United States Patent Application Publication US 2008/0050393 A1 - sequence listing, part 28

SEQ ID NO: 99136 - DNA, 402 bp, Homo sapiens
cacccggctaatttttgtatttttagtagagacagggtttcgccgtgttggccaggctggtctcaaactgctgacctcaggttatgtaggcacctctgcctcccaaaggatgactgcccacctctgtctcccaaggtgctgggattacagatgtgagcaactgcacccagcgcaaagattttttaaaagaatgcttagtgttgctgtggatgccgcactcttacacacttctgggggaatgtaaattgttggtcttcctggaagggagcttagcagagcctttgataccacaattctacttaagaatctatcccaagaaaataatcagatgtggatttatatataggatgggtctcacagtagtatttggtggaacctggaaactgtccagcattaggggaa

SEQ ID NO: 99137 - DNA, 407 bp, Homo sapiens
  misc_feature (1)...(407): n = a,t,c or g
agaggtttcagtgagctaagattgcaccattgcactctagcctgggagatagagcaagattctgtctcanaaaaaaaaaaaaaaaaaaagggttgggcccaatcccttaggaattcccaatcccccatgaacccctgaaaaaaatttccatttcggggggttttttaacaaggccccttaaaacccaaaaaaaaatccggcacccccccggtgaaattaaaaaaagggttcaaaggggccataaaaccccaggggagaaaaaaaacccccccgggccctttaaccctttttggggaaaaggccaaagggacccgtctttttggaaaaaaacctgcccgcttccttttttgggaaatttaaccctcccctttggattccccattttccctttaatttttttccaaaaa

SEQ ID NO: 99138 - DNA, 418 bp, Homo sapiens
  misc_feature (1)...(418): n = a,t,c or g
cattttttaagccnaaaaaaaaaattttaaaaaaaaatttttaataaaaaaaaaaaaaataggattttaaaaagggaatttttttggtgaaaatatagggaggtaaaaatggaggtactgttaatggggggggcgggtcggttttagcggccggggggggggcgctttttgggggggggggggtattttttttttttttttttggggggtttttttttccccccccctttttttttggggggggcctttttttttttggggggggtttatgcggccccccccccccccccttggtgtggggcggggggggggaggtttntcttnggggggggggggggggggcccccccccccgccaggggggccccaaaaaggccnccnnnncncccctttctcgcggggcggatatatattgtatt

SEQ ID NO: 99139 - DNA, 224 bp, Homo sapiens
gtcaacctcgcttccccacccttactaacattaacgaaaataaccccaccctactaaaccccattaaacgcctggcagccggaagcctattcgcaggatttctcattactaacaacatttcctaccactcaccctagcattacttatatgatatgtctccatacccattacaatctccagcattccccctcaaacctaaaataaaaaaaaaaaaaaaaaggggg

SEQ ID NO: 99140 - DNA, 384 bp, Homo sapiens
gaaaactagtgagtatatgggagccacctttgacctgtgccaaagcagtttctaatttcatttgctaactataaaataaagaactgagccgaaataaaaaaaaaaaaaaaaaaaaaaaaaaaaaaaaaaaaaaaaaaaaaaaaaaaagggggggggggttaaaaaaaaaaaacggggggggggccaaaacctagggggggaaaaaaaaatttttttttttttttaagggggaaataaaaaaaactctggttttttttaaaaaaaaaaaacttttttggggggggggtaatagaacaacccccccccccaaaaaaaattttgtgggggaaaaaaaaaatatattttggggggggggggggaacaaccctttctgtatgtgggttt

SEQ ID NO: 99141 - DNA, 493 bp, Homo sapiens
  misc_feature (1)...(493): n = a,t,c or g
agcagggggnnnnnnaatagagtagcatagcactcngcgnggcanttactgaggtaacaaagctacccattttaaaaacacttccttcccccaggtccaagcctgatgctatttacgcttgcagcaaactcaagaggtgagtatctggaagtccatttcacagtggagtaaactgaggttgagagcagggaagtcacgggctgagacaccggaggcactggagccccgcgtctagagccaggctgcctgcatgtgaatcctggatatgcagtgtgtgagagcctgcaagtggtttttaaaaatgtgtatttaaaaatttttttttaattttctattttataaataatattttccttttttttttttttttttttgaaaggaagttttgtttttgccccccaggctggagggcatgggggcaattttgggccattgaaacctccgcctcttggtttaaaggaattctcctgcctcaccctcctgagtagctgga

SEQ ID NO: 99142 - DNA, 416 bp, Homo sapiens
  misc_feature (1)...(416): n = a,t,c or g
ggcatggtggcatatacctgtgatccctgctactctggaggttgaggcggaaagactgcttgagcccaggaggtcagggctgtagtgagctatgatagtgtcactgtgctccagcgaccctgggcaaaaaagtgagaccgcgtctcanaaaagaaaaaaaaaaaaaaaaaaaaaaagggggtccccaaaatggggggcccaaaattttttggggcccccaggccaaaaaaaaaagggggtttttggggggccctgattttcaaggaccctttttaaaaaaaaaaaacaaaagggggtttttccctgggggggggaattggggggtaaaaacacctcccacatttttttttaaaaaaaaatttttggtggggtttaaaaaaaaagccaaaaaggggggttttttttttaaaaaaaaa

SEQ ID NO: 99143 - DNA, 414 bp, Homo sapiens
  misc_feature (1)...(414): n = a,t,c or g
cccacgcgtccgcccacgcgtncgacctgatactgctgtctattaatgaaataaactcagggtctcactttgtccccagactggagtgcattgccagtgcatattttgttctgagcattcactgtaaatttttggtagtattccccataggaatctcaaacttcaggagagcagctttcagaataacaggagagctcaaaatatcagtcaagtcttttatttttcttttcttttcgtatcctttattttatctattcttggagtagatcaagtgcccaccccacagctcactgcagctttgaacccctgagctcgagtggtcttcttgcctcagcctcctgagtagcaaggactgcaggcgcatgccaccttgcccggctaatttttttaaaaacttttttttttagagagggg

SEQ ID NO: 99144 - DNA, 394 bp, Homo sapiens
  misc_feature (1)...(394): n = a,t,c or g
ggcacgagtttgtatttttagtagagacaaggtttcaccatgttggccgggctggtctcgaactcctgatctcaagttatccactcgcctcagcttttagggaggccaaggcaaggcgggaggatctcttgagcccaggagttaaagacaagcctgggcaatacagggataccttgactcttaaaaaaaaaaaaaaatccttttttatctaccttggggaatgttggggngggggttnnnnncatancacttccatanaccggccttaaaggcacattaggaggggaataaaacctgctgattcaggccatcccagagaaatatccattggaccctctctttaggtgaaggccgggctttaaaaaaaagagtttggcgctactaaaccccagag

SEQ ID NO: 99145 - DNA, 363 bp, Homo sapiens
  misc_feature (1)...(363): n = a,t,c or g
cctcagtggtagtttcgtgggaggagtccaaagatgccaaagagctggtcgggtactacatagaggcgagcgttgctggctctggcaagtgggagccctgtaacaacaaccccgtgaagggctcacggtaactcagtcgggtgtgcagggcgggcaatggcctccggagctgccatagacacatacggcacacagacatccaatggaggagattttttttaaaaattttactttnnnnnnnnnnnnnnnnnnnnnnnnnnnnnnnnnnnnnnnnnnnnnnnnnnnnnnnnnnnnnnnnnnnnnnnnnnnnnnnnnnnnnnnnnnnnnnnnnnnnnnnnnnnnnnnnnnnnnnnnnctcgtgcc

SEQ ID NO: 99146 - DNA, 363 bp, Homo sapiens; identical to SEQ ID NO: 99145
  misc_feature (1)...(363): n = a,t,c or g

SEQ ID NO: 99147 - DNA, 460 bp, Homo sapiens
  misc_feature (1)...(460): n = a,t,c or g
aggcgtccggctcagagactacctaactacctgannntcncgnnnntnnngcgaangagcgagaaagtacaggtggcctgttatcatggctgttcattggtttgtggactgcacctgaatctaccagggtcttctgggtagtcccagtattaaatttttgacctgataatcatgaacacagtgctactggtcaaacctttgtccaggtttaagcttcagaacataatgtcttcatgcagtgggaggcctgattaacgatatgattctgccctggggcatttgccccttctgacatggaggcaaacttggcatctgctacttacctctacacttgaacaggcaaggatgggctgagcacggaggctcacatttgtaactccagcactttgggaagtcaaggcaggaggatcacttgaggcctggagttcaagaccagcctgggcagaatggtgagacctct

SEQ ID NO: 99148 - DNA, 444 bp, Homo sapiens
  misc_feature (1)...(444): n = a,t,c or g
ntggacttgcataacgctatgaccanancacgccaagcttggcacgaggccaggatattcgtgaaagatggtcgtgagtggggatcaggattccagcagtcttccatgagtttggcaaaaggttctgggcacgtagaaggaataggaagggcgagtttgttcatggccactccataagcgactgctaagccatcaatgcctcgaaagggcacctcaccagtcagcaactcccaaagtagcaccccatagctccacacatcactgcctttggaaaacatggaggcccggatgacttcgggtgccatccaagcatacgtccctgccgcactcatcttggtggttcggtgccattcccgagccaggccaaaatcagtgatcttcagaatcttgttgctcaggtctccattctccaccttctggaggatcaatatgttgctggactta

SEQ ID NO: 99149 - DNA, 475 bp, Homo sapiens
  misc_feature (1)...(475): n = a,t,c or g
cgggcgatgccgcgcactgggaaccgttagacngnagcatcacacgcttgnttggacgagcgtgatgactttccgctggggagctgttctccgtatcaggggtacgctgtttctgaataattccgtctttcctcagtggaaaccttcttgaattctaaaacgttacaggaaagaaaaagtgagtgctatggaatttgccatcgttctctgtgactctatcttgaggcgctgttgaaagttcctgcacagaggagcacatgtggatccctgagaaggcagtggagggctccctaactcccacgccagaatctcgctctgtagcccatgctggagtgcagtggcacaatgtcagctcgttgcaacctccgcctcctgggttccggcgattctcctgcctcagcctcccgagtagctgggattatacctctgcaggggaaggatgtgcagcaagttacaggagcaaagtgctgaaaat

SEQ ID NO: 99150 - DNA, 467 bp, Homo sapiens
ggcgaaaagggaagaaaaattcgagaccatcgagagccctgtggaattccttaacaaatctctctgtgcctctgtttcccctacccctcccagcctctcgtattctttgatctattttttttacttatatgaaatcacctttaaacacacacacacacacacacacacacacacacacacacacacacgcaaatgaaggggagatatatataaaatacacattttttctgtacccatatatttttattttaacaatctaaatgggagattattatgtatcacccaatataaattaatctcattctttctaacaggcgaatattacatatatagttataaatcactctctattgagaggcagttgtggccataccctagtgagaggctgctataaagaaacgctacaggacatattgctgcacacacatctttgcatttatttatgtgtgagtggaaagaataattat

SEQ ID NO: 99151 - DNA, 457 bp, Homo sapiens
  misc_feature (1)...(457): n = a,t,c or g
cccctcccgccnnnnnnttttgagaccctagtcagngtggaggaattcccgcgcccgccactcggggcccctgccgcgcatcctgcagcccgcttatgcgtatgtgcacggggccgcccgcctggacctggagaagggacctacggacgcctggaagctgcgacgccctgcactgctcccgcctccaccagcgcctcccactgatgtcgtggtcccgggcctggcccaggggcccctttacatgccctctcccttttataaaattttccattaaaaaccacctattttctaaaaaaaaaaaaaaaaaaaaaaaaaaaaaaaaaaaaaaaaaaaaaaaaaaaaaaaaaaaaaaaaaaaaaaaaaaaaaaaaaaaaaaaaaaaaaaaaaaaaaannnnnnnncccccccccctaataaaaagggggccaaaaaaccccggggaaacccccggggggggt

SEQ ID NO: 99152 - DNA, 444 bp, Homo sapiens
cgcttgaccaccccttttgagagcactagtacagagcggtggaattcgctaatctgagaatttagaggttaggtaaattatattcagttttaaccatgaaaatctcagttttaactctaccttttaaattattattcatactcttatataactgggatgtgaatgactacaacaaattatgtaaataaaaatttaagcaattcatcttgatttttgcatatattctttgtaaaaggggtaccaaagtaagcatttgcattaactgtaacattaaataataaagtgggctttgattttaaagcagtttcaataacttaaatcaatgttttgttttgttttgttttgtttttttgagatagagtctcgctctgttgcccaggctggagtccagtggtgccatctcagcccactgcaacctccacctcccgggttcaagcgatcgcg

SEQ ID NO: 99153 - DNA, 567 bp, Homo sapiens
  misc_feature (1)...(567): n = a,t,c or g
agggtncnnnnnnnnnnctttgancncnctcgnaccccantcagagtggtggaattcaatttaactgttagtccaaagaggaacagctctttggacactaggaaaaaaccttgtagagagagtaaaaaatttaacacccatagtaggcctaaaagcagccaccaattaagaaagcgttcaagctcaacacccactacctaaaaaatcccaaacatataactgaactcctcacacccagaatcaccactgccactttttggattagttttacaatttttttatccatcaaatccgaagtcatttaacaaaaaaaatctggaaatcagaatgttgctaactgtggacagaggtcccaatcacccagattcattattctttgttcattctaatgttgatactgtgtttctccctcaggaaggccctagctttcttcagcccttgggtcagggtataactgaagcatttgaacataatcaagcatatgtttgaccactttgctgactgtattgaaaaaaccctcaccttactctgaaagagcatggaacagtacataatggcgatgcttgg

SEQ ID NO: 99154 - DNA, 492 bp, Homo sapiens
  misc_feature (1)...(492): n = a,t,c or g
aggccttcttcagggccccnaggggatagannncctttcgtagatccctagtccagagcggaggaattcggcagattggtgtagagagcagggaagctggagaaccttgaacaggaaggcagagaatttccctagggagtccccctcaagtagctctgcccacaggaactgctgatgtacaaagacagctgttgcttcaaaggccagatatcttcaggctcttctatatgccctggcatctgttaccattgctgccactgctaccaggcttgcttccatctctggagcttctcccattttcagatctttcccatacctccaaccaacagcccctgggctagtccttccctccatcttaatcttagtagatgtaggattaagaaaggagaaggggccggacacggtggctcatgcctgtggtcccggcactttggggggccgaggcgggcggatcacgaggtcaggagttcgagaccggcctgaccggcatgg

SEQ ID NO: 99155 - DNA, 498 bp, Homo sapiens
  misc_feature (1)...(498): n = a,t,c or g
ccgcgtccnnnnaaaagganccatggtatcatncgtggaanctctctgngtctctgtagtgtcagagaaagtagattcacttattcttccctgtagatatgtgaagtagaaagtcttttgtcagatgaattctttattggatgcgcggtcactttcactaacgtccatgctctttgtatgtgaggtctgtgtgaaaatgtgtgaccctgccaaaggagcagctggccagagaaccatcgctgcccttctgccttgccttctggacaaaggaatgatgagcaccgtgacggaagttcgagccctcagcattaacacccttgtgaagatcagcaaaagtgcaggagccatgttgaaaccgcatgcaccaaaactcattccagctctgctagagtccttaagtgtattggagccccaagttctcaattatttgagcctccgggcgacagagcaagagaaggctgcgatggatagtgctcggcttagtgctgccaaatcttn

SEQ ID NO: 99156 - DNA, 472 bp, Homo sapiens
  misc_feature (1)...(472): n = a,t,c or g
ngctccgggccggnnnaaggannccaatggacgngaaanccccanngtanngggaaactccactgaatgggggtgctggggagaaccaggatgacatgtttgccaaactgaaggagaagttattcaatgagataaacaagattcccttaccaccctgggcactgatcgccattgctggggttgctgggctcctgcttctcacctgctgcttctgcatctgcaagaaatgctgctgcaagaagaagaagaacaagaaggagaagggcaaaggcatgaagaatgccatgaacatgaaggacatgaaagggggtcagctcccacaggatgacgacgacgcaaagacaggcctgactgagggggaaggtgaaggggaggaggagaaagagccagagaacctgggcaaactgcagttttccctggactatgattttcaggctaatcagcttactgtgggcgttctgcaggctgctga

SEQ ID NO: 99157 - DNA, 487 bp, Homo sapiens
  misc_feature (1)...(487): n = a,t,c or g
ggagtgcctggggcttaaaggaccangannncnngnngnnagnggggnnggacgggcgcctcctccgcgggcataaccagtacgcttacgacggtttagattacatcgccctgaacgaggacctgagctgctggaccgcggcggacaccgtggctcaaatcacccagcgcaagtgggaggcggcccgtgaggcggagcagctgacagcctacctggagggcctgtgcgtggagtggctccgcacacacctggagaacgggaaggagacgctgcagcgcgcggaccccccaaagacacacgtgacccaccaccccgtctctgaccatgaggccaccctgaggtgctgggccctgggcttctaccctgcggagatcacactgacctggcagcgggatggcgaggaccaaactcacgacactgagcttgtggagaccagaccagcaggagatagaaccttccagaagtgggcagctgtggaggtgccttn

SEQ ID NO: 99158 - DNA, 466 bp, Homo sapiens
  misc_feature (1)...(466): n = a,t,c or g
cttcgttagcactacnccgagcggaggaattctaaaaaggatgcttcgcgttttctctctcctttttggagaccgattcgcagtggtcgcttcttctccttggatttgctaaggattccaagtcactcttatttggagagaagacgagctgcacttcgcattttggcattgacatttaattttagggtcctttatatagaagggagagtaggtaaactgatttttttttttaacagggagggtgcgacaatctttggcagacttggagcaaaagattgaggtgcattccatgcctccttttgagagtcttgctctgtcgcccacgctgtactgcagaggggcaattttgggtgcaacctcggcctcccaagtggctgggattacaaacatatgccaccacgcccagccctcatacctcttttaaaagccgacctgttttgcaaaaagtctgctgtttttgtactaa

SEQ ID NO: 99159 - DNA, 477 bp, Homo sapiens
  misc_feature (1)...(477): n = a,t,c or g
ggggagggggcngnnnattganaattgtagaccttagtccangcggtggaattcgttttaaagttttgtatatttgcttccttttgtctttttcactagtttactgtccatcccaaccacgagggtgtcagcttcacaagggctgaagccctgtctgtctggttcattcttgtctccccaggacctagtgtaatgcctgccatacaacaggtgctgaataattatttacaggatgaatgaatgtgcctgccatctctaaagaagtggtgaatctagtaatctggtttggtaaattttttgagatttaatagctagactacaagtgtataccaccatgtctggttaatttatattagatagatagacagatagatagatagatagatagacagatagatagatttttagtagagacaaagatgttgctatgttgcccaggatagtcttgaactcctgggctcaagtgatcctcctgcc

SEQ ID NO: 99160 - DNA, 457 bp, Homo sapiens
  misc_feature (1)...(457): n = a,t,c or g
aatcgagaccttgataaccntcggggaanccnnnncgtggaatgatgatgatggtggtggtggtggtggtgactaatatcatcattattttctacttcttactgctggtctccatccttctgggaaccaaaagacaaatgacccaggcgtcattctatccaaaattctcatcttcaactacacccaagctttacacagccacacagttgccaagcagccaggctggcttttatgtcagcatctgctagaggagtcagcttcctttccactggctctacctcttccatctcctcactcttctttcttgcctctgcctcctcctcctctaggaggcctgcagtatccctgggattgggaagcggatggctgagaaaatcatagagatcctggagagcgggcatttgcggaagctggaccatatcagtgagagcgtgcctgtcttggagctcttcttcaa

SEQ ID NO: 99161 - DNA, 407 bp, Homo sapiens
ccaaaatctgatgaaacagtgggtgggggttgtcccgtgggagttagtaggatctccctggctttagctgccctgtccctgcccactggccaaaggacctggtgagctgggagacagggggtggtgctggagggatgtcggccggcagcctggcccaccctgctcactcctcctgccacttcctccagaggtgcttccagaccaccaacggctacctgtccgactccagatcccgccccggcaactacaacgtggcagccctggccacctcgtcccttgtgggctggagtgcagtggcacgatctcggctcatcgcaacctccgcctcccgggatcaagcaattctcctgcctcagctgcccaagtagctgggattacaggggtcgccgagcagtttgccatcacag

SEQ ID NO: 99162 - DNA, 707 bp, Homo sapiens
catagaccggacggttgtccagacatcggccccacgggagagctgagtggtagcttaaagattcccaaccgggacagcgggatcgacagtccctcctccagtgtggctggagagaactttccctgcgaggagggcttggaggctggcccaagccccactgtactgggggcgcacgcagagatggccctggacagccaggtcccgaaggtcaccccccaggaggaggcggacagcgacgtgggtgaggaacctgactctgaaaacaccccccaaaaggctgacaaggatgccggcctggcccagcactctggcccccagaagcttctccacattgcccaggagctcctgcacaccgaggagacctatgtgaagcggctgcacctgctggaccaggttttctgcaccaggctgacggatgcggggatccctccagaagtcatcatgggcatattctctaacatatcctccatccaccgcttccacgggcagttcctgctgccggagctgaagacgcggatcacggaggagtgggacacaaacccacggctcggggacatcctgcagaagctggccccattcctgaagatgtacggcgagtatgtcaagaactttgaccgagccgtagggctggtgagcacgtggacccagcgctccccactgtttaaagacgtcgtccacagcatccaggtaaggcgtcgacgcggccg

SEQ ID NO: 99163 - DNA, 363 bp, Homo sapiens
aggatatgtttcatgacagcacgagtgtaaatgagtgcccacacattttaacagccttgggcaggattttgctgctgagatccctagagcagctggttcttggctcattcttggggtagaggccgtggatcagggctgggggcaggggtgacaattgagaagtgcactgagccctttcctgttaacaattgggcatagaaagcaggattagtacttcctggttatacacttattttgtaaaaatagaattaatatcacagcaaccaatgtgtaggtttaagaaagtggccaggtgcagtggttcacgcctgtaatcccagcactttgggagggcggggcgggtggatcatgaggtcaggagct

SEQ ID NO: 99164 - DNA, 360 bp, Homo sapiens
  misc_feature (1)...(360): n = a,t,c or g
atggagtgtcactatgttgcccaggctggtcttgaactcccgggctcaagtgatctgcctgcctcggcctcccagagtactgggataacaggtgtgagccactgtgcctggcctgggttttttttttttttttaattcccctaaaaaaaaaaaagggcggggggggttaaaaatcagtgttaggaggcaaagaaaattggggggggccatggaattaatttttttggaaaccatcatggttgaggggggggggctgaaacaaaattgcccttgcagccccccttggaaaaggcaaggaagggggggtttcagggaaaccatgcttctccaaaaaaacccagagccaattaaacatgggcn

SEQ ID NO: 99165 - DNA, 379 bp, Homo sapiens
  misc_feature (1)...(379): n = a,t,c or g
gaaggagaatcgcttgaaccccgggaggtggaggttgcattgagccgagatggcaccattgcactccagcctgggcaacaagagcaaaactgtctcanaaaaaaaaaaaaaaaaaaaaaaaaccccccccggcctggggggccaaaaccttgaaccccaaaattttggaagggaaagggggggggacccccttaaatttggagtttaaaaaccccccggccaaaagggggaaacccccccttttaaaaaaaaaaaaaaaaattggtgggccccggggggagggcccttaaaacaaaaaaaaaaaggaggccgggggggggaaattttttggccccggaaaaaagggggtccaaaaaacttaggtttccccattcccccn

SEQ ID NO: 99166 - DNA, 389 bp, Homo sapiens
cggacgcgtggcgatggtaaattttgcgttgtactacaatagaaactttgttgaaagtccaggataatcacttgaacccgggaggcggaagctgcagtgagccgagatcccaccactgcactccaacctgggcaagagagcgagactctgtctcaaaaaaaaaaaaaaaagggggggccgccttatgggatccgggggggggccaaccctctgcgggaagccaaacgagatagcctttgctttttggggagggaaaacacaacctcccggggcttctttgaaacgaacccttactttgggggggggcgccattgggccaacctccctcttgaaataaaaagcttggggaaaggtggaactgttccaggtgccaacggcccaacacagcc

SEQ ID NO: 99167 - DNA, 376 bp, Homo sapiens
cccacgcgtccggtagaaacctgtgaggaaaggtattcctgctaatgctaggctgccaatggtgagggaggttgaagtgagaggtatggttttgagtagtcctcctatttttcgaatatcttgttcattgttaaggttgtggatgatggacccggagcacataaatagtatggctttgaagaaggcgtgggtacagatgtgcaggaatgctaggtgtggttggttgatgccgattgtaactattatgagtcctatttgacttgaagtggagaaggcttcgatttttttgatgtcattctgcgtaacggcgcatactgctgcgaacagagtggtgatcgcgcctaagcatagagttatagtttggattagactgagc

SEQ ID NO: 99168 - DNA, 227 bp, Homo sapiens
catcgagtcgtggctggagcccgtgcggttcctcaggagtatgttcgccaacaacctggtgtatgacacctcggacagcgatgactatcacctcctaaaggacctagaggaaggcatccaaacgctgatggggaggctggaagacggcagccgccggactgggcagatcctcaagcagacctacagcaagtttgacacaaactcgcacaaccatgtcgacgcggccg

SEQ ID NO: 99169 - DNA, 372 bp, Homo sapiens
  misc_feature (1)...(372): n = a,t,c or g
attgcttgaaccagggaggtggaggttgcagtgagccaagatcgcaccactgtactccagcctgggcgacagcaagactctgtctcaaaaaaaaaaaaaaaggaaaattttaaaacccctttttttgaaaactttttttataaaaagggggggaaaagaaaaaaccctcccttttccccctccccctgaaagaggtttttttgccacctaagggggctggaaaaaactgggggacccattgaccctgcccgggattttttttaaaaaacccccatttcgcccgggcccaagggctcacccttgaaaccccaccttttgggggggttggggcgggcaaatcatttgccgtcgggagttcaaacccagcgggcn

SEQ ID NO: 99170 - DNA, 263 bp, Homo sapiens
ctcacacctgtaatcccaacactttgggaggacaaaacaggagggtggcttgaggccaggagtttgagaccagcctgggcactgtatcgaggccatctctattggagtattattattattggtttttttttggagacagaatctcgctgtggggctcagccgggagtgcgggggcataatttaacctctttgtattctcccactctgaagtccttgcttttctctcgcctcagcctccccagaagttgggactacaggttggg

SEQ ID NO: 99171 - DNA, 379 bp, Homo sapiens
cggccgcgtcgacgtttcttaaagcttatttttataaagctttttcctaaaaaaaaagaggaaaaaaaaaaaaaaaaagggaaaaaaaaaaaaaaaaaccccccgggttttttaaaaaaaaaaaaaaaccccccccccccccttttttttttttgggtgggggggggaaaattttttccagggaaaaatattgggcccccccccccaaaactttttttttttccgggggggaaaaaatttggggggggcattttttttttttggggggggggggaaaccccccaacccccggggggttttcccggggtttttaaccccccccccaaagggtttttttctcccccggggggcgcccggtcccccaaaaaaaaaaaaaacc

SEQ ID NO: 99172 - DNA, 403 bp, Homo sapiens
  misc_feature (1)...(403): n = a,t,c or g
cggccgcgtcgactgaataaataaatttataaatttttaaataaaatctgaagactctgggctgcataacataacttaaaaagggaggcctttggcagttatgcaggtctaatgtttattaatcagtatgattttcttccccatccattggtttatttttttagtccctaataaggccttgccattcatcatgtgaataagtcaactttgatataaaataattctaagggcaggggcgggggctcatgcctgtaatcccagcactttgggaggccgaagtggaaggattacttgaactcctggcctcacgtgattctcctgcctcagcctcctgagtagctgggattacaggtgtgtgctgccacacctgggtaattttttgtatttttaatagagacgggan

SEQ ID NO: 99173 - DNA, 131 bp, Homo sapiens
ctgacaaacgtaggctgtgggaagaaagtccagtaatagtcgccgcccgcattttctttgcagtcggcctgccaggtgacataggtttgtttgttgcgaccaacgccttgttcactggtccatagcgggaa

SEQ ID NO: 99174 - DNA, 482 bp, Homo sapiens
  misc_feature (1)...(482): n = a,t,c or g
gtggtgaaaaatttgatcgcctgcggagtttgaatcacgtgcacccttgcgggccatgtcatacaccgccttcagagcagccggacctatctgcccgttcgtgccgtcgttgttaatcaccacatggttattctgctcaaacgtcccggacgcctgcgaccggctgtctgccatgctgcccggtgtaccgacataaccgccggtggcatagccgcgcatcagccggtaaagattccccacgccaatccggctggttgcctccttcgtgaagacaaactcaccacggtgaacaatccccgctggctcatatttgccgccggttcccgtaaatcctccggttgcaaaatggaatttcgccgcagcggcctgaatggctgtaccgcctgacgcggatgcgccgccaccaacagccccgccaatggcgctgccgatactcccgacaatccccaccattgcctgcttaagcagaatttctgtcatcn

SEQ ID NO: 99175 - DNA, 461 bp, Homo sapiens
  misc_feature (1)...(461): n = a,t,c or g
nttggaannactttgacccgcgctgcaggattcggcacgagntngacgtcctgaccctgtgatccgaccaccttggcctcccaaagtgctgggattacaggtgtgagtcaccacacctggctgcatagtgttttaaatgtttgtgtgaagaatgagtttgtggaacaatttgatttgctgtggcctctatgcctaatgagctagtgtttctggcagctctctctacccaactttgcacttgtagttttgagtctttgtctctctggaatatgaacaggtttataaaacattccatggtgaacaattctgtcggctgcattatagccatgagtgaatagacagcattggctggtccaagctctgttattgagtatacaaggaactgatttttcttatgttagcactaagggcaaaaaccaatatttataatgtaagcactatccaggtaaaacactggcccc

SEQ ID NO: 99176 - DNA, 479 bp, Homo sapiens
  misc_feature (1)...(479): n = a,t,c or g
agggntgnnnnaattgatttcgatcgcgctgcagcgaattcggcacgagctctctctctctctctctctctctctctctctctctctctccaaaaagaaatgccttagaaaaagagtaacattccagaaaacggngnaatatatttttcttccttaattgccccatctgtggaggatttctttgctgaacaccacatcaaagggatcttctgcatttaaaataaaagaggcatcatgctgaagagggaggggaaggtccaaccttacactaaaaccctgtatggaggatggggatggatgattgagattcattttttcctggtgtgggttctgctttcttataccaagtggctgctgtggtaactaccaaatacttcaaaaaacgagtggctctttctacagatattgcccgctctgagatgagactgacttttcttttggcaccctttacaaaattcctgatagatgtgtgtgactgg

SEQ ID NO: 99177 - DNA, 347 bp, Homo sapiens
agttcttgctcaactttatatggaacacaggcttactatttttgaaagagtgtttagtaccttgtattaagaaacttggccaagcgtggtggttcactcctgtaatcccagcactttgggaggtcgaggcgggcagattgcttgaggccaggagattgagaccagcctgggcaacatggtgaaatcctgtctctaaaatttaaaaaaaagaagaagaagaaactcgagactacatcttcaaaaaacaactttgcagtatttgaattttacattatactgccctttatttctgacagccaaataactttattgaatttattgcttttgtagttggtataactaataaa

SEQ ID NO: 99178 - DNA, 477 bp, Homo sapiens
  misc_feature (1)...(477): n = a,t,c or g
gggncctcgatgacatctntaccatcantacgccaagcttggcacgaggcgtttatccgtgctggttatacacaggctttttacatgactttttattttcccccaaaatagaggaacgtttcatggatgttggagtactgagagctacagaaccaagtaatagtttatttgcaattatatacagcactccaattgagttggctataaaaagttggcatatcataggagacggtttatcaatagaacttgtagctgtggaaagaggcaatagaactacaataatttcacgcctgccagagtttgaaaaatcctctttatcagatcaatcattggtaacattaacttcaggctattttgcagtctatagagtcaaacttactgcaaaaaaattagaggggattcatgagggagccttccagatcacaacagactatgagatcctgacaatccctgtgaaggctcggaatgcattatgct

SEQ ID NO: 99179 - DNA, 439 bp, Homo sapiens
  misc_feature (1)...(439): n = a,t,c or g
ggcacagatagggtgggtttgtataatgagtataaaaaacttctagcagaagatgacaaagtatatcaagaaagggctctcttcgaaatcacaccactgcactccagcctgggtaacagagggagattccatctaaaaaaaaaaaaaaaaaaaaccgggggggggggcaggggacctttttttttccagttacccaaaaatggccttttcacctggggattttggggaaattttttcccaaacccttttttagggccgggggttaaaaccaaaatcaaaacctttttcttgggttttttggggcttattttttggggggaaaaaaaaaaaacattttcaaaaaaaacagggtcaaacacccctaagggcttttattaaaaccaacccaaatacccaaagaaaaagttccttaacgggggggaaacctgcttcaaaaagn

SEQ ID NO: 99180 - DNA, 468 bp, Homo sapiens
  misc_feature (1)...(468): n = a,t,c or g
cgccccccccccnntttgatagacgtacatcatgaacacgccaagctnggcacgagggtaaatggcagaacatgccgctcctccatggcgagattgtgagtgaagtttttttttgacccattggcacaaaatagggattctattctactattatgatggatgagagaatctttgatgatgaacgggccttacctgcttgaaataaggggtgactcctgccatttgctagtaaccaaaaatgtgtgcttctttctagctggtcctccgcgtatttttaattgtatgcactggctctttctgttctaatggctgccctcggaataagctgacctctgctctccgtgtgacatcctgcagttggattttcgtcacattcgaaagactgttgacactctgctggcactcggggagaaagccccaccaccaacttctgccctccgctccagggaccttataagcttctgtctn

SEQ ID NO: 99181 - DNA, 432 bp, Homo sapiens
  misc_feature (1)...(432): n = a,t,c or g
cggtcgacccacgccggccgaaatattagtatatctaggattaaagtgaattgctaaatttatataatttccttgagggtaatggggattgctgaaagagatatttaatatgtggtgtagatataaatagnttaatataaagacttcagatgtcctaaatcttagcagttaaggctggaaagtttttaactggtgactaatattcatgttgccagcacacccccgatccctcccagctgcctgtgtcatcataagtctccagtttttaagctaaattactttgcagtatgatatttaggctggcctactgtcactcctaataaacccagtcctttctctctgtgtttnacacacacacacacacacacacacacacacacacacaagagaaatattcatatattgtcttattgagaaaaaaaatctggaagg

SEQ ID NO: 99182 - DNA, 390 bp, Homo sapiens
  misc_feature (1)...(390): n = a,t,c or g
ctgctgccctccctgcccagctcttattctccagtcccttcttcctcaccgggagtccggagctgcccgtggctgaagctcaggatgctctgaagagctgcgagtccttcctcagtggttgggccattctgtagcagctgcagacgcctctgggcctgggcatcgcggtgggcaggtgtgcgcaggtgttgcancacagccaagcgggagggtgtctcccacgcacacaacaggcagtggtatagccccagctctgcccctgcctccgctccctccatgtccagcagaaactagaaccatgggaagaggctggctcaggcccagaagggacatgccagacctcaggggactttttttttttttctaaagagagtcttgccctgtcgcccc

SEQ ID NO: 99183 - DNA, 403 bp, Homo sapiens
atgactattatcattataagtgctttttgaatcagttaaatggttttctagagaacttttttttttttttttttttttaaagggggggggggttttgttttgcccccaagggggggggggggggggtttttttgggaaaatggggcccccccctttcggggaaaagccatttttccgcccaaaccctctaaaggaaggggaaaaagggcccccccccacaacccggggtaattttttttaatttttgggaaagggggggttttccccggaaggccaaaaagggctccaatttctaaacctaaaaaccggccgcccgggccccccaaagggggggaaaaaaaaagggaaaccccttggccccgcccaaggaaaattttttttaattattgttttaaaaccggaa

SEQ ID NO: 99184 - DNA, 362 bp, Homo sapiens
  misc_feature (1)...(362): n = a,t,c or g
ttcacagtgaccgccacnnnntttcttgtatgggtccctgagacttggcgaagtaggagccctgtgtgatcgtgcgtcagagccggngctgagaccagccctggccagggcagttaccaggacggtctccggaggccgggattcgcggaggggccaccagcaggaagaaaccccaggaggaagaaaactcagacagatcgccggggaggcagcgcgggatcccagcctcaggcgtgcgcggacggtgtgcggctttgtaccaggctgcagtgcagtggtgccatctcggctcactgcaacctctgcctcccaggttcaagcgattgtcctgcctcagcctcccgagtagctgggattacagt

SEQ ID NO: 99185 - DNA, 366 bp, Homo sapiens
  misc_feature (1)...(366): n = a,t,c or g
tcacagtgaccgccaccattgccnnnggatgggtccctgagacttggcgaagtangagccctgtgtgatcgtgcgtcagagtcggggctgagaccagccctggccagggcagttaccaggacggtctccggaggccgggattcgcggagggtccaccagcaggaagaaaccccaggaggaagaaaactcagacagatcgccggggaggcagcgcgggatcccagcctcaggcgtgcgcggacggtgtgcggctttgtaccaggctgcagtgcagtggtgccatctcggctcactgcaacctctgcctcccgggttcaagcgattgtcctgcctcagcctcccgagtagctgggattacagccacat

SEQ ID NO: 99186 - DNA, 403 bp, Homo sapiens
ccacgcgtccgcggacgcgtggggttggccaggctggtcttgaactcctgacctcaagtgatcctcccaccttggcctcccaaagtgctgggattacaggcgtgagccaccgtgcccggcctcagagtagttcttaaattgcaatctagagacaactcttttaggccatcttgctttttctaataattgatgtgtagatgttccttttatattctgtttactcattgatgacgattataggttgcaatacctgctcccagatttagtttatcatcttacttttaattgaattatttgatatataagaaattccaagtccaagcatggtggctaacacctgcaatcccagcactttgggaggccatggtgggaggatcacttgagtccaggagtttgagaccat

SEQ ID NO: 99187 - DNA, 373 bp, Homo sapiens
gcgccggggcaggaaaatagcttgaacctgggaggaggaggctgcagtgagctgagatcgcaccactgcactccagcctgggtgacaagagtgaaactccatctcaaaaaagaaaagaacttcatccaggaataaataacacacgattaagatgggtttgccgagtgtccgtgcatagcgttatgggtgttgacaagctaagccgcctgtgaccccaccacactgcaacagggaacatttccatccaagtccttccccacccagcctgacaatgcaggtcagctttccagctctataggttaatttaccttttctagaggttcacaaacacagaatcccatggcatctggcccagccggtccagcgcggtgct

SEQ ID NO: 99188 - DNA, 443 bp, Homo sapiens
  misc_feature (1)...(443): n = a,t,c or g
ggggaggcaggaggcacggttgagcccgggaggcagaggtttcggtgagccgagatcgcaccactgccttccagcgtgggcgacagagtgagccaccatgcccggcgtaatttgacttttctttgccaggttcaaatgctgggtttactatttcttgctcatctaagtattttttcactaccagcttaataccccttaactttggagacttctgcgttatatttaccactcttgttcttggggcataatgagggtagaaatgagagaaaaggtattttgaaaggactcccttttttgcttcctggaactacctctctctccttcagntttatatactggctgaaattctttttgccttgagcaagtcacccagaaacctaccacctatgtatgagtcatgagatgctcattctagcatctnctctgccactagcatactctaa

SEQ ID NO: 99189 - DNA, 402 bp, Homo sapiens
cgcgccggggcatggttgcatgtgcctgttgttccatctacttggaaagctgaagtgggaggattgcttgagcccaggagttcgaggctgcagtgagctatgattgcaccactgcattccaacctgggcaacagaacaggcgattctacttctaacaaacaaaaaaaacccacagaatttcttaaagtagaccatttaggattcatgatttgctcactatagagcccctgggccctgaataatcggcagtggtaaccagggcctcaccatgggcctcaggtgaaactccgagacatattggcttcaggtatgacacagcacattcacagctgtagtggctaccagcagagactcctgtttgagaaaatgagagggaagaataaaggagattctgtcttgcag

SEQ ID NO: 99190 - DNA, 415 bp, Homo sapiens
ctagagcggccgcgcgccggggcatatggtaactctgtaagtatttaacttttgaagaattgacacactgttttccaaagctgtggccttggaaccacaaaccaaaaaaaagaaatcccccaaaactctaaacagctgaatcagcagacatagtgtaaaattcaacttcgggaagtgtatgtattttatatgtgtttcacataacagtaaccacgtaactttactaagttaacgtgagcatccccaaagacgtttttcttcttattattattattctttttttttttggtccggccccccaggctggagggcggggatgcaatctaaactcactgttaccttggcctccggggttaaagcaattctcctgcctcaccctcccaagaagctggaactacgggcttccaccaccccg

SEQ ID NO: 99191 - DNA, 404 bp, Homo sapiens
ggaggcatgagacaggaggattgcctgagcctgttagattttgactgcagtgagctgagattgcactggtgcactccagcctgggcaacagagcgagacgctgtctcaaaacagaaacatctctgctttgggccttccttgttggcctctccccagccatgtggccactcgctggcaggcccgggccatgagcatcggtgcggatgctgtgctcagcctgggggcggcgccgtctcctctgggtgggattcgaggcctgatgcctctgcctggtgcaggagggatgttgtgctgagggtgttccccgtgctttggatgtaaaatttgggcatggagtttgtggtgtcttcagaggcagacccgcctgcgttctttgtgcatgcctgtccacgccggtcgcagcg

SEQ ID NO: 99192 - DNA, 414 bp, Homo sapiens
ggaggcaggagaatggcatgaaccctggaggcggagcttgcagtgagccaagatcgcgccactgcactccagcctgggcaacagagcgaaactccgtctcaaaaaaaaaggggatcaagataaagggccactgcagcagtgccatgcaccatcaatatctaagcccctttgggtggaggcaggtttgcagtcattgtgtctgtcccaaaccctggctccttgtcaggggtcattgaaatctgcagaagggctgacaacactcagaaccacaacttattctaggaggggcttagacctgagcaccaggtcctgcctgcctatagcatccctgttgcaatgagggaagatcagctctacggagcagaaatctgttttgggagccctttccttcctggctacagagtgactgaggcc

SEQ ID NO: 99193 - DNA, 432 bp, Homo sapiens
ggaggcaggaggtaggaggatgacttgaacacaagaggtttaggctgcagtgagctacgatggcaccactgcactctagcctgggggacagagtgagaccatgtctccaaaattaaaaagttaaaaataaaacgtgagccagaaaacattcttattttcccctgaatcctcaaaaacggtctctactaactcaaagtctggcagtgtttttaaggtgctgattgtgagctcagcccaagtcagtgaaaccatctattccttacagatttcttcatggactgatagaacattacattggtcagtattggaagactcttacccaaagcccatctcattcccaacatttcttgcaaagcccagacttatcatttatacagagggaaacaggcatgcatttttaatgaagtgttcaataagttaaatatatctata

SEQ ID NO: 99194 - DNA, 398 bp, Homo sapiens
gggcaggagaattgcttgttcttggtatgcggaggttgcagtgagccgagatcgtgccactgcactccagcctgggtgacagagcaagactccgtctcaaaaaaaaaaaaaaaaagaggggggttttttttaggttttttgggggcccaattccaaaaggggggtttttcttttgaagaaccagttttttttgaaaaaaacccaacccccctggttttttgggcccaaggaagagggggggcccttttaaaaaccaaccctactcttgtggtggacccaaaaaaaaacccttgggcccaaaccccttggaggggggagagcccccttttccctttgtccgccatggtggggggcccctggtgagggggtgttggccaactggcaaggggccactggac

SEQ ID NO: 99195 - DNA, 427 bp, Homo sapiens
  misc_feature (1)...(427): n = a,t,c or g
ggaggcaggagattggtgtggacccgggaggcggagcttgcagtgagctgagattgtgccactacactccagcctgggtgacagagtgagactctgtcccaaaaaaaaaacaagatttttaaaagggcttccttatttattactttctctcctacaaaggcagaatatacacactgttctatatcttgttttggagaagatcttttcatatcagagcttcttcattcttttatttttattttttatagagacgggggtctcactgtgttgcccaggctggtcttgaactcctgggctcaagagatattcctgcctcgggctcccaaattgctggggattgcaggcgtgagccactgcgctcagcctcattcttttttttctattgcatattgntctaggggatcaatgcaccttagtttacttaatc

SEQ ID NO: 99196 - DNA, 420 bp, Homo sapiens
ggaggcaggagagtcactcgaacccgggaggtggaggttgcggtgagccgagatcacgccactgcactccagcctggctggcaacagaacgagactctgtttcaaaaaaaaaaaaaaggaaaaggaatttcttaaattttatagggaaaaaaaaaaaaccttgtttacccaagccaaaattaaccaaaaaaaaaaaatgggggggcatcacagccctggttttaaaattatataaaagggccatagccccaaaaacaggggggtattaaaaaaaaaaagggcccataacccaggggaacaaaaaaaaaaccccaaaaaaaaccccaaatccgtatacccacttgtttttcaacaaagaaaaaaaaaacaaaagggggggaagggccccctttttaaaaaaagggggcaagaaaaatggca

SEQ ID NO: 99197 - DNA, 385 bp, Homo sapiens
  misc_feature (1)...(385): n = a,t,c or g
ctanagcggtcgncctttttattttnttttttttccccccttttttnnncccccccgggggggaaacttttgggggcaccccgagaggcccccccccaaaaaaaaaaaaaagcccccgaaaacgggggggggggggaaaaaaaaaaccccccaggggggctcccccccccaaacaccttttgggggggaaaaaccggggggggggcacccccccccccccaagaaaaaccccccccttaaacccaaaaaaaaaaaggggggggggaaaaaggggggtttttttcccccccaagggggggatttttcaaaaaaggggtttttttttctcccggggggggggggggggggccccccccccccacccccccccgggggggggggagcg

SEQ ID NO: 99198 - DNA, 411 bp, Homo sapiens
ctagttctagatcgcgagcggccgcccttttttattttttctttttttctcggcgggggcaaaaggaaaaagaaccttttttgggggggaaaacccccccagtgtttgttttttttccggggggggtggggaaaaaaaaccgggggttccccccgcccccccccgcgggaaaagggcctttctcgggggggggggggcgggaacaaacccctatttggtccccccccccccccccccggggaaaatggggaaaaccccccaagcccgtgacccccaattttaattttttggggagagtgggttttttaggcaaaaacccctccccggggggggtttgccccccccccaaaaccccaatttttttttttggaaggccccccccggggggttttttttgggggggagggggaa

SEQ ID NO: 99199 - DNA, 483 bp, Homo sapiens
  misc_feature (1)...(483): n = a,t,c or g
cgcgcccccgattgaggctgagacgancngcnnnncnnnnnnnnnnnnnncgggccacattttctttttaaggaactcattaggagaacagtttattatttgtaatcaaatatttaccatttatgggggtctggcttctggtcttccataggtggggggattatcattttctttttggaaaatgtcctttgaccattcttttagtgcagatctgctactgtgaattctcttagctttccttcatctgagaatgtctttatttcatcttcattactgaaggatattttctctagatatagaatactggatttatagttctttcatttagcactttaaaaaaaatggtgccccacttccttctagatctcatgggttcttttttttttgtttttgaaatggagtttcgttcttgttgcccaggctggagagcaatggcgcgggcttggctcactgcaacctctgcctcctgggttaaaaggattt

SEQ ID NO: 99200 - DNA, 397 bp, Homo sapiens
cagacacattgcagagaccgcatggcagataaaggcagagattggagttatgtttccacaaaccaaggaatgcccagggctaccagaagccagaagccaggagcctccccctagaggctccagtgggaacagggctttgccaacaccttgattttggacttctagcctctgaaaccatcctctagcactgtgagacaatacatttctgctttatgctattcagtttgtggcactttgttatatcagcctaggaaacaaatacacaaatgcatacttaaaagttaatttgattttttgactagataattgtttttgttttttttttttgaaacaaagtctcgttctgtcccccaggctggagtgcaggggcgcgatttcggctcactgcaacctcccg

SEQ ID NO: 99201 - DNA, 406 bp, Homo sapiens
actaataacaccgaactttggacagacgctgaatgactgattgtgacattccagcacgtttttttttttttttttggaaacccccgggccaaaaaagggaaactttccctaaaaaaaaaaaaaaaaaaatttggcccgggccggggggccccccccggaacccccaccttttgggggggccggggcggccaaatctggggggaggaaaaccccccgggtaaaggggggaaacccccttttttggggaaaagcaaaaaataaccgggggggggggggggcccccggggcccccccccccccggggggggggggggggaaaaccccttaaccctggggggcaagggtggcagggagtaaaatacccccccgtgctctaagccggggggaaaagagaaaacctcttttg

SEQ ID NO: 99202 - DNA, 412 bp, Homo sapiens
ctggctcagcacgttttctttttgctcaacacaagcattgcatcgcctgctgactcgtcagagttgctcatggaggtgcacggaaatgggaagaggcccagtccagagaggtgagcagatgagctttgctgtccttgccttcctggaaccgcactggtcctcccctttgcttataaaagagagagaatttgattgctgtggttgtaatgtctcaaactttttttgagacaaggcctggctctgtcgcccagactggagcgcagtggagcaatctttgctccctgcagcctccatctcctgggcttaagcgatcctctcacctcagccttctgagtatctgggaatacaggcacgtgcccacatggacaacttaagggttggtttgatggtatgttggttggttcagttggct

SEQ ID NO: 99203 - DNA, 412 bp, Homo sapiens
  misc_feature (1)...(412): n = a,t,c or g
tttcgtgagagagggggaaagaaagaaagaaaagagaaagaaagaaaaaaaaaggaaggaaggaacgaaggaaaaagggaaggaggaaggaaggaaggaaagaaagaaagaaaaggtaagaaagaaaaccgtggatgaccgcagacggccacaggtgacatttcaagctgtgaatttggagagcgagggcgctccaggcaactgtggggtgactgctccccctggtggccatatatggctaaagcaagtagaagtccagacacacctggagaacaggtgccatcgcctgaaagcaaccgtaaccacgacaacaaggccaggtgcagaacccaggtctcccccctttattataacctgtggagagatcatgaatgtattctccgatatgtntattttcaggggttaaaaaaan

SEQ ID NO: 99204 - DNA, 428 bp, Homo sapiens
tttcgtgtctcgatctcctgacctcatgatccacccaccttggcctcccaaagtgctgggattacaggcatgagccaccgtgcccggcccacttctgttttcttgtaagagtttgctagttttagctttcatgggtttttttgtttggtttttttttttggtgggtgggttggttttgaaaccggcctttttttttcccccccggctgggggggcagggccccaatctggctcgtttgaaactttgcctccgggggtaaccccttttttttgccttaaccttctgggggggggggaataacggggccccccccccccccccggttattttttggctttttaaaaaaaacggggttttccccgggtcccccggggggggtttttaagtttttaaccccatcgggggaacctttggattttgtggagggg

SEQ ID NO: 99205 - DNA, 402 bp, Homo sapiens
tccactcagatcccccctgtttttacctcaaccttagggcttccttgctttggttactgttagcaccatgatttgttcctaagggatcgtaacaccttaaaaatcccagtccaagtgctgtaagagacacctttctccaggcctcctcaacacagtttcttttgaagactgctcttctctttcaactttatttacaggtgaaggaagtgtgcagtagagaagttacagcttctcacagctagtgggaacagtaatcaaggctaggaaacctgagtcatcttgttggctgtgtgccccaaatagaaagaacgctttctggccaggtgcagtggctcacacctgtaatcccagcactttgggaggccgaggagggcggattatgaggtcaggagatggagacct

SEQ ID NO: 99206 - DNA, 411 bp, Homo sapiens
gaagtcttttggatgtgcctcgcgacttcaaatgcatggaaggactcacactggagagaaaccgtataaatgtaagcaatgtgggaaagcttttggatgtccctcaaaccttcgaaggcatggaaggactcacactggagagaaaccctataaatgtaaccaatgtggtaaagtctttagatgttcttcacaacttcaagtgcatggaagggctcactgcatagacaccccataaccccaggctttatgaggctgaggtggggggactgcttaagcccaggagttcaagaccagcctgggcaacatagtgagactctgttataaaaattaaataaataaataaaaggacaaaaaaaaaaaaaaaaaaaaaagggggggcccttttaaaagatccgtttttttagccggggg

SEQ ID NO: 99207 - DNA, 422 bp, Homo sapiens
  misc_feature (1)...(422): n = a,t,c or g
attccaaaggataaattacaggacactaaaacaggtcatgatgagcttaagcggagagcaggatttaacataattggcataatgcttcattgttatcattgtaacatgcctcttggtgtgctttaatcaaaagctgcaaagttgtcactgctttttttttttttttaatggccatcatatcaagggccctccaaagtaaaaaaggttggcaatactcaccattatttttttcagggggcgggaggcaaaaaaaatcaagggtttttgtttatacctgattcacctacttaaaaaaaggaaaatgggaaaaataccctgatggatggagggggggcattaaatataaatctacctttnnnaaaaaaaaaaaaaaaaaaaaaaaaaaaaaaaaaaaaaaaaaaaacaaaaaaaaaaaaaaaaac

SEQ ID NO: 99208 - DNA, 398 bp, Homo sapiens
  misc_feature (1)...(398): n = a,t,c or g
gcaggggaatcacttgaacctgggaggcggaggttgcagtgagccaagattgtgccattgcattccagcctgggcaacagagcgagattctctcataanaaaaagagaaaaaaaaaaaaagggtttctccccgggggggggaaaactatgggggaaaaaatcaaaaaaaaaaaaaaaaaaattttttttttttggaaaaaggggggaaaaaaaattttttttaaaaaggggggccccaaaaaaaaaaggggggcgctgtggtataaaaaaaagggaattccccccaggggggggggggaaggttcaaaaaggggggattttaaaaaaatataattcctttggggcccaacccaaaaaaaaaaaagggggcgggggttttttttttttttttttttcca

SEQ ID NO: 99209 - DNA, 403 bp, Homo sapiens
  misc_feature (1)...(403): n = a,t,c or g
ctgcccccccgccctcttttttttttaaaaagggcctgatcatggctatctcacccacattgggggcaattaaattaattaacttcctttttttttttaaaaaagggaaaaaaaaaaaaaaaccccccctggaaaaaaaaaaaaaaaaaaaaaaaaaaaaagggggggcccccctaaaaaaaaaaaaattttcccccccgggggggggaagaaaaattttttttaagggggccccaaaaaaaatatcccgggcccgggttaaaaaacaacggaggggggaaaaaacccggggaaacccaaaaaaaaagcgggggaaaaaaaaangttcntttccaaatacagtctcaagatgaaaaacaatgacgacatcatgcctaaaacatacacccatccccaagtctcc

SEQ ID NO: 99210 - DNA, 418 bp, Homo sapiens
  misc_feature (1)...(418): n = a,t,c or g
ccagaaccttccacatgaaatgaaaggctcaccacttcatattctttaaggaaattcttggccaggtgtggtgcctcactcatgtaatcccagtgctttaagaggccaagatgggaggattgtttgagccagctgtttgagaccagcctgggcaacgtcatgagaccccatctccacaaaaaaaaaaaaaaaaaaattgggggggggggggggctttttttttgtaaccccaaatttttggggggtgggggggggggtttatttgggggccggattttgaaacccccctggcccacttggggaaacccccgacattctaaaaaaacaaaaattatcccggctggggggggggggccgttaatcccaatttttcgggggggtggaaaaaaattcgcggacccctgggggggggggtggn

SEQ ID NO: 99211 - DNA, 424 bp, Homo sapiens
cggacgcgtgggcagagagaaaagagagaagtggggagaccatggaagaggaggtttgtttttcagagctagtcgtgtaaagaggagagggtagtgccaagaatttagctatccctttctccactgcctcaccagctacacaaacacacacacacacacacacacacacacacacacacacacacacacagacatacgcacatcgtgggtgagatgcaacccagtagatgtggcgcaacttctcagtatgacgagtgattattcgtgtgcgcacccctctcccatttattgactacaggtgaggtaaatcacccacaagagggggggttttttttgctgggggtttattttataagattttactttacagcaacagcgccctctcgctttgcattgcgcaacaggaacaaaaaacgtgtgctta

SEQ ID NO: 99212 - DNA, 424 bp, Homo sapiens
ctcagtgccacagctgcgctgaggaggccgatgactggcaatcggagtggacgcctctgtgttactctagcgagcatcatacaacatttaattgaaatggggataccgataggaggattaggaaccggagtcattcctttaactgtaagctaaggctaagcgacatcgccttggattgagtgtatatgacatccccaaattcatatgttgaagcttaaatcctgaatgtgatggttcttggaattgggacctttggaaggttattgggtcttgagggcagagccctcacgaatgggattaaggcccttataagaagagacatggggccaggtgcagtggctcacacctgtaatcccaacattttgggaggccgagaagggtggatcatgaggtcaggagatggagaccatcctggccaacatgg

SEQ ID NO: 99213 - DNA, 456 bp, Homo sapiens
  misc_feature (1)...(456): n = a,t,c or g
gtttgaccgcctggngnaantnnnnnganngggtctggagaaggtgcatagcatgacggnggaccgcaacagccgcctgtccgtgcagctgcgggactgggatgggggcggcgagttgctgcagttctccgtgcacctggatggcgaggacacggcctatagcctgcagctcactgcacccgtggccggccagctgggcgccaccaccgtcccacccagcggcctctccgtacccttctccacttgggaccaggatcacgacctccgcagggacaagaactgcgccaagagcctctctggaggctggtggtttggcacctgcagtcattccaacctcaacggccagtacttccgctccatcccacagcagcggcagaagcttaagaagggaatcttctggaagacctggcggggccgctactacccgctgcaggccaccaccatgttgatccaagc

SEQ ID NO: 99214 - DNA, 363 bp, Homo sapiens
cagggtttaaccgtattggccaagctggtctcaaactcctgaccttgtgatccacccgccttggcctcccaaagtgttgggattacaggcgtgagccaccacacctggctgggtaaaatcatttttaagcctttcaaagctgttagctttactagtccaaatagttactgaaatgaattcttcatagcaatttgccagatcctccccacttataaagataaatgttaatgtcaatatttattcttgtgtgtatccgggagtgtgtcttgcttcattatttctacatggaggaaaggacctggacagactgcttgtatcaagtcagtggttgtcaggtgctccctcagacttgacacactttca

SEQ ID NO: 99215 - DNA, 406 bp, Homo sapiens
gttttttgcacagtagttaacctcatcactactttgggtgggctgtacagggattctttccttcatcttacagaggagtaaacaggcacagagaggaaggggaaaagtgacttctttgaggtgaggcagcaacccaagagaacctggcagagctgaggccagaacccgagctcctgtctcctagcaccgtcctctcccgcgaacccgagctcccgtctcctagcaccgtcctctcccgcgaacccgagctcccgtctcctagcaccgtcctctcccgcaaacccgacctgctgtctcctagcaccgtcctctcccgcaaacccgacctcctgtctcctagcaccgtcctctcgcgcaaacccgacctactgtctcctagcaccgtcctctcccgcaaacccgacct

SEQ ID NO: 99216 - DNA, 375 bp, Homo sapiens
  misc_feature (1)...(375): n = a,t,c or g
ggaatcaagctgtcagggggcacagtgaggccccagctccttaccagcaagccgtctaggctgcgaacgcgagccgccgggccgcagctctctagaggtccctgtccccaccgcctggccccatctcatgtcacattcccccaaggtctcattccactcggctaatctccaagaacaccatataaaaaaaaaaacaagaaaaaaaaaaaaaaaaaaaaaaaaaaggtttttttttttggggggcgcgggtttttttttttttgggggggggttttttttttggggccggggggcggttttaaaaagggggggggggggagaaagnnnccttttnttctnncttttgtngacgctgttggggataaatcgcttgcc

SEQ ID NO: 99217 - DNA, 376 bp, Homo sapiens
gagagagatggaagttaatcgagtgccataaggcattatagaaatatgaaagccttactgctcagcatctagtcttcaatcttttcttttttttttttggaaggggggttcccttttggtgccccggctggggggccaaggttggcgggaaccaaaaacccccccctggccccccaacttgggaacaaagccagacttcttccccaaaaaaaagaagaaaaaaaacccggggcttcttgggaaaaaattttaaaaaaaccggggggccctgggggaccggacctttttcccctttgggggaaaaaatttaaaacccccggtttttttttggccccgcttttttgggggggggggggcctctccccccctcgcccct

SEQ ID NO: 99218 - DNA, 400 bp, Homo sapiens
ggcaggagagttgcttgaatatgggaggcagaggttgcagtgagccaagatcatgccactgcactccagcctgggcaacagaaaaagactctgtctcaaaaaaaaaaaaaaaatggaaatttggaggcttttatgaagttattggaaactttctccatcttttccccaaatggagttatcccccctcttttaggatcttttaaggaggggcttttttcagctttttaaccatcaatttcttttctcaaagggctttggaagttccctttttaaaaatcaaaaattttcaggagttaaactatgggttcattcagtccagaatcttttaagcccctgacccccgccccaagaaatataacggggtataaggttataatggccccctataacattaaacgga

SEQ ID NO: 99219 - DNA, 396 bp, Homo sapiens
ccagttacttaggaggccgaggcaggagaatcgcttgaacccgagaggcaaaggttgcaatgagccaagatcgtgccattggactctactctgggggacagggcaagagcgtctctcgaaatggacataaatcctaatgataaaaatcaatttccaaaacctcatctcatggaaagatcacaggatgaaggaaagctacactcaactctgtgaatagaagttgctatactgtgagtaaagctacaattcagaatactgaatgagtttaaaatgccttatatagcacccttttgggctaggggtaattactagatctgacttggataatttgacactttgggaaatgaactctgctcttgagactttgtcccggcattttaaacatcttaggaagaa

SEQ ID NO: 99220 - DNA, 362 bp, Homo sapiens
gcatggtggcacatgcctgtagtcccagccacctgggaaactgaggcaggaggatcgcttgagctgaggagttggaggccgcagcgagctatgatcacactgccgcgctccagcctgggtgacagagcgagaccccatctggaaccatttttaaggaccccataagggggacttttgcatggtctggctctgttattgattttttattagcacaatggtgtccttaaggtcttagggaccaaactgataaaatcagtcacgagtcccacggtgtttagtggtgtcttttgattttataattttttactttttatcttaagtatgtagaaccagaagagacagtgcctttttatgtttttggt

SEQ ID NO: 99221 - DNA, 385 bp, Homo sapiens
  misc_feature (1)...(385): n = a,t,c or g
gatcttttttttttaggaattaatctctacatcctccacaaatacctccaccaccaacagtagcccctcatcctggctcagcaacctacccttttctccctgggactccttggctgctgccaatggagatgaaaaactggaatgatgacacagctctttttctctgttgggaaaaaaggaacaatttagtctacaaagacttcttggctgaagaattaaataatttctcacaccctcctaactaccaagtggccaacatctaaaacaaccattatttaaaatctcagcatgccaggaataaaaaagctaacaggaaattccaacagaatgaagggaggctgttcacagaggccatgaatacagtttttgtttaaaacaagcacan

SEQ ID NO: 99222 - DNA, 385 bp, Homo sapiens
aggttgcagtgagccgagatcacaccactgcattccagcctgggtgacagagggagactccgtctctaaaaaacaaccccccccccaaaaaaaaaaatgcatagcaggctgaaaggctttttgggttttaaaaaaaaaaaggtctggaaagttgtttgcttttccccagtttttttttgcggggttacctctaaagggaattggggtaaaggggaaagttaaaaggaatattcggcttttttattttatatccccctaggggaaatttttacaacaaacatgtacggggggattttgaaaggttttaaaatttttggttttcaaaataataaaatataaattcaaactgcaaaaaaaaaaaaaaaaaaagttttttattagccgg

SEQ ID NO: 99223 - DNA, 434 bp, Homo sapiens
  misc_feature (1)...(434): n = a,t,c or g
tggatgtgatgattttcacaaagaaaagaagtcaaaatatacttaaaatttagagagattggcccccaggtcctgtttttaacagtgatttttgtacaaagcagtggactttttttttttggaaaacgaaccccccttttgttccccaggttgggaagggaagggcaagaaccccggttaattgaaacccttgaaccccggaaaccgagggttccaggaacccaaaatgggccccgggatttccacccggcccaacaaaagcaaacttttttttaaaaaaaaaaaaaaaaagggaacccgggaatccccccccctccggggggggaatttttttnaaaaaaaaaaaaaaaaaaaaaaaaaaaaaaaaagaattttttttttggggccccccccctttttttcttttgggggggggaaattttatggggcccgcg

SEQ ID NO: 99224 - DNA, 433 bp, Homo sapiens
aacaagtttctctaattgtgtcctgttgtaaaagaaaacagtttcttattgcacttatataaataactaaattgttttaagttcagaatactcacaaatattttccaaatttttttcacaggtgtatactttactcaattgttaaaaggtgtgaatagttcaaaagaatagtttttttgactctgaaaaacaaaacaaaggatcagtgatgttttaggcgaagtcaaaaaatattacttcagtcttctattagttcagtccactcagttaattcctgttctgtttgatagtcatgatcattttagttctccattagtattgaaagatcttcctcaggccgggcacagttgctcacccctgtaatgccagcactttgggaggctgaagcgggcagatcacgaagtcaggagatcaagactatcctggctaacat

SEQ ID NO: 99225 - DNA, 407 bp, Homo sapiens
ccagagcaggacctcagttatcttcaattctgagaaggctgagagaggtgaggaaactacagaagaaaagtttgaagctagcagaggttggctcgtgaagtttaaggaaagaagctgtctccataacataaaagtgcaaagcgaagcaataagtgctgatgtagaagctgcagcaagtgatccagaagatctagctaagatcattgatgaagatggctatactaaacaacacatttttggccaggcactgtgcctcatgtctaatcccaccactttgggaggctgaggtgagagcattgcttgaggccagcctgagcaacatagcaaggcaattttttaatctctacaaaaataaaaaaattagccaggtgtgatggcatgctcctgtagtcctagctacctggcag

SEQ ID NO: 99226 - DNA, 415 bp, Homo sapiens
tagcggcacgagcaggaggattgcttgggcttatgagtttgaggctgcagtgagccgtgatggttccagtgcattccagcttgggtgatagagtgagaccctgactcaaaaaaaagttcagacggataaattttactacgtatattttaccacaataaagtcagtgcaccagcagttttctataacagaaattcccatattgagtctacattttctctcctactggcctccattcttcttgtacctcttgtatcccactactaagtaaacttccctttatcttaacaaactttcctttatgttaacaatttcatagtctttcctcttgtctgccttagctgagactttcattgaagaaacaatggacatttagatgctcatagtattattacttttgtgattttagtgcccatag

SEQ ID NO: 99227 - DNA, 400 bp, Homo sapiens
ggaagattcaattgaacccaggaagccaaggctgcagtgggctgtcattgtgccactgcagtccagcctgggcaacagagaccctgtctcaaaaaaaaaaaaaaaaaaaccccccgtttggctttaaaataaagggagaaattgaacctttaagggaatttggaaccaaaaaaaaaaagggagggtttttaaaaaagttccccccccaccctttggggttttttttggaaccctttacttgggggggtttttggaattaaacaggaacttttaacccaaaaccccttgtttggaacgggggaaaaaatttttaatccatttttgtttctcccacccagaaaaaggaagggtttttcaaaaagaaaaggcccaccaaaccatatttttggggactttttta

SEQ ID NO: 99228 - DNA, 411 bp, Homo sapiens
  misc_feature (1)...(411): n = a,t,c or g
cagtgagctgagatcatgccactgcacgccagcctggagacagagcaagacaacgtctcataaaaaaaaaaaaaacataaaaaaaaaaaataaattttttttacccttccgggaaaactaaattgctaaggggaggaaagatttttttgatttccttccgggggtaataaccccttgatctctaaaaaataaaaagggaacttttctgaaacatttattacttttttgcccatagtaatttgttaacttatcctcaccctttatttaaaactcgaacctgattgaaaacaggatctgtataggcatcttgggtaaagcatgttcttaataaatggggccgatgagaaaattcaatttattatcctattttaatttaatttacttattaattttcagacagggttttgctcn

SEQ ID NO: 99229 - DNA, 368 bp, Homo sapiens
aaacttgctacaacgtttatctattttggtgatcttttcaaaaagaacaactttcttaacggatttttctctaattttttctattctacgattgagatattttcattctaatttttattatttcctcctttcttttagatttgggttaacttgccttcctttgttcagtatcacctaaggtgagacattaagtgaagtaactgatttcagatttctcctttctttaaaaaaggaaaaaaaactaggctgccaggtgcggtggctcacacctgtaatgccagcattatgggaggctgaggttggcgtatcacctgagatcaggagttcgagaccagactggtccacatggcaaaactccatctctactt

SEQ ID NO: 99230 - DNA, 431 bp, Homo sapiens
  misc_feature (1)...(431): n = a,t,c or g
gtattgtttgtcactgagtcaaagagatctgtgggattgtgaggattcttgggtggaggggtgactaatcctgcacgtccctttgtgaagactccagtaagtactcgcacaacgtacatgtgctttctcccattgctgtctggcttggagtaggtatccttggcagaataactggcatccacagcaaaataggttccttttccataggatacagctggaaagagaaagacaaaaaccttcctaagaatataaaattacacaatgtgtagaaccatgcccaatctgacaaaattgttttctaaatgcagttttagccaggtgtgttggctcatgcctgttaatcccaacactttgggagggctggaggcaagagggttggctttaaggccagggagtttcgagaccagcctgggntagccttttggagaccc

SEQ ID NO: 99231 - DNA, 424 bp, Homo sapiens
  misc_feature (1)...(424): n = a,t,c or g
aaaagaagaacacaaagtcaagaaaaaagataataccaagttcctatttaaaagatcctgtactagagatgagtcacagtttgggccttgggcttcctgggagctaggtaaaaagagaaaaaggaacaacataagtttcagcctgttttgtctgggcgcggtgactaacgcttgtgattccagccctttgggaggccgtggcgagcggatcgcttgagctcaggggttcaagaccagcctgggcaacatagtgagacccctgcttgaaaagataaaataaaataacaaagtttcattttgtttctaattccaagattagaaacaaaccagttctgccctaaccaaggcgttttccagtaatgaggcctgagaggcgtattttcctcctgggccctaatgaaaaaaggagatatgggatgcagtn

SEQ ID NO: 99232 - DNA, 539 bp, Homo sapiens
tagataccttctttgaagttgaagttgaaatggagaaggaggtttgccgtgatctaatgtgcacttcccccaaagatgaagaaggttttcttttaatttaacttttttgacaatagtagctggctagagtcaagttagcagaaccagtgaaaaaatctaagggtaaaattattcttacttagggcaggtagcatagtaaagatgctattcattttattttattttgtaactcttaaaagtagtttccagattctgttttcttctttaaaggtcatctttaataattaactggtcctggctgggtgcagtggctcatgcctgtaatcccatcattttgggaggccgaagggcctggattgcttgagtccaggagttcaagaccagcctaggcaacatggcgaaaccctgtctctactaaaagtacgaaacatcagctggctgaggtgggagaatcaccggagcctgggaagtcaaggctgcagtgacctgtgatcatgctattgcactccagcctgagtgacgagagtgagaccctgtct

SEQ ID NO: 99233 - DNA, 384 bp, Homo sapiens
  misc_feature (1)...(384): n = a,t,c or g
gaaaaagttcctgaggcaaagagactctacggaaaacgaggtgaccctttctatgaagcccaagaaaatcacaacctcatcggggtggcgaatgtattcttggaatgcctcttctgtgatgtgaaacttcagtatgcagtccctatcatcagccagcagggggaggtaagcacaggccagccttggagaacgatggtggttcaagttttttgctttggtttattttggttttcattctatttaagctatgttcttgaggtggatcaagaaactaaggcaaatnnnnnnnnnnnnnnnnnnnnnnnnnnnnnnnnnnnnnnnnnnnnnnnnnnnnnnnnnnnncnnnnnnnnnnnccccaaaaacacccccaaaaatttcccccg

SEQ ID NO: 99234 - DNA, 340 bp, Homo sapiens
agcacaacagcagctgcagacgacatgcaaatgaaagcatgtgaggcatcttgaactcctggcctcaagtgatctgcccgccttggcctcccaaggtgttgggataacaggcgtgagccaccgtgcccggtctgtttttgttttatgaacaatgttcaaagaggggaattgacttgtccaaggtcacgctgggcaaggctctgatttcaattctaaagcccttgatcgggtgggccagaaatgagaaggtctgaagctgctaacatttgcggcaggcctgaaccagggctggcgggggagaagtctcaaggggaatggaacccgtggtttggagctggaa

SEQ ID NO: 99235 - DNA, 348 bp, Homo sapiens
atccacgtagcttatgtgagtaaacagctatatttgggaaaagctactagtgacactgatattgacaggaatttgatttgacatttaataagtgcctggtatgtacaatgaagagtgaaagatcctgaagagcttggatgactaggaaggccccgtgcctgctgactggcttgctggctgggagggagcataaagacacccagataactcatataaggtagagtgtgccgcagcagaggtctaaacgagaagctaagggaggccaggggcggtggctcatgcttgtaattccagcgctttgggaggctgaggcaggtggatcacttgaggttaggagttcgagaccag

SEQ ID NO: 99236 - DNA, 1225 bp, Homo sapiens
gggaacataacgcagagcgggctttcctggcacaggctcatctggggccaggggccccttgcacaccgggattcccttccttcattcccactcagtttccaccatttcggtcatcaggattgcctaatatacctgtccagacaatctccagagctgctgcagaaaagctgtttgggtaagtttttatttgaaagcggtcttgcatagtgaggttttatgattagggaagaacggtaatatgttgattaaaatgttaaacatgatgataattttccacatttgggaatttggaggatggttagctgttaccttggtacagatataaatgaatttttctctataaagagatcttaataatggactttggacttataaacacaggagaataaggagacttataaacccagtgaattccttgtgcaagattcctggcatagcttctgctcaagtacttctgtgctgaagcacgatgcctatagcagcccattcagttagtagagagaatctgttagaattcatattgggataaaatcctattccccgaaacatccatttgtctggatttttcttctaagcaatacggtatgattccagttaccttgtctatagattgagaagccttgcttcttatgatggtttccagagaaaccatttatggttgtggctcgctcctctggatatcctccctgtaacgttagtgtctctctttaaaaacagagcccagttccattagagtacgtagcattaattttgatttggatgtggacatatttatcatttcctgttattacaggatggagatctagtttcaggcctttatgaaagcatttatctcctgtatgacataggttctctgatcctgtttctttaacataattggatagtgaaaatatattctacttgatagtctcaaatgaagaacatctgtatataaggagtatatgaaataccatgactgttgatcatgctgagaggcctttagcataggggagtgtgtaacataccatgactattgataacgctaagaggcatttagcataggtgatttttttgactcattctacctaccacctacaaatcgtaaccaacctgtgaagccagcgtcccatcttatccttatgtagtaggggagtaataatgtttcaacctatatttatgtaagtaagcccccttaggagcagctattatttgggtaacacagaggaattagataggggaagcacat

SEQ ID NO: 99237 - DNA, 366 bp, Homo sapiens
gagagagctagcatagttcttaagggccctaggggttttgaaatggtaaacgatcattggcttcaacttaatgtcaccaattgcattagcccctaaccaaagagtcagcctgtcttttgatgctttgaagccagatattgacttctcctctctagctatgcaagtactaagtggtatcatcttccaatagaaagctgtttcatctacattgaagatctgttgtttagggtagccactttcatgagtgatcttagctagatcttctgaataacttgctgctgtttctatgtcagcacttgctgcttcgcgttgcacttttatgatatggagaaggcttctttccttataggtcgtgaaccaacttct

SEQ ID NO: 99238 - DNA, 355 bp, Homo sapiens
caaatccagtcatcacagagtgggaagggcttactattgacctcctttattgatgaagaaacaaaactttttttttttggaaacaaagtctggttttgtattccacccggaccaggggggaaactttgtttcaaaaaaaaaaaaatttttgggctttacccagggggggggggtttttgggggccccaaaccccccctttggccccaactttccctccgggttttccccccccccctggccccaacttttccccaaggggccccttcccaaaaatgggccccgcccttagggggccgggcaaaaaaaaaaaaccccctgaaaaaaccaaaccggcaaaggggggaaccggccccg

SEQ ID NO: 99239 - DNA, 348 bp, Homo sapiens
acattttcttccttcaaggggtgctcataagtaagccatttatcatttatgtattacactacgtgttgaaatactctgaaaaaatttttttttttttttttggtggggggattttcccctttacagccgggaaaaaaaaaaaaaagggtttttaaaggggggggcggggggcccccggcccccttcaaaaaaaaagggggggggtttcttcttaaaaacatttcgaaaaaaagggggaagggaaaaaggttggaaacttcggggggggccccccccccgcggagaattggtgctttttttttttggaaattgccctaaaaacacccaaaaaaaaacggggggggcccg

SEQ ID NO: 99240 - DNA, 344 bp, Homo sapiens
gttcctcaaggtttaattttgtgtgctgttgacattaacttttatggaattgctattaatgataaagtgaggcaggagaatcgctcgaatgtgggagttggaggttgcagtgagcccagatggtgccactgcactgcagcctgggtgacagggtgagactccatctcataaaaaaaaaaaaaaaatttttttttttacccgccccggggttatttctttttgtgggccaaacattttgccggcctttgggcggaagtttttttggggcccagaaaaaaaccctttttagcccttagatttactttgacccatgcttttccgcccggggagaaaaatgggatctt

SEQ ID NO: 99241 - DNA, 371 bp, Homo sapiens
ctttgtcctttaaggatgaagattgaaaaaaacaacaatccacattgtttttattttattttttaagttttattttatttttttttttggtaaaaactggttctcactatgctgcccaggctggtctcgaactccgggcttcaagcaaccctaatacctcagtcagcctcccaaagagctgggattacgggcatgaacataccgtgcccagccccacatggtttttagcagctaaaaccccctaggaattaaaccttatgagggggggtgaaataagacagccaatgctggagcgcatgatttagtactacctacctggtttatatcaaagtttcccagcctgtgagaagggtttatagccatgccagcat

SEQ ID NO: 99242 - DNA, 429 bp, Homo sapiens
gtctcaaaaacaaacaaacaaaaaaaataaattgtaggggctctttctttcttgccttttttttttttttttggaaaagggggttccattgaccccccccggggccacaggggaaaacccggcccccaaaaaaaaagggaccgggcaaaaacttcttaaaaaccgggatttttttttaaaaaaagcaatgtttgggaagcaaaaacaaaaaaagtttttttttgcgcccactataactggtgaccaaagggcccccagggtttttaaagggccgggggcacagaaggaaccctttgctcaaaaaaaaaaagaaagggggggggggaaaaaaacccgagccgcccccaacaaaaaaaaaaaaccgggggcttttttttccctaaaaaaaacccctctttgggccggggggggaccccctccttttttccc

SEQ ID NO: 99243 - DNA, 399 bp, Homo sapiens
tagtggtgcctgtttctgacttcttgctttgatgttctcttttagggtccagataatttttttttttaaaaaagaaatgtaaagtgaaggtgacagcctttgattatagtagtaaagatgatccaaatagtttgtataataaatacttggacacatgaatctgtatttgaaatttgaaaccatcctaataatatagccaaaaaaaaaaaaaaaaagggcccgggggcctttcccaaccttttttttggttttaaacaaggaaaaaaaccctgtgggggcaggggggggggttccccggaggggggaatcccccccaaaggatttggggcctttgggagactccccttccccggagaaaccccagggacccccccgtgggggtaaaggttttaaagggtt

SEQ ID NO: 99244 - DNA, 384 bp, Homo sapiens
aggtgggccatggaatggttggggagggcatcaggtgcacatacatgcacacagcacacacacacacacacacacacacacacacacacacacacacacacacacacagtgttctatgaggggggacagaacgggtgaaaaaaaaagaaagcgcgcccctcacaggcgggggagcgaattagaggatgcacacaccgcatatgttgtattatacagcgcacgcgaggagtatatgtgtttagtcttccagggcatgtgtatcacaacctcacatacatattttcataattagcgctgtggagggtgccagcccacggctctattctctctcaaaaaaaaaaaaaaaaattttttttttttgggggggcggtttttttttttttg

SEQ ID NO: 99245 - DNA, 388 bp, Homo sapiens
gaaatgtttaaaagaaaggaaaaaatgacccagaaaattctattggacagcgcttgtctacgacgacagcaaagtaggtgttcatagagtatattttgttttatttatgtattttttttgagacagagtttcactcttgttgcccaggctggagtgcaatggcgcgatcttggcccactgcaatctccgcctcaaaaaaaaaaaggaaaggaaaccttttcctttttgggggaaaatcggtacctacaacccaagaatttccctacttttttaacccaggtttgtttttttgaaaaaatacctcccaatggcctaataaatggaaaaaggcccaaatggattcccggttgcgaatttttaaaaactttggttgtgggcccttgggttg

SEQ ID NO: 99246 - DNA, 371 bp, Homo sapiens
gactgttactctcgaggctgaggcaggagaatcgcttgaaccgggaggtagaggtttcagtgagccaaggtgacaccactgcactccagcctgagcgagaaagcgaaactatgtctcaaaaataaaaaaaataaactttgtagtttgttttacccggatacaaagttgtcattaacatttttacttttgtttttcagatattaacctggctgcagagccaaaagtgaaccgaggaaaagcaggtgtgaaacgatctgcagcggagatgtacgggtcagtaacagaacacccttctccgtcccctctactcaggtccggaactttattatttataactgcattgtgtccatcagtgggcatcttctctttct

SEQ ID NO: 99247 - DNA, 387 bp, Homo sapiens
gttgcagtgagccaagatcgcgccactgcactccagcctgggcgacagagcgagactctgtctcaaaaaaacaacaaacaaaaaacctatcatacaaaaagattcactggtagttattcttatgcaaatgagtgttggtttatagacccttaatattgttgaaagtcaccaaaaataagtacctttgatcagataaagcatttcaaactaccatgtgagttaacataatgtttccatggctggctcattcttttcactcaggtctgagcttaaaatttatctccccagagatgcctttcctgaccatcccaccaaaagtagccacctgacattcccattatttcatcacttcattttaattctcagcataaacttatcatcatctgg

SEQ ID NO: 99248 - DNA, 410 bp, Homo sapiens
  misc_feature (1)...(410): n = a,t,c or g
ggcacgagtgacatttgattaaatgtaaaataagaaatcccttgaaaattgtttagaagagaaaataaatatctcattactgttaagtgattactgtgggggtttttttgtttttgnnnnnnnnnnnaacaaacctccaactcggccagtttttatccttcctttttttggacatggggttccacgtttgccccctggcaaaaaacctcctggccctccccctggtccacctcctcctcaagtcgagcaaatgtatggccgtaaagggggttttgccctaaatcttccccctcgtaggcaaaataaaaacatgttatatagtcctgaacttggtgaaaagtgactgtccttttgcttttaaaacaatcattttttatgttggccctgtttaacatattgttcaccaccct

SEQ ID NO: 99249 - DNA, 377 bp, Homo sapiens
  misc_feature (1)...(377): n = a,t,c or g
gggccgaattagctgcagcaggaacacacccttaagacacagatcgctcatgctgattgtttgtggcttaagaatgcctttaagtggttttctgccctgggtgggccaggtgttccttgccctcattcccgtaaacccacaaccttccagcttgggcgttaggaccattatggacatgttacggtgctgcagagattttatttatggccagttttggggccagtttatggccagactttggggggcttgctcccaacaatatactgaattttttcgatttaaaattatctttatctcatcacttcttttcaacatagttttggaagtcctagccagagcaattagacaagagaaagaattaaatggcatgctacagn

SEQ ID NO: 99250 - DNA, 381 bp, Homo sapiens
gcaaaatgcagtaaaatgagatatgcctgtagttactttcttaacactattctcagatttagaaagaagacatgccattgtttgttttgctttttttttcttttttatagaaatggggtctctctatgttgatgaggctggcttcaagcgatcctcctgcctcagcctcctgatgtgctgggatcacaggcgtgagccactgtgcccagccctcttttgcatttctctacataaaactttgtgacatgcttttaaaattttaacacaggccaggcttggtggctcatgcctgtcatcctagcaatttgggaggccgaggcgggcgaatcacgaggtcaggagattgagaccatcctggctaacacggtgaaaccccatctc

SEQ ID NO: 99251 - DNA, 394 bp, Homo sapiens
  misc_feature (1)...(394): n = a,t,c or g
ggattgtcggncctctgactttattcttcattggctattctaggttttttgcctctcctgataaactttattattattatcattttttttttttttgaaagggaccctggccaacaaaaccaaaactttgtctcattaaaaaaaagggaaaccccccccccacctttttccctaggggtaccggggaaaaggtcccttttgcccccccccccaggtccaaaacatgcagggcccccggttctccctgcaggtctttggggtggaccggaaccccctacctggggcaggggggcaaaacaaaaaagggaaatataggtgccctggaaaggaaaaaaaaaccctgcctttattctttaggggacaggatggggcgctttaaaaaaaaaaaaggaaa

SEQ ID NO: 99252 - DNA, 366 bp, Homo sapiens
  misc_feature (1)...(366): n = a,t,c or g
caagaattgtatattatcatatttgccttttgtaggccactgaggacatcatctataactcagttcttgtcagttgagaaactggtagaaaaaggaaggagactagatggaaccttaagaaggtgtgccttttaaaaatgtccctacaaggagaaaaagaagagagaaagagagaaaagtacagaagaacagagatgaagagacagaaaaatagtgagaaacaaagaggcagagagaaaggaaagaagtcaaagtatcaaaggagaaggaagaaagagaagaagggcgaaaaccaaaccaaaccaaaaccaaaagttgaggagnnnnnnnnnngtcaggatatttgaaatgtttcagaaatgttgg

SEQ ID NO: 99253 - DNA, 363 bp, Homo sapiens
tagagagagctagcaccatgagcttcaataccctgtcactactaaaaaaaaaaaaaaattaggcaggcatatgggcgggcgcctgtaatcccacttactcgggaggctgaggcagaaaaatcgtttaaacccggttggggtggggagtgtggaggtgtctcaattatacccaactcgggatattagcatgatggttatcgaggaacatatgtgctttttcgtggttgttaccgagatgttagccataattttctgcatcgatgcttgacctttttacaacatgtcgttgggtgcccctgggtctactccacttctgtggagtaccatgggaccattggccgtgagcgctatacaatcgagaat

SEQ ID NO: 99254 - DNA, 365 bp, Homo sapiens
tgttttttaaacctcagttttggtttgtgttttaagaaatgtaaacttgaatctcggcaagagaaggttctcaaaatttggcacaaagggagcatctgtcagcctattaggtgtttttggtgtatgaaacatgagatgtaaaagaggacttaaaaggacataatagtactagtgtcctttaaaaatatatatatatatatatcagctaggcacagcctgtgatcccagctctttgggaggctggggcatggggaccgcttgaggccaggagttctagaccatcctgagcaacaaagcaagaccccatctctacaaaaagccaaaaacttatctgggcacagacatctaatctacttgggaggctg

SEQ ID NO: 99255 - DNA, 393 bp, Homo sapiens
gaggaaaatgcttatcttatttattaatgggaccctaagaaaagattagagtattgcatatgagcagaatcccatttctaatagtgcaccttctcagaagaccttacctaatgatctttgcttatttggcttaccagcactttactcttttgaatctagataatttcttttttgtctttaaaaaacctttttcttcattttttttttcctttcatttattttcatccggccatttacagaggaatctagtaaactttagatgtctctgccaaagtaaacaaaaatctttttctcttttttttggttttgagagggaggttcgctcttgttgcccaggctggagtacaatggcgcaatcttagcttaccgcaacctccgcctcccggggtcaag

SEQ ID NO: 99256 - DNA, 395 bp, Homo sapiens
  misc_feature (1)...(395): n = a,t,c or g
cgcttgaacccaggaggcagaggttgcagtgagctgagatcgcgccattgcattccagcctgggcaacaagaacaaaactccatctgaaaaaaaaaaaaaaaggggaccagggctttaggggggaccacactaaaaacatttggctatttccacgggtctttttgccactacactccttaaatacccttaaatagctcatattaccaccagacccacccaaggtaaaacctttgggggctttataaaaagtttcctaaagtaaaggctgaaaatccctcatgaccatttcaaaactaaggggatttctttagggcacctttaattacactaatgaccttggttcattttaaaaatatacatacttttaaagaaaactgaggaccctaaggatctn

SEQ ID NO: 99257 - DNA, 455 bp, Homo sapiens
gcgaggccagaattcggcacgaggtataattataatcgcaattttaaaaaaggtatgtgtatatatttatagatgtggtctcactctgtcacccaagctgaagtgcaggggcacaatcatagctccctgcagccttgaacttatgggctcatgtgatccttccacctcagcatcccaaatagctcggactgcagacatgcaccaccacactcggcttataatcgcaagtcttacgttctgtctcttaaaaaaaaaaaaaaatgttttttgtgggacttacaaccattgcccccccaaaggtttttatttataaaaccattttccaaaaaaaggaacagggggcccttggaaaaatgtttgttttttaaaaagggggcaagaaatatgacccttatactgctggcaattagggaggtgctcaaaaacccaaaacagaacaaagaccccacacatcg

SEQ ID NO: 99258 - DNA, 428 bp, Homo sapiens
cgcttgaacccgggaggcggaggttgcggtgagccaagatcgagccattgcactccagtctgggcaacaagagtgaaactcagtctcaaaaaaaaaaaaaaaaaaagaccccccttttttttttttggaattcgccagcccccccaggggggaccctttcaaactttaacccctttaaaccttttaaaaaacctaaccaccttattgggggctaaaaaattttttttttttacagggggaaaataaaaataaaatttgcttttgttccaaggcaaaaaaaagggaaataaacccctcttaaaaaattaaaaactttaagggggggggggtaaaaaaagattgtttagggtttttgttaaaaaagggttccaacaccccccttggaaattgggaaaaaaccccgaaccccttttttaaaatttttaaaa

SEQ ID NO: 99259 - DNA, 399 bp, Homo sapiens
  misc_feature (1)...(399): n = a,t,c or g
gctcgtaccccctcaccaagtttgtctgagagctctgaagatgaaaaaccaacaaaaaagcacaaaaaaggtaaagcattaagacttaagagaagattctgggtggtcttaatgtctgctcttccttgcattcactgatagttgataatcaactcaagtgtgaaaggggaaggtgtggggaagcatagtttaattgggaaagcagggagtatcagtggaaggctggtgctatgggcagaattgtgtctctccccaagttaatatggtgaaatcctaaccctcagcacctcagaatgcgactgtatttggagataaggtctttgaagaggtaactcaggatgggaattaccttgtacagccactcgacatatcanaggtgacagacatccaagttggctt

SEQ ID NO: 99260 - DNA, 399 bp, Homo sapiens
gaattaagccttgtgatccgcccacctcggcctcccaaagtgctgggactacaggcatgagccaccacgcccggccaaacatgggtgaatttcttttaaaacctgaaaataaagaattttttttctctgatgcttcttgaagtgtacatgtttatcttttagtctggcaaactcacttctaagaattaacctcagagataagctgtcaaaaatacaaaatggcagagattaagaacaatgattctcagactcgagcttgcgtcagaatcacctacaggacgtatggtgcagattcctgggcctcacttcagagtatctgattcagtagatctgggcttccacccaataattttcatttctaatagatttttaggtagtaatgatgttgttctgggtacc

SEQ ID NO: 99261 - DNA, 382 bp, Homo sapiens
  misc_feature (1)...(382): n = a,t,c or g
aattcgtccctgagggtaggcctctaaaatggccactttgggggcagctgtcttttacggttgcagctgtagggatgaaataagccccagtctcccgtagcactcccaggcttgttaggatgaggaaattcccacctaataaattttggtcagaccggttgtctgctctcaaaccctgtttcctgataagatgttatcaatgacaatgcgtgtcccaaaaaaaaaaaaaaaaaaaaaaaaaaaaaaaaaaaaaaaaaaaagtttttttttttttggggggggggtttttttttttttgggggggggaattttttttggggggggggggggggttttaaaagggggggggggggaaaaaactntncncccttcttttcctttc

SEQ ID NO: 99262 - DNA, 366 bp, Homo sapiens
ctggtatttttatttatacggacgaaggcttattccctttggagagggtggagcatacctgggcactggcctgttctttacgccgtcgcgactgaaaaaataaaacctgggaggcgaaggttgcagcgagctgagattgtgccactgcactccagcttgggcaacagagcaagactgtctctcaaaatctaaaaaaaacatccaatatggggcaaatcccccccccccccccgggctttaatttgcgctaaaaaaaaaaaaattttctgccccgttgcccccctaaaaataaaaaaaaacttttttctttttttttaaaaacactctggggggaaaaccacagttttgtgcccccccccaaaaacc

SEQ ID NO: 99263 - DNA, 364 bp, Homo sapiens
ggcacgatctcagctcactgcaacctccgcctcccaggagaatctctggcaggcgaatcgcttgaatctgggaggcagaggttgcagtgagccaatatcacgccattgcactccagcctgggcaacaagagcgaaactctgtctcaaaaaataaaaaacaatggcaaagttaagtagttgcagcagagaccaaatgatctgcaagcctaaagtacttactatatgggcctttaagaagtttgcctactcctgttctagaatattcgtagaaaattgtgttcccaagtcaagttgcactggcatcactgcaggaattttttaggaaagcaaaatctcaggaccacaaccctgccccagacctcct

SEQ ID NO: 99264 - DNA, 249 bp, Homo sapiens
gagtcatccaacgcacagtcatcctcaacacctccctctcacccccacgtggaattggtcatcaactcctgtggatttcatcttcagaaaggctcctcctgtcttcccccactggcagcatcatagggcaggacctggcacttctctgattcccacagatgctccccaggaggcctccccaccccctccttacccctccagtccatcctccacacccaccatcccaagagagacctttctaagacagtc

SEQ ID NO: 99265 - DNA, 376 bp, Homo sapiens
agcagaagtactgacaatagttttatgaaggtacagtttggacgcttaaattcttctaagttagcttcttcaaaaaatgcagaattaggctgggtatggtggctacgcctgtaatccagcactttgggaggccaaggctcgatcactttagctcaggagctgagatcgtgccactgcactccagcctgggcaacagggcaagactccatctccaaaaaaaaaaaaacccttttggggccctaaccttggggggttaaagtttttttggggcctggggattagggtggcccacccggggggttttattttccccttgaaaaaggaaaaaaattttaacttccttcaagttaattgcgttggttaagggaaaaaaagg

SEQ ID NO: 99266 - DNA, 792 bp, Homo sapiens
  misc_feature (1)...(792): n = a,t,c or g
agctgtgcatctgtaaccagcagcccgtccacgcccacacggtagccaccctgcccatcgctcaggcccatgctcccattgagtagccacaaggcccgggccaggttggatggctggtcacagggcaggaggacatcatcaccccggagcacagagcgggtcttcagtggtggtggtggccctgtggggtttgggggagaggtcagtaccagcccgtcccaggaagggattagagatggcaagccagactgttcactgccaagtccctggcaccaagcacagaacccagaatcacagtgacagctgacccaggctctgtgctcatgcttccacagaaggttcacggttggcccttcccaggaagcaggcagtgccttgggcccttttccattctctctccatgctctcatcctctcctgtggtttcaatttctgccatctgccagtaactcctaatctctacctcagacttctctcctgagtgccagactcggatatctaccatgttctgggcatctccacatgaggtctcttggacacctcaaaaccaaagcttttctccccaacgacaccaagtcctttccttgaatcgccaccactgtgaatggcaccaccagccacacagttgcttaagtcagaaacctgggagtctcccttctctttcttgctcgcctttntgttttgttttgtttttttgagacggagtctcattctgtcgcctaggctggagtgcagtgacgtgatctcagctcactgccnccnccagcctcggcaacgagagcgaaactccgtc

SEQ ID NO: 99267 - DNA, 366 bp, Homo sapiens
ggagaattgcttgaactcaggaggtgaaggttgcagtaagctgagattgtgccactgcaccccagcctgggtgacagagcgggactccatcacaaaagaaaagaagaaaaaaaattttaagcccgtattggaaaagtttggggaaattttttttttaaaaggttggaaattttttcaattaaaccctttgaaaagttcaaaagaaatggaattttttaatacaaccctcccattggaaccctgttttaatggaaacaaacctttttgggctgccaaaatttggactttaaatttttttcaaactcaaaagggttcaatttttaaatggggtgggaggaaaaaataagggtgaaaactaaaacacca

SEQ ID NO: 99268 - DNA, 394 bp, Homo sapiens
  misc_feature (1)...(394): n = a,t,c or g
gnggcatgtgcctggagttccagctaattggaaggctgagacaggagaatttctggaaccctggaggtggaggttgcggtgagctgaaattgcaccattgcactccagcctggacgacagagtgagattccatgtgaaaaaaaaaaaaaaatcttccgaagagtgttctcacttctttaggctaaaactcaaataccaaaaatatttaggaaatccctaaatttctagaattcaaccaccccatggcccaaaaaaaagtttcaggggaaattaaaaaatttttccatttaaaggaaaataccccataaaatttgtgggatgcgggtaaagcagggcttaaaggaaattcatagcattaaacgcttttacgtggaaaaaaagaacgggcctcaat

SEQ ID NO: 99269 - DNA, 548 bp, Homo sapiens
tgaacgttcaagtacttagttgaacttaagttatgaaattgtaaaggaatggtgtctaccagtgacattacattaaagcttttcataatcgagttgtggtaagttgttttattttaaatttctaccgtaggaacagaatggttctgtaaaagttatttttcttactgtgatataattaaaaaatatgaccatacttttgcataaagaattgatagactatttctcttacggagcatatatgcatgcaaaattgactaaagaggactcatttaaaacatttctaaggggaaatttgagttaacacaagggtgaatatattttaagccagtttatattttaaaccactcaataatgtggttttgaaaagtgactttttagaatatgtatgtgtgtgttttcatataatctaaaatccagagcttggccagcacactggctcacgtctgtaatcccagtattttggggaggctgaggcaggcggattgcttgagcccaggagttgaagaccagcctgggcaacgtggcaaaaatctgtctgtacaaaaaaa

SEQ ID NO: 99270 - DNA, 403 bp, Homo sapiens
atacaatctggggacgaattagagtcagcgtgaaagacaaggaaagggcattttaaaatgaatacaattttaaaaagcacttttggtaaaacatccagtaatttcaatgaagcaggcagataaatggattttttgttgtatcgagaacgaaagtagctattggccaattccttgttggccctagtgtaaaaatatttgagaataacaatgagatttgcatgataaaatccattcaatcctacattgtgctaaatcacaaacacttaaaagtctatagttctaatatttggcagcttaaaaatatcctgttgcggggaggcgcagtggctcacgcctgcaatcccagcattttgggaggccgaggcaggcggatcacgaggtcaagagatcgagaccatcctgg

SEQ ID NO: 99271 - DNA, 400 bp, Homo sapiens
  misc_feature (1)...(400): n = a,t,c or g
aatacatgcggggctgggtgcagtggctcatgcttataatcccagcactttgggagcttgaggcaggagaatcgcttgaacccaggaggcagaggttgtagtgagccgagatcacaccagttgcagcctgggcaatagagcaagactctgtctttctttttccatgaagcttttctgttgttgttttaattcattgccgatttgtaaacgtgtagatcgtgttactggttcgcgtgttaaagtgcacctcttgttaaaaggtggggaacagggcacgccacttacaaatgaattcagagttactgaaccggctccccagactcaagaacttaagcgcaacgggctgggaaaaggagggggagaggagcgcanacgccgctgacctgggaactcggaggan

SEQ ID NO: 99272 - DNA, 385 bp, Homo sapiens
aatacatgtgtgtgtgtgtgtccgtgtgtgtgtttgcatcctcagggaggactcagcccaaccagccaggtgtgtgtgtgtgtgtgtgtgtgtgtgtgtctgtgtgtgtgtgtgtttggatcctcggagagaactcagcccaaccagccagctagagagcagctgccaccctctctatgtcccctcagggggctctaggataaataggccataccccgggggctgttaggttttcccacccccacgcaccttgggttggctcctaggagggctacacgcacatggcttgcttttggcctcctcctctgtggtcttgcttggagacccaagcctgccccacccagccctgtggctgtctcacgctgagcactctctgcggcaaggg

SEQ ID NO: 99273 - DNA, 422 bp, Homo sapiens
  misc_feature (1)...(422): n = a,t,c or g
aatacatgtgtgataggttcgatgtattaaatgcattttgatgtacactattttcaatttacaaagggtttattgggatgtaaccctatcataaggagcatctgtgatatggtttggttctgtgttcccacccagatctcatcttgaattgtaatttccatgtgtcgagggaggaatctggtaggagatgactggatcacgggggtggtttccccctgctattctcctgatagtgagttctcacaagatctgatggtttaaaagtgtttggcaattccctttcactctctctctttctctctcctgctgccatgtaagatgtgccttgcttccccgttgccttctgctgtgattgtaagtttcctgaggcctccccagccatgctgaactgtgagtcaatgaaacctctttcctttataaan

SEQ ID NO: 99274 - DNA, 398 bp, Homo sapiens
aatacaggggttatctagtatgtgtttgggggtatctgctggacctatgtggagtgtctgacatatttgggggttacctggaagcctgttttgggtatctgatggcacctgcctgggtgcctgtgtttaggggatctgatggtatctatgttggggtgtctgagaccactggagaggtatatgattcatttttcccagacccacctttctgaagtctatgctgcctccttttttgttgttgttattttgagacagagtctcgctctgttgtccaggctggagtgcagtggcatgatcatagctcaccgcagcctggacctcccaggctcaagtcatcctcccacctcagcctctggaggcatgatcatagctcaccgcagcctggacctcccaggctc

SEQ ID NO: 99275 - DNA, 398 bp, Homo sapiens
aattcacggtggctggagctggggctgaaggtctggtagtactgctctggggtccggacggctgcgtccggctggcagtagccctggccttgctgcccgtagtgctgatacttggcgaggttttggtaatggagggtttcctgggcatggtgccggctctgaagggcttgctgctgctgctgctgctgctgctgctgctgctgctgctggtcatagctgaggcggcccgactggtaggcatgaagattctggacccgctgccccggggccaggctggagctggcagtcagcggcctgtcatggggctgggcagtcggtgctgtgcaactcttataggagtgggccccctgcccaccaccctggacagaggaggagtaggtggaggaggtggggaagga

SEQ ID NO: 99276 - DNA, 425 bp, Homo sapiens
gtctgaccgccctcgctctccctccttttcctttccttcctcccccgcaggagttggccgggcctccagcatcttccccatccttagcgccatcctgctgctgctcgggggtgtgtgcgtggcggcctcccgcgtctacaagtccaagaggaacatcattctgggcgcagggatcctgttcgtggcagcaggtgagaggcaaagggagggggcgaccggggcggcccacctgggcgcgcacgtgtgtgtgtgtgtgtgtgtgtgtgtgcgcgcgcgcgcgcgcgcgtgagtgcaagtgcgcgctcgtgtgtctgcaaagccaccttgccccgagcacccccgggggcccggagcctttctaggcggtccccaagctccatcggcacccgctgtgtaaggagggtgtagctctcgcgcccccctcg

SEQ ID NO: 99277 - DNA, 415 bp, Homo sapiens
aatacaggttaggcagccacagctggggaggcggtaggtgtgcaccacgcggctgtagggcagtgggtttatctgcatcaggaggcggaggggcctgccggcctcgtgccggaggacacggaacttcacgccagctgcaaggatagcaagcggctgacgaggggacgcgtgggggctggccccacacatgagcagaggctgcaggtaccttcctctctgaggggcacccgggtgctgctggccgtggccacccacgaagctctccccgccccctccgtcgcccaactcctggagctggctgccaggccggcatcaaagcctcctgcagccaggcacggtggctcacgcctgtaatcccagcattttgggaggtgggcggatcatgaggtcaggagttcaagaccagcctggccaa

SEQ ID NO: 99278 - DNA, 390 bp, Homo sapiens
aaactcctgacctcgtgatctgtctgcctcggcctcccaaagtgctgggattacaggcgtgagccaccacgccctgcccatttatgttcatttttttagagaattctcctcctcccatttatgaagctagatttttttttaatttcaccaaaatttgttgacgtcccttgatttgctgatagggacaataattaaatattttccacttgtttttataaaaactgtaatggggatttggttaacagatgttgacttagcaccttctctcttttttttttttgccgggggggaaaaacaaagcaaaactgataaaaatatgggggggggcccctttaaaaagaaaccaatttaacgccggggcgggggggggatattttttttttttggggt

SEQ ID NO: 99279 - DNA, 369 bp, Homo sapiens
acgcgggatttcaccatgttttccattattgtctcgacctcttgaccttgtgatccacccacctcggcctcccaaagtgctgggattacaggcgtgagccactgcgcccgcccaagtggggcaagtgtattttttcacagcttctcacatacttccagggtgtgatcagggctgactaccattggtttggggatcctcattttgaatccttctggagaagggaaggggaagaacttgctcacagccagagatcctaattcccagtataaagttaaccagcgcattgtggttaaccagtggcctcctaacctgctgagccttgatggtccaagcctgagttctgaacctcatgcttcaggcctcactgcg

SEQ ID NO: 99280 - DNA, 376 bp, Homo sapiens
cccacgcgtccgcccacgcgtccgatctgtgtccaaatcagaggccaaaccagagctgtcttaaagctcccttaagccatctactctctcctgtccagtcctgtaacagaaatgctggtatgtgagaacagctaaagcacatatggggatttttttttttttttttttttttaaaaaaaaaatcccctttggcccttgggggggaaggggggggaaaaatttgggccccaggaaaccttgaaaacccctttcgggggttcccgggggacccttttgcccggggggaaaaaaaaattggtttttaaccaatcccccggggggggggggggaaagcccctccccccttaaaaaaaagaagggcggaaaaaccccaagg

SEQ ID NO: 99281 - DNA, 370 bp, Homo sapiens
tgtatttttagtatgagaggaggttttgccatattggccaggctggtctcgaactcctgacctcaggtaatccgcccgcctcagcctcccggggtgctgagattacaggcgtgagctaccatgccctgatgagaaacatttcttaatgaaatggacagccgtatagtgaataggggatgaagagcaagaatttctgtcactccagtcctcagctttttttttttttttttttttttaaaaatccaaaaattttttgggaaaaaggggggggttggataacaggaaaaatttttttggggggatttcccaaatttgggggcccccccccccccgagcgggggttttttcccccggtgggttttttttcttc

SEQ ID NO: 99282 - DNA, 395 bp, Homo sapiens
gggagcaaaattttggataaagctgttattgatcaagtcctgatttggggcccatgcctcagaggctatgggttggcttccagagctggttgctgcagggtgtggatcagagagctattttttctttcttttttttttttttttggaaggggctttttttttccccccccggcggtgtgtaggggcaccggtttggtttcttacacccccccccccccgggtttggggggtttttccgtcccccccccccaaaaacagagggaaaacgggcccccccccccccccccagattttttttttttttgggggggggggggttttccgggggggggccaagaggggttctttttttagaacatgagaaccccccccctggcgcccccaaaggggtggga

SEQ ID NO: 99283 - DNA, 431 bp, Homo sapiens
acgcgtccgattcagtttaaataaaagtcaacctactgtataatgtttgtttaccctgacccttgctgaacatttccacatcctcacagactatgtttgtgtcatttgtttgactaaaaatacttagtttccctggggttcccatgtgacagtacgccagtgttggcctaagctaaactcactttctcaataggactgatggacgccgctggtcgttggcttctctcccttcctctggctatgggacaaacacacccagctctacggtctctgtaagtgcctgactttttttttttttttttttcttcccacaaccaaacttttaccccggccgggttttttttgggtgtttcctggtgggggggaaaaaaaaaaattttggttggcgcccctttgaaaaagggaccccataaaaggaggcccgacaaaat

SEQ ID NO: 99284 - DNA, 460 bp, Homo sapiens
cgggacctcgaccgctcggatttccgggcacccgcgtccggccgcttcattctttgtatggcgcttatatttttcagcatctatttatcaagaaataacccatgatcgtctcagaaaataacccagtgtcctctactaatggacatttgagtaatttcctgttttggtgttgtttggtttactattacatacaagcacatgtgtttgcatatgtattcaggtatttcaggagactctgcatctgccctctgagggaggttcctagctcagtcaaaggaaatatgcattttttttttttttttttttttttggaaaaaaaattttcttcagttcccccgggggagagataagggcccaattttttttaactgaaccttcccctttttgggtgaagggtttttcccccctccccctcccaaagacctgggattatattggccgggacccccccccccttggg

SEQ ID NO: 99285 - DNA, 413 bp, Homo sapiens
  misc_feature (1)...(413): n = a,t,c or g
atgcagcccttgaaggtcaacctgctggagcaaaaaaacttgggacttgaatttgtagctccatttacatggatccattgccccagctactggagtatagcctacaatgtttatttcagtcaatattcctttatctgggtgttctgtacaatgtttattacagtcaatattccttcaaaaaaaaaaaaaaaaaaaaaaaaaaaaaaaaaaaaaaaaaaaaaaaaaaaaaaannnnnnnnnnnggggnnnnnggggnanannnnaaaaaaaannnnaaaaaacaaaaaaaaaaaaaannnannntttaaaaaaaaaaaaaaagagaaaaannnnnannnnnaaaattaaaaaaaaaaaaaaanannnnnnnnannnnannnnnnnnnnnnnnnnnnnnannnnnnaaaaannna

SEQ ID NO: 99286 - DNA, 380 bp, Homo sapiens
  misc_feature (1)...(380): n = a,t,c or g
ttcaagtgatcctccagcctcttccttccaaagtgctaggagttacaggtgtgagccactgcacctggcctaacctttaactttttttttttttttttttttttaaaaagggggccccccttcccccccccggctaaagggggggccccggccttattcccgatttttttttaagggggaaaaaaattttttgggccttggtttttggtgggaaaaggttttaaaaaaaagaaaaacctggaaggggggggaaaaaaaaaattttttttccccccnnaaaaaaaaaaaaaaaaaaaaaaaaaaaaaaaaaaaaaaaaaannggggggggggggggtttaaaaaaaaaaaattttttcccccgcggggggcggaatttttt

SEQ ID NO: 99287 - DNA, 400 bp, Homo sapiens
cccacgcgtccgcccacgcgttttaggtttgagaatggtgtgaacctgggaggcggaggttgcggtgagccgagattgtgccactgcactccagcctgggtgacagagcgagactccgtgtcgaaaaaaaaaaaaaaaaaaaaaaaggctgtggggggtccttggttttttcaaaaaaaaaaggtctgataaaaagaacccccttttaaaaaaaaaaaaattttttttgttgcttttataaaaaaaaaatgatgagggggctttttaaaaaaaaaaaacaccctctcgcaccttttttttggcaaagataaaaattggggggttaagagccttctttttggggaggggaaaggggcaaaatcccgaatcggggagaggcctctttctcctgtgaaataga

SEQ ID NO: 99288 - DNA, 375 bp, Homo sapiens
  misc_feature (1)...(375): n = a,t,c or g
cccacgcgtccgggaacataaccaaagttcacaaacataacgagtgagagaaacacattcaagcccaggtctagttgactttaatgaatctttggtgtggaatgaaaaatgtgaacttcttactcatagtgtggtttttaaatatatgcagttgagtgatgattggatactattcatcatattgcctataatatatatttaccgataagcagtgagtgtaaaattgttgtagcttgaataagaaaccacttttgtagttttaaccagactttctcttanaaaaaaaaaaaaaaaaaaaaaaaaaaaaaaaaaaaaaaaaaaaaaaaaaaaaaaaaaaaaaangggggggggggccttttaaaaaaaaaccttttg

SEQ ID NO: 99289 - DNA, 413 bp, Homo sapiens
  misc_feature (1)...(413): n = a,t,c or g
cggtccggaataaccgcgccgacccacgcgtacgcggacgcgtgggtttggctaacactttttcctcccctcaaacactaccaataactagatcaactgtttatctagttcaaccatctcatttaatgaagaaactgaagcctgagttctttggtctacttgtagtcttcttgattgaagaatggtactatcttttttttttttttttttaaaaanaccccttttgcccccaggggggggggggggggcccaattttgtttttttgggcccccccccccccgggttaaaagaaatcccccccccccccccccgggggggggggaaaaaaaagccccccccccccccccgggggggtttttttttttttaaaaaaaaaggggtttccccgggggggccgggggggtccccacct

SEQ ID NO: 99290 - DNA, 382 bp, Homo sapiens
  misc_feature (1)...(382): n = a,t,c or g
ggtttcaccgtgctggccaggatggtctcgacctcctgacnnnaggatccgcccccctcgggctcccaaagtgctgggattacaggcgggagccaccacgccctgccttttttttttttttttttttttgaaaaggggatttttttttcccccccagggggaaagaaaggggggggttttggttaaagagaaaccttgggtccgggggaaaaaggaattttttcccccaagcccccaaaaaagggggtaaaagggggggggccccccccccggggaaaattttttgggatttaaaaaaaaaaggggggttacccggggggggcggggggggccaaaattccggggcccggttttccccccccctggccccccaaaatttggg

SEQ ID NO: 99291 - DNA, 383 bp, Homo sapiens
  misc_feature (1)...(383): n = a,t,c or g
ctggctaatttttgtatttttagcagagatgggatcttnnnatgttgcccaggttggtctggaactcctggcctcaagcaatccgcccacctttgcctcccgaagtgctgggattacacacataagccaccatgcccggctccccaagtcattaaaccctcaataaatattctcattgtcaatcanaaaaaaaaaaaaaaaaaaaaaaaaaaaangggggggggggaaaaaaaaaaaaaaaaaannnggggggggggggggcgggaaaaaaattttttttttccccccccggggaaaaattttttttttttttttttgggccccaaaaaaaaaaggggggggggggggtataaaaaaaaggggggggaaaaaaacgccctttc

SEQ ID NO: 99292 - DNA, 382 bp, Homo sapiens
  misc_feature (1)...(382): n = a,t,c or g
aaaattaatgcttgggttttcattcattttcaattatggaacataagggcaagtttttattttagtacttcactgtacaaagacctggactaaaagacctcagaatgcctctttnnnnnnnnnnnnnnnnnnnnnnncattttttttttttcctcttnccctttttttttttcaccctctctccttggttcccattctttttcttttctcttccctcttcctccctttttttatcttttttcttctctccccccccctcttttttttttttcccctgaccgggggggaccacacataattggatcatacacccctttaagacaaaacaagttctgcctctgatgtgttttaacccccttgggggatgcttactccccctttc

SEQ ID NO: 99293 - DNA, 347 bp, Homo sapiens
ttgcaaagaaaggaaggggaaaagtttggggctagctgacagtaagaaagactgggagacggacaaggagagacccaaggtgatgggatgaaaaaagaagaaaaaaaaatttttgatgaatgcgattgaaaaaagattgggggccggatgcagtggctcacgcctataatcccagcaggcgtgaggccaaggcaggcggatcacctggggtcaggaattcgagaccagcctggccaacatggcaaaaccccatttttactaaaaaaaaaaaaaaaaagggggggccgttttaaagaatcaagttttacttccgcttggttgaaaggaaaaatttttttattggggcc

SEQ ID NO: 99294 - DNA, 366 bp, Homo sapiens
  misc_feature (1)...(366): n = a,t,c or g
acgatttcatatagttggaatcatactgtatgtatgtagccttgcctttccttccttcctttctttccttctttctttcttcttcttcttttttttttttttttttttttgggaaaaagggggttcccccctttcccccggggttttccaacccggggggataaaaaaacccccccccttttcccccccaaggggcaaaaaaggggggggaaccccccgggggggggcccttttccccttttaaaagggggcccttttattaaaaaaaggggggggggaacaaaacgggtttttttccgggggggggggccttttttttttggggccaaaaaaaattccggggggggggggggacaagggtttttn

SEQ ID NO: 99295 - DNA, 410 bp, Homo sapiens
gccaccccaccgacctctcagccagcatgccccaaacctgctcctcttcctgggctgggtcccatttcaggcagtggcaccaccatccacttggtcacccaagccatgggagtcatcctggactcagaccagggagactttcagccccacctcctgaactgctccaagctcttccatatctcctcccccatcccctaaagctagtttccctgcccacgcctctgcccctccagggtattctccacacaggctggcagagctggcatgctaaagcagagtaactgagccgggaacagtgggtcacacctgtagtcccagcactttgggaggctgagacgggcagatcgcttgagtccaggagttcgagaccagcctgggcagcatagtgagacccccatctctttaaaaaa

SEQ ID NO: 99296 - DNA, 398 bp, Homo sapiens
cacccgcctcggcctcccaaagtgctgggattacaggtgtgagccaccgtgcccagccatgagcggtcttgaaaatgaaaaatggtcttggccacagaaaccaggtatgagggagtggttggaatggtataaagtcatcactgttagggaaacagtaactttaaatgcatgttaacagtgggtctttaaaaatgaatgtcatttggttaaagagttttgctgggcattgagataatctgacagcatctccacttcctgtttttttttcttaatctccactttttttttttttatgaggaccgcccctaaaatgctggtaggcttttttccaacaaaattgcggccaaagtaggatgctggggaatgctgtttttaccaaaagcttgtaaaaaaaaggg

SEQ ID NO: 99297 - DNA, 417 bp, Homo sapiens
  misc_feature (1)...(417): n = a,t,c or g
agcagctggcctgaacttgaaggtacaccaggtagcttgcgtgggccaggagaaggtgattctcttctatgcctctctccaacgccctgcttctgatgctgctcctctacctgtattgaggggaagatacatccctaagaagttccctgaaccccattctttgttgtggctaactggtccccttggaatttttctactaattttcaattccccctctcacctggtgaaatcttgaatcttactgttcaataaaagttcttctaccgaanaaaaaaaaaaaaaaaaaaaaaaaaaaaaaannngggggggggggaaaaaaaaaaaaaaaaannaggggngggggggggggggggggnanttttttataaataaaaataaaattgcggggggggggggtattttatagaggaggggaag

SEQ ID NO: 99298 - DNA, 403 bp, Homo sapiens
cccacgcgtccggaaaaaaaataatatttctagagatagggtataagataggtggttgttgtgtttgagccattgggagagggtgaagaggagtgagttttgctttgtgaacatcgagtttcattcattattcatttactcaacaaatacttatcgagcatctaatatgccaggcactgttccaagtgctggagttgtagcagtcaaaaaaaaaaaaaaaaaaagaaaaaaaaaaaaaaaaaaaaggggggggggcccctttaaaaaaaaattttttttcccccggggggggggggaatatttttttttttgggggggcaaaaaaaatttttgggggggggggtttttcaaagatgcggggggaaaaaccccgcggccacccccattttttttccttggagag

SEQ ID NO: 99299 - DNA, 461 bp, Homo sapiens
  misc_feature (1)...(461): n = a,t,c or g
tgacgtaccggnccgnnnntcccgggnggagnnaagcgtccggagaaacattaattcacatttcaggaatgataattcactgtgaataggcttttggcatatactcagtgaattcacttacgttgactcatttgtcacccagaactaccctgggtgccactgcaagtgtatggctgtagaattaggagtgactgctatacctaaggtgctgtaactcactgataacccgcatctgcctgcctgagtttggtctgcccacaccaggctgcttttgcactgctaggagaccataagaaactaggccgagcggcagcaaccaactcttcagcacacattgaccaagcacttttattttatttattttgagacggagttttgctcttgttgcccagggtggagtgcggtggcgccatcttggctcaccccaacctccgcctcccgggttcaagcgagttcctgcc

SEQ ID NO: 99300 - DNA, 415 bp, Homo sapiens
  misc_feature (1)...(415): n = a,t,c or g
cagctcttcaggaatacatcacttgagtttcaggcaatttagacagcagattctgactttataaaagtagatcttttggctaggtgttgtggctcacacctgtaatcccagcattgtgggaggctgccacaggtggatgagcccaggaactggagaccagcctgggcaacatggcaaaaccccggctctacaaataaaaatgttttaaaaagaagaagaaaaaaagtaggccttctcctcattattacagtggtgagtttgacaagccttttntnnntaaataaatttagataaaaatatattaattggggggcggcgcgtttaaaagataaaattataaaagcgcggggtggagagggatatgttttttttggggggccactaaaaataattcgggcgccggtttaaaaacggg

SEQ ID NO: 99301 - DNA, 386 bp, Homo sapiens
  misc_feature (1)...(386): n = a,t,c or g
agactatcgtaagtaggatccattccatatactgtcaccaaacccagacactattgaggatgccaacaagagctttctgacaggaacctgatatagctgtctcctgagaggctctaccagtgcctgacaaatacagagatggatgctctcagccaaccattggactgagcatagggtccccaaaggaggagctagagaaagcccccaaggagctgaaggagtttgcagccccataggaggaacaacaaccccccccacacacacacacacaccctacaccaccaccccacatcttgagtgcaatattatggttaaagatagggatatagggaagtagaaaaaggtttacacaaaacataaaaacatagaacatggttctaatgttn

SEQ ID NO: 99302 - DNA, 412 bp, Homo sapiens
  misc_feature (1)...(412): n = a,t,c or g
atgcagtggtgaaggctgatttacaccagcttccttacttccttggtgagttagccagtaagggatttcccaaggaaatttctacagattctgttgtttctcattgacattgntttttttttggttttttttttttttttttggaaaaaaaatcttgtttttttccccaccccccaaaagggggggggggggcccaatttgggttaattgaaaccccccccccccgggtaaaacccaaaacctgggtcctccccttttttgggttccccctttaaaaccaaaaaaaacccagaataatttttttgggggaaagggggggaaaaaaaatctcccctttcccccccttttgggaaaaaaaaaaaaaaaacccccaaaaaaaaaaaaaaaaccccctggggggggaaaaccctcg

SEQ ID NO: 99303 - DNA, 400 bp, Homo sapiens
agttttattagaagtcttttgccagtgttcaatataggcagtttcaactaagaggaataaaggaatgttgtattatttcctaaatatataatgtagatgccttacatataactgctatgtaaatccaagacaaaaattactgaagttatttttatcagggtaataataagtagaggagaagcactgtttagggattttatttgacattacctgatacagagcagttcttctatggcttcagagagtgtgcagcttgatgtggttatgaaaattccactaacatggccaggcgcggtggctcacacctgtagtcctagcactttgggaggccgaggcgggcggatcacaaggtcaggagatggagaccatcctggccaacatgatgaagccccgtctctaa

SEQ ID NO: 99304 - DNA, 89 bp, Homo sapiens; identical to SEQ ID NO: 98757

SEQ ID NO: 99305 - DNA, 394 bp, Homo sapiens
  misc_feature (1)...(394): n = a,t,c or g
cccctgccgaggaggaggtgtggggcttagttttgatctatgtgactcgctgtgaggtggtgtatgtacaagcacttcattgcccttgagaagctggtggtgccaggtggccacagcgtggatatgcattgttgaacgaaatggcctcaggcaggccttgggggttcctggatgaggagttcatttagtcctggaatggaaattgagtatggtatgtgcagaagacgatgagctttttccactctgttcttggaaaaagttttttttttttctatttttgagacagtctcgttctgtcacccaggctggagtgcaggggcgcaattttggctcactgcaacctctgcctcctgggttgaagcgaatctcctgcctcactcgcccgagcagttgn

SEQ ID NO: 99306 - DNA, 89 bp, Homo sapiens; identical to SEQ ID NO: 98757

SEQ ID NO: 99307 - DNA, 379 bp, Homo sapiens
  misc_feature (1)...(379): n = a,t,c or g
aagtgatctgcccacctctgcttcccaaagtgctgggattacaggcatgagccaccacacccttcattcctttttatgactaaaaatattatttgaatatgccacattttgtttatcagttgatggacacttggatattcatactttttggcaattatgaataatgtgactatgaatttgcatgtacaagttttggtgtagacacatatttttatttgtcttaggtatatacctaggagtatacactcaagtgtatttaaacattttacagagttcagtgcacatctcctcagtcctgagccttatgagttatctgactgttaaccccgaaaggtacacactggatctccttcactcattttttaaccctgactgggan

SEQ ID NO: 99308 - DNA, 425 bp, Homo sapiens
cccacgcgtccgggcagattttttttgatactgggagacagaggttgtagtgagctgaaatcatgcgtctgtactccagcctgggtgacagagggagactccatctcaaaacaaaacaaaaaacaggtggaacttcgctcacctgccgctcatctgctgggcgggctggttcctaacaggccacaggccagtactaggattggggacccctgcactaaaaaactgctagaactaataagtaagttcagcaaagcggcagcataaaagatgcagaaattgattgttctgtatacaagtaatgaacaaagtagaattaagaaaacaatttaaaaaggccttaaagagaataagatatctagaaataaattgataaaagaagcgcagacatgatcttgaatactagaaaacataattgaaagaaattg

SEQ ID NO: 99309 - DNA, 402 bp, Homo sapiens
  misc_feature (1)...(402): n = a,t,c or g
cgaaccaagagattttaaagaatgtggagtcttccagaactgttcagccacatttcctagaatttttgctttcccttggctggtcagtagatgtgggcagacaccctggttggactgggcatgtttctaccagttggtctattaattgttgtgatgatggtgaaggatctcaacaagaagaagtgatttcctctgaagatattggagctagcattttcaatggacagaagaaaagcatgcatatcattaaacaaataaaatactttttatcacaccncanaaaaaaaaaaaaaaaaaaaaaaaaagggggggggcctttaaaaaaaaaaaattttaaggccggggggggggaaggattttttttttttttgggggcccataatttattttggggggcgggtt

SEQ ID NO: 99310 - DNA, 395 bp, Homo sapiens
ctcccctttctccttcccctccccatcctcctctttctctttcttctccttctccttcttcttcttccttcttctccttcttccttctccttgttcttcctcttcttttttttttttttttttttaaaaaaaaatttttgtttttccccccgggcggggggggggggggggaattcggttccctggcacccgggttaaaaaaacccccccccttaattttcccaaaaagtgggataaacggggggacccccccaggcccgggtgatttttggggattttgaaaaaacggggttttccccatggggtgggggggggttcaaacccccgggctcaaaaaagggaatcggttcgccccggcccccctttaaaaaaaaaaaaaaaaaaaaaaaaaaaaa

SEQ ID NO: 99311 - DNA, 442 bp, Homo sapiens
  misc_feature (1)...(442): n = a,t,c or g
ncaacgtccgtacngnctcnaanattcgggccgacccacgcgtccgcccacgcgnacggttttctttcttttacatgctaaaaagggaacccctaggctaggtgcgggggctggggcctgtaatcccagcactttgggaggccaagacaggaggctctcttgatgccaggagttgaaaaaagagaactccttgaggtcacttactcaaattttaacaacccataatattcaaagtacctgaaagtaaagcaagaccgcgtgttcattcttgcatttctttatccagccactcagacattgttagtttttcttagttttcctctcagggttctcaaatattaaaattcagccaaatttgaatttatggtttaaaagaatcataaccaaaaccaagggggcttttccctagggatacaaaattggttcagtatctgaaaatcaa

SEQ ID NO: 99312 - DNA, 418 bp, Homo sapiens
  misc_feature (1)...(418): n = a,t,c or g
accaaatcgtgcgccagtggaagtacaatgatgatgacgacgaccagctgttctacacacgggtctacctggacccaggactgagggtagggaaggcagaggagtgggcgcatcccgcagctctgtgggagtggaggcctcaggctgaatgggatttggggagcaaagggggttgcaaagagaaaaatgtgtgcctgggcgtggtggctcacgcctgtcatccaagacttttgggaggcttaggcaggaggattgcttgagtccaggaatttaagaccagcctggacaacatagttgagacctcatctctacnnnnnnantaantaaaaaaattaaattattaaaaaaaataaattaaataaattatntggggggggggggttttaaaaaaaaaaaccttactcccccccccggccac

SEQ ID NO: 99313 - DNA, 388 bp, Homo sapiens
  misc_feature (1)...(388): n = a,t,c or g
aggggctcggggacaggacagcatcaataggcaggggccgaggacggaggccttcccgacagtggggtgggttgtacattcaagtgtgaggtgaaccctttggtggggagaggccccctncnnccttncccnccccccccctccccccccccctctncttctcttcttcgtctctgctgtccccccctctccctccccgtctctctctttcccccctcatcgtccctgctactctcctccctcccccaccctctcctccctcccccctcccctcctcttccctcctcccccctcctctcccccccccccccctcgcccttctgctccctctccccctccctcctctccttttttttcccaccccctccccttccccctccctgtcccc

SEQ ID NO: 99314 - DNA, 464 bp, Homo sapiens
  misc_feature (1)...(464): n = a,t,c or g
ggttagtncggtggacttcctacttgcctggcaccgctcccattttcttctcttggtttcttcacccacctctgcttcccatttctccccttcccatccccatctaccttgcgccccatgtcctatagtcttatcagagcctgtagccccagggggcccaggtgaggggctgctcctgcaggataacgcaatctccactgagatccaggctttgctttcctcctattacagtgacaggtgatagggctgggtaggcttggggcctgagctctgactagcccaaccctcccccaaccccttcctggtgccacagttattgagccgctggatgacatctcagcggtgacagacattctgacccatcgggagggcgcaaggctggagacacccccaccctggctggcaatgtttacagaccagcctgccctgcctaacccctgctcgcctgcctcagtgggcccagc

SEQ ID NO: 99315 - DNA, 470 bp, Homo sapiens
  misc_feature (1)...(470): n = a,t,c or g
ttcttgcctcgtgcggtggaattctttaaatgttgcttaatgtagttttagggaattatactttttctaaaatttttttctgacataagtaccctctaacactgaaaggttgtcccctctcaactgcatgctgaatactggatcctagactcttgagagctaaataaagtatatcttttagctgcagtttcatattaaaaatgaatttttaacaatctgcatatttagatgaaatattagggaatagttactaaatgtacaaaatggtataagaaatgtatgttcgtgtcctcattatactccattccataaggtagtaaaatacttgtctgtttttcttacagaagttgattcaagtcagttgagacgccagttgtgtggaggaagtcaggccgccatagaaagaatgatccactttggacgagagaaagtacagattcttcatttagcattgatttacttcttagttn

SEQ ID NO: 99316 - DNA, 443 bp, Homo sapiens
  misc_feature (1)...(443): n = a,t,c or g
aaccagcacaacaggggcttctttgattcctgcgacggcttcttcactaactataactggcgggaggagcacttggagcggatgctggggcaggctggtgagcgccgggctgatgtgtacttgggcgtggatgtgtttgctcggtggaacgtggtcggaggccgattcgacacagacaaggggggtggtggctttctgtccaagggccagcggcccagtgcctcccctgggacctcatttcctcatggaccttccattcccgtctgcacctcaaaggaatgacagcagctgttcttcccagagtggggatcccgtggcactgagaaacaggtgtcctgccccggccaagctatgtccccactgaaacccctttcccggctatttctacaatcagataatgtatttttgtgtgggtgttaccagacagaggcgcgtcgttcccn

SEQ ID NO: 99317 - DNA, 458 bp, Homo sapiens
aactgttaccgggccccccttcggtgtgtcccatcgcgccagcacctgatattccccgctgtctgcagtgacttctgcggtcaggtgctgcaccgctggcggcgtgacaccattcaccgtgccactctgttcgccgtcaaagtgcgccccgttatccacgatggcctctttttccggcacatgctgcacggcggtgatggcatacgtgccgtcgtcgttctcacggatactcacgcagcggaacagtcgctggcgcagcgtcggcagcttcagctcccatacgctgtattcagcaacaccgtcaggaacacggctcacttttaccttcacgccgtcggtgacggactgaacctccacgctgaccggattgccacttccgtcaaccaggcttatcagcgcggtaccggaggatggcagcgtgatttcacggtcgagcgtcagcgtccgggtctggctgt

SEQ ID NO: 99318 - DNA, 468 bp, Homo sapiens
  misc_feature (1)...(468): n = a,t,c or g
cttgctggggcaaggcagaagggggccccttctgccttccctggccccctgccttcgtctctaaactaaagccagtgttcacctcatcacagtgtactgtgccagaaagtacaggacttggaaagtgggactttgcagtccaattggaaaaaaataacaccatgggatgagaacgtgtgtgtgtgtgtgtgtgtgtgtgtgtgtccgtgtgtctcaatgtgtgtctatgtgtgtgtgtatgtgtgtctgtgtgtctgtgtgtgtgtgactgtgtgtatgtgtgtgtgtctgtatataaaagggctgctctttctcttagccaagaaggagaccgcaggctctttctttcactcacagctcacctgtttgggtgtgccttgtgcctttactattcacccagtaccatttctcccccagtgcagaagccactgtgtgtctggggggcgcttctggccaggtgtgcttttn

SEQ ID NO: 99319 - DNA, 427 bp, Homo sapiens
  misc_feature (1)...(427): n = a,t,c or g
tgtaccngtccgaattcccggnnnaannannnacgggtgcccaaccttggccaccacggcgccgcgtcgccggcacgccgcgtgggcttcagacagcgtcagccgcccgggcacgaagaacacttggcctggggaccacagcgggtcaccgaccgagggcagggtgggcggagaggggcggctgacacccaggaggcggagttggggtgcgggaccgcagaggtgctggatcgagcttggagtgttgctccatggtccaggctggagtcccgtggcatgatcatggctcactgcagcccctaacttccagctccagatggagtctcgctctgttgcccaggctggagcacagtggcacgatcttggatcactgcaagctccacctcccgggcctcagtctgcagagacacagaagcaaatgattgtc

SEQ ID NO: 99320 - DNA, 417 bp, Homo sapiens
aaaactaaggaaatactgaatcaagtatgaactttagttaataataacgtatcaatattggctcattaatagtaaatacgccataataatgttagtaataggtgaaagtgaatgtggggcatatgataactctttgtacaacttctctatcaatctaaaattgttctttgaaaaaataaagttgtcttcttttaaagttggactgtcaggtcatttggcttaaaatccttcaatggcccaaatattccattcctcaaacatctggtgctccctgacggtctattcatgcttaaaactgaggcaggccaggagcagtggtgcatgtctgtaatcctagcactttgggaggccgaggagagtaaatcacctgacgtcacaagttcgagaccagcgtggccaacatggtgaaactttgtc

SEQ ID NO: 99321 - DNA, 423 bp, Homo sapiens
cccgccactatgcctggctgaggcagaagaatggcgtgaacccgggaggtggagcttgcagtaagctgagaacctgccactgcactccagcctgggcgacagagtgagactccatcaaaaaaaaaaaaaaaatttttaggtggctccccattgggaacaaaaacaaaggggggggcccctccccacccggggaaaccggaccttaccagtgggggggccccgccgggttataaaggcccctttccctttagtggggacctccgggcccaaaacggggggtggagggaccctttttggcgggaagaaaaagggccctaacaaaaaaaattaaggtccaggggctttttttttagggcccgggaaaacagccttttcaaacatttggggggcatcccggccggggatacttttttctttgggggg

SEQ ID NO: 99322 - DNA, 433 bp, Homo sapiens
ccgcggggacccacgcgtccgcaaagtacattccttctatttctaacttgttgagagtttttaccatgaaaggatgtcagattttctcaaatgcttttctgcagctattgagatgatcatgtgatttttgcctttcattctctctctctctctttttttttttttttaaaaaaggaattttttttttggtcccccggggggaaaaaaaggggggaaattaaaactaatggaccctttgccccggggctaaagaaatttctcggccccccccccccaaaggggggggaataaggggggggcccccccccggggtttattttgatttttaaaaaaaaacggggttttccctgtggggttaggggggtaaaagacccccccccccgggagaggtgcgggggggcgccccacaaagggggaggataccgggggggcg

SEQ ID NO: 99323 - DNA, 409 bp, Homo sapiens
  misc_feature (1)...(409): n = a,t,c or g
cagggaaacaacagcacaccaggcagatttagttatgtccatcggggaacttacagcctagcaaggaaggcagcaattcaacctgtaagtctaaaagtgatgggtgtcatgaaaagatgtgtgtggcggcgtcctgactggcctgtcaggggtcctcaccagtcctgagtaccccaacaactacccgaacagcatggagtgccactgggtgatccgggccgctggccctgcccacgtcaagctggtgttcgtggacttccaggtggagggcaatgaagagtgcacctatgactacgtggctgtgcttggggggncnnnncccacccntgtgcaccaatattgtggcagcatcagtgccccctatcttttttttttggccaagaacatcatgagttattctcttccaaat

SEQ ID NO: 99324 - DNA, 432 bp, Homo sapiens
gagggggttggcaagtacagtttgtgtccgagccctgcagcctctccataaacggagtgatcttcggcttgacatccacagatctgcttttccacctgggggccgaggagatcagtaggtaagaagtgtgttccaggccccaagcaggatgactggctttctggtcccagccctttctgcagccaagaaaatcaaggggctgcttaacggtcttgaccagagagagctgaaagcagcaagctgtgccagaccctctagccatctgagtttctctgtacccaaggggaggggttggatgcattagtttctgttaccacctctctaaactgcgtttgagaccccaaagaaccacgtccattctgtctttgcacttaaaggcatcaaaattcatctacattttcttttctgctccccttttttttcatttcccat

SEQ ID NO: 99325 - DNA, 428 bp, Homo sapiens
  misc_feature (1)...(428): n = a,t,c or g
ngaccacccgantttcctcgccctccgctggggccacatccgactgcctgcctcaggcccccgggacacagccaccctcttctctaccttggacacccagctgctaatgacgctgtatgtggggaaggatgaaactggcttctatgtctctaaagcactggtccacacaggagtggccctggtgcctcgtggactgaccctggcccccgcagatggccccaccacagatgaggtgacactccaagtctcaggagagcgagagggctcacccagcactgctgttagatacccctcaggcagtgtggccctcccaagccagtggctgctcattggacaccacgagctacccccagtcctgcacaccaccatgctgagggtccatcccaccctggggagtggaactgcagagacaagacctccagagaata

SEQ ID NO: 99326 - DNA, 415 bp, Homo sapiens
gtgcagcctgtggaagtatgcttttcaagataacgagggcatgcattgtccatgggaggaggaggagggcctgggtgagctgcacagcttccactgtcctccgggccaccgtctccggcttcagtgggggaaagaggttgggaaacctgactctcatgccctggaacatctcggtgctggtgtggaagggcagcactgtggtggcgctgactcccggacagtccagcagccccagggtcaggctctccatgaaggcgaaggctgacgctttggatgtgcagtagtcgatggcaccggggatggcagacagtgccagcacggagttgaggcacacgatgtggccattctgcagctccagcatacgtggcaggaaggccttggtggtccagaactggcccagggtgttgatgtgttg

SEQ ID NO: 99327 - DNA, 406 bp, Homo sapiens
  misc_feature (1)...(406): n = a,t,c or g
caaccagatgcacaaagctccccacatacccagacacagcacaagcacatggtgttcaccatgttaagaacagcaatagccacagaaaaagtaagcacctactatgtgctaggcactctgctaaacactttcccttcacaatgtcatttaatctgaccctgaggagtaaattgagagtggcagtgtaattccacttaaaggtaggaaaaatgggctagcttgatggctcacgcctgtaatcccagcactttgggaggccgaggcaggtggatcgcttgagctcaggaattcaaggccagcctggacaacatggtgaaaccccatctctaccccnnaaaaaaaaaaaaaaaaaaaaaaaggggggggggtttaaaaaaaaccaaatttaaaccccggggggggggac

SEQ ID NO: 99328 - DNA, 463 bp, Homo sapiens
  misc_feature (1)...(463): n = a,t,c or g
ccgtattttnccgctccggatgccaatccgtnccatcgacgcgtccgactttggtgagtgctcacaggctgcaattaatgataatgtggtcatagtatatgaactcttagaagaaatggtagacaatggatttccactggctaccgaatctaacattttgaaagaattgattaaaccaccaacaattctacgctctgttgtcaactctattacaggcagtagtaatgctggggacacactccccaccgggcagctgtccaacataccatggcgtcgggcaggggtaaagtacacaaacaatgaagcctattttgatgctgctgaagaaatagacgcacttatagataaatcacgatctacagtctttgcagaaattcagggggtcattgatgcttgccttaaactatctggaatgcctgatctctccctttctttcatgaaccctangcttctggatgatgcc

SEQ ID NO: 99329 - DNA, 429 bp, Homo sapiens
cccggtcgacgatttcgtctgaggactgtgaagcaatctttgcgaggccttttgtctgttcaactctcccgcgtatcgtctgtttcttcggcggcggacagtgttctgtaatgtgtctcccgttgcccgagctaaaggttttcctcgacggagtctttagaataccgtggtagaggcagtctccacaccactgtgctcgaacagctctatgaagaggcctatgtggagaggagaaaaagcctccaccaacagccagcaccaacttgccagccatatatgaactctcgctatgttgcctcggctgggctcaaactcctgggctcaagtgatcctcccacttcggcctcccaaaatggcgtcttgctctgtcacccaggctggggtgcaggggtgtgatctcagctcactgcaacctctgcctcctgggtt

SEQ ID NO: 99330 - DNA, 423 bp, Homo sapiens
tttcgttatcaatagaatggaatgtctgggttacaatatggggttgtagagaccaaggtttgatcatgcagttggagcctccaggtatcctgcttcagagaaaatagattataaaatttcttatcagacttaagagtctgctctatcagtaactccaaaagggaggagggtaaaatgaggcatgtccagttccccattcccatcatggcctgaagtagtttttcaggttaagtttggaatgcccttggctgagaggaggggtccattcagatgattgtggggggaccttagaattttaattttggtttacatagctacatttaaaaagtttcaaaaatgttaattttggccgggcgcggtggctcacgcctgtaatcccagcactttgggaggccgaggcgggcggatcacgaggtcaagaag

SEQ ID NO: 99331 - DNA, 431 bp, Homo sapiens
tttcgtgcaaattagtatttttaagtcaccacttaatatataggcacatcccatcttaagaagaaaaaaaaaagaaaaaaacccccctcccaaaaaccttcctatttgggcttggaggggaaaaaaaaaaccggggccaaaaaaaaaatttgcctgcccggttcccaaccgggcgggatcctggggggccccaaccggtttgggattaaaacggggggggccccaaccgggcccttccttgggccttggggccccgggaaaaaaagacccggcccttttttagggactttttttttttttttttttttaaaaaaagaaccccccttggcccccccggtgtggaggggggggccattttttttgttttgggggggccccccccccggggagcccccttttttttgccttggcctgggaaaaaaagggccccg

SEQ ID NO: 99332 - DNA, 224 bp, Homo sapiens
tttcgtgcccggctaatttttgaaaattaagaggagatggggttttaccatgccgagcaggctgactttgaactcctgagctcaaatgatccggctgccttggccttccaaggggctgggattgcaagcatgagccactgctcttggcctggaaaaaattttaatatgttttgctgcatctggaaaatgaaaagactagccatacactgggagtgtattgctga

SEQ ID NO: 99333 - DNA, 406 bp, Homo sapiens
tttcgtctcacaactgaacagttggctcccaaaagacagtgcacagtttggtgcccttaactctattacatacttttcacaagacacacttctttttctatagattaaaattcacctatagaaaactgttactcattttcttaaaacataacaatctccaactacatgcagagcatgatgtctatgagaaggtcaccctcttcaaagagtttatagcacagtgttatggggggatctccttcctttttttttttttttttttttttttttggggaaaaaggacttttttttttttgcccgggggggccaaatctgggtaaagggaaccccccccccccggggaaaaaaggattccccccccccccccccccgaaaggggggaataacggggcccccccataaaggt

SEQ ID NO: 99334 - DNA, 455 bp, Homo sapiens
  misc_feature (1)...(455): n = a,t,c or g
ntggacggactggaattcccgggtcgacgatttcgtgggcagagatgctcctcacctcccagacggggtcgcggccaggtagaggcgctcctcacatcccagacggggcggcggggcagaggcgctccccacgtctcagacgatgggcgacggggcagagacgctcctcacttcctagatgggttggtggccgggaagaggcgctcctcacttcctatatgggatggcggccgggcagagacgctcctcactttccagactgggcagccaggcagaggggctcctcacgtcccagacgatgggcggccaggcagagaggctcctcacttcccagacggggtggcggccgggcagaggctgcaatctcggcactttggaggccaaggcaggcggctgggaggtggaggttgtatcgagccgagatcacgccattgcactccagcctgggcaccatt

SEQ ID NO: 99335 - DNA, 413 bp, Homo sapiens
  misc_feature (1)...(413): n = a,t,c or g
naattcccgggtcgacgatttcgtttactgtaccatttggagtcgggggcttgcagggattccgaggtcaccaccagaagtgtgcaattggaatgtgccaggaatgatcgcctgggcttcaccacgtggactttctaaggcacttgttttctagggttcaagtgcacattgtggagacactagtccttactgcatcctcctgaatcttttatagactttttttttttttttggggggggggtttcatttttggtccccctggcggagggcaagggccaaaatggggtttatttaaaccccccccccccgggtaaaaagaatttccccgccccccccccccgggggggggggaataacggcccccaccccccccccggggttatttttgttttttgcgcttgaaaaggacaaaa

SEQ ID NO: 99336 - DNA, 432 bp, Homo sapiens
  misc_feature (1)...(432): n = a,t,c or g
gtgtaattgccgtaccggttcggaananccgggccgacgatntcgnngctttgctaacaaagacttagttgggggttatcttagcttttcaaattcattttcacccacttgccttgctctgtttataatagattaaaacaacctaaattcattttaataaaatctttgtttgaccaaactgttccagctaactaaattgagtgctccaaagtcaagccggcttaaattccaatctcagttcagccacttaccatttacacaacactgggcaaattaacctctcccaatctcaattcccccatctactaaatgggtataaaacctactttgtagatgttttgtgagaattacaaagaaattgcctggccgggtgcagtggctcactcctgtaatcccaacactttgggaggcagaggcaggcatataacctgc

SEQ ID NO: 99337 - DNA, 403 bp, Homo sapiens
tttcgtgcttggacccgggagccggaggttgcggtgagccgagatcacgccattgcactccatgctgggtgacaagagtgaaactccgtcttaaaaaaaaaaaaacctttccctgcgggggttttgatttaacccccttttttggggttgggggggaaaaaaaatttaggccccctttttttggggggatttaacccttccggttttttaacccccttccttcccctccaaaggtttttttagcggaagactttatttgattaaccggccgaggcttttaaagggggggggttggaaaaccctggggacctacaacttaaacctgttttaacgggaactgggggaatgtggaaacaaaacaaaacatcgggggagggcctcaaaactggaaaccatggctacc

SEQ ID NO: 99338 - DNA, 423 bp, Homo sapiens
tttcgtggagcagccaggaaggtgaggggaaagcgacctccccagcacaggcagaagtcccgggtcacaaggacaagcgggtagagcagatgaagcctgcagggagaccgtgggagtaacgacgaggttgctggcagaagcagtttcagggcccggaagcctgactgcagcaggaagccgtggacggggaatgaagacaggagtgcggtggagaggaaaggacatgctctgctcctaggaaccccaagagagctgctctgtcctgacctgaaggagcagagatgaggctgagctaagagcagtacagccgggtgtggtggctcatgcctgtaaccccgacactttgggaggctgagactggcagatcgcatgagcccaggagttcaagaccagcctgggccacatgatgaaacgctgactcta

SEQ ID NO: 99339 - DNA, 426 bp, Homo sapiens
  misc_feature (1)...(426): n = a,t,c or g
tttcgttgggaatggtgtcctccagatgtgtgatgaggctaaggcactgacttaaaatcccatttcctagtggtttgactgcaattttgtactatcgatccaaataatttgtaaaatatctcagggagaagacccagcaaaatgtgttcaaatagtagtttatttattatgttgaaaatgcttaagaaaaaactctcagacttctcttaaagcaacagatgaattcctgaaaggtgtttatatactgtgccttcacaaatatagtcaaactccaatacatagacggaattttctacttgtattctgaatttcagtgatgaagatttattcatcagactttnttctttttttttctttctttctttctttctttctttctttctttctttctttctttctttctttctttctttntttttttttggg

SEQ ID NO: 99340 - DNA, 344 bp, Homo sapiens
tgggcgccgtggcacttgggaggtgggtagatcacctgaggccagaagttcgagaccagcctggccaacattgtgaaaccccgtctctactaaaaataaaaaaattagccaggctggtcttgaactctgggctcaagcagtactcttgccctcagccttttgggactatgtgtgtgtgccatcatgcccggctgggccgtccttctttccttccttccttccatccgtccgtcttcctgatggggtctcgctatgtcgcccaggctgctcgaactcctggcccaagtgatcttaccacctcagtctcccgtatagctgggactgtaggtgtgagccactgtgct

SEQ ID NO: 99341 - DNA, 355 bp, Homo sapiens
gaggctgcagtgagccgagatcacgccattgcactccagcctgggtgacagagggagactctgtctcaaaaacaaacaaacaaaaaacccaaagaggtctaaagtccattgcattattcccagcaattcactcccttctaccagttgtcataaaacttgcaatgccaatactcgcaatggatatatttcctcatcccattgttgagtttagttatcatgtgtgggagcagatgtgacacatgccaattcaagctgaagttttaagaaacatcacaaattctgcctattttttttttactattccttttgcaagaaaatatagcatgtccctcgccaggattgtcccttcacccag

SEQ ID NO: 99342 - DNA, 409 bp, Homo sapiens
ggtgacagaggttgcagtgagctgaaatcgtgccactgcattccagcctgggtgacagagcaagacttgccctcaaaaaaaaaaaaaaaaaaaaaagggggaaaaaaaacccggaatgggccccaaacctgtgggggggaccttcccccccccccccttgggggagggaaaaacttccccaagggagaaactttttggttccattcgggaaaaaaaaaaagatttttttccttggggaagggggaaaaatgtttttttatccccagggcccccaaggggcctgggaaaactttgggggggcctaaccgggggggaggggcaaaaaaaaaattgaaaagacccccgggccctgtttattgagggcccctaaccttttggactttttttaaaccaggggcgggggaaaatc

SEQ ID NO: 99343 - DNA, 400 bp, Homo sapiens
tcaaggctgcagtgagctgtgttcataccactgcactccagcctgggagacaagagcgagacctgtctcaaaaaaaaaaaaaccaaaaaccaaaaaccaaaccaaaaaaaaccggcttggaaaaaaaccacccaatttaattttcccccccttccaaaaaaaaaaaaaatgggttcaaattccgggaaaataaaaggaaaaaaaatggcaattttttggccaaaattggattttcccgaaaacctggggaaaaagaattggtaacccatttgatttccctttaaaaaaaattggtaaaaaaattggggaatcttggcccaattggtcaattaaaacccaattaatggccccccaactgaagccagggctttgttgggggggaacataacaaaaatccaaa

SEQ ID NO: 99344 - DNA, 409 bp, Homo sapiens
  misc_feature (1)...(409): n = a,t,c or g
gaatattaagaagcgagcgctcatgggatctggttgtttaaaagcatgcagcacctcctgcttcactctctctgtctctcctgctccaccatggccagaaacgtgcctgcttccccttcgccttctgccgtgattgtcagtttcttgagggctccccagccatgcttcctgtacagcctgcaaaactgactcctagaagtaccccaccccacccctgctccttggagganaannnnanntantttntnaatttattatatatatttttattatctccaatatcattacacactcctctttttatctaattacctataaatgactcgccctcccctcttgatctatacgtcagttctcatatgtaaactatcctttctgtcatcgatgctactttctcacgacacacccg

SEQ ID NO: 99345 - DNA, 411 bp, Homo sapiens
  misc_feature (1)...(411): n = a,t,c or g
gaaccgcttcggaattcccgggtcgaggtgagtccactgaggcagcccagccaggggtgttctgctggttccaaatgaacccagggcccatcccacccagaggtttggaaccccacagggggaagagcgctgattgagtctaaagggccgtggctgctgaggaagcctctgagaatgactccaggccttcctgaggcctagtccccctgttctttttctactctacgcagacttgtcaaatcagaatctctggcccggcatggtggctcgcgcctgtaatcctancactttgggaggccgaggtgggcggatcacttgaggtcagaggttttttttgtttgtttttgtttttgttttagatggagtctcgctctgtcaacaggggcgagngcnnnngcncganctcnnctt

SEQ ID NO: 99346 - DNA, 420 bp, Homo sapiens
  misc_feature (1)...(420): n = a,t,c or g
ccgtccggcagcccaggaggcagaggttgcagtgagcctagattgcaccactgcactccagcctgggtgacagagcaagactccatctcagtaaataaataaataaataaaaagcgctgcagtagctgtggcctcaccctgaagtcagcgggcccaggcctacctcactctcttccttggcagagaagcagacgtccatagctcctctccctcacaagcgctcccagcctgccctccagctgctgctctcccctcccagtctctactcactgggatgaggttaggtcatgaggacaccaaaaacctaaaaataaacaaaaagccaaacaagccttagcttttcttaaagactgaaaaaaaaaaaaaaagggcgggccgttttaaaggacccaattttacggccgcggcggggcaagaaan

SEQ ID NO: 99347 - DNA, 425 bp, Homo sapiens
gaggttgaggcaggagaatggcgtgaacccaggaggcggagcttgcattgagccaagatcacgccactgcactccagcccggggggacagagcgagactccgtctcaaaaaaaaaaaaaaattcctaggaaccgggccggtacccgggctttgcttgaccaaaacaaacccaaaggatgggggggccttggttataaaaaccattgtttcccacccttttttttgggggcccattgccctgggggaaatggggcagggcgggcctgaggctgcccccccctgacccttggaaagaagaatcggacttggcaagccaaaaactttttcctcctactccccctttgaaaaggccagggggccccccatggaatggaattctttaacctgcaaaaacaaaagggccagcttgaggagagggtgagggg

SEQ ID NO: 99348 - DNA, 470 bp, Homo sapiens
  misc_feature (1)...(470): n = a,t,c or g
ctggataacngttgngatttcttagccagagaggcaagaggagaggcgagtagccttgggactagcctatcccgtgcttcaccttcttaccgcagctagtctgaacagccatgggcagtcgctgcatggctgggatgggcatcaagtcctggagctgccagccttatgatgagaagcaacccaggccgcccgcctggcattggggtttgagcagctgtctgcatttgacactggcaaagcatccctcctccccgagcatctggcccaaataagggagtggggactttgggacccacatatgttctgaggggagggcagcatccacaggggaggtgtgtgttcagccgagccattgacatggtcacatctggntctagttgttggtctctaagaaattccagtccgggcgcggtggctcacgcctgtaatcccaacactttgggaggccgaggtgggcggatcacgaggtc

SEQ ID NO: 99349 - DNA, 384 bp, Homo sapiens
gttggttccccacctccttccctcataggatcctctagcaccagaacttcctaacagccagtgcagtgatgattatttaatgatttagctatttatatataggggtggaatgtctctctttcccaagaggccaaaagctccaagaggcaggactcagatcagttgtttactactttgtcccttctgctttacttggtgcttgcatataggaggcactcgatacaaccattttttttttttttttttttgaaacaaagttttgttttgtcccccaggctggggggcaggggcaaaatttgggttcattgggggctccccctaccgggttaacccctttttcttgcctaaccctccggaaaacttgggactgcgggcccccccccc

SEQ ID NO: 99350 - DNA, 400 bp, Homo sapiens
tccacctgctttgcctgggtcctgtcttggtaggattgagagcagctaaattctagtgtatcttggatcagtgagggtcaaataagctaaaagcagctgaaattcctttgttccctgtgagctgggaaaacagcgaaggcctgagtcgtagagattgtcaggtccattttggcttctttccacacccacagtctcgcgtttgttccccagccctcggctgcctcttaactttgggttgactttcaacagtgaatagtctcttgggtctgaatatacctgggtttgtttttgtgtttttgagacggagtctcgctctgtcggccaggttggagtgcagtggtgcaatctcagctcactgcaacctccccctcctgggttcaagcgattctcctgcctcagg

SEQ ID NO: 99351 - DNA, 399 bp, Homo sapiens
gcctgggaggcggaggccgcagtgagccgagtttgctttactgcattccagcctgggtgacagagcgagactctgtctctaaataaataaagaaataaataaaagacctctctggatgagcacagacatcccactggctttcccttcaacccttggaatggtccccttcccattcctgccccacactgggaccagagctgtttcaaacaatcttcagtgccattccccctggctaaaaccttccgtaggtcccagtgcctcaggataaagagcttcccccaaagcagctggctgccccggcaggctctgcagaccacagcccactcccacgtttcccttgccgggctcgggcctgtgccgagccccgggtcctcacctactgaccccacagctcttgct

SEQ ID NO: 99352 - DNA, 440 bp, Homo sapiens
  misc_feature (1)...(440): n = a,t,c or g
gccataccgcccttgaannnangagaggacncacgcgtccgtgcgcccctaggatgggaggaggggaactattttgtgttacgagccaaacccaggagtggaaagagaagctgccttccatttctacgttgtggacaccaggagccactcctgtgggggatcagcacagcatctcctttgcgccacctggtgggggcatctcaaatttgtggggtgctgtttctgtgtttccaagtgagtctcaaacctgcaggttcctggaaggtagtaataggcaataatggggaaaggaaggcacagcgcctctgtcctctgagagcaacaagggttgagggtattttttgttttcgctttgtctttttgagatggagtttcactcttgttgcccaggctggagtgcaatggcgcgatctcggctcactgcaacctccacctctcag

SEQ ID NO: 99353 - DNA, 468 bp, Homo sapiens
taggaaccgctccggaatttccgggtcgagagaagccccagaatgtcacagcttcaacgtcatctggttggctggtttttcggcttgttggcctgagtctgtgaggtctcttgcagctggcaagggagggaaaccagttcacactggctggagcacagagagggaagggattggttcacatcacaggtcaaggccagctagaatggggccagctccaggatgaggacactgccccccaccagggctgtagggcaggttgatggccaacaccagggcacactctgggatgcacctgattagtgggtgcaggtgttcccactgggtgtgggcagaggaatggggtagttaacagtcacaaatctgtccaggcacagtggctcatgcctgtaataccagcactttgggaggctgaggcaggcggatcaagaagtcaggagatcgagaccatcctggctaacatggtgacac

SEQ ID NO: 99354 - DNA, 391 bp, Homo sapiens
ggttttaagttaaccgattcttttgcttccggggctaaagcaatcttaaggtcccagctcctcggaaggctgaggcaggaaaatcgctggaacctaggaggcggaggttgcatgggcctaaaatggcacaactgccccccagcctgggcaatagaagggaacctccttttcaaaaaaaaaaaaaaaaagggggggggaaccttttgaaccaaaagggggaggccccctttttttttttttttcaaaaggggttttttggggcccattgggtttttttcccccccaaaactttttttagggtttttggccccttttttaaaaaaaaaaaaaaaaaggggttttccggggcctccctaaaagggaaaagggacctttcacttttttttttacg

SEQ ID NO: 99355 - DNA, 430 bp, Homo sapiens
ctttaatcccagcattttgggaggccgttttgttcaaatcacctgaggtcaggagtttgaaatcagcctggccaacatggggaacccccatctttactaaaatccaaaaaaaaaaaaaatttcgggggcctgggggaaaacccctgggaaccccccttcctaggaaacttaacctggaaaaaaaagggtgccgggggcccaaaatccccccctggccttcctttggggggaaaaaacaaaaattccttttaaaaaaaaaaaaaaaaaaggttttcccaaaaggggttgggggggggtccctttctttttaaaaaaaaaatttttcccccaggggctttttaaaaaattgggggggggtccggggccccaaaaatttttttagggaaaaaatttttcaccccctttgggcccatacccccccttttttttt

SEQ ID NO: 99356 - DNA, 423 bp, Homo sapiens
  misc_feature (1)...(423): n = a,t,c or g
cctcttggggaacggggaggagctcagccgtttccccttccagcggtcctcccaggcttgggtttttgagtccagcgctggaatcttcgggggcaaggcaggagctacagggctcgaaaaattaactggttccttccagcagttaaccgggcaccccgaccccaggactcccgaggagctgggggaccctgaaaagtcctcggcatctgaaaagaccagggggctgcaggaggcaaacggagtacctgaaatcttaaaagccgtcacctacactcaagcctggcccaaagaagcaaaggttgaccccataacccccnnnnaaaaaaaaaaaaaaaaaaaaaaaaaaaaggggggggcctttaaaaaaaaaaaaatttaaccccggggggggggaaaaaaatttttttttttaggggccccaat

SEQ ID NO: 99357 - DNA, 2555 bp, Homo sapiens
ctgcttctcacagagttgctagggacaactgctgaggcaggcacctgccctcgggctccccgggtgggctgctatttgcctgtgggctctgcctgcccgcctgtccagtccccagggatctgaactgtgacctcccccttgctcttcttgccctttgcattgcctggcttggcctcattaatgtccccaaatctgtgttcttctctccagctcctctggcaacccctgacccccttcattcctcacagccagtcctaactctcctccatcccaaccccaatccctcttccacagctgtcggaacatcccctaagctaaaaatcagattgctccttgtcaccttggctcgagtcctctctcccactcccctcactgtccttagaatccccatggcccacacggcctgtcctggcccagccactgcctggggctctggccctgtgactcaccgcgccctgtttccctctgcaccctgcatcctgtagtcctttccaggggctgtgctcttggcctggggtggtcttttctctccttacctggctgacagttacttctccctccgcagaggatcatgttcggacctccaggccagcccactgctgctccttggcactttcacggccctggcgtgtccccgtcatagcccttatcagtcccttgtatttacctggtcactctccatctctgagggtatgggggccagatggctcttgctgccctgatgttttggggggtctgcctggtcccctcctggtgtgtcacacgcgtccagtcctggccccctaggaggcagcatggcgggagctggaggccgagcgggcccagctgcagagtcagctgcagcgtgagcaggaggagctgctggcccggcggaaggctgagaaggaacagctgagtgaggagattgctgccctgcagcaggagcatgacgagggcctcctcctggccgagagcgagaagcagcaggttcgtgagccctggcgtggcctctgctgctctctgagctgctccagttctggggccgggccctgctctgccacttggcagctaggagccctggggcaggccactgccctcttgggggcctcagtttccttacctgcaggaggggaggattagaagggggttcgtgaggctttgctgtgctccatgcctggcacacagtgagcacttactgagtgacagtgacagtcgtgacaccaggaaagctgttccatattctcccatgcctcgtcccaccccacgctgggcatggatcctcatggctgccttctgagcagtccccacgatgcccacaggcatcagctgacgtgtccccccaaataacaaatccctaactttcctataatgtaacggagacagggcagactgtgcccatctcctctcctcaccagctgtgtacctgggcgagtcactttacctccttgagcctcagtttcctcatctgtaagatgggtagaaagaaagactctgcagtcagggtgctgtggcgggttagtgagctctatgagtggtatccacgtccgggattcttgtgactgccgttgtgcccttttccagggctgcatgtctgccctgggtccacctgcagtggcacactcaggcctctaagcccccagtgggcacatttcccaggcagcaagaagcctgagcatgcccccaggaccagcccatcccccaagccctttgtcccctgcctctgcccaggccttgtctctgaaggagtctgagaagacggcgctgtcagagaagttgatgggtacacggcacagcctggccaccatctccctggagatggagcggcagaaaccagatgcccagagccggcaggagcaggaccgggtaggcctgccgtcgtagggaggcttgcggagcaggagcgccctctctccaccgagctatcccgcggtttccagcatcccatctggcggactcctcttcctctctcttctcctactctgggtcttctatcctggtgttccttgaatgcctatcttccttttgtgcctcggaacctctcacgcctgccacaagttactcttttccttggtagttctgaactttaaataaggtaatgcctgtaaggaatgccataaatgctcaataattgtcatctgttattattttcatcagtaacatcatctgaatcatcagtattgtctgcttttaacagctgcatttttcattgtccaaatatagtcacatacatttgaccattttataattattgaataataaattcgttctgctattttacaatgaaaaataatgctgcagagagcatttttgcacatgtatcgtggcagatgtaggccagaggctcttcttttatccatcctatggccaacctatgaatgtatacacgtttaatgagattttgccagcaatcaaagccttcagggaaaatgtccctagctctttactacatcagatcaaggactctggataattggcataacatcctggaatagctgaaacagagatattattctctgctctcctctgttgtctttgtcttttcacgtcttaataaaagtgctggtgacaagagtgta

SEQ ID NO: 99358 - DNA, 454 bp, Homo sapiens
  misc_feature (1)...(454): n = a,t,c or g
caatggagcagggaccatgtccgtctccctcgaggctgatgagaaccccttcgcccagggggccctgaagtcagaggactgcttcatcctggaccacggcaaagatgggaaaatctttgtctggaaaggcaagcaggcaaacacggaggagaggaaggctgccctcaaaacagcctctgacttcatcaccaagatggactaccccaagcagactcaggtctcggtccttcctgagggcggagagaccccactgttcaagcagttcttcaagaactggcgggacccagaccagacagatggcctgggcttgacctacctttccagccatatcgccaacgtggagcgggtgcccttcgacggcggcaacctggacaccttcactgccatggccgcccagcacggcatggatgacgatggcacaggccagaaacagatctggagaatcgaaggttcn

SEQ ID NO: 99359 - DNA, 405 bp, Homo sapiens
gggtactcaagggaaaattgtggatttggtcaaggagcttgacagagacacagtttttgctctggtgaattacatcttctttaaaggcaaatgggagagaccctttgaagtcaaggactggaaaagttaatcctgatgtatatcaatcactattggcagcttgatttcattgtggagattatcaggtgacagtgttcttttttgatctttataattggtggcctagaatctgatctgtcctggttatgaacaccccagggataggatctgtaccgtccagtgtctgctgaatgggctgttttctaaccatgcctccttgcctctggagactcttgttggttggagcagtagttggcactttaatgtttctatgctgcctatgtacctcaggcagcagtcaccagc

SEQ ID NO: 99360 - DNA, 442 bp, Homo sapiens
  misc_feature (1)...(442): n = a,t,c or g
aggtcagttgcgtgatgctccgagccgccgcatacacttccgcctctcctgcagcgtggggttatctatgaagacgtgccggtccagtcggcctggcctcatcagagcaccgtccaaaatgtcagctcggttcgtggacgccaggacgatgacatggtctgtggtacccattctgctcagtgtcgtggagcgccttccttgcagaggccagggctgtggatacagaattctgaaagattgtataaacagtgaaaaaaatgggaaaagtaataggaacaccggtctcaaagaaaaacagcagccaggccaaagaggtgcagtgcgagctcctatagggggcggcgccggattcaagcacagctcggccttcagcagagcccagccaccctgcggggcacgtgctccccaccgggctatgtgtcaggatgtgcaccctgcgggn

SEQ ID NO: 99361 - DNA, 430 bp, Homo sapiens
gtgtcgttatcgtgatcctccacagcggccgcaatacaggggtggtgggtgtatctaaggatttttttccgcttgtaaatctgttccaccacatgcgaggtcatgcagttctccttgagatcttgaatcaactgctgggtgggggtgtcgatcggcgccttggtgtcagtcacgttttgaatggcactggaccaccggctggcctcgctgagcagcttggtgtatagccggtaacagtgcttgcgcccgtacacggcgacgttccagtactctgtctctttgaatatcttctcatctggggggacgacagagcagaggctgttgatgaccacggtccccagtttgagcgcgctcttctctgaactcttgtagtaatgcacggaattgtgggtgagtacaaaccaccgcttcttgaggttcagtgaataca

SEQ ID NO: 99362 - DNA, 432 bp, Homo sapiens
  misc_feature (1)...(432): n = a,t,c or g
ttgccaagtagcgagaanntctagagcggccgctctgctggaagcagtaaccgagaccctgttttactacgaggtggctgagaagatctggtctaatcgggccaaccggcagtgtgcggactgtgggtcctcccgcccagattgggctgctgtcaatttgggggtggtcatctgcaagcagtgtgcaggtcagcaccgggccctgggttctgggatctccaaggtgcagagcctgaagctggacacgagtgtctggagtaatgagatagtacagttattcattgtcctgggaaatgatcgtgccaaccgcttctgggcagggaccctacccccaggtgagggactacatccagatgcgacccctggcccccggggagagttcatctcccgaaagtaccgtctgggtctcttccggaagccccaccctcagta

SEQ ID NO: 99363 - DNA, 432 bp, Homo sapiens
  misc_feature (1)...(432): n = a,t,c or g
gtttgccatgcggaaaaacccacagcggccgaatacaggttgttgaccttggacttgttattgtactcctcataccacaggatcctcagggagggggagccctccagctcgatctcaaactcctcatcccacttgggctccgctgtgtcccggaacaccctggttttggctttgctgacaaaataaccgaaggaatccacctccagggcacaggacagggtggctgattgcttaaatcccttggcaaagtggactatgacatgaaggaagccatagagtcctggacactcatcgtcgactttattgctggggacaggaatgttgtgtacagtcctaagcttgaaacaggatcctgtgagcacctggagctgcactgagctcaggacaaaggcctggagatccttcttctgtagtgtctgaaatgcccctctn

SEQ ID NO: 99364 - DNA, 436 bp, Homo sapiens
  misc_feature (1)...(436): n = a,t,c or g
gacccataggtaagaantcaagcgccgaanacatgtggctagcatttcttgaggaacattcggttatagaaaaagcctctgccctcaatgtgaggggggaaacacagttcccccatctaggaactggggtagatgctcatctccctaccccatcctagcacccacctcacttccctgcccttctgcgccgactttgggacaaggcagaccacaggagctgccagccatgttctcaccctcagtgcccactcctctgtctgcagctgccctcccctcatgggtgaggccaccacaagccgggcccaggacctgcctgctgatgagcatacagcatttgctcatgagctcgaggcgcctgctctgtcaaaggggcagggcctcagcatcctgcgggccctcactggccaccttcccctgggacaggaggtgaacttgt

SEQ ID NO: 99365 - DNA, 397 bp, Homo sapiens
aatacacctgctgcatgtgtttgtgtgaagtgagcctctgatgcaatagccctctctaagtgggtgagcagctgcatccgttcactgctgccagtgtagcacctggatgatgcccagacaagctcacggacaactgtgaataagtggttctgatgtagtagttctctgacgtgcttcccctaaaccccacctttgcacgctcacctgccacactgtcctgcttggatctgtgacattctctggaccccagggacctcttgacttgcatacctgtgggtgtgtcctctgtacatagtgaagctggcagcagctgaaactcgatgatggcatcggccaaggcctggcgagctgctcctcggagtttttcctccaacttgccaatactaatggtcccctt

SEQ ID NO: 99366 - DNA, 324 bp, Homo sapiens
atgaggcggtgtgtctccgcaggtggagtggagctggaggagtactacccggccttcctggacatggtgcggagcatgctggagggcagcatcgaccccacgcagtacgaggacaccctacgcgagatgttcaccatccatgcctacgtgggcttcaccatggacaagctggtgcagaacattgcgcggcaggtgagccgggccggggtggggccggccctgaggacggcggaaatggctctaccatcatttcactccccgctcgggagggggcccgtggtcagcacagcaaacctatcctgttttttcttaattgagacaaaa

SEQ ID NO: 99367 - DNA, 398 bp, Homo sapiens
cgcctgggctcccgcccctccctgcatgatcagagccccttggaactgcgctcagagatccaggagctgaagggtgatgtgaaaaagacagtgaagctcttccaaacggagcccctgtgtgccatccaggatgcagagggcgccatccatgaggtcaaggccgcatgccgggaggagatccaaagcaacgcggtgaggtctgcccgctggctctttgagacccggtctctggacgtcatcaaccaggaccccagccaggtgcggctgatccgggggatttccctggaggagggggcccggcccgacgtcagtgccactcgctggatctttgacacacagtccctggatgccatccgggagatcttggtagatgagaaggacttcccaccctccccagg

SEQ ID NO: 99368 - DNA, 453 bp, Homo sapiens
  misc_feature (1)...(453): n = a,t,c or g
tcgtagacnaccgcgatgtggcatgatcctcagagcggccgcaatacagggtgtgatactccaacaggtttgtcctctcatgctcaaagaagtcatccacctccttgagccctgacatgcccgtgatgagggcttcatccgcggacttcacaatattcctcagaaaccctccgaggagctccttcctgttcttcccccggacactcagctgaggcacacagggagggtatgatgctggggtgggcgttctcaccctccaccccaagttgcaagccactcacggtgctgggacacacgattgggccccccttggtcccctttctccattccctgcgcccccctgcgtcgctttccccaccacaggcttgactccgtggcccgaggcgcgctccccacggatctccgccccgcctacccatcctcgggcccccgctcgcccgcactgccgtagcc

SEQ ID NO: 99369 - DNA, 405 bp, Homo sapiens
gtaaacactgcctttgttccctagcgtcttttctttcgtcgccccgtgccctcacgccgccgggctctggccggcccgccctcggtccttgaaccccatttcggctcgtgccgtgcggatgcagctgccgggcctgggtttgggcattgagcgggaggaggaggaggagcggcggcgcctgggcggcatgcgatggggaactgctgctggacgcagtgcttcggactgcttcgcaaggaagcggggcggctgcagcgagtaggcggcggcggaggatccaagtattttagaacatgctcaagaggtgagcacttaacaatagaggttgagaatctagtacaaagggatgaaggggacgaaatccgtcgaccccgggaaattcccggaccggtagcctggctgtcg

SEQ ID NO: 99370 - DNA, 413 bp, Homo sapiens
  misc_feature (1)...(413): n = a,t,c or g
ggttcacgtagcgngaccctcagagcggccgcaatacattgggctggtcaccgtagtgttaactgttgtcgtggtgatgatggtggggggcggctcctcctctcctccctcaggcccaaggggaggccctggggaggcagggctgggtgggggtggggctgtggttcctgggggcggggtcagcagttctggcgcagaggggcctgcccccctgaccccgttaggggtgacggctgttgtcagaggccctgtccccggctcagtggcccgtggcagggagggcactgcgagagtctggccggccggaggggtggctagcgtggggtccggatcatatcctggcaggtagcccatctctgggcccctcctcagcagggacccatgaagcagatcatccccggcctgagaggtcn

SEQ ID NO: 99371 - DNA, 432 bp, Homo sapiens
  misc_feature (1)...(432): n = a,t,c or g
gaatggtacacagccgccgnantacagggcggtaatgttcaaaaaacaacgtgtgtttttctgggtcttgagcaagcggccctgggagatgagtttcatctggctttcttgtccagggaagtatttgctgtaaggatgaaagacatggaagaaaagatagagggtgaggaatgagaaggcaaacaggcctggaccaacaaagcaggggagtggggaaaaactggagggtggattttttttttccctcatctttatccttttttttttttttttttggaaaggagtcctattttgttctcaagtttggaattcatgggcttaaatttgggtatttggaacctttgtctcccgggttaaaagaattctctcgcctctcccctccaaaaggggggcacttaaagtgtcgccctccttccccattatttttttttt

SEQ ID NO: 99372 - DNA, 424 bp, Homo sapiens
  misc_feature (1)...(424): n = a,t,c or g
acgtagcgggcacctccgagcggncgcaatacaccttggcnnnccgctcacttatcttttcgcagttcttatgctcctgaaagatcctcttttcagctcctctctgcttgatatattctttgggcaggaattccttcagatctaaaaatccaggtttgtgtttatgttccacatgaggtccaaattgtatctgggcttgaaatccaccaaactcacaagctttctcgaaggagacagggtgagagccattcaggatgtcatcccgtgcctgaacataaagcaagttcagctgcacggggtctctcgaatctacattctgatcagagtaaaagaacttccgtctaagcagcaacgtttcgttttcatcgactccttgttctctgaatgttcggctgtgatccagccaatttaggtcatcatctgt

SEQ ID NO: 99373 - DNA, 400 bp, Homo sapiens
agcaacagaaagtgagcctgaagccctcgaggtggtgctgggttagagtctttactcttaccccagacagaaagctcatccttgctgatcccggcacgtggacattgccttgtgtaatgtgctggtcccggctgagcgttacccaaagcagctccagacaagacagggatatggagagaccagctgagctagtgagcaagaaacacaagcactgaagctggaagcgtctgcatcaatttctgtggctgccagcacagaaccgcaggaagtaagacagcgttgtcctactgatgctctcacctggggtctgccctcatgtccaggtatggcccatctcctgtacgcttggagcgacctttggctatgtggctggccttgttatttcaccactctggatata

SEQ ID NO: 99374 - DNA, 445 bp, Homo sapiens
tccagccccgacgtagcttgatcctctatagcggccgcaatacagtccctgtgactgggggctctgcttgcccagcacccactccgtaggcctgcatttctgcttcctctgcttttgtttttgtggcctccacccccatggcctccactcccgtggtctctgtgtctgtggcctgagctcctgtgggcttagattccatgtttgcttcttcttctgtggactccatttctctgacctcagcccctgtgggttttgtttctgtgaccttggctcctgtggcctcaactcccgtgggcttggctcccgtggcctcagcttccatagtcctggcttccatggtttcatctcctgcagcctccttatctatggaatcggctccgttaactttggcttctgtaccccctgagccctttatctccatgtggtttggcgcccgatttgtgtc

SEQ ID NO: 99375 - DNA, 379 bp, Homo sapiens
aatacactcgtccttctcaaagttctccatgatctggaccttctccatcagttcctggttctgtctggtgagcacagccacctgttcctgcagcgaggccaggtgttcctgggccgacggactgagttgtctggacagcagcacctcggcccctggaaggtcaggcagctcaccctcctcatcctgcagggtggttacgtcatagctagtattcccccgctcgttctccagcagggacagccggctctgcaaactctccacctcccgtcccaggctctccttctcctcttgactctccaccagcaactgctgtagctcttgcacctgtctctccaggatgtgcagggagctggcctccggggactcctgctgcctctgt

SEQ ID NO: 99376 - DNA, 662 bp, Homo sapiens
aatacacactgtcgcagcaatttgcctgtgctgaaggctcctgtagccgggctcggaggttatttatttcttttctcaggcttgtttccttctcccctatgagctctatcactcccaggtagctgctcccatagtcatcacactgctgctggaggccagtgagcttgtactcacatgagtttttcaggtcagccagctttctgtccatgccctccatgagctcctctctcagggcgtcgatcttactgtccacataggcttggtagagttcgttggttgtcatggtcaccgtcgggccctgagctgcttcctggagctgtctgagctgcccttcgtagcccttcacttttccatccagctcttccagcttgtcacttttgttctttagagtatctttgacttcagccaattcagacttgatgtccttcatgccagattccttagtgttgaagacaccaggactctggcccgtttctgtgtctccactaacagtggtgtcaggcttggggtgctggctgctgagccctggtgcccgtgttctactggcatcatcctgagtggcatgtctgagattttcactcactccagcaaggaaagaataaaggtctagaaccgtccttgtgagtcgaatcgttcgcgtggctcgtcgctcaaccccgaat

SEQ ID NO: 99377 - DNA, 401 bp, Homo sapiens
  misc_feature (1)...(401): n = a,t,c or g
aatacaggtggtggtggtggtggtaatggtggtggaggcagtggcagccctgggggaaggccagtctgttcagagttgcagcctctccttcgcttgcctccagggctgaggccctcctcccctgaggggcctgagagtgctgcaggaggcacaggctgcaccactgggggttcagcagctcgcttcaccgggggacctccccgcttggctccatagttccgtttgtactcaaggtgtagcaagttccacacttgctccagtgggggcaggaccttggctcggtgctggcaggagccagtatgaaagttccagagctgggcctgctgcagtcggccaatgcggggccccagctcagcgaagcttcctccgtatcgaagggcgctgtggtagcagcgtgtggn

SEQ ID NO: 99378 - DNA, 382 bp, Homo sapiens
aatacatgtggggttcatcagaaagatctgatcaatacttgtttttttttttttttaaaaaacgggggggaaacctgtattcaaagttaaagaaaagggcccaaataatacctaacggcaccctaaaatttgggggttaaggggtccccccggcctaacccttgaaaaaagggggaagggggaagaacccctggaccccagaagttgggggtttaaggaagcggaaacccccccacggccttttacccggggaaaaaaagggaccccccgccttaaaaaaaaaccaaaggaaagaaaaacgagggaaaggggaggaaaaaaggaagggaagaagaagggaaaaaaaaacgaagggaaaaccaaccctctgtaaatgtgcccg

SEQ ID NO: 99379 - DNA, 414 bp, Homo sapiens
  misc_feature (1)...(414): n = a,t,c or g
ggagagtatgatgcgtggatcctacgagcggccgcaatacagtgttccttatcgatgatgtgttttattttcaagaatgttgaagattcctagacacgaggctagctgaactctgaacacgacatataaacatgttctattttacctgggatggttcctactctgaaagaattcaattatcctttcattgcttaaaattgcttattgtcctattatcaaccttccatgtgcatccaaataatttcaggtacaaatcctatttacgaacaatgcaacttgactcaaaatgtatgcagtaaggctgggcacaatggcccaggcttactttgggaggccaaggtgggcggatcacctgaggtcggcagttcgagaccagcctgatcaacatggaaaaacccccgtctctactaaaan

SEQ ID NO: 99380 - DNA, 381 bp, Homo sapiens
  misc_feature (1)...(381): n = a,t,c or g
aatacatctccataatccaagtacctgggagtggacaaattgatatgtttttttttaagtcaaaggtgagcaaattgactaggggaattttcttgctataagagactaaccactggtcacacagagccacaacacattcatctgacgacctggacatcacttgtttctctggttccatgtaaataagtgcatctccctaaaggaaggtaaataaacatacattagatactatgtcaaatcaatcttcattcctcaaggataaaaattactttaaaaaaatgctataccaccaataactgaaagcccacattttcattatgtcttgcccgccttcccagggtcagncatcttctacctttccttctatgtaacacctgcttt

SEQ ID NO: 99381 - DNA, 371 bp, Homo sapiens
aatacacgccttcaggtttgcttccccagattaagttgataaatagcctgagtttatattttgagccccaatatgtgtcttccatctcttcctcttgctctttttgatcttatcctcctttcctcctcatttacactggcctgttccctcccgcaaagactcacttggtctttctttcaccctttcattgctacaactcttctttcagatggctcttccaccgaagagctccgcagggctgtgttcctggctggccaggaagttccttagctcctcaccttccccagcaatgagctgctgtcagcacaaagtcttctcgcaccaggaaccctccacatctgctctgacctgctggactctggatctgaaga

SEQ ID NO: 99382 - DNA, 413 bp, Homo sapiens
gttgcaccgccgaagcttgatcctcatagcggccgcgtacgagcccaggctgggcttgaactcctgaccttatgtgatcctcctgcctcttcctcccaaactgctgcgattacaggcgcgagccaccacacccggcaagttttagggtcttataaagcattaagttaggtcacagttaagtgatcaaaatggtgaggaacaggaatgaggcaataatgtgtattatgcaccccgtatcttaccctcctatcctacttaatgaggcttcatttgtaaccatcctagaagttaagcagcattggcgtaactacagacaattcaattctggaaaggtttaaagacaaaggaagacttgctaaacataaagaatagggggttatgtagacttgaactaagtttaagtggggagaacc

SEQ ID NO: 99383 - DNA, 878 bp, Homo sapiens
tccgcaccgcaattcccgggtcgacgatttcgtatgtctgtgcccggatgattgttcgtgagtcatgaagggaagtgaagagagtatgatattgaaggcagaggtttggggagagggcataggagaggagtatttgtagcagatgggctgtggctagagttggtgtaaggcaatgctattagagattgagcaagtagggtcccagacagaaaaggaaacctaagagtagcagcagtggtacaaagggaaagggcaatctggaaccttatctgaattttctccccctttcccaagtcaacaacaagtttgggcttcgctgtaagaactgcaaaaccaacatccatgaacactgtcagtcctatgtggaaatgcagagatgcttcggcaagatcccacctggtttccatcgggcctatagttccccactctacagcaaccagcagtacgcttgtgtcaaagatctctctgctgccaatcgcaatgatcctgtgtttgaaaccctgcgcactggggtgatcatggcaaacaaggaacggaagaagggacaggcagataagaaaaatcctgtagcagccatgatggaggaggagccagagtcggccagaccagaggaaggcaaaccccaggatggaaaccctgaaggggataagaaggctgagaagaagacacctgatgacaagcacaagcagcctggcttccagcagtctcattactttgtggctctctatcggttcaaagccctggagaaggacgatctggatttcccgccaggagagaagatcacagtcattgatgactccaatgaagaatgggggcgggggaaaatcggggagaaggtcggatttttcccttcaaacttcattatttggggcccggct

SEQ ID NO: 99384 - DNA, 110 bp, Homo sapiens
aatacagtgcgggaagtaggtcttggtggtggggaaggacaggaacatcctctccagggcctccgcaccatactcgccagcgtgcgcgccgaccttaccccaggacgaaa

SEQ ID NO: 99385 - DNA, 120 bp, Homo sapiens
aatacatgtggtggggaaggacaggaacatcctctccagggcctccgcaccatactcgccagcgtgcgcgccgaccttaccccaggcggccttgacgttggtcttgtcggcaggacgaaa

SEQ ID NO: 99386 - DNA, 377 bp, Homo sapiens
  misc_feature (1)...(377): n = a,t,c or g
aatacagtgtgtgtgtgtgcgatttaattatgagagagcgcgtgtgtatgaatttcgtttcataatccatatgacacctacagatgctatcatgttgtctattgagataaagaattttggagttcttttaatcacaaatatggaatatgttataaaaccttcccaaaggcaaatctgaacactaagatgtgttgtgatgccaaagactctgctttgaaggagaaaaggaaacaccttcacctaccatcagtgttctgcaagacagtgacatctttcacaaatgcatcgtctccagcattctcagccaggcacctaaaatgttccagactatataccccattgttacagaagagaaactagtggggctttcataaatn

SEQ ID NO: 99387 - DNA, 380 bp, Homo sapiens
  misc_feature (1)...(380): n = a,t,c or g
aatacatggtctgctgttatcatgatggttgggcccacggtgttttggatgctgtcactcacaggaggctctctccccgttgctcctggtgtttatgtcccctttgctttggcgccctttagtccccgtcacttcctccatgcggtatatttcggaaacacataatctgggattgaaagcaaagtacattttccctgctttgatggtcaggctgcggtggtcccagtcccacagttgctgcaagttctggttgtcgaggacgcagaaggagtaatttccttctacctgctcctcttctaggatgaggcgaatgtttttcantaaggacatggacaccatcgtatgacaatggcggatctttacgttcgcctgtcccaccg

SEQ ID NO: 99388 - DNA, 375 bp, Homo sapiens
aatacaggttgtgctcgctgtctgggtgccagtccaggccatggattttggagaggtgggcggctagatattccactgctgtactgggtttcctcttatcccatatccgcacatcgccgtcatggctggtggcaaggcagttagcattttttttattccatttgacctgggaggcacccgcaacaacaaacagtgcaacagtaagtttccttgtgtctttgatatcccaaatgtatatgtaggtgcccaccgagctggtaaccatgaggtcaggctcatacaccgcccatttcaagtcgctgacgacacgagtgtggccttggaaggctgaccaactttccccctggcgtccttcacctggaaaggctaccttgg

SEQ ID NO: 99389 - DNA, 384 bp, Homo sapiens
taaaaatcagtttgcaaaaattaattttgctaatttgatacattcatatggttcaggtcaggagcacagagagcactgtttttagtcctcaaatgagaaccttctagggaaaacagttaccctgtaacacacagatgattgatgtcccacatctcctcctagacttccttataccgagttctttggcggagtgagtggcttaacagtggaacaatttcggaaaatcaatggctttcctaatgctttctggggttggggtggagaagatgacgacctctggaacaggtacctctgccgttctttcggtgtcttctagaaatgctaccttagactgcagaccaatactatccgataggaatataatgcaagccatgtgtgtaattt

SEQ ID NO: 99390 - DNA, 391 bp, Homo sapiens
  misc_feature (1)...(391): n = a,t,c or g
aacacagaggcaggagaatcgcttgaacccgggaggcggaggttgcagtgagctgagatcacgccatcgcactccagcctgggggacaagcgtgagactttgtctcanaaaaaaaaaaaaaaaaaaaaaaagcccccccaaaatgggggggccccccttgaaaggggcccccccaaacccccccggaaaaaagcgtttaaaaaagggggggggaaaacaaccccttttaaaattttttccggaaaagggggccggggggccttttaaaaaaatcagggggttggggggggatttttcccaaaacttttttccggccttaaaaattaaaaaggggccccctttccccccgggccaaaaaaggtatacggaggggccttccccccctctcgag

SEQ ID NO: 99391 - DNA, 465 bp, Homo sapiens
  misc_feature (1)...(465): n = a,t,c or g
aatacagtcccttccacagtctccanaaattgtatttgttataatataaccaatgtacaccaccacccagctttgtgagtacctaccgaaactgatgtgggttgctttctcagttgtgttcaaattttccaaaagcttctttagtttattgagcctaccttaattaaaaatacccctctgtggctgtgcaggaatcacatcttgcatcatgcaagaattcacttagagctgatataggctaataccatagttttaaatttaaaatgtatactgttaaattattcttcaagttaattataactacttgattagcaattcctaaatcctacacaacgaactaagtgatctttttttttaaattgaaacagggtctcactctgtcacccagactggagtgcagcggcacaatcataactcactgtgggctcgacctcctaggctcaagtgaatctcccaccttcaccc

SEQ ID NO: 99392 - DNA, 378 bp, Homo sapiens
gtctactcctctgaatttgaaaacatcaaggaggagtacagggggcgcggcttccccaccatctgctattttgagaaaggacggttcttgatccagtatgacaactatgggtccacagctgaggacattgtggagtggctgaagaatccgcagccgccacagccccaggtccctgagactccctgggcagatgagggcggctccgtttatcacctgaccgatgaagactttgaccagtttgtgaaggaacactcctctgtcctcgtcatgttccacgccccatggtgtggccactgtaagaaaatgaatccggagtttgagaaggcatcagaagccctgcatggagaagcggatagctctggtgtccttgcagctgtc

SEQ ID NO: 99393 - DNA, 374 bp, Homo sapiens
aatacatgcgccgtgtaatcccagctactcggaaggctgaggcaggaaaatagcttgaacccggaaggcggaggttgcagtgagccgaaattgcaccactgcactccagtctgggtgacagagcgagactcaaaaaaaaaaatttccggttttcaatattggctttttaaggaaaaaaacttacctgagcgttttgccaggaaagggcagtattcttcggttttgcccaggaattcccccgaaccaaacttattttaatggcagtttttaaacaaaatcgcggacccggaaattccgaaccggtacttgaaggcgacccagctttccttaaagggagtcgaattaaagctgggcgaaacctgggccatagttgg

SEQ ID NO: 99394 - DNA, 375 bp, Homo sapiens
aatacatggtcaggtttacataataagtcaaaaaatgttttcacagaaacgatgccaaactcccaagactgttgttagctgggtctgctggcctgggtgctgctgctcctctgcagcagtgaaacacttacctcccattgggtggaggctgctcagggtgttgaggttcccagaggaggcagtctgctgaaggagctgcaaataaagctagacattacaccaaaaaacagaacaagagtgagagcgagggctggttctgcatccgggataactctacagcacagcaaagcgagagtgcagaggcccccacagaggagaaagtctgagactagaacccaagcccgcccaacagaaacatgaggcttattgaaggcc

SEQ ID NO: 99395 - DNA, 393 bp, Homo sapiens
aatacacctgggggtggaggttgcagtgagccgagatcacgccattgcactccagcctggacggagggaaactcttgtctccaaaaaaaaaggaaagaaaaatgaattattgcgtcacagctgaaagtgaccttaaatgaggacaaagacacatgcatttccccacccctgcttaggaggcaagaacattctgatccctagtggctaggggggctgttcaaactgctagggtagaaaaaaaaaattgggggagttggcgatggattaaacctagcgaacgggtagaaatcaaatttggagaaaaatagattaaggtttgtttacccaagcactgaggacaagaaccaagggcttgctgcccaaccctgccttaaccaattggagtgttttttg

SEQ ID NO: 99396 - DNA, 384 bp, Homo sapiens
aatacacctccccttaaaggccccttctctgttattctgatcaagtaagttactaatgatctacttggtcagaactctgacattaaacagaatggtatataaaggaaccacttaatttataaacacaaaacaacgttcttactctactttaaatcaacagttagcagcgcaaagagcaatcgtatgatttccaaatcaatgttggaactagactgaatcacatgaaactgttcttcctatagatttttcaagccaaagtttattggcattttcatatagctcaacctaatacaggacttgcagattatcacacacacacacacacacacacacacacacacacacacacacacacacattttttgaagaccaggctggtcttgg

SEQ ID NO: 99397 - DNA, 368 bp, Homo sapiens
aatacattgcctgtggtcccagctactctttaggctgaggcaggataattattaaattttttggagagatgaggtctcaccatgctgcccagaccggtctcgaactcctgggctcaagcgatcctcccacctgggcctctcaaagtgctgcaattacaggcgtgagcctccgcatccggccttgaacattcttatcacgttgttttcgctaccgccctaattaccagtaaaaactatgcaagtgtattctttatgtctttagtggcagtattcatccatcaggatataagccccaaagtctaagaactttgtcatattcactattgcatcactgatactttttttttttttttttttttttccagccg

SEQ ID NO: 99398 - DNA, 375 bp, Homo sapiens
aatacactcctcaaaataaatggctgtgtcaccctgtgtaaccttatgaccactttatggtagtaatcctggctctcttcactgggggccctcagaggggagctcaggtagggcctggagatccctgggaccaggaagtgcaccatggtccagagctccaggaaggtattgtgcagcggcgagtcgatcagaagcagacgttgttggctctgcagggtgaaaaccgcttcccagtgcctctcggtcatgcccttcacgcgctgcatctcatcaatgaccaggcacttccagcgcactcgtgtgaaggcggtgaggccccggaagaactgagtgtaggacgtgatgcagacgtggaagctggtgggttcggcccac

SEQ ID NO: 99399 - DNA, 389 bp, Homo sapiens
actacatgcctggtaaactggggaactgaaacaattttaagcaaagagagcaaaaaacaacacttaattacaaattaaacaaacagtagtgaaataaattggataatttctatctcatctattaatagagcctttatttatgtgtttaaaaaccatctcattgctttttttaatcattaaacttacttgacagcctggtaatccagtatctctgctgtacagggaaaatgagcctctctctgatgtttttcctataaaacaaagaaattaactttatataaaacccttcatttattgacagacaatcaaactgctagactattcatggtaattatattgcagttttaaaatagaaagaacaaattagaaataagaggatacaattcatg

SEQ ID NO: 99400 - DNA, 365 bp, Homo sapiens
aatacatcgtccaaacaaattttgttttgctttcctgagttcttctctcacttccacagcattattccctgctatcacaaacacatcattcatgtcgtcagtcagcatgttgcaggcataaccgatgttgatggcagtttcttgtttgtctcctgttaggacccagatcttaatattggctagtgataaacttgtaactgtttcaataacaccctcctgtaacttatcttctacagcagaggcacctagtagcatcaaatctctttcaatttcttcatatagcccagctattcgttcatccctctcttctgtgggagcattcgcatcttcaagcatcttatgccactctttaaaggacttgtcat

SEQ ID NO: 99401 - DNA, 294 bp, Homo sapiens
aatacactgtctgcctcctttagaaatcacgcttcacgcggtaggtaagaagattgctttgtatgtaagtggttctaacgagctattcgggaagaaagcccagtgacttactttaggcacaggcacgtacacgggttgaatctggggctccagagaactgaagagggacgccagccgaccggtgccacctctggaatggtgttcgccgcgaaataagctactggcgacctgtctaagcctgtagtcttccggcggactcccgcgaacgccgtcgtcaggattctctccacgaaa

SEQ ID NO: 99402 - DNA, 386 bp, Homo sapiens
  misc_feature (1)...(386): n = a,t,c or g
gtggcgcatgcctgtagtcctggctacttgggaggctggggcgggaggatcacctgagcctacgagtttgaggttgcagtgagctgtgatagtgccactgcattccagcctgggtagcagaacgaaattttgtctctgaaggggggaaaataaaagataattcttgagataagaaattatttagtcattcaggccttttggttccatataggtaaactgtaaatcatggtaaattaagattagcatgggaactttatttattcagcacacatttttctgcctggtacaatgtgctgggcacaggccttaggaatgcantggtggagtaggtcactaggggcttcctcttttacttagctttttggctcaaaggaaggctggtgggn

SEQ ID NO: 99403 - DNA, 469 bp, Homo sapiens
  misc_feature (1)...(469): n = a,t,c or g
aatacattgccctgcgttttccacactctgtgctgatgactgcatccccaaaacctggtgtgtccacaatggtgagccgcagcctcacacccttctcttctatgtccactgcatgcttagagatctccacagtttgcatgatcctctcttcagcaccaagaagtttccggtcccggtacagatcactgacgaagaggctattgacaagtgtggatttgcccaggccaaactctcctgccaccatgagggtatagtccaagcctttattcacggactttctggggacttgcntgaagacggatacagagccctcatactccatgtcatcctagtagacagcaaggcacaatgcaaaacggtgaggatccccagggagccctgctacccaacgccaaacttctctcccttttaggcctttggccccaagcttaaaaaaagcaggggcaggacttccgggagcttccccatg

SEQ ID NO: 99404 - DNA, 393 bp, Homo sapiens
tttcgtccccccacacaatgtgacaagcaccgtttggccctaagtgtttcaacgtgaacctgtgcttctctctgtctttgagtaaaggtgagcccgagttccactacatcgcgggggcccacggcaatgaggtgctgggccgggagctgctgctgctgctggtgcagttcgtgtgtcaggagtacttggctcggaatgcgcgcatcgtccacctggtggaggagacgcggattcacgtcctcccctccctcaaccccgatggctacgagaaggcctacgaaggggtaatggccctggcccatctcacccaataggacatgggcagcgaggccccagctccagagtatgtctggccctggggctatgcaaaattccaccttccgagcatgtatt

SEQ ID NO: 99405 - DNA, 472 bp, Homo sapiens
aatacaatgggcctcgaggcctgcgagtgcagtggtagcggcggcccccggcgtggctgcagcactgggagcagtggtggctctccctcccgggtgagatgaggtggaggatgcagaggatgaggtggacgagccctgaatgacccggtcgagccagggctcgacgctggaatggctctggagcggagtggaggtgagtcgcccgggtcgccgtaaagagccctcatcttctgaggcatacgacgtgtctggaggggtgtacgtttacacggacgaatgcgcaaggaccgcaacgttcttccaatgcataagcgccttactctctttggagatggccaaagcgtgctggacaggttcattgtggacatttgcccggaaacgatgattccttccaggggcgttgcctgtacttcttgccggattgaatgcaacagacccttgtgtcgtgaatagcccttccgaagtgttgttg

SEQ ID NO: 99406 - DNA, 510 bp, Homo sapiens
  misc_feature (1)...(510): n = a,t,c or g
actcgttgccgcgtacgatgatgctctatagcggccgcctacatccgggcatgataggaggtataaaaaatctaatttgaggaaggtgaaccaaaagaaaaatatggaaagtatgctttaagacacattcaccaattctgtgcaaagcttattagcgtatgcagctgaaaagctcagactactctgggatgcaccaaactgacctgtgttcactgaacacacttccgctgccagatgtgtttaggctttttcagatgaggagccaggcctcaatttccgtaagtcaatctttcaaattaactgagaaattagaccttctttatactatagcccaaccatttttccaatgaactttcagacacaagttactaaaaacaaagaagatanaatctattgctacaatgcgttaaaataatactggcactaaccctgccgcaatgatcctcttctatttctatctcatttctgaatgtaggaaccacctccctgccttcagtgcaatacatccct

SEQ ID NO: 99407 - DNA, 509 bp, Homo sapiens
gccgctgccgcgacgaagcttgatcctctatagcggccgcaatacagctgggtttctccacatagtgcaatacctcgtgtgtctgtggattctcaacgatgcagccgtagttgagggattgcgtcctgttagccgtagtgccaaggagtaagaaagggtgacgctggcgtcggtgggcttccaacatagcactcaaggggaagccggagcagacatcagcattgagcacgaagaatgcctcggggctcccagccaggatctggtctcgaaaatggtaaagaccaccccctgtgcctaggggggcaaattcctgcaggtacctgactggaaggataaactcctgctgggcggcttctatgaactgggtgaggggctcatcaggttggtagaagccaatgagcacaatctcctgcattccacggacctgggcacaggcttcaatatggtgttggatcatacggacccctggcacaggaaacaatgggttgggcacctcacaagacaaaggg

SEQ ID NO: 99408 - DNA, 479 bp, Homo sapiens
  misc_feature (1)...(479): n = a,t,c or g
atacacgcctccctaagtgctgggattacaggtgtgagccaccatgcccagccagaatattaattattagtaacaatattaatcaaaccttattgctgaagtcaactgattcccagcantttacaacttatattagatttgacatttcctaagaaagatgtaagacagatttttcatataacctcacacttaccctcgtatctggacactgtgtggcttcacagaccacctgcataataaagtgcctttcagactgtaggaggaataaaaataaagagaattaggagagcataacctgtacgtangaagatttccagactccctctacatggaaaacctctcactccccctcagggccccacacagccctgcctggtacaatcaagccactctcccttgagatgggacagcactataaaggctataaagagtttaccttcggtgtctggtatgtgacttgcccctccatgaagtcccta

SEQ ID NO: 99409 - DNA, 479 bp, Homo sapiens
  misc_feature (1)...(479): n = a,t,c or g
aatacttttgtctgtctaatataaatagaaccaggagacccatagagattgcttggaatttgtggaagaatttgtaaagctcttggtacagtctgtccagaagggaggttctgggatactgtaacagtaattggatttgtactataccgaggtatgtgcatgtatgaaggaggtggcggtggtggtgaaggcccttgcatagcagacggattcattcctgtttgcatggaagatggctgttgaggtggatgcgaaggaggagtaactgcacttctgtttctgtccatcataattaatggattgtacctggaagtaccaacagcgggtggtgtaactggatgtggttcttaactacacatttgatgtcttttaccgatgccttctccggacaagtaatgccatcttttttattttgtacccttgtccgatcaccaatatggtgagatgaattcgctgtttggcttttaactctgggatcn

SEQ ID NO: 99410 - DNA, 483 bp, Homo sapiens
  misc_feature (1)...(483): n = a,t,c or g
aattcatggnggcgatgtagtcatgcgggtgagccaggcctgcaggcgcacaggttccacacaggccagttgtgccagggagccacaaagatgcaacaggctcgggttagggctcttctcagtcagctggaagagtttggtgaagaatttcaaaactcggttacagaatttagcagagaggttctcattggctgttgccatcatgatctgtacaagttctccactgtcagagaaaaactcctccatagctttacgagcctggctactttccagctgcttttccaagtactggagacattcctccaggatggattcatccagtccactgttaggatctgcatgattggccagaatgttgtaacaaccagtgatcagcttctcatanacacgagccaagaactcatcagactcagcagggcccaagatgcgttccaggagttgctactgatctcggcacactctcagtggttgattcaaaagaag

SEQ ID NO: 99411 - DNA, 608 bp, Homo sapiens
atcctctagagcggccgcaatacagggctgctgctgctgttgctgttgccctggctgccaccaaatgcctgggcccaggactgctgggcactgggggctggtggagtgatctgcacaggttcaggggccaggctctttctttgatgggctgacttctccatggcttcactcagtgactctgcatacttcatcatagccttgagctgtgagtcagtcagcacccagagcaggtcatccaacaggaacatcagcttggaggatatcacattgcaatctttggttcttcttttgagggctatttggatcctgccttggttcgtaataagcctcaatggagtggtgactgggtcctgatcaccattgtctgtagcatctgcctcaattcggagtgtttgccaagttatttccttaaatgttaaaacctctcctcggcaggggtcagtgatgcgggtaaggcgaaggtcactctgctgccagttggggttgacactatagccctggagctgccacaattcaaaagaagcgtggaaggccttggagtgaatcttgatggtgatagaattgacaatgatgaacatcccttccaccaccttttcggcaaaacgaaa

SEQ ID NO: 99412 - DNA, 491 bp, Homo sapiens
atacagtgagggccgtttgtagtgtgtgaggattttatgctctgatcgggcacagccagaggggttgatcatgagtggcagctccataagggggtggcgcccatagcggaataaatagttttgacagctctccaccccgggcagtgattcagctatgcgaagcacggcatgcaccgtcagcccaaagagctcctcgcccttcagatactcagggaagagtcgcagcatgtcagcctcttttctcatggcagccacaggctcaatgatgcgattccacacggctaagaagcagggaagagagcagtcctcagaggcaacttctgctcactgacctccagtccctaaccccaatccagaactgcagttttctgaggccctcaagccttcctatcatgaagttgtggtggtcctccacaacctcttctggccctcctaagactacttctcttttaagaagcaggaaggtttcctatcccacaaggggcaccccg

SEQ ID NO: 99413 - DNA, 366 bp, Homo sapiens
ggcacgagcacctgaacctaatgtatcaatatctagctgagcagctggtgagagctacttctccctgaacctcagttccttcatgtgtaagatgcaggtatatcatcctaagaacttcgtcagctctgacaaacatcctaggaacccactctaactcctcattttttcatgcctcctccagtgctcttcactcatgctgtttccccttcttctcttggcttcagactctggacattaatgtgaaggccccagccctgatgacaaaggcagtggtgccagaaatggagaaacgagggtacagagagtgagagagagcctgggtgagaggggacaccacacgggctgagggcactggtccacaatggg

SEQ ID NO: 99414 - DNA, 453 bp, Homo sapiens
aatacagtctggggttttccagggctggaagaacgtgatttggagtgttctgatccatgctggccttttttccggctactgctcccactattgttatatgactcacggtcgtgcctctgaccactactgttagtgccactactgctacctgcgctggtccgctggctactatgtccactctgtaagcctgaggaccgtttctgagactgagaagtgctgggtgcgggtcctactggagtccatttgctactctgatgagagcctccatgtctctgttcaaagaaatttgagttacatttttcatctgctgacggtcggactgagtgattcgcaaatgaacaacgcctgtgatagatttgtttcctatcagctccttgatatcctcgcagtttcctgatactctctgaaaacgccctctggagttaactatttcgtttgtcagtgtcataagag

SEQ ID NO: 99415 - DNA, 106 bp, Homo sapiens
agaggtcagtgcggccgtcccactcatctgtggactactgccattcaccgttccctgggtactctgtgctggtacacccatccgcactccggcggtaagggaggac

SEQ ID NO: 99416 - DNA, 496 bp, Homo sapiens
gttccccacagaggacagcaggacttccaaggagagcatgtcggaggctgatcgcgcccagaagatggacggggagtccgaggaggagcaggagtccgtggacaccggggaggaggaggaaggcggtgacgagtctgacctgagttcggaatccagcattaagaagaaatttctcaagaggaaaggaatgaccgacagtccctggatcaagccagccaggaaaaggaggcggagaagtagaaagaagcccagcggtgccctcggttctgagtcggataagtcatctgcaggaagcgctgagcatatcggtccatgtgacagcacaggggacatggaagtctcttctggacttcctggatctcggaggcctgagaatcctgttttcctttgcatatgggttgctgtgcgtgccatatgtcctggattcctttggtcttagtatttgtgctcccttctcgttgtcggtctgatatcactgtgagggccacgacatctg

SEQ ID NO: 99417 - DNA, 488 bp, Homo sapiens
  misc_feature (1)...(488): n = a,t,c or g
ccccagtcacaggccagcagtcagtgcggcgggaagatgtccgcgcactgctgcaggatgagctccaccacccggttctggaacaccatggtcatgggcatgctggtctcttccacctcgggccgcagcagcgtgggcccgaacacaatggccacgctctgcaccgacatgcggttctgctcgccgtgctcgatcacccggcagaggtgctggaagagcatccgcagagtgtcgtggttgggagcggccagcgagcgcaccaagtcacgcacacagcggctgagccgggcctggaactgcaacttgatggccgcaatgaactggcggaagtgcgataaggggaacacgggctcggncatctccccgaaagaaaagctccaaggcttctggggataacaaagaacgagcacccagcccccaggagtacaaggtagggtgctcaattttggcgaaactaaaaccctacctctcccaaaaatgtctgggcg

SEQ ID NO: 99418 - DNA, 871 bp, Homo sapiens
gcggggaatttgttctcagaggtggagaagagaagggagtcaatcaaggggtccgggtttggtaatcacgtccccctcaggctctcttgtgaccacagcatcatcagctcagaccttccccatttcggctcccatgattgtctcagctcttccccctggctcacaagccctgcaggttgtccctgacctctccaagaaggtagcatcgaccctaaccgaggaaggaggcggaggtggtggtggaggtggcagtgtggctcctaagccaccccggggccggaagaagaagcggatgctggaatcagggctgcccgagatgaatgacccttatgtcctctcccctgaggatgatgatgaccatcagaaagacggcaagacctacaggtgccggatgtgctcactgacattctactccaagtcggagatgcagatccactccaagtcacacaccgagaccaagccccacaagtgcccacattgctccaagaccttcgccaacagctcctacctggcccagcacatccgtatacactcaggggctaagccctacagttgtaacttctgtgagaaatccttccgccagctctcccaccttcagcagcacacccggatccactccaagatgcacacggagaccatcaagccccacaagtgcccgcactgctccaagaccttcgccaacacctcctacctggcccagcacctccgtatccactcgggggccaagccctacaactgttcctactgccagaaggccttccgccagctctcccacctccagcagcacacacgaatccacactggtgatagaccatacaaatgtgcacacccaggctgtgagaaagccttcacacaactctccaatctgcag

SEQ ID NO: 99419 - DNA, 466 bp, Homo sapiens
  misc_feature (1)...(466): n = a,t,c or g
aatacagctgctgatgtctcgcaatctgttcttgctgttggcgagcaaggtccatttgctgccgttgtttctcaatttgtgacgctgccagttttttctgttcatcatgcgctgccagtagctgctcccgtaaactgatcagctgggtaatcatggtggagagctgccgttctttttctgccaggctctcaggtgtacctttaatttctccaagaagttcactggtatttagtctttccattttttccttccaatcttttgaaagaagtttttccatgcaggaggaatcctcttgttcagtccgagtcatttcctcaagcttcttctgtttcagagtggccaccacatcggcaagactccctttgcggcgctcatgaggttcaataggataactggtcattatcacacgggcccgactcccttcttcacgcttatgtggggaaggtagacgggattctggaagtcn

SEQ ID NO: 99420 - DNA, 473 bp, Homo sapiens
aatacactgtctgtaggttcttgccattgatgatgatggttccagaagtgggagggtggagccccgtcaacatggatatgatagtggttttcccggcaccgtttgtccccagcagggcggtgatttggtctctgtagaaggtcaggctgaggtcttggaccacagccttgtggccctcatattccttggtcacagacaccagggtgactcccggggcacttccttcaagctctccttccctgttttgcagtgatgaccctttattgtcaaagttctcattgaagaagaacagactagaacttagaaagtattgccttttctccaccaagaaacccacactcttccaatatgaggcagtaaaggggaaataccatggttttcgtacaccatatgttccaagaatcaagttgctcaagtaccatccacacaaaaaataaaggcttgaatcaaaaagaatcattcagcaaaccccc

SEQ ID NO: 99421 - DNA, 395 bp, Homo sapiens
aatacagtgtggcgtatgcattccaattatcagctgttgggtaggcaagcgaggataggggatgtgaatccacctctgaaaggagaagttctcccatctctgtcttcatgtcataatgatacactttgcgaccatttggtgcatacctaccacttcctgacatatttaggctgacatgatgtgtgctggccacaaaaaaattaactcccattcccattgcccaagctgaatggaattcaatagctgacaaaaggggccaaacgttcatccaagctgaggcaaacaggatgccggccacatggatatctttcggcaaggcaccaccccgatcataaatgaatatatcgcagcgcgggacgatgcccttccttttagaagcgggagtggaaggcacg

SEQ ID NO: 99422 - DNA, 383 bp, Homo sapiens
aatacaggtgggagagaattgtaaatatttataacatgtaaatatcttttataatacaagcccatgaagataaatgagcctgtctgccgaaaagctgtgagccgtataagatgctaatataactgtcgtcactctagaaattaccataatgcttacagggatttgaaagttcctgagctttggaaggaaatgcataaatactaaacagaacacacacacacacacacgcaaacatctctttttctttctctttcttatttttcgacaaacaatttttttcctttttttttgaggagtcccgctttgttgcccacgctggagtgcagtgccacaatctgggctcactgcaacctcccgcgcccgggtttaagcaaatctcctca

SEQ ID NO: 99423 - DNA, 170 bp, Homo sapiens
aatacatgtggggcagcatacctcgcacggtccgccagaagatgcggctgggggcccggaagtggtaggggcctcgggaagggttggtgttcatccgcttgcggaggaaagccaggtacttcaacttgtttctgtagaaattgccagaaatgttgatgccttcaacgaaa

SEQ ID NO: 99424 - DNA, 404 bp, Homo sapiens
aatacatgctctgtactgtagcctctagtatcttcggaaagtttctaaaatgttacttcacaatgcatctgggcctcaacagtgtagaatgtaacatactaaggaaactgagattcctagcatggaatctactttaatttcacaaacacaatcataaaaacactaaaatatataatttttaaatttaatatacttgtatagcataagaggtaagcctgacttctcagcaaagaccaaaaaccagacttcacgttatcaaaaataaatagtaaattaatcagtgcttatcaaatttgaaaaaaaaactctaaaatataaggctatatggccgggcgcagtggctcatgcctgtaatcccagcactttgggaggccgaagcaggggaatcacaaggtcaggagaag

SEQ ID NO: 99425 - DNA, 415 bp, Homo sapiens
aatacatgggtgctgtacgtgtcctcgtttgtcatgctggaggggctgatggcagcgatcatcactgtgcggcagttgcccccgagggagtctttgagcaggcgggtcagtttgctgtcccggtagggcacatgggtcttgcggccctttgcatcggccaaggcattgaggacgttgatgagcgccagcagagagcggttgatgttggccccctcccgcagccgctcccccttcgcatgggtgctggatgcccgctctgagccagccaggtcaatcaggctcatcttggccacctggacagcctgtgtcagccctggaacccggccctgctgcttcaaaaagaactggaagacggcatgggtaccgctaggaaggtcatactgccattcacatctgccctccttgcccttgctcg

SEQ ID NO: 99426 - DNA, 408 bp, Homo sapiens
aatacattgctttcccttaatatgactgagattaaacgtcttttcatagcttaagggccatttgcatttgcttctctgtctccatcctctgctcatttttcttttggattactcttattcaattgtccactctgagaaataaaagcatcaagggactgggaaggaacactgtcctctggttctccctgaacatctaccctgagtcaaggggatgaaagaggtagtatctagaggtgccatttgaagccaagattccaaactaccctgagggccaggggaggctggctgggaagtggtgggctggggagagccgtgctccccaggagagccttaccgggtccccacagctgctggcactgctcctggtaggtgaggcacatgccgttgtagcagtaggctctgcccgcg

SEQ ID NO: 99427 - DNA, 410 bp, Homo sapiens
  misc_feature (1)...(410): n = a,t,c or g
gcatacaggccgggtggttntcagggggaagtcttgtccacaggtgttgatgacgtacttccagggaacctcagaggcgacaaggtctttcagacagttcaggtcagcctggagtctggaaatgcctgcataaaccacagactctgtctttgaagcaatgaaagcattttggaagcaactcagtaactgcctcacagattccttatactcagctggggctttctcatccacgtgaacacagtagacattttggggcatatagatagccctaaagagcctttcaaaggtgtcaaagtccttatggatgaccatgacataggccaaagggaatgcagcctcttcttccgacaggggacttgtgatgtagtgattctgggtcaggtaatccttgcaagggacacttcgcagag

SEQ ID NO: 99428 - DNA, 389 bp, Homo sapiens
aatacagcggggggaagaggagattcctggagaggaatggatcaagctgggaagcacagaactgcaggccagagacaactctggaagcagaaacaggtgtgtgcttccaggcacacagacaccaactgtgtgacacccacacgaaaaggagaaacacacaccttctactcacaaactcactattgacagtgcacctaccaccacctgctttgtgcaacacaggaaacaccaataaacactggagacagtgtcaggccaggcatggtggctcacgcctgtgctcccagcactttgggaggctgaggtaggaggatcgcttgaggccagaagttcaagaccatcctcagcaatacggcgagaccctatctctacagcgagaccctatctct

SEQ ID NO: 99429 - DNA, 388 bp, Homo sapiens
aatacattggcgcagcttgtccatgaccgttatgtagaacgagaccacgtctgcgatgcagcggttgaggttgcccttgtcgtccttgatggtgatgggccggtcctccttgatccgctccatggccagcgggcagtccaggcggaacttgcggcagaattcgtcaatagagctgatttctgagccctggacctgcctgaaggcagctttgtattggaccaggagccgggagcaggctgcagtgtacctagggagaggtcagctgctgcccaagcatgggaccagccccacccagctcatcctaccccctcggctggtccagaggcatagcagtttccagagaggaccaggcgacaggcaaaggcatgcccgagcaaggaggagggcg

SEQ ID NO: 99430 - DNA, 384 bp, Homo sapiens
aatacaggtgggcatgtgctcttttatgtttatccgatccaggagatcctccacagacttgggctggggtggtcgtcctttccgacgcctcctggtggggcgtttgggtttctcctcgtcttcactgagcacgtccacgtagatgaacttgaacgtgccgactttgttgttcagcaggcccatccaggtccccatgggtggcttgctgattatatcgatgatatctcctttcttgagcttgagtgagtctgtgtcatagggactgggggtgaagtcggtgtgcaccctgtcacgcccgcagaacgggcctcggtaaggcggctctttcgcatccccatcttccgaattgacgctttcccggttggtggttgaggaatcagtgcg

SEQ ID NO: 99431 - DNA, 387 bp, Homo sapiens
aatacaggctgggggaaggagaatgggaagtgtgtttaatggggacagtttcagtttggaaagatgagaaagttctaaagatggatgatggtgacagttgcgcaacagtgtgaatgggctggacatagtggctcacacctataatcccaggactttgggaggctgaagggggaggatcacttgagcccaggagtgtgagaccagcctgggcaacatagggagatcctatccccaacaaatacaagaaaaaacaaacaaacaaaaaaatgatgcaaatgtacttaatgccactgaattacatactcaaacatggataagatggttaattttttttttttttttttgaaacggagttttgttttgacttccaggttggagtgcagtgcg

SEQ ID NO: 99432 - DNA, 390 bp, Homo sapiens
aatacattggctgagcagatatccccagaggcgtagaaaattaaatttgttttatgttgttccaaaagaggagaactgaggccagaggagcacacttctgagacactcatttttgctgggtagaggaactctctggcaagcaggaccatcgatattagagcagctggcctcaggagggagtaagagccccatccctgaaggtacacaagttgtggcagcaaccatctggcctgcagtttccagaggggagtcaggcgtggggtgggactggagtgaacgggtagatgcttccacatgcggcagttggcactgacggcaggaacacgggggtggcttaatgggtcctggggctcccctctggccctcaggaaggcaggagcatgaggggct

SEQ ID NO: 99433 - DNA, 478 bp, Homo sapiens
  misc_feature (1)...(478): n = a,t,c or g
gtacgtcagctcggatcctntatagcgagcgaatacatatgggcccaatatcatttaactacttttatttccacttaccagcatctgaacactatcttttcctaacagatgaagaaccttgtagatgcttgcacagattaagggataagcgtaactcctcagtctctctgtccattcccaaggcaaataaccataattgaaaaccatgtgatgcgaaacttcaagagactgccagtattcatctggaacaaaacttgtctgcactaacaagcagtttaatattcttaaagctatggcaaacaagagcagataaatattttctccaagaagatgcccgcggcgcctggcgctcttctcctgggtgttgaagaacaaggtacactttctctttcgcagctttatcttgccgagggagcggatatggagaccatgcatagcgaggctggcatgtccgacccccggctccattccgacgaaa

SEQ ID NO: 99434 - DNA, 548 bp, Homo sapiens
  misc_feature (1)...(548): n = a,t,c or g
acgaccctcgatcctcatagcgagcgaatacatgcctggctagagaggtatgctgngaccaaagcaacaactagaacaacatcaacaacaactaaatatcaggctacgaagcttggccttcgttgtagtcttaagaagattcagcggtgggtgtacagtcatccctcagtatccatgaatgactggctccaggactccttgcatataccaaaatctgacgatgatctagttcctgatataaaatggtatagtgtttgcacataacctatgcacatcctcccacacactttaaatcatctctagattacttataatacctaatactatgtatatgctatgtaaaatatttgtaataatgtatttgtttacgaaataatgaccaggaaaaaaaaggtctgtatatgatcagtacagacaaagccattctttgagacagaatctcaccctgtcacccaagctggagtgcagtggcacaatctctgctcactgcaacccctgccttgcaggtctaaacaattcttgtgcctcagactcccgagtagctggga

SEQ ID NO: 99435 - DNA, 395 bp, Homo sapiens
  misc_feature (1)...(395): n = a,t,c or g
aatacatgctgggtgtgttattatccccactctcaacagatgaagaaactgaggcttggagaggttaaggtcacaggagaggtccggcagcgtgcgggcgatcggcaggatgtgcggacagcagcgtcaggaaccactgcaacacgtggtaactctttttccagatcccttctttctgatccactctggcaagactgtctctagcccaccgcacccccaattggatgtgcgtgagctcctcaaagccttggtggtcccgacactcaccctgcctggacaccgagagcctctgcgtgagctgngtggggcccatgaggaagcagagtccgttgaggtacatgatcctccccgactcgtggtgcacggtggggtcttttgcccggtgacacagcgtc

SEQ ID NO: 99436 - DNA, 470 bp, Homo sapiens
actacagtactgggaaaaaagaggaaatgcggactgtggatgcccctgggtaatctatcccatattccttattgctaaattcagtaattgttacaaatatgacagaagcatataagaccatctttcttttcactcagcaagaacagcaactagacgaacgggtcaactttaaaactttcaaaacaaaataagacattatttgtttaaaatagccacctgataccacattacctgattacaaagggattggcccaggccaggtctagcaggagcactacgatatatgacaggcttcttgttatataacacattgaagccatccactacgaagtcttcgtatcgagaatgaatggacagcctacatatcctggcaagcccttctctttcctcttcgtggaaataagcacacccattctcatatgtgaaaaatctgcctaggcataaggaggtatccgaaagtatactaagtg

SEQ ID NO: 99437 - DNA, 125 bp, Homo sapiens
aatacatcgcgggaagtaggtcttggtggtggggaaggacaggaacatcctctccagggcctccgcaccatactcgccagcgtgcgcgccgaccttaccccaggcggccttgacgttggacgaaa

SEQ ID NO: 99438 - DNA, 421 bp, Homo sapiens
aatacatgcctgcgggatctggggctgtgtcctcggaagccctgggttcagggtggtgcctgccctgaaagctaggtaccttctttgggttgttcttctccaccacaccatcccggtctgcgtccacatccagggagatctctggggagaagagacatgggtgagttgctgagcctgccaggcagggcagggcaggggcaagaggaagacctgtgggatttgggtgcgtctcagccattcatttggtcacgggaaagagaggacctcgctgaagtcatcttatgcaaccccctgcctcaacatcccactacccactggagaccgtcagcagacaccgtgtggacctcgtagcttacggctgcaagagctgccatcggggaggtctgggaccttctaccactttcttggtccgtctggggcg

SEQ ID NO: 99439 - DNA, 422 bp, Homo sapiens
aatacatagtgggttttaggagcagaggtgggggccgtgctgaggctgggccaggacacatggaacagagttgagtgctaaagggcagtagagcagggaagctagtctgttggttgggtaagggtctgcacagacaggggccttggggacctgttagtaaaggctgtggaacagtcagtggtgctgagtggctgagaatgccatcactgccccacatgttggagctccagtcccccgctgcctgggtggcttgctcaccagccctgcccttacccccatccccaaagccttgctcaccagctgtgagggagggcacagtgcccacttgggtgtccacagcaaacaggtccttgcggctgggcttgaccgagtcaaagaccactttctggttggcacttgaccagtttcccaaaggcgaaagg

SEQ ID NO: 99440 - DNA, 682 bp, Homo sapiens
  misc_feature (1)...(682): n = a,t,c or g
tttcgttctaaaagaacttctgtagggactgtaattttttaaaaaggttgagaaacacttccctgcaggaaactgaggtgctgttaccagaagaggggggtggataccaagctgctgaaaacagcacctgcccactctgggggagttggaagctgaaaccagcggcaggcaggagtaggccagtgtggagcacctgctcagaggggcttggtggggagccgcgtanggtgctggccgctgcaaagctgagcctcttctttggtttctctggcccgggggttctgcgttgaagattatactgtaggaagcatggagatgaccctgacccagctactctctgctgtctctgctgcaggtgaagaacgaggtggagaagctcccccgacagcagcggaaggaaagcatgaagcagaagatggaggagcacacgcagaaaaagcagcttcttgtgagtccctggcctcagctggggagcgcaggggctggtgcgagacctggaatggtgaccaggccccctctctgcctttgcccaatccctgcccctcaaataccccgttctgaatacctaaatctggcctcatccttcatggccccattatcccctcctccatgcagccttcatcgattgtcctgcctccatctggaagtaagaaattccatctctggataccccaactgtatt

SEQ ID NO: 99441 - DNA, 381 bp, Homo sapiens
aatacaggggttgtctcgtgtggttctattgtgagaggaggtatggaggctctgggattgtcccgctgggcacaggatgttgtggggttgtctcgtgtagctctactgggagaggaggctctgggattgtcccgctgggcgcaggatgttctggggttgtctcgtgtggctctattgggagaggaggccctggaggctttgtgattgccccgctgcgcgcactctgccccggccctctctcgtcgtctgtcttctcgtgctatggtactttccgtcccgctcccccctccctctcgcccccccgcctctccttttctttctctttccctctcctctcgtctccctctcgctctcccttcttcttctcgctctccctccccg

SEQ ID NO: 99442 - DNA, 388 bp, Homo sapiens
aggtgatatacatcttcccctccagcgttttgcctttgtgggcatacacctcctcttgagtggggccacgtatgcccaggagttggtggcagggtcgtaccgctccacagcattcaggtcattgtggtagccacggcccgccacagcgtagatgtacctgcctacaacacacacggacaggtcggcgtgctcctgctgcagggactggatctggaaccagcggttgtgccgtgggtcatacctccagcatcgggactctgctcgaaatccttggacattgttgccctctccaaccaagcatacgaagctcgttaccaccgctatgctctggatggtcatgcgggtcctcatggatgccccgaacttctctctttgtgtggggaggccg

SEQ ID NO: 99443 - DNA, 378 bp, Homo sapiens
atacagtgctgcaggatgctctccatggtgttgtagttctgctgcttggcggcccgaaggtacttctgcatggcacgggccatggatgcaaagatggcttgggctgcctcccgggggtccatcacctccctggggtttttctgctcctcttcctgcagccgcttaatgtgagtgaaggcctcctccaccgccactacaagcctggccctcctcttgcgcacccttcgctcatgctcagcctcctcatagtagtactcattgtgactgttgccccgcctccgagctgccgctgcaatcacagcccgagactggccagcggagttgttggtgctgttttcctctccggagcagctcccgctgtaccgcagacttcttccc

SEQ ID NO: 99444 - DNA, 373 bp, Homo sapiens
aatacatggggggatggtgctgttccaaatctccacccgcggttctttgagtctctgtccgaggctcatgttcaagtccagctgcaggtactgctcagtcagattataagctggccacagagacaggtcgttcccattaggattcccggctcgagcaaaggtagcccagtatttcatcatcttccggctcagtaacttctcctcctccgtggctccttcgaacataacaatgtcccccttcaggaaggcaccaccgaacacaaagcggacttcatcagcgtggtcggctttgacaaaagccggcttcgtgtcttctaagcactgaggccggtgccgaaactcatatatgttgacaggtgctccagcatcactg

SEQ ID NO: 99445 - DNA, 514 bp, Homo sapiens
  misc_feature (1)...(514): n = a,t,c or g
caactgacctagatngntttagcggacgcaatacacttctcgtttgagtaagttgtccacagaaaggcttccccacattctttatttttgtagggcttatcattactatgagttctttcatgaacaagttttgagccatgagtaaaggtcttcccgaattccttacgttgataaagcttctcaccagtatgaaatctctgatgaacactaagttgatagccactaccaaaggccttcccacagtctttacattcataagacttctcattagtatggactctctcatgcttaactaggcttgaaccccaactgaaggccttcccacattccttacatttgataggggtctcaccgcgatgaatcttctgatgttgagtacggtgacagccacgactaaaagccttcccacattctttacattcatagggtttctcccctgtatggattctttcatgttgaacaaggcttgatccacaattaaaagccttcccacattccttacattcatagggtn

SEQ ID NO: 99446 - DNA, 390 bp, Homo sapiens
aatacaggaggtctcgggaagaggtgaatttggcagctccccctactcctgcacaggatcctggcctgggtgagggaactctgtcctcagacacaggagtccaggccccatccagactcctctgctccttgaacttgccctcaaacccacgctcaatctcatccaggtagaaggcgcagacggcagagccagggatgctattggtctgggtggtgaagaccccaaagagagcagagcggccatgcaggttcacaggcccagtcaaggcctgtaaaacatcaaaatagaaagtagagtccccagggacagagcagttgagccgaagcttcaggaaggatgtccagtggcggcccaaggcccgaggcgagccgcccatgccacgctcacata

SEQ ID NO: 99447 - DNA, 389 bp, Homo sapiens
ttcgccattcgtctcctcgctgttctcctgttggagttttgccctctttttgaaggcttccttctcggggctcttcctccgctgcctgacctccttcttctttagccgctccaggtcctgcttggccctgcggatcacctccgaggcatcctccatggagctggcagggctgcccccgaaggccggggcggctggagaagcacccagggagtaggggctcctatccgaggcccgtgagaggctgcggcgcagggactcgttcatggcttcactctctacaagcttagaccgcagctcctcgatctcccggatgtagctccggaacacggcacccctgcgccccttgccgcccccggccttgggtaccatccccgtcgtcctcctggctc

SEQ ID NO: 99448 - DNA, 407 bp, Homo sapiens
aatacattgcctgttctgatattgtgccgtattagttactccacctgatatccaaagaagaccatcagccacatatccagcatggcatgaaagggatctgtcaaaggactgaacaaaagtccatttgttcttcttggggcaatatcgctcaactgtaggcagaacctggcgcagttcatttctgcccccaactgcatagaggtattcctccatggcacccagcacaaaatgctcccggcagtttttcatgggtgctatctctgcccaggaattactgcgggggtcatagcgacaggcaatcctcaacagcacacgctcggccactggcaagcttaactttccctcctgcacaaacaggagttcctcctgacctgcccaccatgggtctccttcccctggaagggaac

SEQ ID NO: 99449 - DNA, 403 bp, Homo sapiens
aatacattgggggatatatactctctagttttgatgtttgaaattttccataatcaaaaagttgacaggaagttagatggataggaatttaggctctgaggggacttttataaaccaccgaatgtgtaatactaccctctaactcctagggaacccacgtgaagcctggagcttggcctgggaagggctgccaccctcatggaaccagcaggcacctggagacccaggcgaggcagcacccggggacactcacccaccaccctggtgttgtagtagtcgggcagcatgcgcttccacagggccaccaggagccagaaggccttctcctcactgtcatagaacaggagcacccaggtcaccaaggtcattggctggcggcacagagacaaccgggaaaggttgg

SEQ ID NO: 99450 - DNA, 388 bp, Homo sapiens
aatacatgggcgggtgacgttgtacatgtctatagtgttcatgatgatggcaggcgtggtgagaaagaagaagaggaagaagaggaaggtgttgattgcgataaagcgggcccaccaaaagaagcggcggacagacaggtgtttccaaataatatctttggggtgtggggccatagtgaccctccagtaatatgatttgacgatggtggtcactgaggactgctggggttgcacaccacactggacatacttgtaatccttacggacacgcttggccatcctggagtcctggaaggtgacaaagatcaggtccagccgcttgagcggcacgcggttgagctcggcgttgaactcgtccgttagctgctcctctagctcgctgtaatac

SEQ ID NO: 99451 - DNA, 526 bp, Homo sapiens
  misc_feature (1)...(526): n = a,t,c or g
tctctcttctagagcagcccgaactacatncggcatattntcagccccttgtcatgggtcccatcatcgcctttactctctgtctcatcctcagagatgcgagagtcatcagcatgaagatccacaacagcctcctgccccgccaggggtttgatgtcggggatgaggctctttagtgattcagtggtgatactgatggaaggtttcttctgtgtggtggctgtgctggctccccagcgtcgtttccgaccaggctggcccccctctgtgtcactgtttccagctggcacccccttggtagagacaacggagatcttcctcttgaatgatttgggcagcgagctctctttcttctcctcatcttcaacactgccctccgggcggtcatcattgctgacttggtctgcaataggcatgggaggttctggaacatcattntcaggtctggttttacttgtgtccatgagcacttnctccttttnnctcacagtgtgatgaattctttctgattctggcagatgagagg

SEQ ID NO: 99452 - DNA, 398 bp, Homo sapiens
aatacattggctggggcgtgtttcgcgctttatcttgctgcatggaggggtggggctggtcagagctgccagcgtgcggcatagtttcctgcatggggtggctgatgggtttctcgagggcggccatgttgttgggcatgtccggcgggtgggagagctgggggggcccgtgcatgaagtcattcatggatgtccctccagggttcccgtgggggaagtcaaagttgccatggccttggcaggtgttgccttggttgctgtattcgatggagctggtgccctctgggggaggcgggaggggatagggggacggcccgggccccactgctgcgatcatctccctgacattggttctggtcatcccgctcgggaccctgtttctgttccgcctcgtagcg

SEQ ID NO: 99453 - DNA, 714 bp, Homo sapiens
gtagaaggcccttcattgcactctgtctttccaatgttgcttttatgcttccctggcaatttgctcagtttatactttttacacagatagcatcattatttcccatgtatgttgtgggatacattgaaccaagcaaatttcagaagatcatttatatgaacatgatttcagttacccttagtttcattttgatgtttggaaattcaatgtacttatcttcttattattcttcatctttgttaatgacgtgggcaataattctaaagagaaatgaaattcaaaaactgggagtatctaaactcaactgctggctaattcaaggtagtgcctggtggtgtggaacaatcattttgaaatttctgacatctaaaatcttaggcgtttcagaccatatttgcctgagtgatcttatagcagccggaatcttaaggtatacagattttgatactttaaaatacacctgttctcccgaatttgacttcatggaaaaagcgactctgctgatatacacaaagacattattgcttccagttgttatggtgattacatgttttatctttaaaaagactgttggtgatatttcgcgtgttttagctacaaacgtttatctaagaaaacagctccttgaacacagtgagctggcttttcacacattgcagttgttagcatttactgcccttgccattttaattttgaggctaaagctggttttga

SEQ ID NO: 99454 - DNA, 423 bp, Homo sapiens
aatacatgggggcacacagttctgatcctcagagcgacagcctgtcccattgagggactcctggggcatcatgggcttcatcagtcctgagggatgcagggcggaggggtagaagtccaccggggtccgagtgggcgtgatgcgtgggtccatgtaggaaggcatcatcatccacctgggatcgaagcccaacatctgggggtggtgtgggtaaaaggtgcgctgggggtgggacggcggggggtacaccggctgccagtgctgcatcttgtacagctgctcctgctgttgttgctgctgctggcgctggaatcggggaggaagggacttctgatacttgaactcctgtgcaggggacccaacctctctggcctcttcctcactgctgttgctctgtgccactgctgtggacactgggggtgc

SEQ ID NO: 99455 - DNA, 520 bp, Homo sapiens
  misc_feature (1)...(520): n = a,t,c or g
gcgaccttgctgggatcctctacagcggccgcaatacactttccggatgaattgctggaagcgtttgtctcgggcgtacagctccttatagagctttaaggccttgctgtggcggctgcagaactccgagtaggtcttacacatctgctccgcactatgacctgagaactggctgatgagcagatcacccaagcgatggatgacaaagttccgggtgctgccagggcacagggcctggcgtcggcgttctaatagctggctgaggaagcgcgtatggatgtcactgagctcgtccacgcaggggaacaggccctggaccactcctggctccaagtgtatctcttccagcattcccgtgcggataaggcggggcatgatcttcaggggnctcacatgggcattatttgtgaacgccccccccccccagatcttttgtggtggcataagctccctccccccccctcctcgcccccctttttgtcccgcccccaccgcttataatttgataccccccacccct

SEQ ID NO: 99456 - DNA, 381 bp, Homo sapiens
acctggccaaggtgaggggaggggagggacggggaagtgaaccccgacggtcagcgctttgtcatctggtctcagctctgctgccgtgcacggcgggactggagcaagtcgctcatctgaaatgagtatgagccgaccttccctgggttacgaattaagatgggatgaaaatgctttaactttgagtgttttgaaggattaaataaccgaagtacaaagtggtagtggcggagactgtaaggaagtcgggcgtggcggcgcgcacctgtggtcccagctactcgggaggctgagggaggaggatcacttgagcccaggaggtcgaagctgcagtgagctatgatctggccactgcacttcagcctgggcgacagagctaga

SEQ ID NO: 99457 - DNA, 377 bp, Homo sapiens
ttcgccattctgcttgttggccgtcatggtctggtgagaggggtcggcggtgctggggagactgctcaccattttggggtttgccgctttgccttcagagggcttattgtgagtggatgattttcgggaaaagttactctgtttcccagaggttgctgcgtgcgcattcagcagaggcagcagggagctgcagggagttcttgaggaatagttgttctttggatgtggaatttctccgcagagcatgatttgggccttcagctgttcgatgtcacaggaaaaccgggcagctttcccgagctcctcgtcatatttacgctcgctgacaaagtgcttaatttctgccctgagttcggccagctgcatctctgccatct

SEQ ID NO: 99458 - DNA, 376 bp, Homo sapiens
aatacaggggtgatgagggctgaactctggctgaacctctgcccacagtcggtacatttgtagggtttctctcctgtgaggattctctggtgtctgattagattggagttgtaactaaagctttcgccgcattctttacattcgtagggcttttctccagagcggatcccctgatgcgtgttaaggctggatcggttgccaaagctctttccacactcggggcacgagtagggtttctctcctgtgtgggagcgctgatgtgcaatgaggttggggctcctgctgaagctcttgccacactcggcacactggaagggcttttcccccgtgtggatcctctggtgggatatgaggttggcactacggctaaagctct

SEQ ID NO: 99459 - DNA, 373 bp, Homo sapiens
  misc_feature (1)...(373): n = a,t,c or g
aatacagtggggtccttgcagctgcatacacttccatagccctcaactttgctgcagaagcgccggcggcgacggttcagctctgtgtctgcccagtggcactctgcctctccttttcgtcccacgaaggcccatgtgtccctccagcccagggcagggccagcctggctgcccaggctcctcagcagagccttggctgtgtccttgaggtggaaggagccctcatccttgacagtgcagatgagcactcggccgggcgctaccatgttgaggaatagcaccatggcctcatcctcatgaggtgagtacgtgtcaaacacacgctttgccatcacgtggcccgtggcctggttgaagacaatgacatggatgn

SEQ ID NO: 99460 - DNA, 373 bp, Homo sapiens
aatacaggtggtgggcgatggccatgttgcgggtgacgctgatgcagaacagcatgaaggccgcatggaagcaaaagagcacggccataaaggccacaatcttgcagctgagtgcactgaaggtccatgaagagccgtggcgcacagaagccagcacaaaggggaagcagacggcagagcgtatgccatcggccaggcacaggtccagcaggaagtagtaaggagccttgtgcagggcacgctccttgagcaccatcagggacaagatggcgttacccgccaggctcacgcacataatcagtcccagcagtaccagcttcacataagctgatgcggacggtggggacagagcgccgctcacctcctcaggctg

SEQ ID NO: 99461 - DNA, 381 bp, Homo sapiens
attacatggggtataatgagagttgacttatcactgaaagttttcttacactcattacattcatggggtttctttcctgtatgggtactatgatgtataattagatcaagcttctgtatgaaagattctccacatttagcgcattcataggttttctctccagtgtgggttttctgatggacaatgaggttggacttctgagtgaaggcttttccacattcattacattcataaggtttttctcctgtgtgagtcctgtaatgtatgatgacagttgacttttctctgaaggcttttccacattcaggacactcaaagggtctctctcctgtatgagttcgcaagtgtataatgagctgagatttttggctaaagcttttc

SEQ ID NO: 99462 - DNA, 368 bp, Homo sapiens
aatacaggtggtcgagttcaagtgtcctatgcccggtgagcccatctgattaatactgatggtgaggtccgaacgccgcctgcctagcccccggtttggggctgaatgcacggtcccaggaggattggacgcagggggcagaggcatgtggctgagccgggtggcgcccacgttgctcatggtcattgagctctgatcagggctgaacatgtcttgggtattgcccatgttctgagacatggcttggtagggctccttgccttcacagaatccctgctggccctgggtgggaaactgggattgcatcaacatcttctgcggcccgctcatcacgccactgatgttctgggccctaacccggcccattt

SEQ ID NO: 99463 - DNA, 361 bp, Homo sapiens
atacaccccctggagagtgtcctctgtcaatgcataagtgatgcgggcgttgttgttgctatctgggtcctgggctgtcactgagaagatggaggctcctctggggttgttttctggaatgcaggcggagtacgataaatgagggaaggtgggtgggttgtcattgatgccaatcacatgcagggtgatgtgagtttctgtggacagtggcgggcttcccccatctgaggctctcagactaatgttatattctgatatttgtccgcggaccagggatgcggccgtcactaagcggtaatattgaaccattgattcttctaacttagaaggcagatttcccaggaccaaaaactttccaccg

SEQ ID NO: 99464 - DNA, 369 bp, Homo sapiens
tacaggtggggggcacaggaggcatttgtttaagagacggtgagcaggcgcatcggagagcatctggagatcattgggagagttcttgaagcgagaagccacgtatagggccataagccgttggaggaaaacttcagaggccttgtggcaccaaaagagggtatctctattaacataggacagatcacaagcttcaggcaaggggcagactgagactatccgagcgatgttgaggcaatccaggcacagcaagtcattcagccacttctccactgcatccccaggggcgtatcggattgactcctggagggaaacctcatgcagtgtccgcgctgatgccaatctggctgtcggtcgcggtcttattcg

SEQ ID NO: 99465 - DNA, 369 bp, Homo sapiens
aatacatgctgggagtggacttatagtgttgtccctacctcatgtagggttttagtttattcactagatccctggagagttcttcattaggcggtgttgtgtaatcctgaatcacctatagggtacacaaggtgatctgcaaaataccccttaataaagatctctgaacgggggctgggggtaagcttcactgaggaaaatgttctgagggtaggagtattccctctgtcccccagagatgaccttgggtgacagaagctggggtagtattgggggaggtggggttggaccatttaataaaacaggtggggatactagggctgctctgtaagaaaaatatgccgtttgcagggttcttgcaggcaactc

SEQ ID NO: 99466 - DNA, 508 bp, Homo sapiens
aatacataggggctgaggtagctgaacactgttggcattgcttcctgtggtctgggtggtcccgacagacccactgacagtctggctgctgatgctgtggttcagggtggtccctcctgggccttttccttctgaggacgccaggctggaagaggaactggagtgtctgccgtccagctggggcttctgctgggggagtcctgagctcagcttcccactccggctccgctccccttccttggaaggcgctggggcacttggggatttcccgggcatgctcttcattcctggttttggtattccactgtgggaaggggccatgggctccttcttggcactgttgagcttcccccctttggggatgaagctggcaatcttggaggacttttttggcatctcgggcacagctgctccactggggtcttcttttggcttcctccttgaggtccagcctctccgtcacagaggctctctggcacgaaatttcgaccggaattccgggaggttc

SEQ ID NO: 99467 - DNA, 501 bp, Homo sapiens
aatacagggtggcggcagccacggtggcctggaggacactgtaggccttgatgggagtgatgatgatctgctgcagctcctgcagagcgtttcgtaggttcccgccttccagcacatccttctctagggacttgaggacgctctgtctctcacgcagcttctggatgctcagggctatcttgtggcgggcacctttggtgacgttctgagactccaggtgctgctcagtcagtgtcatcatctcctcgtagctcatctgtgagaagagggctgcatacttgtgcaaacggaggctcttgagccatgagggcacatctttcatgccactgccatcctcctggaaggagttccggctggagccctgctcctctgtctgctcactgccagaggaagccaccctgctctggggcgagagaggtgccggatcgggcgtggtaaaagcagcccgggccccaagcttctttggactcgggcactccccagggacctgggggcttggag

SEQ ID NO: 99468 - DNA, 422 bp, Homo sapiens
  misc_feature (1)...(422): n = a,t,c or g
tagtgcctcccattgacttaggattccatacactagagcggacgcaatacattggctggggatttattttgctttgtttcaacaactgctggggactccatcgatttcttgtcatccaagcacacacatttctttagaaaatcttgaaagccacctggtaaaccactagggatggccacagggtactctgcacattcctgtccttggctgagggacagcatcagaaggccaagacgccaaacatctcctttgttccccgttctataatgcatagcattgacactaaaacgaactcgggtttgctcaaacacatcctccttgcaaatgtctgcgaggcgcttagaaatgctatagtccgtaatcttgacggtgccttctgcatccaccaagacattagatgcactcaggaccttatgcaccan

SEQ ID NO: 99469 - DNA, 434 bp, Homo sapiens
aatacatgtggtggggggcacatactcctgactgttccacacctggaagaggccaaccaggacactgagtgtggaggccacctgtacccgggcagcatctctggctgtctcattgatcatggagccgttcaaggcctgcggggccagggattctgtcacactgcccaccatcacagacatgacagcaaaggtccctgtaaggacggcacggggcaggtctgaagaggagaggacactgccctgccctggagccctggtcttaagagagaggccaggagacttccagttctggataaatgtactcagattatggctgcatgaacagggacagtgctggcggttcaggtttggccaggccaggagtaaaccctgagctcacaggcccttaagcatggctagaaatgctgggcctgtctcatctaccctgtcccacg

SEQ ID NO: 99470 - DNA, 432 bp, Homo sapiens
  misc_feature (1)...(432): n = a,t,c or g
aatacactgggttacagcaatctcactttcaagaactgtcagaaacttgttcaggctttcagagaatggcagatcatcccaaatttgagggtcaccatcctgggaactgctggctgtctcttcaagtctgagtaacgaaggtggacaacatgcagatctcttctgaaggctagttggggtatctataccatgatgctgaaaacatggtagctcatgctgggacctatttttaatttccactgcactgtggaaggattttgtattacttgactcaaggggctctcgcatttccaaagagaataaattagagtcattaactccaatttcatgatgactgctgtgaactgcactcagctccttagcttgtaagccaagttctttacccaacttttctgctgtactctctgtatccatatatgaaacaaggctccn

SEQ ID NO: 99471 - DNA, 434 bp, Homo sapiens
aatacactgggttacagcaatctcactttcaagaactgtcttaaacttgatcaggctttcagagaatggcagatcatcccacatttgagggtcaccatcctgggaactgctggctgtctcttcaagtctgagtaacgaaggtggacaacatgcagatctcttctgaaggctagttggggtatctataccatgatgctgaaaacatggtagctcatgctgtgacctatttttaatttccactgcactgtggaaggattttgcattacttgactcaaggggctctcgcatttccaaagagaataaattagagtcattaactccaatttcatgatgactgctgtgaactgcactcagctccttagcttgtaagccaagttctttacccaacttttctgctgtactctttttatccatatatgaaacaaggctccatg

SEQ ID NO: 99472 - DNA, 585 bp, Homo sapiens
ccacagccttgatattattttaatgaagtacaaaatgaatcttctgtgtatttaatttgattcttttatgtttaggtctgtcatgaaactacgtatttagtgttttgttttcctttattgcacttctatacagtaagtatttttttccttccacttgcctcatagcaagattttctttcattccttttctttaggattcatactcatatgtaaggtccacagctcctgctgtagcttatgatagtaagcaatactaccaacaaccaacagcaactgctgctgctgtagctgccgctgcccaacctcagccttctgttgctgaaacttactatcagacaggtgggttttcttaacctacagagtttctttgtaaactattgaagtatatgacttactgtgtttaatgaagataagcttttgagtccatctaaactcatatcacatcatcttaggaggcaggttctagacctgtcctactaaatgccttggagtcacaattcataatcatgcctttctctcctggaaatgtactccatttctggactttcagcccacagtccattcctgctgaaataagctgtgcaa

SEQ ID NO: 99473 - DNA, 432 bp, Homo sapiens
ggggtcggttgtcgatgcagccactccacgggcggcctgtgccagtgttttcagagcttgggccgtctctctagcagccacccctgtgtagtgttcgttgccttgagcagcacaggtcagcagctgtgccatggaggagcccaccgccttggatgtgcttcccaggtcctgagcacatttttccagcgtttcccctggaagtggcttcagctggctctccacggctgccatcttggcatcctgcagttcattcttaagcgtctgcaccgtattcagagctgaatcgatttccatcggaccacaaagcttatgggccttctgcgaagcggtacgcagctccgccaagctggtggccaggttcttgggacactggctcaaatgcatggctgcggcctggtcacttacggaggccactgggactttggcagaaag

SEQ ID NO: 99474 - DNA, 424 bp, Homo sapiens
aatacagggtggccatcaatcctttcctcccttccctgtccctcccctgcacctccctgacctgtctataggcagccaggttgttctcggcttccaacctcaggttggtttcatcctggagcctggagtggggggacacattcctgggtccaggctcttctgaggacacttgaatacctgcctcagtctcccttgaggcagctgtcacagagaccacccccacccaggaccagtagagcagcaggaggattaagggttggggggccttagacagaggacttgtctggaggatgagcagatgtgggcttttgccttaactcattactaaggtgccttatcatgggtggggcacctggttctgctacacaggcgcatccacaagcatacactcactgttgacacacacacacacactcgctcattg

SEQ ID NO: 99475 - DNA, 430 bp, Homo sapiens
aatacagggcgtgacatgggctgcttgttgtacgtgttctgttggaacgcactgcaaaacgagctcagcggcatcagcttctcaacacacacctggggggacaagccaggccttgtttgccgaggcttacacttgcaagcacccaccccatgccttgcaactggcaggggctgggagcctcgagagtcagtctcagccctggaggggaccagatacagtgataaataattacccgatgcaaagaggagtccagaccaagagtagggaagtacctgagtgcaggtggaaaggaattctagtgaataggttcctggaaggctaaaactgtgccagcatcctaactctctgagccacaggtgcaacctaattatccctacagcttcttccacccaccacaggcagagtatgggtgagcagaacccacttccat

SEQ ID NO: 99476 - DNA, 416 bp, Homo sapiens
aatacagggtgcttgttggctggggtgatgtacctccagaagctacagctgacattatcagtgaggatattgcttcagagtccgtgcctgacattagcagcgaagatatctctccagaggctagagcagtcattagcactttggacattgcttcggtgtcttcatctgtaatttgcaatggggacattgcctcaaagctgggagctggcactggctgtgtagacatcactccaggattcatatcttgcattagaattggggataactctccagaatctggggctagcattaatggtgtggacattgcctcagaggatgaagtgctcattataggtgtacacaccactccagaggatggagctggcattgccaatggtgatatctctgcataatctggtgctaccattagcgatgcg

SEQ ID NO: 99477 - DNA, 418 bp, Homo sapiens
aatacactctgctcggttttcagccttggagtccccatgtctgtgatggtgatggtgatgttgtactcggctctggtctctctgtccagcgccccttctgttaccagcctgtagaaattctcaacagaaggttttagcttaaaaagaacatcatcctgaattgagcaaatcatttttccattttccccagagtctcggtctctaatcctaaacagggccacttctgtctctggagaattctcgggaatagggctggtaagtgatgaaatacttagttccgggaagttatcgttaacatccagcaccttaacagagacagagcattttccagaaagtcccccgccatcagatgcctctatatctagatcatacgaagacattgtcttcaaatctagctttttaattaagtcgaatttcg

SEQ ID NO: 99478 - DNA, 414 bp, Homo sapiens
aatacacggcggggaactgataaatttagaaacataatatgtgagccagctatcctctgaaaaacaggaattaaagaagagaattttaaaagcaatatcttattttcctttttgctctcttttagggaaccttatccttttcattaacaatgaggaaaaaactccactttacctaatgaggtaccaaggctacctatgttggctatgcaaatagttgtattatattgtaaaatcttaaagcaaaacattttatgtctatttgaaacgtcatcttacattcaaacgccatagattttagaaataataagttaactatttaatttaacatgcgcatttggccaggcgcgggggctcacgcctgtaatcccagcactttgggaggccgaggcgggcggatcacgaggtcagcagatg

SEQ ID NO: 99479 - DNA, 415 bp, Homo sapiens
aatacaagctgggtgtcgagtaggttggtgacgtggggtagtctgcacctccttctgttgacgtggttggaggctttgtgtctggcaccggcagaggcacaggcctggccatcggtggtggcggtggcggtggcaacattggggtgggaaggaatgggttgtgcaccttgtcttggctgctcccattgggattgaggaaccccacctgtccagcctgctgaccagcatcagggcagacaagttggacaaattctttcaacgtctcctgagggtgatagcggatggctgtgtgtgacaagtaaagcccaagctgctgtataatgggtgatgtttttaaatgaagagtccgaggtgattcatgtggactttgttttgaggctggaatgccttttacactggttccgggcaaacctgg

SEQ ID NO: 99480 - DNA, 410 bp, Homo sapiens
aatacaggcggtgttgtcattgatgagctgcatttctttgaggccagccatacgagcagcctgcagcacagctcgacgctcggcctggttgaagaaaactggcacggtgatcactgcatccttgatgggctgctctacagatgacaacagaaaagggtcccgccggctccataccttagatgagggcttctaatctggtcactaatgacattttggactatgtaactctgtgctgaggggctgtcctgtgcactgtacgatgtggagcagcatccccggcctctacccactagatacgaggtgcccccctcaaatgtgacggccagaatctatcttcagatgttgctaaatgttccctggcaggcaaacttgcccctgccggacaattacatgcctagattcctgggagg

SEQ ID NO: 99481 - DNA, 411 bp, Homo sapiens
  misc_feature (1)...(411): n = a,t,c or g
aatacactgggctcaacatcaagagcaaagaggtccagagtggtaaagatataatgatagtattctgtcatcattcccatagctaatgcctgctttaaaatgcctgctgccatttcatggctacaatcaaagattacatgaaactccttgcctcttttcatttcttttagtaagggttttgcatcctttgtatcaacaggtaactgacgaattttgagtcgaagattataccttgatggagctttgatgagctcttgcaaacgaatgagaccagcgctgtcatcatacacaaccgtgacggttttccacttgaaaaactgcaccacgtctaaaatggcacggctgagtgaagagaagtctgggtagagactgacatagaaggaatctttgttgtctgacacctggtgcttn

SEQ ID NO: 99482 - DNA, 411 bp, Homo sapiens
ttcgccattcgtgcttcacggttccaacagcaatggactcctcacacacttcagaagcgacgtactttcctacctttatgcccaactctttgaggactaggtagcctgtcgcgatgccatcaaacaatgacaggactcgaatgggccgccttcgggctgcgggaatggcagggtacagcttgggggcttcatattcaagccccgtgtcactggtgaagaaggcctgcaggcgcacgttccagtccttccggcgccgcaggacgccatgacagcgctgcgggagacacatgtaacagctccagggctcctgaagcttggcctcggccgctgtgcctgtgcccaccagcacctccaggcactccacacagaaacaccggcagcagctcgtgttgctgcaaagcagcagctctg

SEQ ID NO: 99483 - DNA, 422 bp, Homo sapiens
aatacatggctgcagtctggtattctgtgaataattctggtcctggctggccggagctggcggctgttgtgggagaggtttcggatcattccgaagggcagatatctgtgtgttcagaggcgctgtgcttctctctgtcttgctgctagaaatgttctggatgtggaatgagaccatagtttcaacctggcccttcaaaacagcttttgcagctttattggccatctcagtagaaaacacgtacaccactttggctggagtcttctgagcaggtgtggcctctgcggcagtattttgtccatgcgagggggtacaagacctggtgcctggtgcttctgatggcgccatccgagcgctgtggtgcccttggtctcccttacattgcacgcctcgtacgcttggctccctccttccactgcacg

SEQ ID NO: 99484 - DNA, 400 bp, Homo sapiens
aatacagttgtgggtggaagaagctatgaagcaagggtgaagggaaagtgtgccagtgcaccagacactggtcaggggcatcagaggagtgtgccatgggcctcaggatgttccaagtgaacagcatatgtgcagtgggaaaagccaccagcttgaggccaccaagctcagcagccaccttccgtaagtgcctccgtgtactcacctccttcagctccagctcgatgatctgctctttgaaggaataagctttgttctctcgcttcatgttggccttttttatgctgtcctgctgggcactctgaatgatggatttgtcatacagctccccagcaggggtctgcataatggcaaactcctcccgcgtcaccaggcgcagtgcagggttctgcacggaggc

SEQ ID NO: 99485 - DNA, 419 bp, Homo sapiens
  misc_feature (1)...(419): n = a,t,c or g
aatacagctggggatgacaccaaagctatttttggtaaactggattgcagaatctgtcatgtgctgcagagctttattggtgaagtccattgccatatagatgtgcccttggcggcgagtaaatgttccggaactctccaagcctttagcctttactgcaggcagccagaccgccttaggagccacatatccaccatgtgccatgcctatccatgtggagagctcagacagatcattcagtccactgctgaccacagcaggtgtaggagaaggagcacaggttgcctgcaccgatgatgggatgaacgattgtcccactgccggacttcctgcaatgcccccgccaaggtcactgccaagcagactatctagtcctcctcctaggagattcactgctcccatctgtatggaggacaccn

SEQ ID NO: 99486 - DNA, 423 bp, Homo sapiens
aatacagggtggcgggtagtggggtggtgcatcgtccttgcggcgccgtcgggtgcgcacctccaggcagatctggcctttgaggtggcgctgcaggtggtcctccttggcgaaagccttgtggcacaggtggcactcatagggccggtcccccgtgtgcaggtgcatgtggttcttgaggtcgtagctgtgcacgaagcggactgagcaggactgccttgaataagggcgctctcccgtgtgcttccgcatgtggatcttcaccttgacgttcctggagaattgaacacccgcgacctcgcaggtgaagggcttcttgggcgtgtgggtcctcatggggagaggaactatgcctgcctcatgaataaaacgtgaagcccttggtcacttacgaaacggggtggggggggaatctctacacct

SEQ ID NO: 99487 - DNA, 428 bp, Homo sapiens
aatacaggctctgacttaagatctttccatactggtcacatttataagatttttctcctaggtgagtgctgggatgggcacgaggatctgtatcatctgcaaaggccaccccacagttattacatgtgaaaggctgtggtaaaacatggaccacatgatgttgttcaactgttgatttcatacccaagtttttcccacagttggggtgtctaccagggtcctctcctttacattcttgggactcatgatgatcacatgaggtccaattgaggctctcatcatgccgagcacgtctgtacaatttctctttcacgtaaattcccttatatctttcctgagatttctggggctcggtcattatgttggctttcctccaagattctggagtaagaacctgtgtcaggctttgccatgctgcgatatcttgg

SEQ ID NO: 99488 - DNA, 425 bp, Homo sapiens
  misc_feature (1)...(425): n = a,t,c or g
aatacatgttcgctgaggttccgggcccagcccatgctccgcacaagctcagagatgaggttgcccacagccatgctgaactccagttcccgctgtccccggcttttctctcttgtggcacatggggagctttggtctccagctcccagctctggactgctattcagctgatccaggagggacgtgacacaaaggtagcgcttcaccaaggagaaaagcagctttcctgggatctgaggcagatgaatgccctcaaaggccatgcagtgttcttcagaggatgtggtttctgcaaacagctccagcaatgtataacgactgtcaaaatccatgtgctgctcgatgccatcttgctggctcagtgatagaaggacgtgagcccgactcccagcatcgtgggctgccagagcctgcagcattntgcc

SEQ ID NO: 99489 - DNA, 460 bp, Homo sapiens
  misc_feature (1)...(460): n = a,t,c or g
ccgatgtcatctcgatgccgtttcggaagcttgctcctctgagcgaccgcttacaccgttgggtatggcggtgcacacctgtaatctctgctactcnacggggggatgcaggagcatcgcttgagcccgggaggcggaggttgcagtgagcagagatcgcaccactgcactccagcctgtatggcacggtgaggttccatctcaaaaaaataaaactcttgaatatgaatgagaccaattaaacaaaacctcatattaaccaccaccatcaaggagttttcactacatacataactaataacgtgctcagcctttaacataaaatatcaaacttaaccctcataataaccttgtcaagtaggtactacttcctttcatgtatgaaaggagaacacttacgctgagggagggtaagttagttgcctaaagtccagctaaactcgaaattcaatttcagttg

SEQ ID NO: 99490 - DNA, 418 bp, Homo sapiens
tactacactacttggtgaggaagttccccaggactcgcgttgggtagccacgggggatctggtaagcagacaacccgaagtaaacacatttcacaaagtaccaaagctgggcaaccaggttctggctgaatttcttctttatggtaaaggcttttgctttgattaaatgttcttgaagcttttccatataaagttcccttttgcctttttgcttaatactcaaaacactgcttcctttttgactgctgtttcgggtgcttgtgctgcctctttgggatctgtttgaagaaaagctggatctctgggatggctcgtaacttgatgccggagcgcttcctccggacaagctgtctgctggtccgggaaaggataaatgcactgactcccacagacggtcgcctggtttaggcgaccttcc

SEQ ID NO: 99491 - DNA, 401 bp, Homo sapiens
aatacatgcctccctcctgccgttgtttttttgtcctggtggacgtaccaggcccctggggcctggtggcagcctggctggaaccctgcgagtcctcatgggaatagttatctggtacaatatcgtcaagatactcaaaggccgtgcgtacttccccatgctgtgtgaaatactccaccaggggcttcaaaaatgcatggctgctgacagtacggtagtcacagatgaccgtcacgagacgtcgtgcacgggtgacatccacgttgatcctccggtcctcaacaggaaaaccaacttcacctttcctgttggatctgaccaaggacagtatcacgggctgcttctctgggccttggaagccatcgacagacttgatttcaagctcagggtgcctgtaccca

SEQ ID NO: 99492 - DNA, 418 bp, Homo sapiens
aatacattgggtcttcggggctgcagttggcctttgattcccctcctgggcttaagctgaggtctgtggcctgggctgtttctgaggccccagccggggtctctgtggtttctggagccagcccagccttgggccctgagtccacaggggccgcagtggtgtttggacctggctgcggggcctctggctgggctggtacccctgctaggacctggggagggccagttttagcttcagaatggccaggctcttttcctgtatccttgggactcttctcaccccccttcatctcatatatctgacagcgtgcgtctgtcattttgatatgggagaggggacagatgccctatggtgtggatgccatcggtttcattccgtctaatcgcttgtatccgtgtcttctgttcgtccgtctgtg

SEQ ID NO: 99493 - DNA, 437 bp, Homo sapiens
tggatgcggtgaggcaacagagcggccgcaatacatggctgtgtaaagcttgggtgtagtataagttgagaattttggatagaatgagggctgggtaatttgtcttttggttcccagaaggatggagaccagcagtaagaagtagaaaataatgatgatattagtcaccaccaccaccaccaccatcatcatcattccaacagcaagagctaacatttactgagggcttactctatgtcaggtcctgtgctacagggaccatttcatttaatagtagcccctttttactaatgagaaaactgatgctttgagagtttaagtaacttgtctggagtcacacagttagtgaatgacaggaaccagagttcaaaccctggtctgttaggcttcagaagccaaacttcttttaaacaactttttaagcgggacaccaaggc

SEQ ID NO: 99494 - DNA, 398 bp, Homo sapiens
gccatgtggctgctggggccgctgtgctctgttgttgatcagcgccgcggccaaggctaagtcgaaatgtggcccaaccttcttgccctgtgccagcggcatacattgcatcattggacgcttccggagcaaagggtttgaggactgtcccgatggcagcgatgaagagaactgcacagcaaaccctatgctttgctccaccgcccgctaccactgcaagaacggcctctgtattgacaagagcttcatctgcgatggacagaataactgtcaagacaacagtgatgaggaaagctgcgaaagttctcaaggcgttggctacgtttgtggttttaagaaagcctgagggcctgaaggcagcctgtggagaatccctttgcgagggcattcggaacctt

SEQ ID NO: 99495 - DNA, 431 bp, Homo sapiens
  misc_feature (1)...(431): n = a,t,c or g
gtcgctacggtaagnggaccctcagagcggccgcaatacagggtaggggtcgggaaacccatgacttataaggacagccagtcccctgaaggaactgcaggaagttctcctcaatggagccctcccggctaggcagcctcagctcctcctctggagctggcttgaagaagcagacaaactgcttgctgagctccccccggatctgccggttgagacatccatagaagaaagggttggaagtgaagcaaaagtagccaatccaggtgaccacactctccacctgcccagttgaaatgggctgagcactcagggcaacatagaggtggaaagagaagtagggcgaccaacagagcaggaactgtccccccacagccaggagaaccactgctgctttccctcccccaaacgtccggtgtggggtggtctggggg

SEQ ID NO: 99496 - DNA, 407 bp, Homo sapiens
aatacactccggtgtttaatgaggcgacagctctggctaaaggatttcccacattcactgcacatataaggccttgtacccaagtgaactctctgctgagtaataaggctacaactatggataaaagatatcccacattcactgcactcataaggcctcattccagtatgaattctctggtgtgcaatgaggctacagctatggctaaaggatttcccacattcactgcacttgtaaggcctttctccagaatgaactctctgatgtataagaaggtcatacttcctgctaaaaaattctccacattcatcacaatgatgaggtcttactccagagtgaattcttcggtgcgaaacaaggctagagctttgcctataggatttcccacattctccacatgcataagg

SEQ ID NO: 99497 - DNA, 417 bp, Homo sapiens
aatacactcccgtatgagttctccaatgtacaatgaggtgtgacttcttgctgaaggttttcctacatgcagtacattcaaagggtttctctccatttttaattctctgatgtagactaaggcctttctttcgcctaagacctttcccacactctttatagccatagggcttcattccagggtttgttttctcatactcagtatggaagaacaattttgcacatccattatcatatttattttctgcagaacttctactaaataagtctaaattatctaccatattatttccaaatgattcgtgtttatcgggtctttgtattgaagcaacaaggtttgtactcagatgaagtatgtttccaaactcatgacagtcacgagcactcttggtgataattgttttctttgccagaacac

SEQ ID NO: 99498 - DNA, 439 bp, Homo sapiens
agcattcttgatgctatacagccgccgcaatacagtcgtctcatagtttattttcaaactcttattttctttattttgctcaatacatgaagcattttcctttgatccactgcaatctgtaagcctattgagtggcagtgatcatacgtctttcccctgtgaccttctgatcccctggggaatagccatggctgaggaccatcagttgtctccaggcttgaatgctgaccaatgagagattggagctctgaagatttttgaagtctgtcatggcacggagcaagaagggatgtcttctcccatttctgtaaaacttgattggcttcttctatcttctgctcacaacttttttgagaatttatcaatgtcacctcataaaattcttggatatctaccaaagcttggaataagctgctcttaaagatacccatcacctttt

SEQ ID NO: 99499 - DNA, 317 bp, Homo sapiens
gctgcttgctcatgctctggaggaggtgggggagtagggggagcaggcaaagaaggctccaggccaccccttcgtgggaaagcacaaagactgctgatggtcaaggagacagacgagaaagtggctcccagaggcattgcagctccccccacccccagagcaagagcaccacaacctcatctgttcccgctgccagggagggggctcaggaagctgcacagggagggccccggaaaggccagacttccaggcctcaagtgtctacacgtcagtgtgcaatgccccctgcccgccaccggaaactagagaatgatgcc

SEQ ID NO: 99500 - DNA, 396 bp, Homo sapiens
aatacagggtgggagctgccgacgacttcttcttggggtgctggtgtcagagacagaggggatggagctctcacttatggaacctgtgccctgtatagcaggagagacatggcatgttagattgggcttggcatgatccctacttgcaactctgttaagagagtccttggaatctgaattctgtcagggagaggcctgagctggagctccctgtagtattcacatccactcagggaaaaagggattgaagagattaaggaggcaagaacatttagaccaggacatctcagactttgtgcatacaaacctctggggatctggttatactgccgatgcaggctcataagatctggggcaaggactgagatatttgctttttaacatacttcccagggg

SEQ ID NO: 99501 - DNA, 398 bp, Homo sapiens
  misc_feature (1)...(398): n = a,t,c or g
aatacaggggttgaggattggttaaaagctttaccacatttttcacatatgtagggtttctctccagtatgaattctcttatgtttagtaaggtgtgaggaccgagtaaagcctttaccacattcttcacacttgtagaatttctctctggcatgaattctcttatgtttagtaagaattgaggaccaattaaaggctttgccacattcttcacatgtgtaggggttctctccagtatgaattcttttgtgttgagttaggcgtgagagcacgtgaaatgatttgccacattctttacatttaaaggttttatctccagcatatcttatcttatctttgtttgaatttgaaaatctatgaaaaactttgacacatatattaaattgaattgttttttn

SEQ ID NO: 99502 - DNA, 448 bp, Homo sapiens
atctggccttgcggaacctcccagcgggcgcttcaccattcgtgcactgaaatcggtttttttattgaccatgaagtctggcttcacattgctatcggcttctgacccctcctcttcttcaatgatgggtatggtgttagctcgggagaggatctgtttgaccagccggtacctgtcgtatagaggcttcatcacctgccgttcgttctttgttaccggccgtccatgaatgctttcataatataacagagctttctgcagagccactttctcattagcaatctgggctttggtcatatccttaatgtcctcagggcggctgctttccgctcgcttatactggagcttcctctgaatagattccaatgtggcttcaatactgggctttattgctttatccaccagctcttgcttcttctcatcttctttctcaaggtgggaaccaaat

SEQ ID NO: 99503 - DNA, 463 bp, Homo sapiens
  misc_feature (1)...(463): n = a,t,c or g
gtgngccgttttgcgagacnctccacagcggccgcaatacaaggggggcaggtatggcttctcatgtttgtgtgtctgggcaacggggtggtggaacactggcagtgcttctgtgtaaggcacagtgggccccaatgggggcctgtcctgccctgggcccttgcctcccgggggtccaccatgtgaggtggccgcagaggaaatctgggacaatgagcttttggcagagggtttactggatgagggctgtggttcttcgctctcctgtcttcccttgggggcaacctccaactcagtttctggaggcctgctcagagaggcctgtctcaccaagaagcattttcttctctctggcggggccacccgcgctggtggagccactggggctggagcagaagggcctgtcaaggacaagctgccatagtcaaaggatttgctgcgtgtctccgtcatgtgagcagaa

SEQ ID NO: 99504 - DNA, 366 bp, Homo sapiens
aatacatgcgggggagtgcgtcatggcctcattgaaggcgatgaaggccaggcctgtgccctgcacggacttgtccagctcgtcctccagaaggcaggggtcaaggcccagggctgagaactggtcctccttcacggtcatgatgacattgtacatctccatgtagtcctttgtggtcaggtgggagaagttgacgtggggtgggatgaggtcccggctcaggacgttggtgttaaggtaccctaggattttctcagcattctcgaccacacacttctcattcatgatgttggccttgaagcccagcacagcaaacaccacgagggtggccaacactgacgtgaagaagttgatgaaggacaccag

SEQ ID NO: 99505 - DNA, 366 bp, Homo sapiens
aatacactgtgctggaattggtcttccactaataaaatttcattattttttccaaaatttctgaatggacactgactttctggagacagacacagaagactgtggagagtcagcccaatcaggctctgagactgtgcctggattactcctaacacccccatcctgggctcacctgcctgatcaatcacatttttgtgactgactctcaggcagagtcaagtacaattagttcttggtgtatatgaacatcggtaaaagagcagcaaatgccgggcgcagtggctcacgcctgtaatcccagcacgttggaaggccaaggtgggaggatcacgaggtcaggagttcgagaccagccttgccaacatg

SEQ ID NO: 99506 - DNA, 398 bp, Homo sapiens
aatacaaggctgagtgtcttctctgatggggagtgacaaagaagtgatggtaacctctggggcgttatcatttacatctagtacttccaccaaaagggtacaatgacccgccattggaatatttcctttgtcaactgcctccacggatatttcatataatttcttttcttcgaaatctagtttgccttttgtcctaatttctccattgttcggatttatggtaaatgcatataccactgcaggccatacaggccttctaaatgagtaaactatatctccatttgtaccgtcatcaggatctgtggcatttagcttgatcactaatgttccattgaaggcgttctctaacaccgtcactttataaacggattggtaaaattccggggcgttgtcattca

SEQ ID NO: 99507 - DNA, 436 bp, Homo sapiens
ctcgccgactcgggtttggagaccccacagcggacgcaatacacggtggttgtttgtcattcgccgcatgtcttgttttcattaatggtaacaaagtcaccttggtgtctggggggagagcagaaactaacagagcctactttacttaggaaggtaggatgctaatttatttgcctttgtcttatattaatatccttatctgtaagaagggggaagaaaatagggctgttttgaggagatgtggctgagaaaacagaataagagaattacaggcctgagatcccagcactctgggaggctgaggtaagaggaacgcttgattccagggatctgagaccagcctgggcaacatgacgaaaccctgtctctatttaaaaaacgacatttaacgggctgtggcggtgtgcatcagagggcctacctactcaggaggcta

SEQ ID NO: 99508 - DNA, 467 bp, Homo sapiens
gacgagctcgagcctaagagcggccgcacacatccctcaactctcatagctcacccccctctaagtgcaccctctgctctatggtgacaaccactcatttcctgatcaggagtatgcaactacatacctgtatgcctgcacggatgctctttccacctaaaatatcttctccattcctgctctgtagactctcttcttctctcctgtttttaaatgtacttttatattgatagggcctcactcttgtcacccaggctggaatgcattgtcgtgaccatagctcactgcagcctcgaacttctgtgctcaagagatcttcccgcctctgcctcccaaagtgctgggattacaggcatacgccatcatacctggctgaagactcatttctattcttcatttaaaacttagcttaactcaacttttccaggaagcatttaaatcttatttaaatgcccaactatatttgc

SEQ ID NO: 99509 - DNA, 474 bp, Homo sapiens
  misc_feature (1)...(474): n = a,t,c or g
ttgtacgaactttggatcctntagagcggccgcactacatgtggggctgtgcgtcagtcacaggcacactgttgaggagcaatacagtaccctggcccttctcaaccatggaccacaggtggccctcaaatatgtccacatggatgaagtccccatgccagcctgctgcctggaaggccaagggtgcctgccagctctgtgtggtgagtgtaaactccagggttccttcatcctgagtgccccaggcaggcaaggcagccagagagtgtgacccacagaagcccagggccacatcatcattggcagaaaactcttcagcacagccctcatgcttattgcgggtcaaaggctggacgagtctgcggccattgagagcggctgcatggaggcaacccctcaggggatggctggttcccctcaggtagggcaggccaagtcttccagtgctcccaacaaagagcccataggggactn

SEQ ID NO: 99510 - DNA, 429 bp, Homo sapiens
atacacctgctggcctttgagggaggatggtcttggcctgcctcctcttggggtacaggtggttttgtgtcctgagacaggggagctgaccggggaagggtccccgcaggcttctgggtgggcagggcgggcttggcagccacctcaggccgggagccggacacacctagcttggcctcctccgccccctcactaaccgccttccccagagcggggccgcttttggtggtttcgaagagaatcatggtgctggagctgggccgcaggaacacagccttgttgaagaggggcgagctcgtcctcgggccctccccactgcccacctcctgccccaccaagccgggcatcctgttgtccagatcctttgctgctggctcctcagagagccccccagagggggaaggtccagtcgaactgggccgcagagac

SEQ ID NO: 99511 - DNA, 485 bp, Homo sapiens
  misc_feature (1)...(485): n = a,t,c or g
ccgcgtcgaagcttgatcctcagagcggccgaatacatggggtgttgcgatacgcaggtccaggatgcggtcgtacacggccttggtggactggaaggtgccaaggctctcctccaggtcggcgagcatggaccagaccttcagtgacttgtacacgcggttctgcacgggctctgaaccatcaaagtactcggcccggcgggcaggcagcgccgtggcctttcgcagcagccgcaaggcctcatcgtagttctcgtgtcggagctccagctctccgcactgacaccacacgcttgccaggtcatccacctgcttgaagttcaccttggtggccttctccaggatgacacgggcatcgtccagctgtccgttgtcctcatanaacttggcaaacgccacccacagagtgtggggcttggcttgtgccttggaggggtccaccgtctgcacaaccctntgggtaggtggtggatgaactcccgggg

SEQ ID NO: 99512 - DNA, 410 bp, Homo sapiens
aatacagtcttgggggtatgatgttacttgtagaggcagatactgttgcagcactgccaggtcttggggaggtgggtgggctgctcacagttttactggcatccagttcagatgaagctcctgcagttgctccctgggtcccttttccaatctgatccttctttttacccttctttcttccccggtagtaagaacgttctcgcattggcagccatctttctggatctggggtaacttttgggtcataattcttaggcaccattcccttctttttctttttcttctttttcaaaactccctgtccttgttcctttggttgactatctccagtaacttttccacccttcttccgaatgtatgtagcaccagcagaattttcaagagcctcaacatctacttttagagacata

SEQ ID NO: 99513 - DNA, 401 bp, Homo sapiens
  misc_feature (1)...(401): n = a,t,c or g
ttcgccgttgcttttcatcttcccatatggcctgtagaccagggtttccaccaatttgagcttcaatgtccagacgatttaagatatcagcagctacagcatccacttctaattcacatgtactctgtggttcaacaccttccaatattaaagagcttggtatttcatcttgttcccaccgaaataaagtatcagcaagagaattccctgataaatgattcttgcaggatccagttgcatgcaatgtattacttttccttcttgcttttcggaacttgacagcagccagatttattaaattcatgccataaagattgtagtcaatgaagagctgtaggaggtagggaatatgcgcttcatgaggctggtaaaatttattcattatggctccgctttgcaan

SEQ ID NO: 99514 - DNA, 403 bp, Homo sapiens
aatacactgtctgtattgtaatgaatgctgaagtctggtctataaaccaagtttgctttgaaaatcaagggtctaattgttgttttaaagtttaatcaccaactcgtgcagtcggagcagacagacggggaagacttgagagtcagtcagagggattaccgagagtgcagagcctgggctaggaatgttgctgccatttctgacttctctttgagcagagacaagcacttatttttttttttttttggaaaggcagttcccttttgccccccagttgggagggcatggacgcaatctcaattcattgaaccttttgcctcgggggttaagggaattttcccgcctaagcctcccaggggggtggatttacgggggggcccccccttccccaacttttttttgt

SEQ ID NO: 99515 - DNA, 398 bp, Homo sapiens
aatacacggtggcgtgggtcataggggcagcgggccacaccattgatcttctcagtagtccggctgaggttccccacctgtctgctggtgcacatgggggaaaaggcattggttccacacatgaacaccttccggccggcgacgatcaggactcgcacgtagttctgacactcctcctgaggcaggaaggaaaggagcagacagcacagctctccaggtgcgatgctggatatctcacgctcacaccactgcgtcatggatgccaacaagtattctaaacactccccttgaccccagatccacctgtcccgacgtccgggtcatgtctgtggacgtcccctcccaccaaggtcatttctccgcatcactgctcactcagatgctcaggaccagctcgc

SEQ ID NO: 99516 - DNA, 400 bp, Homo sapiens
aatacatctcgtctgacagaaacaccttcacatataccatggacttgaggcctcccccatccacagctgtcactgtgaagtcaaagcttgagggcccctggtcacggtccagggtccgggttgtgcacacatcaccgctgtgggcatcaatgcggaatgggggagatccggaggacccaagtccagcacccaaggaataggagaggaggccaaatgggccactatccgcgtctgtggctgtcacctgcaggaagcaagttccaggctgggtgccctcaggcagtgaggcattgtagaaagtcctctggaattggggctcattatcattcacatcttgcagggccacgctaactgtggcagaggaagctagaaggggcaggccaccatctgtggccaccac

SEQ ID NO: 99517 - DNA, 397 bp, Homo sapiens
aatacaggggtgtaatggataaaaatcaaccgagtgaagtggacagggcagaagattctatggagcgtctgtgggtatggcagcgcgagctagtggaggggtgaggatggggctgagccctggctctggcacagaggatggatacccaccctggacgatgatgaaagcggtggcatggacgctgtcaatgttgttggtcgcagagcacgcatactctccgctgtccccctgtacgacgttctgtatgtaaagcccgccagaaggcgtgatgttcacccgcgggtcaactggcaagggtgtgcggtcacctctcgtccaggagatccgcggcggggggtggcctgtggcgctgcactccagcgtgacgctctccccaaccagcacctctgtattgtgg

SEQ ID NO: 99518 - DNA, 404 bp, Homo sapiens
  misc_feature (1)...(404): n = a,t,c or g
aatacattggcattgtcattcacatccagaaccgtgacgataaccttcgctctggttagaaggcccggaccatcctgagcttcaatatcaatttcatggaatgtagcatcctcataatctagatcttttatgattgtcagttctccagatgttgacttaagctcaaatacctctgaggtttctccagggcttttctctagaaaatataccacttgagcgtagtagccctcatctgcgtcagtggcggtcaccgtgagtatccgggtgcccacgagcgtattctccggaatgcttatgcggtactcgggctgtgtaaaaacaggcgcattgtcgttcgcatccaggaccttcacgcagatgcgggaggtgccagatagcactgggtcacccccatcagaagccan

SEQ ID NO: 99519 - DNA, 406 bp, Homo sapiens
actacattggcattgtcattcacatccagaaccgtgacgataaccttcgctctggttagaaggcccggaccatcctgagcttcaatatcaatttcatggaatgtagcatcctcataatctagatcttttatgattgtcagttctccagatgatgacttaagctcaaatacctctgaggtttctccagggcttttctctagaaaatataccacttgagcgtagtagccctcatctgcgtcagtggcggtcaccgtgagtatccggctgcccacgagcgtattctccggaatgcttatgcggtactcgggctgtgtaaaaacaggcgcattgtcgttcgcatccaggaccttcacgcagatgcgggaggtgccagatagcactgggtcacccccatcagaagccacag

SEQ ID NO: 99520 - DNA, 391 bp, Homo sapiens
ttcgccattcgtgcagccctgggtagggctcccagcccctctactcatccacaaacaggaaaagcagtccctgtccctctggatgggtgtgcaggcttgccacagggagaccccttgaggaataaccagtcttgacctgtgcacactttcatttctctgctggagctgggggctcctatttcatgatctctcgttcactggggccagagtttggaggtgctgagggcctgtgcttgtacctggcaacaacattcgcaactgccatgtacatactgggggccatccagatcttgctggtgagtcaggctgagccatggtcaactctggccatgatcaaacagttcctttggactccaaacagaaggctcatggtgctcatccccacatgtct

SEQ ID NO: 99521 - DNA, 435 bp, Homo sapiens
gccgcgcacctaagctaggatcctctacagcggacgcaatacatgtcccttgccttagaatcatcaggccattacattttacatatacaatggttactaatgaatacctagtctaacttcattgttttacaaataaggaaacacaccaaaagtgactttcccatttgtttttacatgtccaattacttactttttataaaattaatatgatttacttgagtcactcttcttatccacctgaattttcaccagtaacaaactaagaaattaaagagatagttatcttctgcaggatatacaatcacacactactcagagagttagactgaggactaaccaaaatgataactctttactcacagcaagccagatgtatttttcacgtcattaatgctcttttctggaactttactgccaggtaaccattctttattt

SEQ ID NO: 99522 - DNA, 363 bp, Homo sapiens
ttcggtacaagagcacgctgatgcagacaaatgcaaagatggtgaagagggtgacggagaaggccagtgtgccggccgacacgtggaactcctgtccctgcagagcccagtagatggcggccacggaccaggccaggccgatgcccaggaagacattgacggcgttgctgcccgtcacgttgccaatggaggcgtctgcatatacatcctggagggcagcagctttgctggcaaacgtatctgggacagaggtgccaaatgccacgaaaacaacagctgtgactgaatctttgagaccaatggtgcagccgaagtgcgaggccaggtccccaatgatggcggtgagcatgccaatgatgagga

SEQ ID NO: 99523 - DNA, 392 bp, Homo sapiens
  misc_feature (1)...(392): n = a,t,c or g
aatacagggtgggtgtatttctcctgacgcatattctaaatgcgagcccccaactgacgaatgtggcatttcaacagcatattctgcaaccatatactcatcttttactttagtacttgaagaataaagaggcgagtaatcatttttgacttttttcaggtcacatttgcccaaagcactctctttgtccattccagatgatcttttctccgttatctgccttttcttttttggcagtgagttgtcttttggtgatgtagaaaagacagaatcttcctcagatgtcagaaggccacctttgatggcacatctatttagttttttgtcatgattttcatggcacatacgttcatgtttcaatacacgatctgttctggaaaaatactgaaaan

SEQ ID NO: 99524 - DNA, 393 bp, Homo sapiens
aatacagcttgggaaccagggcaacttcctcttgatatccagacacaggccaccgaagaaccttcctgtccagataagttcctccccgatttcatgcatggctggcatctctccatcatccccgctgcttgttccgccggccccgccactgccagccccgccgccactgccaccaccaccaccacctccattgcctcctccaggagctccgccgcctcctcccacagagccattcatctggcccagctctgctagggagaacacagatttcctcttgtcagcagagggcaccttcttggggggctcaatccggatatttgggtcccattctccaggaggaaggacgatgacctcatccagaaattcatcaattcctgcgatcagatcttcccg

SEQ ID NO: 99525 - DNA, 408 bp, Homo sapiens
aatacattggccagtacaaaatcccattgttaactaaagtcctactgctcatagctcaaggcacttcacaaaaaataaaaaatatgggtcttaggattctcctagtcttttcctattggagttatacatttccagcatccgggggttccaggtttcttagcacaaactgtaaatcagaagcagatgcctgagaacgaaaaacttcattgggatagctgcataagaaattgtaggcgagtggatcacctgaggtcatgagctcaggaccagcctgggcaacacggtgaaaccccgtctctactaaaaatacaaaaattagctgggcctggtgtctgtaatcccagctacttgggattacaggcgtgagccaccgcgcccggcctgctttcttataataacatattgggc

SEQ ID NO: 99526 - DNA, 426 bp, Homo sapiens
aatacatggtgcgttgtcgttgatgtctgccacctggagcaaaatgtgagcatccgtggacagggaggggttccctccatctttagcggttagagtgatgttgtaaaaggaaaactgttccctgtcaagggctctggttgtaaccagtcggtagtaattgtctactgacttttctaacttaaaaggaagatcctcggggagtgaacaggtggtgaatgcgttctgcccagagtctctatcatgtacattaaaaagcccaattatggttcctggaagagagtcttcagaaactgagctagtagcagatgtcatgtaaaattctggggcattgtcattcacatccagaaccgtgacgataaccttcgctctggttagaaggcccggaccatcctgagcttcaatatcaatttcatggaatgtagcatc

SEQ ID NO: 99527 - DNA, 436 bp, Homo sapiens
aatacaacggggctgacaactttgttctcctgcggcggggcagggcctctgctaggactctcttttggagaggcccctgagagctgagcgctttccttaggggactcccctgtcccaatggcggaacaccgaacatgttcttgcgaggctggcttggccgtttttggcaggtgcttactctgaaggtcggaggcagcgcctgaggggcagccctctggcaggggcaccctcttgctttcggcttgttcggcctttgattctttcgaccactgcttcggtggggagaatgtcccattgttcagagaaggtatcccgccagagggcagacacgcctgtttcgaattcttaaggttcacactgttgccctgtgagacaccgcccggggctctgacacaaacgctcccgttcctcagaagccctttcgtggggtcagcgg

SEQ ID NO: 99528 - DNA, 444 bp, Homo sapiens
  misc_feature (1)...(444): n = a,t,c or g
aatacagtgtgtgtctgtggtcccagctactcaggaggctgaggcaggaggatcacttgagcccaggtggtggaggctgtactgagccagtggtcaacacagagagattgtctaaaaacaaaaaaacaaaaaaaagagagagagagaagcaatgtgggttccacagtatgtggtactgcaatttaaaatagggtggtcaggaaaatcctcactgaaaaaattacatttgggcaaatattcgcaggagctgaatagtaaaccatgtaaacatttgtgaagagcaatcccacagagaggacagcaaatgcaaaggtcctgaagcagaggcttggaagagagagtaactgaagccaggtgagcaataagaaattggtcagagaggtaaagggaaagagggcanataattacaagaattttggtttttactctggatgaaagaccaan

SEQ ID NO: 99529 - DNA, 400 bp, Homo sapiens
  misc_feature (1)...(400): n = a,t,c or g
aatacacggccccaagtaatacatttaccagctcagttaacaaggtaaaacaacactgtcgcgtcttcacacttttttctttcatctgcttgtgaacagctttaacaatgttggcaacctgactctgaagcattgctaaaggtgttcctccctggtccattgcatcaaggccacatagccaactttgtacaggactagtttgcttaaaaagagaatggtgtgcgtgacaaacatctgcctttacattctcttcacgctctttaaatctgtatattagtgcaggagagacggtcttgtagaattctggaagcatttcatgccttgtgctaactacagcatccaagcacttcgcagctgcacgtgtcactttccagctcatgtcattatcatcactgtattn

SEQ ID NO: 99530 - DNA, 409 bp, Homo sapiens
aatacatggtctgaacggggaaggaatgaggaaaggccaagtttgtgagagaaaacataattttttagtacctgggatggacaagctcttagcactttgtagagatgtagaccagaggcctgggggcgaaaagccccatgtgaagccataggacggcacatgaatccaaagagagggccagagcagaaagtgtcagggcagggggcactggagggccttgagcctagataccaggagggggatggtaggagactgagtccagccagtgggcgtagacaggcaccgcaccacactttcagaagctcatccgaccagtcccggcagtccctctgcacatcacacactttcccgccgtccacgcgcttgccactcttacactgaaatctgcggggaccctcacaaggtgact

SEQ ID NO: 99531 - DNA, 395 bp, Homo sapiens
ttgccttcgtgccatggttgagggtctgcgctgtgaagttgctgcagctcttaatgctctcctgcccctggagcagagtatccagctgcgactggaggactttgtgtttgaggccatagttgacctccaattccataagcagcacactcttgcgcacatttaaagtcttctggagctcatcaaaggtggaatgaatgtcatccacgatgctggccttttggttggttaactgatgaatgatttcagagatgaactgaagagcagaatctatttctgggagccttttgttgacagcatccaactggacctggagcgaggccttgtgctgttccaccacatccttgagtggaactgtggggagctctgcgtgctccccctccgtgcactcccgacaa

SEQ ID NO: 99532 - DNA, 430 bp, Homo sapiens
  misc_feature (1)...(430): n = a,t,c or g
caccgacgcatcttgatcctgttatctaacgcgggacacctctccttttattacaagaggtcctgacagccccggtggtccctgtcctacagggggacccctagctccgggggggcctattcctggaactcctggagaccccacggagcctggcaaaccaggaggtcccggttcacctctgatcccctgatgcccaggggggccgatcgctccatgttctccaggaacgcctgggaccccaatgctccccttctcctcgggcgagccaggaatgccgggaagacctggcaaacctttgagtcccggtagaccaactccaggctctcccttctggccctgcacacctgggttcccaggtaagccattatatcccgggcgaactgtaatccccggtggccccatgtctccaggtataccgacaacagctttn

SEQ ID NO: 99533 - DNA, 394 bp, Homo sapiens
aatacagtaggggtatggtcagtctgcagctgaaagtaccttggttctgatacagtccaatccacccacttcagcacacccattgctaccactggaaacctaatacactgataaagtgtgctcaattctgccactagttcagaggcccctttgttctcgttgcaacacaaattgtgaacggtttcgacagcttttgacgttgacttcagctcatctttattgatgctcactcgcttgttcttcttacaggtctcaaccacgcttgctgcgtacgccaagatgtggatgtatttgtgcttgaggtcctggctgatacgagcccctggtttaaagagcgactgcatgaacaggtccaggaaggctggaacgcggataagttcaaccggaagagggg

SEQ ID NO: 99534 - DNA, 464 bp, Homo sapiens
ggcccgcccgcgtacgtatgcttggatcctatagagcggccgcaatacaatcatccaacacaaaggtactcttgttcatgtgagcgaaggggtccttggccttgggctcagcagccatagcctgctcacattcatccatctcctcctcaggagcaggggcagccgcctttttctcctccttccgctcagcctggggcttctgcttctcttcccgtgaacccttctctttccgtggtgtgtcctttttaggttgggtctctgcaaactttttagcatcaaactgggccatcttctcacacagtttcacttcgcccaagacagcccggaactggggctggttaatgcaggtgaggaaccagcggttggtattgggaaaggcctggcggaaagaaggctctagaacctgcttatagagccacaacagggtgcagacaactgtgatgtcagccaatgtcactcgttcg

SEQ ID NO: 99535 - DNA, 413 bp, Homo sapiens
aatacacttgttcatctacagaatggttttctttacaattaacctttactatttgttcatcataaagtatcgcggtttgcgtatggagcgtaactggccctgtttttattatggaaactccattggctaatgccatgaaaacaatcagctggtcttgcttatactcatacacagttccaccatgtctaagatttgctaatagcatttcggcagcttcaattgcaactttgtctgcatttacacctcgtttaccaagcgatgatccagcaaacaaacagccggtggaggtctcagcaataattattattccatgtccattgccacatgcttgggctttaggttcttgaacaggctggatgtctacataccaattccggatctcctttctgatgcatctaactggtggcgttgcc

SEQ ID NO: 99536 - DNA, 411 bp, Homo sapiens
aatacatggcgccgatatgtacctgacgatctccaccttgggatcggtggcagctgtgatgtggatggctggagagaccctgggcagctggtcaggctccgtctgcacggagcagtcactgatggtctggatgcccacgctgctcatggccctcacagtggcagcagcactggatgatgaggcagtggcatcgtgcttgctgtcagagcctgagtctgagtggcggggaagacgagacctgcggcggcgcactggctgctcccactcagcactgtcttcgtcgtccgtctgcacactgcagtcagcactccgccgtgcccggcgtcgccgactcaagaggtagcggctctccccatcctcatcgtctgtctgcacgctgctgtcggcaatcctcctgaccacacagggctc

SEQ ID NO: 99537 - DNA, 409 bp, Homo sapiens
aatacatttgctttatcaatgcttgattttggatattgcttttatatcctgaaactttactgaattcatttaacaaatctaagagctttttgtagagtctttttgtttttctaggtataagatcatatcatcaacaaacagagataatttgacttcctttttttccaattttgttgccctttatttcattttttagatacagggtcggacttctgtcaccaaaactgaagtgcagtggtgtaatcatagctcactgtagccttgaactcttaggctcaagcaatcctcctacctcagcctcccgagtaatttttctttatttatctctttgtttgtttgtttttgagatggagtcttgctctgtcgcccaggctggagagcagtggcgcgatctcggctcactgcaagc

SEQ ID NO: 99538 - DNA, 447 bp, Homo sapiens
  misc_feature (1)...(447): n = a,t,c or g
gcccccttgcttggatnnnaagagcggccgctatgtcctcgcggaactttcgcttcctttccagccaccgcgagctctacttcggggtggatctacccagcggcaatttggtggtcagagagccggcggaccgcgaacagctgtgcagggccaaagctgcctgcgtcttgacctacgacctggtgctcgaggacccgctggagctgcacaagattcggattcacgtcctggacaccaatgacaactcacctctctttcctgccggcgacgtgcagctgcacatccccgagttcctgacgcccggagcccgctttactctcccgaatgcccaagatgacgacgagggaagcaatgggatactaagctacagcctaagccccagtcagcactttcgcctggacatgggatcgcgggttgacggcagcgaatacccggagttggtgttgg

SEQ ID NO: 99539 - DNA, 442 bp, Homo sapiens
  misc_feature (1)...(442): n = a,t,c or g
agcgccgtagcggaannnacagagcggccgcaatacagtggctgaggcatgagaatctcccttgaacctgtgaggaggaggttgcagtcagctgagatcgcgccactgcactccagcctgggtgacaaagtgagactccgtctaaaaaaaaaataaaaaaaaaataaaaatctccacttaagtaattaattacaagccaccaagctagtatgtttagttttgttttacagtattctggcacagtacaataataggcccagttgtcctgtcaattcattctaacacagtagaaacaaaagccagcctgccattgcttctgttactactattacaagtgaaaaggaaaaaacatccccaggttcttgctccttctttcatctaccttccaattctcttcctttccttcaggggtcctttctacccactgttctctcagtcccat

SEQ ID NO: 99540 - DNA, 387 bp, Homo sapiens
aatacataggctgtggagttgatggcatctttgctccaggtgacacctgcatgctggccagctgagcggcatagagctgctggagctgtaaagggctgagtccagaagcagcagcagctgccattgttgatggaatgaactgtacggggtagttatcacctggtttgtatgttattccaggggggaagaggaatccctgttgggcagcagcagctgctgccagagtccgctggtcatgtggaaaaattgggatcatgagcggaggcatgtgaccctgaacctggatctgttgctgcaggagattaattttgtgctgctgttgcagaagttgctgctgttgtctcgcaatctgttcttgctgttggcgagcaaggtccatttgctgcc

SEQ ID NO: 99541 - DNA, 2306 bp, Homo sapiens
ccacgaggaagaatgtggaaggatctcccattggccggttggggcaaaagcctgaggcaatctttcatccccttttgccaaggcgagactttcccagtgacggtgatgtagttggccactctgactatgggtggactcgggtgtagacctctgaagctgagatcacacgaaaacctggcctccccgccatgtagctgttggagagtagaaaaatagagcacgcctgatgtttctaaatgagaagactttcaatagtaatgaagaatccatggcactctcctcaccctcaaacacatggcagtcattcacatacaggccccaaagccactgttagtgctgcagtagctcctgtggacattggaaagcccggagagggcgtggaagaaatcagctggcccccggcaggttctctggggttttgtgcccaaggctcctggagccctaaaaactttcaaaagttaactccccacgtccccatcctgcttgggtttctggacttttctgaggcaccggcagaggggtctcgttgctcccttgagtgtaggggcagccctttaacctggctccttgagtccctgctttttctgcttctgttgccttcttcctcgtcttcctctctctcaatatcgccctctctttgtccctccccagttcctgacctggccatcccggggtgcccttgaccagccccgtgtctcctcagggtgtcccagcaccagcctggcacagagtggggctcagttagagtatgtgggatgttggtttcgccaggtgagtgaatgaaaggactcgaccaccacagctgagccactagctgggccatgcgaagagttctaggtgcaaaggctggagggtggaattcatttttgagaggtgtgtgagcagcttccgacccctgccccatttgaacgggggccttgctggtcgcgtccctgcattcacccgcgcggccatcccgtcatccaacagttgatcctaactgagcacgcccacggccctggtctggcctgggcaccggccaccgtagcccatcccttgatggcctctgtgtccccaggagggcgggccggggggttgcccaggggctggagcagtggactgtggctccatagaggtaggccggagggtgtgagggcagattcaagctatccccagggctctgctctggtcggagccagccccttctccctctctgccttccccgccccattcctgatgctgaactgttctggacccctggccctgagtctctcaggaccaaagtgggcacgggaacagctgtagtgtgtgcccccccgggctttggccacaggtctccctctcgaggtgtggttgtgactgcgacccttcccttgccgtgatgccttcctcccccggggcttggtccagctccttcactctctagcagctgctggggcccacctcccatgccgaggaccagcaggggaaacctccagggagcatctgcaggctctgcttctgcccggctgctggcttgctctccctggtggctctccagcggccagcttcctcacccacccggcactccgctttgctctgtctcctgaggtgggcctgaccaacctccccttctctgcctcagtccctgggctccagggctcagctccacagccctctgcctagcaggctggttctccctgccaagcccatacctgtggtcacctggccctcctgtggtctgagtaccactcccctgccccaggagccactcccactccagctgcctgtttccagcaggttcccagtgcccccgacaagcccctgctggtgtctccatgtcctgccaagcatcctccagtgcctcctcctgtgggcctggcctcagggctatggacagactcctgtcccatcccagagacccctcgtgatcgttccctggtgggtgttgcccccgcctgcctttgcctccgccgtggccctgagagtcctgggctctgccccgcccggtcccttgctccccactcagttctggatttggggctgcccctaacccagcccgttgctgctttgcaccttttcctgtcattgggcatcccccagtagtcaccccactccaccgaaaagtaaactgcaggtgaggccgtgccccgagtctttcttcggtgtgtttggcttttccggggcgcttgccttgccatgattctaactctctgcccttccccaaggcacgtgggccgtggcccggctgggtcggctgaagaactgcggatggaagctgcggaagaggccctgatggggcccaccatcccggacccaagtcttctttctggcgggccttcgtctcc

SEQ ID NO: 99542 - DNA, 460 bp, Homo sapiens
ctactggcctcattttacagatgagaaaactgtggcatagagaagctaagtaacttgtcgaagttcagagagccagtttcgaacctgagattggactctcccaggcatgtggcctaagcctgttttcttcttggataagaaagcagatcagagaggcctggtgatgtggcccaggtcacacagtgctcaggggcagagtcagggagccagacgtagggtgggtctgggaccccaggcctgcatggctcctccccaaatgccagctctggaagtcagggagcattcaaaggcttccagtcggcccctggcacttggacagggcctgagaggcctgtgtcatgcctgttagttcatggttacatttgagctgggtgtggttggggcttgcttgcagggaggagggggctgggggctgggagggagcccttggtgaacaggcccaataatgtcacgggggtgg

SEQ ID NO: 99543 - DNA, 844 bp, Homo sapiens
aatgatggaatttttttgcacttgtacatttattttctctggattgattttatatcagtatggtaaacttttattgccacatttaaaggactgtattttcatacttttttgcattttacctttcatctaccaatccatgtgcattgggattgcacactaagatgtattttcttacgaaatagttctgtgtttattttttaattatagaaattccaaagaacagcacatcagaatgctcctctcttttcagtaattgttttagttcagagatcttcccgctcagcctccataaatctaatgtcatttttttttttaataagtcctaggagctgggcttcattcctccagcgggagtccagtcagggtcctgaagtttgctggttcaggaaagaacaggaaagagaaaagccttctgtgcccaggctaaagctgttacatttccacagtgtggatgcagtcagaatccctgcacattctggtcataaggattagagtcaccagatgaggctctaaacagatcgcatcccttggaattagaaagcagtggagaccgggcgcagtgacctcacacctgtgatcggcacttcggaaggccgaggcgggcggatcactgaagctcaggagttcaagaccagcctgggcaacatggcgaaactccatttctataaaaaatacaaaaaaaaaaaaatctagccaggcgggggggggcccccctgtagtcccagctacttggggggctgaggtggcaggatcgcttgagcctgggaggttgagactgcagtgagccaaaattgcaccactgtgctcccacctgggcaacacgtacgaccctgtctcaaaaaaa

SEQ ID NO: 99544 - DNA, 398 bp, Homo sapiens
aaaacgcctgtaagtgacagaggcgaccaaatgctgctcagaatccttggggaacaggcgaccatgcttttcagctctggaagcctatgaaacatacgttcccaaagagtttaatgctgaaacattcaccttacatgcagacatatgcacactttctgataaggagagacaaatcaataaacacactgcacttgctgagctcgtgaaacacaagcccaaggcaagacaggagcaactgaaagctgttatggatgatttcgcagattttgtagagaagcgctgcatggctgacgataaggagacctgctttgtcgaagagggttaaacacttgttgctgcaagtcaagctgccttaggcttattacatcgcattaaatagcatctgagcctatcatgaa

SEQ ID NO: 99545 - DNA, 892 bp, Homo sapiens
  misc_feature (1)...(892): n = a,t,c or g
ttttttttttttgcagggtggtcatctgtcactttattgttgcccgtcttgtagcatgtgggtctttcgcagcaggaagtgtgttttacaaccagagccgccgccctcctgtcagcgcaggcgcagctgggctgggctcctgcttcccactctccacctcatccatatttgtcctcgtccctgccagtctcgaaaaggcactctgtcacgtgtacacaggaaagggccctgacaagaggatgggactgcagttgtggctgccaggtctcactctcccttggatggtcggcggggtgggggtggaggccagggctgtagtgcagctcccgcaggtgctggctcagggggagcaggcaggctccggttttcggtaatcctcctggatggggatggtgctgccctcctcctccctggggcagctgtaacgacaaggctctgcaggctccacaggactttctcctttgtttgatctatatttccttcgttgatggaggaacagggccccggccagggtgaaaacaaggaacattccagagaagatcacaaggatgcgaataaaatcggagctgcacagggatctttgggctgttggagtgcagtggcacgatctcggctcagtgcaacctccgcctcctgagttcaagtgattctcctgcctcagcctccctagtagctgggattacaggacaaggagagggacaaattccttcttggcatccttatggccctgtgacctgctaatgaatgctgactctgagttgctactagaatttggtttccttgtggcttcccaggaattggtctcactctgctcatctgtctcccnactggagtgcagtggtacagtcacggctcactgcagctccanttctggactcagtgatcttctcac

SEQ ID NO: 99546 - DNA, 1780 bp, Homo sapiens
ttttttttttttatcactgaatagctttattgagcattttgggctgggcactaagctcagcactttaatccccacaactggccagtgacatagctgttaccccactttacaaatgagggaggacaggtcacggaggctcgctgcctcaaatggcaggcccggctgcctggtcccaatgcaaaaagtacccaatgccatgcctggcacataatgaccctcagcggaggttacccctccagtctgcaatcaacaccattggccccaggtggaagggatcccaagctctctccagctttccagtggcccttaaccatgggtcacccttgcttgggaatctgcccccagacaggacgcttccacttcccccaggcctggcactgccagccactgcccctctgcagtggctttccaggagcggggcagcagcccctgtcctccccaccactctgactctggcctttgcctgttgccgaggctgctccctgccccgtagtgaggacagctgtgtggctaggggcccgtcatggtgccactgcccacctccaccacccagcagtgcttcccagtctatcacctgccatccgccccatctataagctggcagctgctgctctagcctcaggtgaggaacaacaaggagctgctggcatgaggctctggggctcaggtgggtctggtgcttctgtggggagggaggcaaagaaagtttactcccaccttgacctggcctgcaccgggggcatctggggccatgcaggtggcagatgttgggtagaggctgttgagtttaagctttcctccacaacgacacctgctcctgggccaggctgggctggcatcctcttctgctcttcccatcactgaccccgggggcccatctgcaaaatggaaaccacaagctgagcttgcctactttgccaagttgatgatggctgcagtgaaacgtgccggatgcacgtggagagccagcatcacctggggctctcttgctgttggggttctctgcccctggccccaagccccattggccgtcagcggcagaagcctggcatcgatggagaggaaggtgacctcatctgacttacagcaggaggacactgaggagcaaagcagctagacaacggcagtggtgagggtccccacttggcatcagcgatgtggtcactgctggccagttccctccagggcagggaacacggccaccgactccatggctgggcggttccagactgtcacataaatcaacctgggctttatgaagctaatgaatttgcgtccaagatttggtttggagcctcgggtggcaggatgatttaatcagctttgtctttaagcaagagggaacgtaattggagaagggtagttccagatgttttgagttttcagccacagtggggcagccaggtcttccttgctcttggcctgaccactgcaggcccctgctctacccaacctgagaggcctccttgggaggaagtcgcaatgatagatggagaagaggcatttgtttttcccgtggatggaaagtgacacgtggggacaagctatgagaaacactgaggtgcgacggcacagagaaagcgggctgaggccaattacaccacgcagggactctcccaggcttcagctgccagggcagaggtggggcagcccgtgggctccccgagttccctgcaaatcccacccctgaccctgagaccaccttgggccccgggagaccctaaatcgtcgctctgtcagaggtctgaagacgctgagatacaggggaggggctgagcaa

SEQ ID NO: 99547 - DNA, 413 bp, Homo sapiens
aaagaaacctgatcagggccgagctgtgagcacctgtgcacatctcttgtggtctggcagaaacacggacaaaaatggggaggagcttcacggaggcaagagggtaatggagcgcctaaaaaaagctgtaaaaatagcaaatcagtgcatggacccctctctacaaatgcagctttatatagaaattctgaacagatatatctatttttatgaaaaggaatatgatgcgggaacaattcaggttttaaaccagcttatccaaaagattcgagaagacctaccgaatcttgaatccagtgaagaaccagagcagattacctaacattttcataacacactggagcatttgcgcttgcggcgggaatcaccagaatccgaggggccaatttatgaaggtctcatcctttatgaag

SEQ ID NO: 99548 - DNA, 932 bp, Homo sapiens
tattatttgtaaaaatttaaaaaaattctttcagttgaattctcttaggattatctggtttgtaatcacagcatttcaatgattcttttacctcctacttcccaatttttagatttccattttctttttcttatctacttatgttaattatgtcagtcaggatttacctggagaaatagaaccgcaggatttattgtagggacctgacttgacataggtgtgggagatagttaaatggtgtttacaggaggctgttccttcaatgtctgttgctgtggcctgaagtaagcagggcagggactcaggaaggcaagatagacatgaactggaattcattccagtttacaatggtgggctttactcgctcatctttgcaggttccacgtttgtccttgaagcactcagttcatgtctatctaacacgtttctgttacttattccatattctctttgccctcagcaagcacttcatctgtcgttggttccttgcccaatggggtcacctaaacttttattcttgaatggtctgggccatcagcagtcctgcctgatttgggttattatagtttttttttgattttaattatagggcattggagtgtaagggggtgcacccagtatgtctgggtgccctgcattccagacatactcatctttaccatcactgtgcagaagcaatctaatttttcccttcattatcaggattagtcacaccaaccatcaaagtggactccttctttgccttaccttcacttgcatgagggtccagagttgacaggtctcaacctccaagcttaatttagggttttcaggtaaaatacaggatgcccaagtaaatttgattttcgggtaaacaacaaataattttagtggatgtgccatgcaacatttggatcacacttaaactaaaaaaagtgttcattgtttacatg

SEQ ID NO: 99549 - DNA, 428 bp, Homo sapiens
cgacagtgtacatatacgtaagtacagctgctacctgtctacaactcagatccaatggctaccagctttcccactggacctctctggatttagcactctctaaaattgcatacccttgattcttacacaaataccaaagcttagatgcccataggatgtcaccctgtttaaaatttctagtggctgctctggacatcaatttaatacaaatcccttagcatgaccaataaggctcttcactacttacaaataccggctgggcacgtggctcatgcctgaaatcccagcactctgctaggccaaggcagtacgatcacttgagcccatgaattctaaaccagcctggactacgtagtgagactccatttctactaaaaaaattaatgcctcatcataacctattcaaaactactgagttttaaccataa

SEQ ID NO: 99550 - DNA, 1084 bp, Homo sapiens
  misc_feature (1)...(1084): n = a,t,c or g
aaggaagaaaattgataccctttttgatgtcactatcagtgtggtggaattcccaaaaccttcaacccctcagctcacttcagagagctcagatacagatgacagtgctggaggcgggccagagaccagggaagctctggctgagagcgaccgtgcagctgagggtctgggggctggagttgaggaggaaggagatgatgggaaggaaccccaagttgggggcagcccccaacccctgagccatcccagcccagtgtggatgaactactcctacagcagcctgtgtttgagcagcgaggagtcagaaagcnnnnnnnnnnnnnnnnnnnnctgggctgagctgcagagtcttcggcagaaccctttcatgccctccgtgcatcctcaggcacttgtcagaggtggaaacactacagacactacagaaaaaagaaattgaagatttgtacagccggctggggaagcagcccccaccgggtattggggccccagctgctatgctgtccagccgccagcgccgcctctccaagggcagcttccccacctcccgccgcaacagcctacagcgctctgagcccccaggccctggcatcatgcgaaggaactctctgagtggcagcagcaccggctcccaggagcagcgggcaagcaagggggtgacattcgccggggatgttggcaggatgtgaattcagaacagaagccatgtatctcccccacaccagggcccaccatggagcttgtgttctcagaatctgatgctttctgatcaacaaaactgagcaaggaagatcccaacactgaaggggtagaaggccaggggggcatggagagtgcagctccattatagtgaagagccaaacatatgtgaactgtttgctgtgtggaggtgttagttctgctgcctaccatcttcatctctagcacctcccctgccaagagtcaaccactaagcaatcccacccaagcctggatgcttctagaggggcccactcccagctgggagagtgtaggggatatgctcacaccacattagcagcaaccaataaaaatgctggaaacaagcaaaaaaggaaaaaaaaaa

SEQ ID NO: 99551 - DNA, 705 bp, Homo sapiens
ggcagaaagggaagtggtgagagaagaggatgagggaggacaaacaagttctgctggtgggtgagggctggcagggagagtgtggatcagggagggcttcacagaataagtagcaggtgggcgtccgcttgagtcctgaaagctgcaggtccaccatcccttagatcccaaaatctaaaaagctcggacagctgaaagttctttcatactaacaggagactatttaaggcttttatttctcccatttaatgtgactttcctaagttttgctgcagatgtaacacttttaaaacaggctgctgcccagacactgcagagggtgatgtgtggaatctaccacgtgcgccatgctgcctttctaaaggccaaacagttttaaaatctagcctgaaggtttcagatcagggatttcggcctgtatatcaagagttagagttggccgggcacggtggctcacacctgtaaccccagcactttgggaggccgaggcgggcagattgtttgagcctcaggagttggagaacagcttgggcaatgtggcaaaagtctgtctctacaaaaaatacaaaaattaggcaggcgtggtgttacacgcctgtagtcccaactactcgggaggctgaggtgggaggattgcttgaacccaggaggcagaggctgcagtgaaccgagatcatgtcactgtactccagtctgggcgacaca

SEQ ID NO: 99552 - DNA, 428 bp, Homo sapiens
  misc_feature (1)...(428): n = a,t,c or g
tgaacattgaaaatataacaatgaacaaggacccttggggagcagccaagatggccgaatagtaacagctccggtctacagctcccagcgtgagcgatgcagaagacaggtgatttctgcaattccatctgaggtactgggttcatctcactagggagtgccagacagtgggcacaggtcagtgggtgcgtgaaccgtgcgtgagccaaagcagggcgaggcattgcctcactcgggaagtgcaaggggtcagggagttccctttcctagtcaaagaaagtggtgacagatggcacctggaaaattgggtcactcccacccaactactgtgcttttccgaagcactttaaaaagcgcactaggagattatatcccgcacctggctcggagggtcctacgcccacggagtctcactgattgctagcacn

SEQ ID NO: 99553 - DNA, 413 bp, Homo sapiens
atggttgatttaaaaatacaagaatatgttcattagaaactggagtaagatcacgttttcagtgatcatatttgttaactcctgcgttcatcaagacttaccaaaagaagatgaatttgtttaaagtcaaattggaaaccccatccttttccacatgttgccaagacagatgttcagatatacatagaaaacgtgtgtgctggccaggcacagtggctcacgcttgtcatccctgcactttgggaggccatggcaggaggattgcttgaacccaggagttcaagaccagcctgggcaacaacgcaagatctcatctctactaaagaaaacaaaacaaaaagcttgagtgcttctgatgctgcagagctgtgtgtacattggaggctacttaaaatatagtaggagagttaaca

SEQ ID NO: 99554 - DNA, 426 bp, Homo sapiens
gatgatcaaagggtaaagtcagtgataaatcttttgttggctgcatatactggagatgtgtctgcacttcgaagatttgctttgtcagctatggacatggaacagcgggactatgattctagaacagcactccatgtatctgctgcacagggtcatgttgaagttgttaaattccttgctggaagcctgcaaagtaaaccctttccccaaggacaggtggaataacactcccatggatgaaacactgcactttggacaccatgatgtatttaaaattctccaagaataccaagttcagtacacaccttaaggagattctgacaacgggaaggagcatcataccgtccataagaatcttgatggactgtcgtaatggtctcacattccaagatctacatcacttacctatttaattgcggaacatgt

SEQ ID NO: 99555 - DNA, 454 bp, Homo sapiens
  misc_feature (1)...(454): n = a,t,c or g
ggcacgaggagacctctagatatgaaatatatgaactaatacatgttcatccctatgcagttaaacagagctttgacctagaggagtacagcctctcacagtctaccctggagcaggtgggtcatttttagggattcgtatcatccatggtatatgtgtataaaacattccctgggagctgcagaggcagcacggcattgttctcctctctttatttccttcctccctttcaggttttcctggagctctccaaggagcaggagctgggagattttgaggagattttgatccctcagtgaagtggaagctcctcccccaggaagagccttanaaccccanattctgtgttcctgtttaaacccgggggtttttttacatacatttatttttatagcagccaatgttctaattttagaaactatattattcgtccggaatggttcttcggtgggtg

SEQ ID NO: 99556 - DNA, 872 bp, Homo sapiens
aatggaagatcgtaggctagtgcggggaattccctgcccacagcataatgcgaggcaatgtccagccgttccacccggcatacaagcttatggagcagccccctttgaagatctccaggtggacttcacagagatgtcaaagtgtagaggtaacaagtatttactagttcttgggcgtacctactctgggtaggtggaggcttatccaacacgaactgagaaagctcgtgaagtaactcgtgtgcttcttcgagatcttcttcctagatttgaactgcccttacggatcggctcagataacaggccggcatttgtggctgacttagtacagaaggcggcaaagatattacggatcacatggaaactgcatgctgcctactggcctcagagttccggaaaggtggagcgaatgaatcaaactatcaaaaatagtttagggaaagtatgtcaggaaacaggattaaaatggatacaggctctccctatggtattatttaaaattagatgtaccacttctaaaagagcaggatattccccttatgaaatattatatcataggccccctcctatattgcggggacttccaggcactccctgagagttaggtgaaattgagttacagcgacagctacaggccttaggaaaaattacacaaacaatctcagcccgagtaaatggcctgttagcttattctccccagttcaccctttatccccaggtgatcgagtgtggatcaagaactggaacgtagcctctttgtgtccactgtggaaaggaccccaaactgtcgttctgagccctcccaccgctgtgaaggtagaatgaatcccatcctggatccaccacagccatgtaaaaccttgaacggcggg

SEQ ID NO: 99557 - DNA, 433 bp, Homo sapiens
gaaaagtcaatcaatatgacaaagttcactgttgtcttattttgagaaattgccacagccaccccagccttcagcaatcatcaacatcaaagcaagaccctccattagcaacaagattatggctcgctgaaggctcagatgatcattagcattttttagaaataaagtatttttaaattaaggagaggtgcccgatgagctcccagtcatgtggttcagggcgggctctggaagactcacagaggagactcctccgagaaaccaagaaggtttctgtccaagtcgggatctgctctgctcaggatgctcctccaacacacacagtgaaaaactgagcacctagagagcaacaccaaaaacccatggccaataatggagagccaaatcaggagagcattcagcaaagcaatttcttgcttgtagaaggaacagc

SEQ ID NO: 99558 - DNA, 704 bp, Homo sapiens
  misc_feature (1)...(704): n = a,t,c or g
ggcacgagggcaaatcagggcccatgacgggggtggttctggtggctgttggggaggtggctatgaagatcctgcttctctgcctctgcctcatcctcctcagagtgaggtcttgcaggaggaaggcagcaagggcagcattgggcatggaggctgcagacgctgtcacggactaatctccagactccagactgcttccagatgcctcctcatccagttcctccacagtctgagcggccgtgtttcctctgcaggctttgcatggtctgtcccctgctggactctcctgatccctcctttccctgtcacccaacatctccccaaaccctccgggccaaggactctgcggctcttgacactttgcacgtgtagtttcttctcctgaaacacccttccctcctgccaaaccacgtctggaccctccttcaggttcacnnnnnnnnnnnnnnnngaaaacccagcctggccaaaaaaccaaaactgtttaaaaatctaaaccaaaaaacccccaccacccccaccatggtcggataaattcaaaccccgggttccttttggggccaggggccaggatgggggtggggggaacaaaaaagggtttccacccccaataagttgaccttcttggaaacacctgagcaattccaaacctccgggcctggaaagacttcttcaaacccggaggagaaccccctcttttaaaa

SEQ ID NO: 99559 - DNA, 448 bp, Homo sapiens
ataggaagtccctagcacccaataggttggggtaactgggtattcagtgaatgctttaccgtagaataagtgaaacacttattagttgcctactgggtgccaggcattgttctaggtactgggataaagcagtatgaggctgggcacagtggctcacacctgtaatcctagcactgagaggccgagtcaggcagatcacctgaggtcaggagttcaagaccagcctggccaacaaaaacaaaaaatggcagtatgaaaacagacatgcccaaaaatatcccaggtcatggggcttagctattaatgagaaaagacagacatgatgaggcctgaaaactgaacacagaatttaacaacatgcaggttacaggcccctttgacaagacccaatattattatgttgcggtaggaaagcctgtctgttagagggttacaggaaaatgaaaag

SEQ ID NO: 99560 - DNA, 454 bp, Homo sapiens
gaatattgttacctaacatgcttaaacaaaacagatttcattcttagcatcaggctctgaacgttccttttagttagcatttgctatattgacagctggttagacaaggacatattttagcataccaaaaaaacagcaggccgggtgcagtggcccttgcttgtaatcccagcactttggaaggccaaggaggcagattgcttgagctcaggagttcaaggccaccctgggcagcttaccaagaccccgtctctaccatgtaaaggttaaaccccattccccgacctagccatatggggtggcgtgcacctgtagtcccagctcttggcaggctaaggccgtaggatgacttgaacctaggaggcataggttgcactgtgtttgaaaatgcgctactgctatccagcctgggtgacagagcgagaccctgtttcatacaaattcaaaagcgggg

SEQ ID NO: 99561 - DNA, 527 bp, Homo sapiens
gggatatagtacagggggagagggctgttttatacacgtataaatggtatacaccatttatacacggtggtcagagaagctctgatcaggtgacgtatgtacagaaagtcactgtggcctgagtagagtcaaggagaaggagcagcaagagttgagcttagggaggtggagaaggggtggaatagatcaagcaaggccttggccctggtagggatctgggattttgagtgagaggacaaccgttgggatgttttgagcacagaatggttgtaagaagacacgattcaggaggaccacttaggcctctgtgtggagggggcaagcgctgccacccaggcccaggaatgtcagcaccagggtaggctctggggactgcacaggggtgattgttgctggagacttaagtgggaggaggagaagaggggctggagatagagaaccatgggaggggccacattcaggaacttactgtgtcgtatctggaggataagaaataagtaagccttgggcagcatggcactattgtt

SEQ ID NO: 99562 - DNA, 1953 bp, Homo sapiens
caacgcaggagagtgccagggaaccgagaggggcttgacagttgctgcaggagagtcttgacttggaaccagacgaacgtggaaagttagaggaggggaaaacccctactaggataaggcagacaggaatcaaggcttggagcgcatctggggccccggccgccctgcccaggtggaggaagagccggctcgaggtgcagcaagggggctgggaaggaagggctggctaaagcgccacgtggatgtgagtgccaaagagactaggagagcgtggaagtgagtcccgaagagactgagttcaggacgtgaagagaaagaggccgagaaaaacgacccaccagcgatccttcttgaggtcgacaccgagcaggggtggagtcggatacgccccgcggacaccatgcacccaatcagcgacgagctgtcgcggatcgcgggacacgccccctgatccaaaggcccgaggagctcttgcacaggacagcctctggaaccccgcgccattagcgcctgcgccgtctctaggccccgccccctcacccctccggtcctggagctcccacagctaacatggcggcgccctgtgtgtcctacggcggagcagtttcgtaccggcttcttctctggggtaggggtagcctcgcccggaagcaaggcctctggaaaaccgcggcccctgagttgcaaacaaatgtcagatcccagatattaaggctaagacatactgcatttgtaataccaaagaaaaacgttcctacctcaaaacgtgaaacttacacagaggattttattaaaaagcagattgaagagttcaacataggaaagagacatttagccaacatgatgggagaagatccagaaactttcactcaagaagatattgacagagctattgcttaccttttcccaagtggtttgtttgagaaacgagccaggccagtaatgaagcatcctgaacagatttttccaagacaaagagcaatccagtggggagaagatggccgtccatttcactatctcttctatactggcaaacagtcatactattcattaatgcatgatgtatatggaatgttactcaatttagaaaaacatcaaagtcacttgcaagccaaaagtctgctcccagaaaaaactgtaaccagagacgtgattggcagcagatggctgattaaggaggaactagaagaaatgttagtggaaaaactgtcagatctagattatatgcagttcattcggctgctagaaaagttattgacatcgcagtgtggtgctgctgaggaagaatttgtgcagaggtttcgaagaagtgtaactcttgaatcaaaaaaacagctgattgaacctgtacagtatgatgagcaaggaatggcctttagcaaaagcgaaggtaaaagaaagactgcaaaagcagaagcaattgtttataaacatggaagtggaagaataaaagtaaatggaattgattaccagctttacttcccgatcacacaggacagagaacagctgatgttccctttccactttgttgaccggctgggaaagcacgacgtgacctgcacagtctcagggggcgggaggtcagcgcaggctggagcaatacgactggcaatggcaaaagccttgtgcagctttgtcaccgaggacgaggtcgagtggatgagacaagctggactacttactactgatccacgtgtgagggaacggaagaagccaggccaagagggagcccgcagaaagtttacgtggaagaaacgctaagggtttgctcccaggaaaggagaggaagagctatatatatgtgccgacatgtggcagacacacagtaaataatggctgaccagcatgagggcagtactgtcagaaatttctttgagctgtgagatggatttatttttaaatgctactttgtaaaggtgacctttaaaaaataaaaggaaaataaagaaaaaa

SEQ ID NO: 99563 - DNA, 1241 bp, Homo sapiens
ttttttttttttgaaaaccaaccaggaacatttattaaaaaactaagcaagttatccccaagagggtgaagcaccgctggctggttctgacattcgattcaggctgaaggcacggcaactcctccagcccttgctgggaaatgtcctacccaggccacgggcagtgccccagtgcagctgggtcccctaaaagcccccaaacacatgatcccaccaaaggcttgaacagagcaacttcatcaagcaggcagggaccacacctgagacacaagggcaaggaggtaaagcacaggggactgggagtgggccagggacacccagcccccgtctccaactggcgccccctccaggggggctaacatgtggcgtggggccaccaggacctgtgcttgcccctggtggcggaagagctaccctccctcttgggtggtggggggatgttgtctgcacacagctcagacgaccgagggtacaggaagaatcaaactcagtcaaccattcttcaacccaactgggagtctgtgaggcctggcacacaggtgctcaataaacacttgtggcatgaagaagtgaaggaaccgatcttgttcatctctgtgccccagcactcggcatgtagcccatgatcgaaaatgcagactgaacaactgtcacactcttttgtatcactagtgcccggcacacagtcagtgctcttcaggtgtgtgggaaagaagccaatgagtgagaagttcccacaccgtctagcagtgaggaaaaaaagaaaaaagtgaaaagtaccttgtttactcccattcccatcccatagctcagctccctgcacacagcaggtgctcagtaagtgtaccgaatcaggaacttatctttgtgacatgagtgccaggcacacagtaggtgaccaatatgtgcttgaataaatggatagaagcatcttatttatctcaatattcccagagcctgggctgggcacagtggctcatgcctgtaaccctagcactttgggtggccaaggcgggcagatcacttgaggtcaggagttcgagaccagtctggccaacatggtgaaaccccgtctctactaaaaatacaaaaactagccagatgtgatggcacgcacctatagtcccagctacttgggaggccgagaaacaagaattgctggacgctgggaggcgcaggctgcagtgagccgtcacaccactgcactccagcctgggtgacagagacagactctactctta

SEQ ID NO: 99564 - DNA, 432 bp, Homo sapiens
ctgactagctatgactacagacgcgcattaccatgcctggttaatattttgtgtgtactttttgaagagagaggagcttgctttgttgccgaaactgttctggaactcctgggcttaagcgaccctcctgccttaacctcccaaaatttttggattacaggcacaagtggccatgctcagattgaaatttcctgcctgcctgcctgcctgcctgcctgcctacctccctcccttccttttttccttcatccctccctgataatgcctcaccagggggcgacagctccttttgacagagtgcacagtcgtacctatggctcactgcgacatctgtcccacagacacccacgatctttccagctaaaactgaccaataactagaacctcatgcatgcgttggcatgaatggatccttaaggtaaggtttgggtt

SEQ ID NO: 99565 - DNA, 430 bp, Homo sapiens
gtattttactgatatttatgtaaccctaccttacacagataagtacaaatgagtcatcagtatgttcccatgcaagggcagagtttttagatcatcagaaccagctgggctgggcacagtgacttacacctgtaatcccagcacttgggaggctaaggagggaggatcacttgaggccaggagttcaagaccagtctgggcaacacagcgagaccctgtctctaaaaaagtataaaaacagaacaaaacaaaacctgcaatacactttgaaagaatactaagacaactttctttttttttgttcagcattaatacacttaaggctttagggaacatgggcacatggggcaggttcgttataaatgtaaccgggagccatgttggagcgctgaacccattaactcgttatttaccattaggaaaatttcct

SEQ ID NO: 99566 - DNA, 394 bp, Homo sapiens
cggcacgagaaaatcaccacctgattaatatggagaagatttccattactgcaaaaagaattccaggtaccctttggccattaattctctctactgctcagtgaaccactgatcatatctccatcactataggttagttttgcctcttgtaggatttaatataaatggtcatcccagatcttttatgtagacttccaaacctagcattatattcacattaataatatgaacttggccaggtgcagtggctcatggctgtaatcttagcactttgagaggctgaagtgggaggattgcccaggagttcgagaccagcctaggcaacatggcgaaaccctgtctctacaaaaagttagctgagcgtggtggcacatgtgtgtagtcccagctacct

SEQ ID NO: 99567 - DNA, 951 bp, Homo sapiens
ggcacgaggttgaagtcagggactaacaccaagaaggccctccaggcagtgtacagcatgatgagctggccagatgacgtccctcctgaaggctggaaccgcacccgccatgtcatcatcctcatgactgatggtcagaagggacctctctcctgtcccagcctccccaccttctcagaccagcatgtggcccttaagtccacttgtaacactatacccatggttggggccctgaatgtgactcatagctggctgttcatctctcctgtgacccttcataaggaattcttcctaagccctgtgatcaactatctctaacccttcctcaacttgctcaccctgccatgtgtatccctgcctttagccagtttatcttccttatctcctaccctcatggtcctgtctcttctgcaggattgcacaacatgggcggggacccaattactgtcattgatgagatccgggacttgctatacattggcaaggatcgcaaaaacccaagggaggattatctgggtgagtaacctgcctaggacccagcaccccacttcctcagggcttggaccctcatccttcctttttatccctcagatgtctatgtgtttggggtcgggcctttggtgaaccaagtgaacatcaatgctttggcttccaagaaagacaatgagcaacatgtgttcaaagtcaaggatatggaaaacctggaagatgttttctaccaaatgatcggtagggagatacaagggaataaagaacccaactctcctcaggttcccctgaagtaattcattcttcctctacacctgaagctctagttgcctggaaagccttcttcattcctccttctctacctcagtgtcactattcttgtttcctggcactgttcccttaaccttagaatcacagagctctgagcacttcagagatctttctatagtcctacatttgaca

SEQ ID NO: 99568 - DNA, 420 bp, Homo sapiens
gaaggctatagctcccatagatagtgattcttctgatggatctgggcaaaataagttgaaaacctagaaagaatttatcattctgaatgccattaagagcatttatgattcatgggaggaggtcaaaatatcaacattgacaggagtttggaaaaaattaattccaattctcatagaagactttgaggtgttcaagagcagatttggtagaaatagcacgagaacgagaattagaagtggagggtgaattgctcaatctcaggataaaacctgaatggatagtaagccgcttcttatggatgaacattgagagtggttatcttgagacgggtttgcctactggagaccatactgggatcgatctcctggcgtcaaccaatgagcctgacttggccttacaatgagctgggactacagatg

SEQ ID NO: 99569 - DNA, 402 bp, Homo sapiens
ctcctatacacatacgtattactcgcatcaggagtatgggtggcctgagcttaccataggctaatagaaaacaaccgaaaccaaataattcaagcactgcttattacaattttactgggtctctattttaccctcctacaagcctcagagacacttacagtctccctttaccatttccgacggcatctacgggtcaacattttttgtagccacaggcttccacagacttcacgtcattattggctcaactttgctcactatctgcttcataccccaactaatatttgactttacatccaaacatcactttggcattcaagccgccgtctgatactggcatttagtagatggggtttgactattcatgcatggctccatctaatggtgaagggcttaaaaaag

SEQ ID NO: 99570 - DNA, 395 bp, Homo sapiens
aaaaaatgttagatgatgctgacgtggtggtgcatgcctgtggggctactccgagggccgaggcaggaggatcacctgagaccgggaacttgaggctgtagtgcaccatgatcatgtctgtgaatagtcactgcactccagcctgggcaacatagtaagacctcatctctaaaaaacaagaaagatatgataggtgaaagatgaccctaaacttaaaaggcagtgaaaaaaatcatcacaggtgtaaaagttagcaatgcatggaacaagattagtacaatgtttaggtcttggggtctggaatacccaggttcaaatgccatctctgtactatcatttccttatttgaaataatacccatttcattaggggtcctatggggaattaattccgag

SEQ ID NO: 99571 - DNA, 413 bp, Homo sapiens
gatttatatgaagaaaatcattgaactttgttgaagggtgtaatataaggctgaataagtgtagacataccaattttgtgccccaaacaatttttttctttttattatttttataacttggccaatgttgatgagtggttgtgttcagtttttttttttttttttttttttgttttgttttgttttttgtgtttgtttgtgttgtttttgtttttttttgtttttgtttttttgttgtttatttgtggtgtttttgttgttttttatgagttgttttgtatagttataataatgtgttattatcttaggtgatatgtttgaatagtatatatgttattttttgtttgttgtatttttgtattatatttatgttttcattattgattattcttatatcatggatagttagagcc

SEQ ID NO: 99572 - DNA, 331 bp, Homo sapiens
agattggacaaaagagagccagtgaagatacaacttgaggttcagcggatccaagaaatcttcagcaggaccaaaaagagatgccaggcagatttataaccctcccagtgggaaatatagcagcaatttgggcaactttaattatgagaggagccttcaggggaagtataggtggccgaggttggggcacacgaggaaatcgtagtcggggaagactctactgaataagacatcagcattcttcagcattgtcatgagcttaatatacttaaattctactactcattggattgccggggatgtccctttaaacagactgctgccttcagat

SEQ ID NO: 99573 - DNA, 367 bp, Homo sapiens
ctagcaccatgagcttcaataccctgatttgatgcattacacattgtatgcatgtatcaaaatatcacatgcacccccaaaatatgtacaactgttatgtatcaatttttttaaaaactgtattgctaaaaatgctaatggtcatatgagccttcagcaagtcatagtctttttgctggtggagggttttgcctcgatgctgatggctgctgactgatcagagcggtggttgctgacggttggaatggctgtggcaatttcttaaaataagacaacaatgaaatttgctacattgattgactcttctgttcccaagttttctctgtagcatggatgctgtcctgatagcattttacccacagtagag

SEQ ID NO: 99574 - DNA, 380 bp, Homo sapiens
actggctaatttttaaatttatttttgtgggacaagtgtcttcctgtgttgcccaggctggtctcgaactcctggccccaagtgatcctcccaccttggcctcccaaagttctgggattacagggcatgagcccctgtgccccacggcacagttaaatattaagggccagagcctttcacgcgtaatgtttttatcctgccgtaatttcttcctctccaattatctggaagccaaaaaggcattgcaaggtctcaaaggctattatatgaagctagattctttcaattgctgggaccagcgaccaactaaaattagcttaaccaaaagaatagaatttaatggcttatatttccttgggggcatgggcccagttgtcatt

SEQ ID NO: 99575 - DNA, 403 bp, Homo sapiens
tgtaattgtccatgttagctgcataattgctgaataattctaacgctgagtcgtttatcatatggtgatggttcttctcaaggttgttatttgccatcattttctaacactctttttttccttcaggtctctcattctgtacttattttttattttattcatgatctccttatatttgtcttgttttttatacaattttctttttatctcttttttttttatcttttctattatttgttttttaatgattattgttttgatttaattttttttctatgccttatttattattatcattttcaatcctattattttatatcttaatttatctattatctctttttcttatcgagtctttatttgattattacttatgccttatttctttcgtcattttctattc

SEQ ID NO: 99576 - DNA, 651 bp, Homo sapiens
tttttttcaccatccaattatacttttaattaagaaaacatgttttaagctgcattatttcagattatcagtgattctgaaaattacaagtggcagggtgcaggaccttaagtcaaatagacgttaagttcaaaccatcagtccattcgtcactagctgtatgtcttcgggcaaattattttacctctcagcctaatgtaataatgcaggtaacactgctcacgcggtgtgttgcacatagcaaacacttgggaacagttagctattcatcgtggtacattaaattgcttttccccaagagccactttatttatttatttattttgagacgaagtcttgctcctgttgccccaggagtgcagtggctcgatctcggctcactgcaacctccacctcctgggcccaagcgattctcatgcctcagcctcctaggtagttggattacaggcacccaccaccacgtctggctaatttttgtatttttagtagagaaggggttttgccatgttggccaggctggtctcgaactcctggcctcaagtgatctgcccacctcagcctcccaaaatgctgggattacaggcgtgacaccggcacccagcccccaaaaagccactttaaaccttatcctaggaggacagtttcacattg

SEQ ID NO: 99577 - DNA, 349 bp, Homo sapiens
gaaattagagaaacagcccgtcatggtggctcatgcctgggatcccagcactctgagaggctgcggcaggcagatcatctaaggtcaggagtttgagactagcctggccaacatggctaaaccccgtctctactaaaaataaataaataaataatacaaaaattagcaggacatggtggtgcgtgccatcaccactcactgcagcctcaacctgctgggctcaagtgatcctccgacctcagcctcctgagtagctgggactacaggtgtgcgagactgcacctgggttggttggtttgattttgtttttgtccttgtaaaaacagggtctcactgtggtgacaaagcg

SEQ ID NO: 99578 - DNA, 1737 bp, Homo sapiens
cggctggtttgattcatccattttgaagagacgggggagcggggggctcgtctgtgggcaggagccctgaaccaaagagcagcggagtttgagaagccagcagctcggggttcggcagcagcggtcccatcggctgaagttcggggggggtggggcgccgagcgcgcggggcgttggggggtcctggtctttggctactcgactcggtcctgtttcgacagcgaacatgtcgcggcctgtcagaaataggaaggttgttgattactcacagtttcaggaatctgatgatgcagatgaagattatggaagagattcgggccctcccactaagaaaattcgatcatctccccgagaagctaaaaataagaggcgatctggaaagaattcacaggaagatagtgaggactcagaagacaaagatgtgaagaccaagaaggatgattctcactcagcagaggatagtgaagatgaaaaagaagatcataaaaatgtgcgccaacaacggcaggcggcatctaaagcagcttctaaacagagagagatgctcatggaagatgtgggcagtgaggaagaacaagaagaggaggatgaggcaccattccaggagaaagattccggcagcgatgaagatttcctaatggaagatgatgacgatagtgactatggcagttcgaaaaagaaaaacaaaaagatggttaagaagtccaaacctgaaagaaaagaaaagaaaatgcccaaacccagactaaaggctacagtgacgccaagtccagtgaaaggcaaagggaaagtgggtcgccccacagcttcaaaggcatcaaaggaaaagactccttctcccaaagaagaagatgaggaaccggaaagcccgccagaaaagaaaacatctacaagccccccacccgagaaatctggggatgaagggtctgaagatgaagccccttctggggaggattaaaagtgatgatggtctggggagagattttattaaaaaaaaaaagaaaaaaaaagaaaaaagagggaggaaaaaaaagaacctacttaagatagaacatggttttggctatggcttgactcatggggctttcagtgcttttttccatttgttgaaagtaacatttctctctctctctctttttttttttttttttttaaagcaaaccattgtatgtgtaagtgtttaagttacctttttgtctattggtctctttgccagccctcccctttcccaatgaaagccatgtcaaattaatcactggattgactgcttcatctttttatttttaatgaaaggtgtaccacggttgtaaagcaataagatttgagatgaacactattgaaacttcgctttttgctaaaaaatagcaagttgaatagtaatcaaaaaacatagaaagattttagttcaaaatgattgctcctttctctacctggacttttaaaaaatcaattgtcatctaatatgagtttatttgtctatagacacaagtatcaatgtctaaaaaaaatcatgactttaaacttccaccgatgaggcaggtaggagataaagatgaattctgaactgttactaaaagtactcattttttaccttgtagggagggtgggcaatggggttacctgaccttatttgagggtatgggctttcttttttatttcatcacttgttatctcaaagagactcggagccagtgatccttttatcctgctacagtctttagggagctaaaaaaaaaa

SEQ ID NO: 99579 - DNA, 642 bp, Homo sapiens
  misc_feature (1)...(642): n = a,t,c or g
agactttgaatcattgagtagtttatctcttccttcaagaaatcatttgtttacacccaagcatcttgtagtaataggaaacttttattatcatagctgagtttgttggtttgcctaggcttgttttgttttgagcatccaaatttcacaagacccagattttgaagaccaaaagatttttcaaaaatgtatgaggtatagaacatccaactttgagagcactttaaaaaaactctaaatattagtctcacctaccttgccatagagccagtcatggtgatttttacatatatattcaaaatctcttaaaagtcagcttaagtatatgggctgggcgcggtggctcatgcctgtaatcccagcactttgggcggccgaggcaggcggatcactaggtcaggagttcaagaccaaccagttcgagactagcctggccaacatggtgaaaccccgtctccactaaaaatacaaaaatttgctggacatggtggcatgtgtgggatagtcccagctactcaggaggctgaggcaggagaatcacttgaaacccaggaggccgggggttgccagttnagccaagatcacaccactgaatttccagcctggggcaacagagttaacattccaccttnggggtngttg

SEQ ID NO: 99580 - DNA, 356 bp, Homo sapiens
ctggcaagaacagaaagcagagtcttgagagatgtctggacagcaatgtgcacagcagcattattgacaatagccaaagggcggaagcatcccatgcccaatgatgaaagaatgggtaagaaaaatggggcctatctatacattcgaatattactcagctgtaataatgcaggtaattcttaaattctgatagcatgctaccacagggatgaaccctgacgacgtgataagcgaagtatgccaatcacaaaaggacaaataaaggattccatttatgtgacctagctagagcagtcaaatacatagacagaggaatggcggctgtcatgggctcaatgacaggaaaatgaaggttg

SEQ ID NO: 99581 - DNA, 335 bp, Homo sapiens
gaacctcaggtgaaggattttaaaattaggggagtaggcttgacgcagtggctcatgcctgtaatcccaggattttaggaggccaaggcaggaggatcacttgagcccaggagtttgagaccagcctgggcaatatagtgagaccccatctctattattttattattgttattattattttatactttaatttctagggtacatgtgcacaatgtgcaggtttgttacataggtgtgcaggtttgttacataggtgtacatgtgccatgttggtttgctgcacccattaactcgtcatttacattaggtatttctcctaatgctatgcctccccc

SEQ ID NO: 99582 - DNA, 364 bp, Homo sapiens
gcgtacagctatgtaggctaggctggagatgaacaccgggcctggggataccagcctgccatggcctcccaaagagctgggattacaggcgtgagtcactgaggctgcccttttttttctctcttaaataaaatatggaggtctcactgagtagcccaagctggagaacagaggcttttcagagagtgaactcctgggctcagctgctactcttgcagcctaccgagtaactaggactacacgagtgcaccactgtgcccaccttatgatacatgattaagagagagggctgccagctctgaagtaccacttactattacctatataggagagggtgctggagactgggatatctcgaactaat

SEQ ID NO: 99583 - DNA, 346 bp, Homo sapiens
agatgtggcttctgtctccagaactgggttaatggggtccaaaggctcctggagatctttcagcactgttgttagtggagacctatgaagcacaatcagcagaggcagattctgtccatcatgacctcggtgaacgttgtttggaaggccagaaaaagtgctaagatgaaagattctacaagagttacaagctatgaaaaacagctctgactttgttttggtttaatttagacattattcttgcttttttagacttcattaggtgcttttaaatgtttttacggggtgtgtgtgtgtgtgtgtgtgtgtgtgtgtatgtgtgtgcgtgtgttttgtgtgcatatat

SEQ ID NO: 99584 - DNA, 350 bp, Homo sapiens
cggtacgagctggaagatgagttacacttacagatgactactcagcttcatgctctgaaggaaaataactaccaactaagaactataatcatagattgtacactaaataataatatcttttaagaatgttagtaagctgggcatggagactcatgcctataatcccagcactttgtaaggccacggcaggtggatcacttgagcccaacagctggagaccaaactgggaaacatggtgagggaaaaaaattagcagggcatgatggaacatgcctgtatcctcaggtacttgggatgctgacgtgggaggatcacctgagcctggggagcccaaggcttccgtgaaccct

SEQ ID NO: 99585 - DNA, 363 bp, Homo sapiens
agagctagcaccatgagcttcaataccctgatgaacttgatgcaaaccaactcaaaatattctactgcaaataagggcagcttacttgaaccaacataaaaaactaaaaaaatacctgtcaacttaggataacaaacagcgtactttactgttctgcagtaaataacctggatactaaaatttatcactaagattatcatcttaaaattaccaagaatgctaacatcaggcataaaaaacctgatgtaaggctggggcgggcaggtcacttgaggtcaggagttcgagaccagccttgccaacatggtgaaaccctgtctctactagaaatacaaaaattagctgggcatggtggtgggcgct

SEQ ID NO: 99586 - DNA, 355 bp, Homo sapiens
agcagaaccattctaggatccagtcattggctttccttggtttttcttttttaactctctattttggaaaacttcaagaatacacaaaagtaaagagaaaggccaaggcagtaggattgcttgatgccaggagttcaagactagcctgggcaacatggtgagcccctgtctctaaaaaataaataataagaagaaagagactagtacagtgaaccctcatatacccattactcagctacaacagttttcaacaaatgaaaacttctgtctcatttatatccccaaccccttcagcacacaaccaaattattttgaaataaattccagacattatttattttatccacaagtattt

SEQ ID NO: 99587 - DNA, 352 bp, Homo sapiens
ccaatactctacaatctctttcagaaaatagaagcagagggaatacttcctaactcattctatgaggctagtgtcaccctcctaccaaaaccagacaaagatattaccagaaaactacatactaatttattttattaacataaaacatcctcaacaaagtattatcaaatcaaatccaactatatattaaaagaataacatattaagtaggatttatctatcccaggtatgcaagattggcttaacattttaaaaatcaattaatatatttaatttatatcatatcagtaggctaaagaaaaatcacattatcatattaacacatgaagaaaaaatatttgacaaaattcaa

SEQ ID NO: 99588 - DNA, 601 bp, Homo sapiens
ggattagatattagatgatataaatggtattttttaggtatgagaatggcacggtaatcatatttaaaagaagggttatcagaggtatatatagaagtatctactgataaaattattagtgtctagatcttgctttcaatgctgcagcaaaaataaacaaaaatgggaagactgataaagtaggtaaaattttgataattgttaaagcaggtgatggatgcatggggttcaatatattatatgaagttcattatactcttccatctacttttgtatatatttaaaatgcccataataaaaagacagtggccgggcatggtggctcatgcttgtaatccccagcaccttgggaaggccaaggtgggaggatcacttgagcccaggagttcaagaccagcccaggcaacaaagagagaccctgtctctacaaacaaacacaacaaaaattagctgagtgtggtggcacatgcctgtggtcccacctactcgggaggctggggtgaaaggatcgctggagcccaggaggcggaggttgcagtgagccgaggccatgccactgcactcttagccttgggcaacagaaccaagaccctatcttcaa

SEQ ID NO: 99589 - DNA, 330 bp, Homo sapiens
  misc_feature (1)...(330): n = a,t,c or g
gagactataggcatgcaccactgcacttggctacttttaaaaaatcttctgtagagatggggtctctctgtgttgcctgggctggtctcaaactcctggcctcaaacagtcctcccaccttagcctcccaaagcactaggattacaggcatgagccatcacgcccagcccttttcttcaaagagaatcacttacctaaaattgccttgtgtaatgcagagcaggctaggcaaagccagcagactagttgttttatagcagtctcactctcctcctggccttccccangcacaagttttggtcccctatggccttccctgcatccgcgagc

SEQ ID NO: 99590 - DNA, 363 bp, Homo sapiens
gaaatacagaaagtcctagaacatccaaaacaatcttgaagaaagagcatccagaagtcttagactggctcagtgcaatggctcacacctgtaaacctagcattttgggagaccaaggcaggaggatcacttgagctcaggagttcgagactagcctgggcaacatagacctcatctacaaaaaaaaatttaaaaattagccagacatggtgtaattaaaagtgtatgaaaagtgtgttagtgtagagctaatttaaaaatagctcattgcagcctcacctatagtcccagctattctggtggctgaggcggtaggattgctggagcccaggaggttgaggctgcagtgagccgtgattgcac

SEQ ID NO: 99591 - DNA, 540 bp, Homo sapiens
ggtcagacttggccacgaaccccactccttttctgggatcagttttccgtctgtggcaagagggaggctctgtgtcaataccgaacacgcttaatttctgcaagtctcaggaagggtataataggataggatataaattacgttctctccactccccagcacctaatactgtgtggcatgctgtaggtatttaataaatacgtgttcaatgaatttatcctcccaggaatcccttaagagaggggaattttaggccaggtgccgttgatcacgcctgtaatccaaacactgggaggctgaggcgggtggatcgcttgagcccaagagttcgagaccagcctgggcaacccagggagaccccccccctcgtctctacagaaacttaaaaagttagccgggcatggtggcgcactcctgtagtcgcagctgcttgggaggctgaggcaggaggatcactggagcccggaaggcggaagttgcagtgagctgaaatcgtgccactgcactccatcctggacagcagagcgagactctgtctca

SEQ ID NO: 99592 - DNA, 369 bp, Homo sapiens
caataaagcaagtcacagaaatttttggttccctacagtggataaaagggatgcttacactatactgtagtctgttaagtgcacaatagcattatgtctaaaaaccagcgtatgtaccttaaatagaaaatacttaattgccaagaaatcgatcatctaagcctttataagtccttatctttttgctggtggagggtcttgcctccatgttgatggttgctgactggttgtgggtggccgtggcaattgcttaaaataagacaacagtgaagttcgctgcatcagtttgtgcttcctttctcaaaagatttttcttttaatattttctttattttgcaaaaagaagttttatttggggcccagggcgga

SEQ ID NO: 99593 - DNA, 354 bp, Homo sapiens
ttgctatgcaaagtaaagtgattatgtatttaggaatatataataggaaaacagaacatataacaaaggagaggggattgtttataggaacacatgtaagtgcggtggttattatttttttaaatttctttttagagtcagggtttcaccatgttggccagggtagcctcgaactcctggcctcaagcaatcctcccaccttggccctccaaagtgctgagattacaggtgtgagccaccttgtctgcccataaatgcagtggttcttaaacttgaatttacaaagaatggcctgggataattgttaaaagtgaagatgctctgattctaaccccaaagattcctattcaatag

SEQ ID NO: 99594 - DNA, 367 bp, Homo sapiens
ttggcagtttctcaaaaagttaaacacaaagttgctgtatggcccagtgtttcatacctgggtatctacaaacaagagaaatggaaacatgtacacgcagaaacttgtacacaaatgttcataacagtattattcataatagtccccaaatagaaacaacctaaatgtccatcaatggaggaatgaatagattaaatgtagtttgttcatatgttagaatacagagcgataaaagaaaataaattgatacatgctacctggatgaacctcagaaacactatgttaagtgaaataagccagacacaaataaccacatgtatgaatctattacataaaatgttcagaaaagtaacagagacagaaagta

SEQ ID NO: 99595 - DNA, 370 bp, Homo sapiens
cccggattcaagcaattcttctgcctcagcttctggactaggggtatttttatagagatggggtttcaccatgttggctaagccggtctcggactcctgatgtcaggtgatccgcccgcctctgcatcccaaagtgctgggattacaggctgtgagccactgtgcctggacttactagtgttaatcgtaactagagattacatgtactgtgcaccctttgtcatattcttcggctaattggcacttttccattctacataaaccttatagcaccgtaactttattcaccacctagttatccagtaaattattgtgtattttagctttttatgtattgaaaacctcctaaaatattgtcagtactgttttt

SEQ ID NO: 99596 - DNA, 289 bp, Homo sapiens
gaagttcttacaaaaataccaataagatttttgtagaaataggcaaacttattcaagacttgaaagacacaggccctagaatagcttaaacaatgttgacaaagaagacagaaatgggaagaatagttcactctgatcttgtagcttactatattgttgcagttatcaagatggtgtggtactactggtagagagatagacatataaatcaagggaaagactagagatctcagaaatagactcacaaaatatgtttaactgggtttttacaaaaatgcaaaagctgttc

SEQ ID NO: 99597 - DNA, 440 bp, Homo sapiens
  misc_feature (1)...(440): n = a,t,c or g
cccttttttaaggctgaataatattcccactgtatggatatattacatcgtgtttatcccttcatctggtgatggacacttgagttgcttccactcactcccagatgttttttcccctctctgatcctcaaggaatagaaaatgcccagccttcatttttacattttacaggtagtggagctttaaaaaagagagtactttgggaggcacagataggagcatcacttgagcccaagagtttgagaccagcctgggcaacatggtgagacccagtctctacaaaggtcagctgggtgtggtggtgcgcacctgtagtctgagctactcgggaggctgaggtgggaggattgcttgagnccgggaggctcaggctgcagtgagctatgatnngccactgcactctagcctaggtgataggtgagaccctgnnnnaaaaaaat

SEQ ID NO: 99598 - DNA, 365 bp, Homo sapiens
atggtctccatctcctgacctcgtgatcctcctgccttggcctcccaaagtgctgggattacaggcatgagccaccacgcccagctgttttttcttaattgataagtagttgataagtagtactgtaactcctgggctcaaggaatctgcctgcctcggcctcccaaagtgctggcattacagacgtgagccacagcacccggcctgcactgttctatatttgcaatttcaaagtgatttccaattgaaatagcttgccccacttgttccttcttgccctgtccactgtggagacctctccctgacccctgacgtctgggtccccgactggctgggcagtgagccccgaggccttcctgtgccag

SEQ ID NO: 99599 - DNA, 558 bp, Homo sapiens
  misc_feature (1)...(558): n = a,t,c or g
gggaattcttgctatacaactgcaaagaataggccccactactttctagctgtgcctcaatttcctgatcagttaaatgggactaataaaagagcagctagtgnnnnnnnnnnnnnnnnnnnnnnnnnacccctggccttatagtttatcttctagtggtcttctatcctcatttgaaaatgtgaaaagtgggtacctgagataattcaccgactcattgtttcttggaaccacaattgatctcagaagtgtaaccctgtactactgagaagcttaatcaaggacaaatacaatcccctcactccacagatggctgacatgatggtctgtgacctgaaagttgttgaatagttggagtgttctgcattcatgtggaagaggctaaaggatgtttgatgaagcactatgggctgccctggaagaggactgaagaagcagctgcaggaaagaaacgtccactctgctccagtcaaccccactgctggtgtcctatgcactgccttgcactccctgaagagagcctgggcaacagagcgagactccatctcaaaaaaaaaa

SEQ ID NO: 99600 - DNA, 623 bp, Homo sapiens
gcgcccacgcgtccgttcacttctctgctaaaaaccttccagtgacttccccttttaccgagaataaaaaggtagtgatttacagtgatctttaagaccctacctacacagttgcctgcccctattctcttgagttcatatcctactagtttcttccttactctctatgctacagtaacactggcctcctttttgttcctcgaacacacagggtatgctcctatgcatgcactggctatttcctctatctggaatactctttcccctagataccacatgactcactacatcaccttctttagctcgttgatgaaacgtcactttggggcttggccggtggctcacctgtaatcccaacactttggggagggctgaaggcagggaggaattcacttggagtccagggaattcaagactagcctggggcaacatggatggaggacctcccctctacaaagggtaaactaaattagctgggcgtggtggtacatggcggtagtcccagctgctcaggaggaggctaaagtaggagaatcacttgagcctgggaggctgagggtgcaatgagtcatgattgtgccactttactccagcatgagtcacaaagcgagaccctgtctcaa

SEQ ID NO: 99601 - DNA, 373 bp, Homo sapiens
gtctttaaagcctgaaaataaatgtgatgaagattgattctttatcatcagtactagacatgattttctccttccctttaataaagtatttgagtagaagtatgttctaggaagactagaagagaatataacttgtttaccaagatatttaaattaagtaatttgataggtgttttaaaaattagagtaaacagctggtcatgatagtatgtgcttatagtcccagctacttgggaggctcaggcaggaggattgcttgagcccaggagttccaggcagcctgggcaacatagcaagacctcaactcttttttaaaaaatattaagtaaatggtgtaatggaactcctttaaaatatgtctttatgttctttt

SEQ ID NO: 99602 - DNA, 362 bp, Homo sapiens
ctttaactggcacctcctttctctatctaacccactccctgcagcctctggtactctctacgtgtatgagttcaacttttttagattccatatatcatgtggtgtttgcctttgtatgcctggcttatgcttatttcacttagcataatgtcctctaggttcatccatgttgttgaatatgacataattttctgcttgaggctgagtagtattccattgtgtgtatatgccatatttatttcatctgtttatccattgatgggcatttcaattgtttccatatcttagctattgtgaatgatgcagatgctacagcgtagttcacctttgttttgagagagggagagagagagacagagacg

SEQ ID NO: 99603 - DNA, 345 bp, Homo sapiens
cgaaaatctgggcacgtcgattctttttttctgttgacgttaaacattgaacattataaaaaattaagttacatttagctgaatttaattacacttaatgagtgaccctcattgaaaacaatacattggccgggcgcggtggctcacgcctgtaatccaacactttgggaggccgaggcaggcagacggcctgagatccggaggttgcggtgaaccaagatcatgccactgcactccagcctgggcgacagagtgagacactgtctctaaataaataaatgaaagaagaagctacttgaaaaaaatatgtatttccaaatatatgtcagttttgacaggatagta

SEQ ID NO: 99604 - DNA, 501 bp, Homo sapiens
  misc_feature (1)...(501): n = a,t,c or g
caaagccgctgtagcaaagaagccctaaatacagtggctcgaataagacagaagtttatttctctctcgtgtaatagtttagacctcaacaatggctctgctctaaaattccagaattgggatttctatcttgtagctctaccagcccctagggcagagctcagagttcaaaatgcacatgagtaccctgggtggtttcattaaattgcaggttccagggccaggcacggtggctcatgcctgtaatcccagcactttgggaggcaaaggtaggaggattgcttgaggccaggaatttgagaccagtctggacaacatagcaagacctgtctcgacaacaattaacaacaacagaaattagccaggtgtggtggtncacgcctgttagttcccagctnactggggtaggggtaggcttcaggttcggaggnttcgtttgaggcacaggagtttggaggttaacagtncagcttttgatttgcattcagtggcattccagtc

SEQ ID NO: 99605 - DNA, 354 bp, Homo sapiens
attttggaaggctatagctggcatagagggtgattcctctgataaatgtaggcaaataaactgaaaaccatttggaaaaaattcatcagtttagatgccatgaggaacattcacgattcataagagaaagtcaaaatgtcaatattttggaagatgattccaactcccagggatgactttgaggattgaagacttcagtggagaaaagaactgaagatgtggtaaaaacagcaagacaatgagaattaaaagtggatcgaacttgaacagatgaggagttgcttcttttggatcagcaaagaaagtagctttgtgaggtggaatctactgttggtgaagatcctgtgaatattg

SEQ ID NO: 99606 - DNA, 1390 bp, Homo sapiens
ttttttttttttaagatggagtcttgctctgtcgcccaggctggagtgcagtggcgcgatctcggctcactgcaagctccgcctcgcgggttcacgccattctcctgcctcagcctcccgagtagctgggactacaggcgcccgctaccacgcccggctaattttttctatttttagtagagacggggtttcaccatgttagccaggatggtctcaatctcctgacctcgtgatctgcctgccttggcctcccaaagtgctgggattacagatgtgagccaccgccgggccgagagggtgatttctaagcagagaattgtatcagttatgtggaaacctttgccagaaatacatataccttgtatattaaatctgagtctcagatttaatcatcgaagcgtagctgggttaagaaacagtctgatcgtaaggatgttgtcgattctgacccatggatgaccacaagaaaaagatatttatttctgcctggataattgagagttgactaactttggaagtcagaattcccaggaattagagtaactgctctggaaagttaaagtgtgaagttttttagatagtttcataaaaacaattctggtttctttttgcttgtgctgactttcttggattttaatctacctcatcttgtctttttagagttacttcaacttgtcactttaacattgtgcttgactttgggttgttttctaaggatgggaatttttcctgttcattgacagcttgttctcttgccttttcattctgatcctcatttcatctaacatcatctcatattgctcctctgccaagaggaaatgttttaaaatagtttaaagtcttgttttatgggaagaaagtgatcctccaatgctatttgtttctgaggtcagtaagagaaggagttaaaacaaggcagtggggaagggaatgaatcctgccactggaggcaaaagctgacaaggaaagagccattaattaagacaatttcaaagtcaactgattgtgatcattaatgtcacaatagatcaaaacctaattatcacagcctaggtaagagcccatccagtattaatcggaaaatcctaatagggaaactattatccaaggaaattagggccaaattggaattgcagttgaactttttatccttgggccttcccctatttttttgtgatgtccccctggcattggccaggtgtgaccctaacagtcgattcaaggccaagtggtcagtttgtcagcctttttttaagggatttctttttatttttaggaattccaaacagagttaacctaaactgtcattgccaaaagatcagtcttaaactttcttagcacctgtacctgtttaatgtgatcagactatcagtgaggaaaaaaaaaaaaa

SEQ ID NO: 99607 - DNA, 388 bp, Homo sapiens
ctttcatcttacaaatctgaaactctggacctattaaagaataagtgcccattctccccttcccccagcacatgggaaccacattctgctttctgtctctatgaatttgactactgtacctacctgatgtacatgggatctatagggttcgtccttttgtgagggcttatatgacatagcataatgccttcaagcttgttgtagcatgtgtcagaatttccctcctttttatggctaatattctgttacatgtatatgctaccaaaagcctgaccactcatccgctaagggaagcttggattgctcccacattttgactactgtgaataatggagctactaacatgggtatagaactatctccttgagcggcgaagagcatgtgagca

SEQ ID NO: 99608 - DNA, 384 bp, Homo sapiens
gttagaggttattatattctgtactttgtagatgagggagctgaggttcagagagtcctggtcatttgcccaatatcataggactagcagatgtcaggctgtttttccttctggagtctcccttattgttgtccttagttgtcccaaactctggtttttattattaaatatttttagaagacctactggaacctaattttaaacagaaactaggccaggtgcagtggctcacgcctgtaatcacagtgctttcagaggccgaggcatttggatcacttgaggccatcctggccaacatggtgagacccccatctctctaaaaatatgaaaattagccgagtgtgatggtgcacgcctgtaatcccagctacttgggaggttgag

SEQ ID NO: 99609 - DNA, 332 bp, Homo sapiens
ggcgattcccctgcctcagcctcccaagtagctgggattgcgggcgccctccaccatgcccggctaatttttgtatttttagtggaggcggggtttctccgtgttggcccggccaacatggtgaacccttgtctcaactaaaaatacaaaaattatgtgggcgtggtggcaggtgtcggtaatcccagctactgaggcaggaggctgaggcaggaggcaggagaatcacttgatccccggaggcagaggctgcatctactcgggaagttcatgtgagagaaaggcttgtactcttggttgtatcggtcgcgaattcctgatctattaatccg

SEQ ID NO: 99610 - DNA, 380 bp, Homo sapiens
gacgctacttggaggttgaggtgggaggatgccttgagcccaggatgtcaagagggcagtgagccatgattgcgcgactgcactccaggctgggctgcaaagtgagacaccatctctttttttttttttttaaaggcccccattgaacccgtgtttataatttttatttttttttatttcttttttatttttttttttatttagtttttttttctgttatttttatttttatttattttttattttgttttttttttttttttatcttgctttgtttattttttttttttttggttcttcttttttatttattgtttttctttttttgttcttcttgttttgttttgtcttttgtttttttttttagttttgttattttg

SEQ ID NO: 99611 - DNA, 387 bp, Homo sapiens
  misc_feature (1)...(387): n = a,t,c or g
ctcctcttcttcattaggaatgggatgttctggaaagtgccttttttgtctgcttcgattttttgttgctgttttttttttttttttttttttttccggggataaaccccccctccgcctttggccccaaaaggggggggattcccgggtttgccccccttttccccccttggaaaaattttttacggccccttttcttttggttttcgggggggaaacccctttaaaaattgccccccggggtcccccccccccgggggaagaaactttaggccccccttttttttttttttccccccttttttttggccccttgggcccaaatttgggtccccccttttttttggggggtttaccagttcccggccctggttttttttcccgggn

SEQ ID NO: 99612 - DNA, 392 bp, Homo sapiens
gtttagtgaagggaaaaatcagaagttgggaggaaacttgggtgaaaacgtggcattttacccaggcgtgatggctcacattataatcccaaccctttgggaggccaaggcaggtggattgcttgagctcaggagttcaagaccagcctgggcaacgtggtgaaaccccatctctacaaaaaaaaaatataaattttagggtaaactctcctgaaattcctaaattttgaatctgaaaatacgaaaaaccccgatagggttcttaaaatgtggctcttgccccatataaattcctttgatttaacctaaggtggtgcctattttaatatacaaatccgctctaatatttaagttgtctattgattcgtcttatgtatagatattttaagtcg

SEQ ID NO: 99613 - DNA, 362 bp, Homo sapiens
gttttgacaaatagatatacctgtgtaacctacacacacacatcactgtagaaaatttccatctttccagaaatttctcttttgggttagtcaccttcctccctccagaaaacaactgttcatgttgttttgaccttagattattttgcctccagcctttaacaaatatgtttatttatttagtatgtatactggatatgtgtatacacacacacacacaaacacacagaaacatatatacacacacaaacatatatagatatatacacatacacacaaaatatggaatgtataccatgtggacagtgtatgtccatttattttgaaattatgcaaatgtattatcaatccatttattattg

SEQ ID NO: 99614 - DNA, 2165 bp, Homo sapiens
  misc_feature (1)...(2165): n = a,t,c or g
ttttttttttttatttaggatcttttttttatttttatacacatgacaagattttaacaccaagaatagtccagttaaaatagtacaaatttacattccatgaggaaatgttaaaaaaaattccaactaaaaaacccactttttcctgtgacccataatcccaacattttaccagtgcaggggagaagggggattatgtgtgggcatccaaaacaagtcttctcccaaaaaagaaatgacttcaaaacttcacatttcccttctcacacagggatccaaatgggtgaggagtataattttacaatttcatcttttttcaggctgtaggattcctttggctggtttcttcttcttcatctgtttcccaccatcccatttcttgcactcttcgtctctgctctgtgtctttctgcttgtgtccttctgctgtctctttcagggttcttccttcggggctcttcttccacctttggcatcaggggtcaaatgttcaaaactgaggcgaagcattctttccaattccaatctccatatgcctttagtgtctgggtaaaaagataccctgacccgagccgttgccggtttcaaaccaaaaccacaagcaagatccaaaactgttttatcatccttcatcctcctttaattcgtcgaagcatgtctctgatccagcggtggtctgggaattaatttcaaatgttttctttctgactcgcatagtaaattgggtaagatgttctttgcccggttggtacgcttgtgctttcatgaaatctctcatgttgccagaccaatccgtactgggctggcccacccaaagcaaccacggagattctgtcaggcgctgagacaccacagccttttcaatcttgtccttaagggctttatctttcatccaattcagcagaggctcaaattctttctcaactgcttcacgactctccttagttttctcactttcatcgaacttcactccttccttggcaacattctggaacctcttcccatcaaattcgggaagggcctgaatacagtattcatccacaggttctgtgaggtaaataacttcatagccctttttcagaagtcgctcaacaaatggagaagattcagcctcttttctgctggacccagccatgaagtagattttgtcttgtttttccttcattctttccacatactggtctaggctagtaatgtcagttggatgatgagaagactggaacctaagaagtttagcaagacgtgttcgattcgagtggtcttcaatcacaccaagcttgatgttggtaccaaattctttccaaaaagtatcattgtatttatcatcagcaatcttcttgatcatgtccagcgttttacgaacaagcttcttcctaatcaccttaagcagtttatgttgctgaagagtctcgcgggaaacattcaaggggagatcatctgagtccaccacacccttgacaaaattgaggtatttaggcatcatatcatggaagtcgtctgtgatgaatacacggcgcacatagagcttaatgtaatcgctctttttagatccatattcgtcaaacagaccacgtggagcagatgtgggtacaaataaaattgatttgaaggtaacttccccttcagcagtaaagtgaatataagccatggggtcatcactttcctttgaaaatgatttgtagaaagctttgtattcatcttcttctacttcttttgatggtctctgccatattggtttgatatcattcataagttcccagtcccagacagttttttcaacttttttagtctttggtttcttttcttcttcttcttcctctactgcagcttcatcatcagattcttctttctcttctttggctgcttcttcttcctccatgggctcctcaacagtttcagtcttgctgctccatacataaataggaaagtttatgaactgtgaatattttttgacgagatttttaattgtatccaattcaaggtaatcagatgcagnagaagaaacagcaaaggaatctacagctgaaaaagatgaattgtaaattatactctcaccatttggatcctgtgtggagagggaatgtgaaatttacatcatttcttttgggagagactttttcctgtgacccataatccnacattttacagtacaggcggcccccccc

SEQ ID NO: 99615 - DNA, 338 bp, Homo sapiens
ccaatttaaacggtaggggctatgcccccttccctccttccttccatctaagaaggaaccagagatgggatacagcatgacaagttcacagaatcattaaaagttgagacctactgataccatatttaccctaatgtgattattacacattgcatgtctgtatcaaaatatctcctgtaacccataaatatatacacctactatgtacccacaaaaattaaaaacaaggccaggcatggtggctcatgcctgtaattccagaactttgggaggtcgaggtggcagatcactagatgttaggagttcgagaccagcctggccaatatggtgaaacccca

SEQ ID NO: 99616 - DNA, 374 bp, Homo sapiens
cacccctaaatgctagatgggaagaggaacttagaacataactttctttctccaacatatgtaaaaatccaggcttgaaattgaaagcgggggcttgaagagagatctgtacacccacgttcacagaagcattttccatagaagccaaaggatggaaataacctaagcagccattgacaaatgaatggataaacacgatgtggtgtatccatatgagagggaaattctgacccatgctaaaacatcaatgaagcttgaagacgtatttcatgaaataagcaagtcacaaaaagacaaacactattatatctgattctgatgtaaagcaagtgagccccaaaattggggcttgccccaagactaagggtcttggt

SEQ ID NO: 99617 - DNA, 360 bp, Homo sapiens
aacaattacctatagaggagcaaagataagaattacatctgattcatcttcagaaaccatgcaagcaagagaagagtagagtgaaatattttaagtgttgaaaggaaaaaaaaaacccactaacctaaaattctatattctgggaaattatcatttaaaagtaaaggagaaataaagacttttaaggcaaacaaaatcaaaggaatttgtttccagtagacctgtcttgcaaggcatgttaaaagtagttcttcagagagaaggaaaattatataggtcagaaacgcagacctataaaaagaaagaaaaagcatccgagaaggaataaaggaaaaaggtaaaatatgttttatttttttc

SEQ ID NO: 99618 - DNA, 338 bp, Homo sapiens
gagatagggtttcgccccgttgcccagactagaatgcagcaacacgaacatggctcaccacagcctcaacctttcaggctcaagcgattctcctgcctcagctaatttttccattttttatagagacgaggtttggccatgttgcccaggctgttctctaattcctgagctcaagcaatcctcccatctctccctccccaagtgttgagattacaggtgtgagccaccatgcccgaccttgaagttactcttactgtaattaatccatggtccaggcatccaagaaaaatcaaacaaaatagaattcagaatttattacgattctgagacttctggga

SEQ ID NO: 99619 - DNA, 362 bp, Homo sapiens
gcctgttatttttgcagtgatttctgatctgcatactgaagagtctgtacttatgcattcataggtaacacaccatggtgactgaaatttgaatcctgggtgactagtgttgttatctaatggtaactgaaatcagtgcacaccagaaccctgcaaagcaaggactggctctacagcattcccttaaaaaacattttttttaaaagtgtcctggacaggcacagtagctcatgtctaaaaacccagcactttgggaggctaaggcgggaggacttcttgaagccagaagttcaagaccagcctgggcataatgagacccccgtcactacaaataaaaaaaaaggttttcaaaatttacccgg

SEQ ID NO: 99620 - DNA, 1521 bp, Homo sapiens
  misc_feature (1)...(1521): n = a,t,c or g
ttttaaattaaattcgaatctagtttatttgcagaattttacttaaccagttatcatttcttcctgtttctcaccattatataaaaacttaccctttgtacaagtatgaaaaatgtggaacaatgaataagtagtgaatattgcacatttaatgtccaaaataaagttgtggtttttaaaggtcacactagatatgtgggaagaaaacgagttgaacacacttaagtatgtgtctccacataagtgattttaaactattgaaagaaaaataaattctatcagtgctcaatgagagacagtacatctgtacattaaaaaataaaagttataatcaacaacattccttcgcaatttcattatcccaaaagaggatcagtagtataattattttttttttcaagttattttcatcaggaatcaggaacctaccagagtgaaggaaacctcaaatacagctactcctggacactgatgcccgaggcatgctgtggaaaccggaccaaaatgaagtctgcgttagtaagtctagaactttacccagcacaacccagacacaaatggaagatggtagaaggggatactttcttttaatcaacacacttatttcccaacattatattctccattttgcttaataagacaaagttaactgatcagaaaaatgatcagctactatctcaaaatgagctgtacagttggcccaaaatgaagagcaggcagtagtagaggattaagggcaaagtgccttgttgttaggcctgtcatgaagatgtggggtgagatctgtcttgggcaacaactgatattaagctgaggtctgcagtctcaacttgccactagcttaatgtgcctcccatggggcacagctactgaaagctgatgctgcccaagcatttagggagataattatgccacttggaccacactggtgcgactctaaccccagggctggggccagaatgaggtaaaggaggcaccacgggggtaaacccaaggaagcactctcttggcacctgcaagcaagcaccaacttaaatgtatgccccaggtgcctcatttgtctcaccctagccctggccctgctaatccggggcacaccccttttaggataacacggactaatttggacactttccccaaaccgtagcccagttagacatgatggtggaaaaggtctaactaaagacattgcaggggagannnnnnnnnnnnnnnnnnnnnnnnnngtgattttgagttcataaaatatacctaattataattacatcgtgattttcatgttctatgaatcatattttaagcaacnnnnnnnnnnagcatttactatgtccccggcatatgctacatataccacatgcttgtgtgtatgtgtgtgtatatgtatgtgtatatatgtgtgcatatgcatatatagtatatgttagtatatattatatacactactaactatgcaaaactagtaagactagtattaatactaacattttacaagaggaaactgcatctttagttaaactttag

SEQ ID NO: 99621 - DNA, 404 bp, Homo sapiens
  misc_feature (1)...(404): n = a,t,c or g
tatggcctctatctagacgcaaacggagactctgagtgtacatatatagccaatgcaggttagatctatacagagattttttttaatctctcccttgtttatacttgtttttttttttttttggaaagaaaggtgaccgttgtgcccaccgctgtgggggaaaacgggcgtgaccccgaaggggggacttggcggggacccgaaaccgccccaggggattcaacctggcccccggggagactcggactcaagagaacccattaaaatgggccccccccggggggggggcccggtttcccccatttctgggggggcttagggcgggggtttcccgggcccccgggggttaggggccccggggccttttacccccccccccccgggggggcaaaaaaaaaccctcn

SEQ ID NO: 99622 - DNA, 441 bp, Homo sapiens
ctgttttctaagcatttaaaataaaataaaaagtataatagtgtgataagttctttcacaaagcaagcaatcacatttatgtttctacttacatttgggttttccaaatatgtgtgtgtgtgtgtgtgtgtgtgtgtgtgatgtgtattctatgttaggcttattgggatgtctagggattatgatatggttcctatttgtattatgatgtatctttattgttgttattagtcgtctctcttctctgtgattatttgtattttcttgatgtgttttgtttcttatgagagacgctttattctattcgcatgattcttgttgttctcggctttttttgcgtgattaatcgatttggtatgtgcttagcaatcttctttaggatgattcgcaaatatgttcttggtttatttttgtggcatgtagttggtatatttttttgtg

SEQ ID NO: 99623 - DNA, 397 bp, Homo sapiens
tgacatatcttcaactaattccacaataaaaactgactggaaaggagctctcaatccagtactacgcaatacaaaaaaaaaaaaaaaaaaaaaaaaaaaaaaaaaaaaaaaaaaaaaaggggggggccctttttttaaaccccggggggtgttttcccaatttgggggggggcacaaactttttttttccccccgggggggcccccccccgggggggccccctttttggggggccccccttttgggcccaaaaaaaggggctttttggggggggggcccccctaccccgtttttggggggggggggtccccccccgggggggaaaaaagggtttttttgggggggccccccccggggttaaaaaaaaatccggcccccctcaagggggggggccttt

SEQ ID NO: 99624 - DNA, 380 bp, Homo sapiens
agggaattgagtaatagaagaataatgtttcagtatctcactggaattaagttagtataaatctgaaatagattctgataagctaaaatgaatagagtaagctctagagtaaccactaagaaaacaactgaaaaaaatagaatggaaaatgattgaaggaattaaaatgttacataataaaatattcacttaatgcaaaagaaagattaaaggagaaacagaggaatgaaaaagacatgacatatacagaaaatgaaaagtgatgaagtcagaaataaataaaaaaaaaaaaaaaaaaaaaggggcggccgttttaaaggatccttgggggggccaaagttaacccgggcttgcaacgtcaaagctttttccttaaaggg

SEQ ID NO: 99625 - DNA, 319 bp, Homo sapiens
agttaattaaaggagaagattcctaaaatttgagagacaaaataaatggaacacatgagaaccttaaaaaaaaaaaaaaaaaaaaaaaaaaaaaaaaaaaagggggggccttttaaaagaacccttggggggcccaaattttaccggggttggcaacgtaaaattttttcccttaaggggggcctttttaaaacttggcccggggccgtgttttaaaaacgggggaaggggaaaatttgcaacttgggaatttttggaagggacccttcttttgggcggggggaaaaaattatttgggggcacaaatttcccctaagga

SEQ ID NO: 99626 - DNA, 419 bp, Homo sapiens
tttaaattgtacaatttagtaatgttatgtatattcacatcattgtgaaatttagatctttagaaattttttatctttcacaactgaaattttgtacacattaaatactaattttccccctactcccacccccggcccttggcaaccactactttatgtttctgtgatttcgactaccttaaatacttcatatgaagggaaagtatttgtccttttgtgattggcttatttcacttagcataatgttcttgagattgatccatgttctagcatgtgacatgatttccttctttccgtaggctgcttagtcttccattgtatgtatataccatattttatcctttcatccaccaatggatatttggattgcatctcttggctactgcgaataatgctgtaatagggattgtatggattcg

SEQ ID NO: 99627 - DNA, 432 bp, Homo sapiens
agaaacagtgaaaatatatttacagtcatttgaagtgggcactactaacatattttcactgtttctcaatgtatttaattcataaagtaaaaattttatgaaaagaaaaaaaaaaaaaaaaaaaaaaaaaaaaaaaaaaaaaaaaaaaaaaaaaaaaaaaaaaaaaaaaaaaaaaaaaaaaaaaagggggccccttaaaaaaaacctctggggggccccaaatttacccgggtcagaaaaaaaaaaattttttccaaaaaggggggcttaaaaaaaaccaccccccggcccgtttaaaaaaacacgtaaaggggaaaaactaccctgtggaaatttttgaaaaaaactttttttttggggggaaaaatacaagcaccaacccctcacaaaaaatctaaactttcagagaaaaactaaaattctttccgtata

SEQ ID NO: 99628 - DNA, 583 bp, Homo sapiens
gaaatgcataatctttttcttttgtgagacggagtctcactgtcacccaggctggagtgcaatggtgcaatctcggctcactgcagcctccacctccctcccagtttcaagtgattctcctgcctcagcctccagagtaactgggattacaggtgcctaccatcatgcctgtctaatttttgtatttttagtagagacggggtttctccatgttggccaggctggtctcgaactcctgacctcaagtgatccgcctgcctcagcctcccaaagtgctgggattacaggcgtgagccactgcacctggtctgaaatgcataatcttttaaaactgaaagccatttctaatagtgttcttaatttgtcaagaatcgtatgagaagtgccagtgccctttgcctgtctagctataagtggattatcatgcccaccctttggagccagcagttttggttcagtcctttggtctctgactactcacagtctgcaggaaagagcaggttgtgacacttgactagtttatgagagcagaagctgttacgtgacacttagcacatactgctctcagaggccccagatggat

SEQ ID NO: 99629 - DNA, 346 bp, Homo sapiens
aatagtatctcattttatggacatactcatattttatgcattcatttgtcagctaatagacatttgggtaacttctactttttggatattaagaataatgcttctgcgaacattcgtatacaagattttaatgtggatctatgttttcatttttcttgggtatgtacctaggagcagaattgatgggtcatgtggtgactctgtagaagctttcaagctgccgtactgtttccagagtggctgcactattttccattgatgttgaacatcttttcatgggcttatcgacgatttgtatatctttggagaaatgcccattcggtttctttgcctgatttttaattat

SEQ ID NO: 99630 - DNA, 353 bp, Homo sapiens
caatttcctttcctcatctcaaataaatgccttgttacaagaaaaaaaaaaaaaaaaaaaaaaaaaaaaaaaaaaaaaaaaaaaaaaaaaaaaaaaaaaaaaaaaaaaaaaaaaaaaaaaaaaaaaaaaaaaaaaaaaaaaaaaaaaaaaaacgggggcaaaaaaaaaaaaaaaaaaaaaaaaaaaaaaaaaaaaaaacccaaaatatttttttattggggatgaacaaaaaaaatattttttttttttaaaaaaaaaatagaactttttttttaaaaaaaattatatataagaaaagaaataatttttgaaaaaaaatatataaaaaaaaaaatttttaatagtaccaaaaa

SEQ ID NO: 99631 - DNA, 744 bp, Homo sapiens
tagtccagtgcggtggaattcactagaatgagtgaccttgagcactgtccttttgggaaattaagctaaactcaagtaaaactagaaggccatgccgtttgttgtacaggaacttctcaaaaaatatcaaaatttgtttcctgaaattcaactaagtacaacataatcattttcgttaaatataatttgaaggaacccttaaagtgtcaggttattgagaatctgaggataaggaaattggcatgatccaatacagctttaacagtggtactacaaaagatcatctcttttacttttaagaattctagagtaggccgggcacagtggctcacacctgtaatcccagcactttgggaggccaaggcgggcagatcacgaggtcaggagatcgagaccatcctggctaacacggtgaaaccccgtctctactaaaaaatacaaaaacaagattagccgggcgtggtggcgggcgcctgtgatcccagctacgcgggaggctgaggcaggagaatcacttgaacctgggaggcggaggttgtggtgagccaaaatcgtgccattgtgctccagcctgggcaacaagagtgaaactctgtctcaaaaaaaaaaaagttttttttatgtttaaaggttacagaggttcagttattcaaaataaaaggagttctggagagttctgcacagcagggttgaacatacttaactttacagaactgcacacctacaaatgggtaagatgatgat

SEQ ID NO: 99632 - DNA, 356 bp, Homo sapiens
taaaaaaataagaaagtagatacagctctatttgccttcctttctccagtgtttactgttctagaattatatctttacaactgtattcttatgttttattagtatatatactcttttttttttttttttgaaaagggagtttggtttttgccccccactgggagtccaggggcccggtttgggttcattgaaccctccccttttggggtaaaagcaattttccggtctaattttcccaggaatcgggaataccgggcttgccccaccttccccacctaattttggattttttagaaaaaagggggtttcgccatgtgggcccaaccggcccgcaatttccaaattttaaaattcga

SEQ ID NO: 99633 - DNA, 340 bp, Homo sapiens
attttttgtagaggcaaggtctggtcatgttgccaaggctggacttgaatgcctgggctcaaacaatcctcctgcctcaacctcacaaagtgttgggattataggcataagccatggtacctagccaaggctaattattattaagagctgttttggtagagtgatggggtacaaaatctatggaatattcaacaatagtgagtggatgggtataaaataaaggtagtggaggcaactctttccttggagttggtcttagttcatctgtaatcttttttttttttttgggggaaaccaaacttttatttttatcaatttcagtctcccgggaccattggag

SEQ ID NO: 99634 - DNA, 337 bp, Homo sapiens
caattttgtatcagcccatttcttgttctcttttgcctttaaaaacctgcttgtaacctatgctgaatggaccactccccaaaccaacttggaagccagttgccctcaaccttggcccaaataaactgtctacattcattttgcctcagattcttcaggtcaacgttttgtttccatctcttggctattgcaaataattctgctgtgaacatggatgtacgtatatctgttcaagtccctgcttttaattctttcggatatatacctaatagtagaattgctggatcctaacagtaattctgtctaattttttgaggaccaccatgctgttttccac

SEQ ID NO: 99635 - DNA, 333 bp, Homo sapiens
gcccatcataactagagccctgaagctgacaaacccacaagggaggctttaaaatcatcttgccgggatctcccagccacatcacatgcccctgaggacagggccaagccatctgctcccctccccaggaccaacccctattaagtaagaactgcatctacagatccaacgcaacccccaaaattccaccagggttgtgtgtgtgtagattccagcagggtggtgtgtgtaaattccagcagggttgtgtgtgtgtgtgtgtgtgtgtgtgtgtgagtggagatagtgacaatctaatctttataggctcatataaatgggggcgccccaaag

SEQ ID NO: 99636 - DNA, 361 bp, Homo sapiens
ctgcaaagtacatattttaaagttaagaggctaaacatctgggggttttgagtcccaaatccaaaataaattaccctttttggacttttcaaaaaaaaaaaaaaaaaaaaaaaaaaaaaaaaaaaaaaaaaaaaaaaaaaaaaaaaaaaaaaaaaaaaaaaaaaaaaaaaaaaaaaaaaaaaaataaaaaaaaaaaaaataaaaaataaatcaaaaaaaaaaaaaatttagagaaaaagtataataaatatacttttatatatattattttattttgtaataataataaaaatacattttatattaagtaaaacccgccgattctaaagattatgcaataattatcatagaaataaatcag

SEQ ID NO: 99637 - DNA, 230 bp, Homo sapiens
aaaaaatttaaaaattagctggacatagtggctcatgcctgtagtctcagctacatgggaggatcccttaagcctgggagattgaggctgcagtaagctgtaattgcaccactgcactccagcttaggtgacagagcaagaccctacctctaagtctacctttatctctattactctctctatatctatatatcgctatctctaacgcacacgcgcacgcgcactcccgc

SEQ ID NO: 99638 - DNA, 333 bp, Homo sapiens
cccatcattatttatgtattattattattattttttgagacggactctcactctgtcactcaggctgtagtgtagtggcgcattctcgactcactgcaacctctgcctcccgggtccgggtgattcttctgcctcagactcccagtggctggtgttgctcccgcctgcctgttctagccctaccgcggtttctcgggtcccgctactttagccttccgtgctctggatcccgggcttccgcttcacccgggcttttccctccagcgtccgtcctgttcccgtggcggctgatgttctcctatctttgtgtgtcactctaccctctcacttccg

SEQ ID NO: 99639 - DNA, 356 bp, Homo sapiens
gagatgagccatacgcctttgccctgactacttagcaaaaggtttgaaaaaaaaaaaaaccctgggaaaaaaaaaacccttttataaaaaaaaccctttgggaaaaaaaaaaaaaaaaaaaaaaacctttttaaaaaaaactggggatcaaatgaccattttaaaaaccaacttgacaggagtaaaaaccaaatccattctttaaaaaacgtgagggaaaataaaggaacttttgggcccaaagggtcatctataaaaaaagggaaaacgcaaaaaatcccacccataaaagaaggcaaaaaattttaaaaacccgcccaaaaaatcaaatattagaatggaaaatatggaaaaag

SEQ ID NO: 99640 - DNA, 307 bp, Homo sapiens; identical to SEQ ID NO: 39694

SEQ ID NO: 99641 - DNA, 385 bp, Homo sapiens
gattttttgtgttttagtagagacggggtttcactgggttgcccaggctggtctctaacttctgagctcaggcagtccacctgcctcggcctcccaaatgctgggattacatgtgtgagccactaagcctggcaatgaatggtatttcttaacccagttaatgaatggtcttaggattcacggtttcatcaagacacactgaatcatttctattaacatcccattcacttgaggtttatttaggcattttgtcttgatttgttaaatgctcactaatacttttatcagtggtgggtttcaggtgtctctctttcagaccctcaggattctcttcaacctgaactagatatatggaaagtagattctgagaagcagtatggtgttt

SEQ ID NO: 99642 - DNA, 330 bp, Homo sapiens
ctgtgttagccaggatggtctcgatgtcctgacctcatgatctgcctgcgtcggcctccccaaatgctgggattacaggcgtgagccactgcacttggtcttttttttttttttttttttttttacctaaatctacttaaagggcttttatttgaatccccggaaaatttttaaaaatttttttccccttttgaagaaccccttttttggggttcccccaaaaatccaattttcccccatacccaatttaccttctttggtggtcccaaacatggtctttttcaaaagagttctaggggaaaaaatttttcggggttttttcccaccccc

SEQ ID NO: 99643 - DNA, 324 bp, Homo sapiens
cttttgctgtgcaagaacttcgtaggttactgaagtcccattttgtttttgttgtgtttaagacaccagtctggctgtcacccaagttggactgcagtggcacaatcagagctcactgcagcctcgaactcctgggctcaagcgatcctcccgcatagctgggactataggcatgcaccaccacacccaacttatttggatggagtcatgctgcgttgcccaggccagactcaaatttctagcctcaagcaatcctgctccctcagcctcaagtgctgggattacaggcatgagtgactgtactcagcccctcttgcttccact

SEQ ID NO: 99644 - DNA, 318 bp, Homo sapiens
tgcaaatgctgctattttatataaagagggttgagcctctgcagactttggtatccagagggtgtcctggaaaccaatccctcacagttctgagggatgactgtataccttagagtggaattgctgggtcatatggtaattcttatgtttaattcctttgagggagtgccaaactgttttcacagcagccaaaccattttatattgccactagcaacacacaagcattccaatttctctacatcctcagcaacatttgttatctcctgttttttgtctgtttttactgatagccatccctgtgggtgtgaaatggtat

SEQ ID NO: 99645 - DNA, 340 bp, Homo sapiens
attaaacaaagatatgtagatactttggcggcttttcttattatagaaacagtttgattttaagaatttttattcagaacgcagattcgaaaagaaaaaaaagaatttttagaaaagttgccttttaatttaaatttcttgttttgtcctaataatcacattgaaatagccaaggcgaataatataaattaaaatgcagcgatggcccggcatgagtggctgggactgcaggaatgcaccaccacatctggctaatttattttttgtagaggtgaagtcttgctttgttgcccaggttggtctcgaactcctggactccggtgatcctcctgcatggacc

SEQ ID NO: 99646 - DNA, 1437 bp, Homo sapiens
ttttttttttttgagatggagtttcactcttattgcccaggctggggtgcagtggtgcaatctcagctcactgcaacctctgcctcctaggttcaagcgattctcctgcctcagcctcccgagtagctgggattacaggcatgtgccaccaacgcctggctaatttttttgtatttttagtagagatggggtttcttcatgttggccaggctagtctcgaactcctggcctcaggtgatccgccttcaggtgatcctgacctcaggtgattggccttccaaagtcttgggattacaggcgtgacgaccatgcagggcaaatttttctatttttttagagacagagtctccctctgttgcccaggttggagtgcaatggtgcaatctcggctcactgcaacctctgcctcccaggttcagagtgattctcctgcctcggcctcccgagtagctgggattaacaggcatgcgctaacacacccagctaactttttctatttttagtagagacggggtttcaccatcttggccaggctggtctcaaatgcccgacctcagttaatccatccacctcggcctcccaaagtgttgggattacaggtgtgagccaccgtgaccagccaatgtgccttcttatagtgtctactcattggtctttgttctgcccagtgataacaatgggataacgcctgctacacatcttcattgtgaaacccttcccctgtgctgagattaaatgaactctaagattattaaatagtatattttccttgacagcctagcgtttgatgattttaaagccttatgtataaataaaccaaaggaagtaagcagtcatattgctaatttgctaactcctatctattgaatggtgaagttttaaaaatttccccaggtaagtttaagattcaaacaccatctattgagcacctacattgtgtgccaggtagtaaaataggtgctttcatacacattgtctcaattcctgtgaggtcagaattatctctgcatttgaaacttgaggaaacatgctcagagtgcaagaagcttccttgcctgagatcacctagaaaggaaccctcagagccggcaactgaatcttggtccctgtgatgtcaagcccattgctctcccactgcagaacatggcctctagattaatgccaccgattcaggaacacctccgacagtcttgaaatacccccatgttgccttgtttgttttttccttctggcttcttctattacagtctcttcattggaagctctgtaggccaaggccagagctgatactgacacggagccaatgcagatagcacatcagatgctaggggtcgctgggaggattaagggacttaatctgctaggaacacctgtacttgaagtggaggaggctagggggccacagttgctgcttcattaacatagaggttttggatt

SEQ ID NO: 99647 - DNA, 320 bp, Homo sapiens
gctggacgcggtggctcatgcctgtaatcccagcactttgggaggccaaggtgggaggatcacttgagcccaggagtttgagaccagcctgggcagcatagtaagaccctgtctctatacaaataacataataataaaataaaaaacaaagtaccttatagcacaagtacctaagtacctgtttacctctttagatgctggtagaccacttgttttgctagtctttgaaattggaaggagtgtcaaatacacagaagccagagtcatcttggccagatggtgtttgatacagatggatggttagttgtcatgcagatctc

SEQ ID NO: 99648 - DNA, 292 bp, Homo sapiens
taccgaacattctactcgataactgggcaggtcaggtgcagaggcttatgtctgtacttccagcattttgggaagccatggcatgaggatcgcttgagcccatgagttatagacctgtctaggcatcatagcaagaccacgtgtttattcttaagaactataaacaccgatccctgaataactgaccaggattattcaaaagtgtcacggtcacaatgactggaaagggtcacaaatgactggttaagactgaggaactgtcatagaccaaaacttagggaaaaataacaac

SEQ ID NO: 99649 - DNA, 615 bp, Homo sapiens
gctgtactccagcctgggtgacagagcaagactgtctcaaaatgaataaatcaatcaatctatcatttacctgctcaaaaactttcagtggctcccaactgtggtcggtttagatgcttagctcattagaatgccatccaagctctagatctgtggctttcaagctgggctttgagacgcatcatgagttcaaaggggagagtaaggggaagaagctgaattggggatttctggttttctagcccgttgtcaatctttgggttttattcctttttcagattgtgcttccatttaaaaaaatgagttccagtttaaaaatatatatatatgctggactgggcatggtggcttatgcgtgtaatcccagcactttcggtggtcaaggtgggcagatcacttgagcccaggggttcgaggtcagcctgggcaacataaggagacctcatttctacaaaaaaatttaaaaattagccagaagtggtggcatgcacttgtagtcccagctattcaggaggctgaggtgggaggattgcttgagcccaggaggtcaaggctgcagtgggctgtgatagtgccactgcactccagcctgggtgacagggtgagaccctttct

SEQ ID NO: 99650 - DNA, 212 bp, Homo sapiens
cctctttctacacagacatggcaaccaggcgatttctcaatcttttccccacctttcccccctttctattccacaaaaccgccattgtcatcatggcccgttctcaatgagctgttgagtacacctcccagacggggtggtggctggacagaggggctcctcacttcccagtaggggcggttgccaggcagagggtctcgtcgacgcggccg

SEQ ID NO: 99651 - DNA, 414 bp, Homo sapiens
ggcacgagcggtatcattgctgctacataacattcagctgctgatcccttcaaggctgaacatgagattgctgctatccagtcacagactcaggctccacttctagttgtctggctgtttacacacatctgcagctacttccttcactgaagtcctgaacccctcaaagtcatccaaactcccattagggttgctattttgacctcctctgatgaattacaaatgtttttaatggcgtctagaatggtgaatcctttccagaaggtcttcaatttactttgcccatatccctcagaggaatcactaattctattaattcttttttttggaaacgcagacttgctctgtcacccaggtggcaaagcattggcgcgaatttggtccactgcaagctgcgcctcccaggttcatgcg

SEQ ID NO: 99652 - DNA, 332 bp, Homo sapiens
ggcacgagagacacggggtgtcaccatgttgaccatgctggtctcacaatgctgacctcaggtcatgcagccgccttggctttccaaagcgcttggattacaggtgtgagccaccatgcctggcccaatatttttgacctgattgagtgagtatagaaatatgacaccgggttttcacagacccctgaactgcggaattcatgcgaattgaatttggcacagagataggtggcagtacacttatagcatgactttacctgctggacagacattttgagacaccggagagtagactgcgtcacttttgatatttggccagaagcaggttgaga

SEQ ID NO: 99653 - DNA, 420 bp, Homo sapiens
  misc_feature (1)...(420): n = a,t,c or g
ggcacgagaaggaccaatgccaagcccagatggagggttccaagttccccttccccactcgctagtagatataacgggcagaggccccagggaactgcagagcccccagtgaaaggagccgggttcctgaatgattgtgtggaggcaggcgggccaccacttgctgttagatgaatgagaatgaactttttttttgttttttttttntaattttttttttttttgtnttttttttttttttttttttttttttttttttttttttttttttttttggttttttttnttttttttttttttttttttttttttttttttttttttttttntttttttttttttttttttttttttttttttttttttttttttttttttttttttttttttttttttttttttttttttttntntttnttt

SEQ ID NO: 99654 - DNA, 829 bp, Homo sapiens
cccacgcgtccggtgaccaagaggtctataaaatcaaagcatcatggaacaggatcttgtatcagaccaaagtgtgccagtttttaaaaatgtgcatcaaaatggaagtctcagagacagagccctctggtggaaagttctagtaggttaggacagtcctgcctgcagacaccttgggctttactgagggactcaactgagaaaatgaggaatgttgcagctcatgattcttagaagaagaaagtgaagcttgtttaaaatatgatttaaaaaatctgtagaacactgtaaactacacaggctatgagggaatagcctggttgggccagcttggaaatcgggcacaggcaggaaggggcctgtctggtttgggccgtgtccacagagagcacttcttaggtcctgcctggagagaaggaatggctgggctatattttcttccagactcattatttttcttctgtttgacttttctctgaatttcccttgatttgtataaattttctcaataattagtgacagtgtctactgattgtaaaatgaagcttgaaggcccaggcgcagtggctcatgcctgtaatcctagaattttgggaggccaaggtgggtggatcacaaggagttcgagaccagcctggccaaggttgtgaaaccgcgtctctactaaaaatacaaaaaaattagccgggcatggtggcacgtgcctgtagtcccagctactcaggaagctgaggcaacagaatcacttgaacctgggaggtggaggttgcagtgagccgagatcacgccactgcactccagcctgggcgagagagtgagatccgtctca

SEQ ID NO: 99655 - DNA, 414 bp, Homo sapiens
ggcacgagttttttttttgaaacagggtcttgttctgctgcccaggctaaagggcagtaccacaaatcatggctcactgcagccctgacatcctgggctcaagggagtagctgaaaccacaggctcaagccaccatgctcagcttctttaatttttgtaaacaaggtctcactatgttgcccaagggggccttgaactcctgggctcaagcaatcctccaaccccagcctcccatgtagctgggactacaggcatgtacctatgcttggtctttagggccttaatattaaatttacacacagcttctgaaacagggcttcttaataacacaaagttgcgtggcatgtacttaaacagtaactttaggttcacacagtaaataaaatctcacaatgccaaaattttgaaaatagg

SEQ ID NO: 99656 - DNA, 384 bp, Homo sapiens
ggcacgagcatatatagatccagaggacagaatgagtgtccaaaaataaacccatacatctattccttttctttttttccaagacaaagtcttggtctgtcacccaggctggagtgcagtggcgtgacctcggctcactgctacctccgccttccaggttcacgcgagggtgccgcctcagccttgtgattatctgcgactacgtggttgtgcaaagtcgcgcttcccctgggggaggacttgggggccctttgtagaaacccctggggggccggggtgaaggggtcaagccgggaatccccgcctcttggggaggccagggggggcgagttgccgtgggggcaagttcggatccggctgtggggccgcggggagcctgctccg

SEQ ID NO: 99657 - DNA, 393 bp, Homo sapiens
ggcacgaggacatttttaagccatgtaggatgcaagccaatcacaacaaccgaaaatctgcttcgcagatgtccagaatactctagggagtcatatggatgcactggggaaccttagaatgatagaagaagtaggctaaaaaaaaaaaaaaaaaaaaggggaaacctggcccggccaccggggttaatccctgaaatcccagcactttgggaggccagggctggcaaattgcttgaacttaggtgttaaagtcctggctggccaaaacggctaaatcctttttctataaaaattatgagcttttgcgggacatttgggcatatacttatgttaaaaggtttttcagaggttggggtctttgttttgctagtatcttggaaaaatgggttgggg

SEQ ID NO: 99658 - DNA, 367 bp, Homo sapiens
ggcacgaggcctattttgagttggggggacgttgtgagtgtcgacccggtaattcccccgtttttgtttttgtttttggagtcggaatctcactctgtcgcctaagctagagtgcattggcgcagactaggcccaggttcaagcgattcgcctgtctaaaacttccgagtaactggaattacaggcacacgccaacacacccggctaatttttgtatttttataagagaccaaggtatgacactatagccaagctggtcttgaactacctgatatcaagtgatactactgaagagacagacaaagtacatgaattagaggcattgatctacatgatctaaaactagtatgaaattaaagaacgagag

SEQ ID NO: 99659 - DNA, 379 bp, Homo sapiens
ggcacgaggaaccacaggggtgtgcaactgtgcctggcgaattttttaagtttttgtggagacacggtctcatcacgtatcccagactggtctcaaactcctgggctcaagcagccttgccacctcagcttcccaaaagtctgggattataggcatgagccactgcacctgaccagtattgccatcttaaccatatgaagccttccaatgctgaatatgatatgtgtttccatttactgaggtcctgtgatcactttcaatgaggcttgggccatgtcattgtacaagtcttacacaaaattcttcactctgaccattaggatgccatgcttgatagtcttcaggcctcacgatcagacgaccgatgtaacggactggg

SEQ ID NO: 99660 - DNA, 337 bp, Homo sapiens
ggcacgagtttgtattttttgtagagacagggtttctccgggttgcccaggctggtctctaactcctgggctcaagtgatccacccacatcggcctcccaaagttctgggatttcaggtgtgagccaccacgcctggcctccccctggttgtttctggaacacaccaggcatatgtcttcttagggcctttgcactggctatttcttacacataaatgctcttccttagatggctttgttgcctagctccctttcctctttcacatctttgttcaaataccaccatcttagtgaaaccttttttttttttttttgaaaaaaaagcctggctctctcg

SEQ ID NO: 99661 - DNA, 1007 bp, Homo sapiens
  misc_feature (1)...(1007): n = a,t,c or g
ctgggattacaggcccccaccagacgcccagctaatttttttattttttgtagagatggggtttcaccatgttggccaggctggtcttgaactcctgacctcaggtgatccgcccacctcagcctcccaaagtgctgggattacaggcgtgagccactgcaccagaccctatctgtccaaatcttttgtcccactttaaattgttttttcttcttaacattgaattttaagaattcattgtatcttttaatattctgaatgctagttatttgtcagatacatgttttgcaaaccatttatctgtatttggtttctttttgttatcttagcagtgtatcctgaagaatagttttaaattttgatgtaatccaaaatatttcggttgtttgtgttctttgttatcctgtctatttttggtggtggtnnnnnnnnnnnnnnnnnnnnnnnnnnnnnnnnnnnnnnnnnnnnnnnnnnnnnnnnnnnnnnnnnnnnnnnnnnnnnnnnnnnnnntccttgtctacctaattaggctttgtgtaactcagtgttgcaaagctttgacatctgtttgagttaatgtttatatatgttgttacttaagggtttcacattaaatttaaacatacttatattttataaccaaacaagtcatgttggggcatactcattaggattgagtgctttcttacaccaaaatacatgtatacaaagatttaaaacactttcggccgggcgcggtagtcccagcactttgggaggccgaggcgggtggatcacaaggctaggagatcaagaccatctggctaacacggtgaaaccccgtcgctactaaaaaaatacaaaaaattagccagacgtggtggcaggcgcctgtggtcccagctgctcgggaggctgagacaggagaatggcatgaacccgggaggcagagcttgcagtgagccgagatcaccccactgcactccagcctgggcgacagagtgagggctgtgtgctaagagaaaaaa

SEQ ID NO: 99662 - DNA, 364 bp, Homo sapiens
  misc_feature (1)...(364): n = a,t,c or g
ggcacgagctcttctttctctgttgaatggatttgccttctgtgtcgatttttgacctaaggtctctttgggctgatattagcagagccacttcaactctcttttggttactattttcatggaattgctttttgcatcttttaagtttcaatctatttttgtctttgggtcaaaagtgagtctgttgtagataacatatacagtcatgtgtcacttaacaatggagatacatggtcgggcttggtgactcacgcctgtaatcccagcacttttggaagccaaggcgggtgggtcgnttcagtctaggagtttgagaccagcttgtgtaacatggcgaaaccttgtctctacaaaaaatatgaag

SEQ ID NO: 99663 - DNA, 344 bp, Homo sapiens
ggcacgagcatgctcacatggtactgtggcacttactgcatcttgcttccctcttcaactagactataaatgccttcaatatagttttgtttgtttttttttttttgaaacaaaatctaattttgtcaccccggttgaagtgcaatggcccaatctcagttaattgaaacttcaacctgccaggtttaaccagatctcaagcttaagcttcccgagaagctggaactacgggaacgtgctaccatgcctagtaaataggatgaatttttataatagatggctgaactaccactcttagaaactaagcgttacctacttctttactgaactctttgcattcaccg

SEQ ID NO: 99664 - DNA, 329 bp, Homo sapiens
ggcacgagtggtgtttagggtccttcctacaaccctgtgtgataggtttaggagaaaaataagattaccttaatttgaaataagaaatagattaaaggaggctgggcgcagtggctcatgcctataattccagcactttgggaggctgaggtgggcagatcacctgaggtcaggagttcaagaaaaaattagctcggtgtgatgccgggcacctgtaatccctgctacttgggaggctgaggcaggagaacacgggaggcagaggttgcagtgagcggagatcacgccattgcactccagcctgcacaacaagagcaaacctccgtttc

SEQ ID NO: 99665 - DNA, 351 bp, Homo sapiens
ggcacgaggcgtggaggtaaaagttggtaaaacacaaaaattcctgaatatgataagaagaacactagtacactgttggtggaaatgtaaattaatacaacctcttttttgaggatcctcccaaaagtaaaagaagagctaccttatcatctagcaatcttaccactgggtatatatccaaaacagatgaaatcaataagtttaaatatacatatgttcttatatatagattgtagatcattttgtataggcacttttcttctattgtgatatgatgttattctcggttaagcactgtctgaatcgttttactcaccgaatctatggtgtaagttatcgtgctcttgctcg

SEQ ID NO: 99666 - DNA, 379 bp, Homo sapiens
ggcacgaggggacatagtgtggtgacagttcactgcatattttgagaccttattctctagatccatagttaatgatgccctggcagtcattcctcttgccatggggaagcttctgatgagagaaaggagccccacatccactgaaacatcctttggttctcaagcttgttctggaggcagtaaggaagaataatacccaccaaggctcaagaagggaactattgaaaagttcatggttttgctcctctcccggatgcgtgtttggaactggtgtgcggggctggggctcctggggcgggggataggggtggtgtggtgggggggggtctttgtggacgtgaccggggggcggagtctcgcgagtttgcggggggggggg

SEQ ID NO: 99667 - DNA, 395 bp, Homo sapiens
ccgcagaagcctccccagctcacccctggaggacggccggctctctatagcaccagggctcacgtgggaacccccctcccacccaccgccacaataaagatcgcccccacctccaaaaaaaaaaaaaaaaaaaaaaaaaagtccacccggcccgaaattccaaaatttaaaaccggaaaacctgaaaaacccccgagggtcctttaaagggggcattggcccccatttaaatttttttaattaaaacccggtttgccctttttttagggaactaaaccccctaaagtttaaatttgggccagggacccctgggcttaaaaaattttttaaaggcccaaaaataaggccccattttttttgggcccaaaattttttgggaaaaaattttcccgggc

SEQ ID NO: 99668 - DNA, 1558 bp, Homo sapiens
tttaaaagtccgcccatgaaattagatttgggggcccttaaaaaaaaattaagttttgcaaggccgggttagtaaagctgggtccctttgaacggcccccccatttttagctttttaggaggtagtatttcacatggttttattacaaaacaagccacaaaacagttttagaaaatttttgctacataccaattaggagatcacataaaatgagaagcgtaacagtttccatgcactcagcctagagcttacagcgagtgcatttcacagctgaaacatcactgctttaaaacacagaatcatgctaccccttcataagcagagggggaggaggtcaaacagtatgtttttgccaaacgtttgctttatctgaactctatctagtatgaaggactggctgccgcaggcaataacacagagaggaaaaggaacaaaggaagaaaagggtgctggcagacaagatttaacaaacctgtccacttccgacatttcgaaagtttataaacaaagctcacttggggacactcaatttccaaaatgctgtgacctccacatgttatctaatttatactgaaaacaaacctactaaactccactcctcaactactgaacctgctatttattcatggggtctttttagcccatataagagtatatttatattcagaaatataaaagaaaaaaaatttgcttcaagtagactaagaagctggaccttaaaactactttctttctcgtgggagctgagtattcaactcagaaatagatgtataactccaatattctgacctgacatcaatctccataatgtatacctcaatacccttatgatgtctcacttaacactaaaggccaaattatttttaccaaccatcagctgacattgagtaagcaagtcttttgaagatttcaaaagtaatagatggtggccaggcgtggtggctcacacctataatctgagtactttgggaggctgtgaggcaggaagatcacttgagcccaggaggtccaggctgcagtgagccatgatcaggccactgcactcccacccgggtgaacagagtgaaacactgtttctaaaaataaaaattaaagaataatggatggcattattcagccatggggaggaccacctgaaatactgttacacacagtgggtcaagaccacttcaaaagccttatgaaaatagcacaactcaggcaaggcttttattccacaaagaaaatgcagtacattttttagttcctttaaaaaaaaaaaaactcagatttactccagagcctatgcacttagtcactaatctatactgcatccccaacctattttttccatttggttcaattttatacatttaaaactaactgctttggtcaaatacgtaccatctttggttcacattaaaagattatggtccaaaactggccagaagttaagaaatatcaacaaaataggaagtttgaaatacaatttaggaatggaatgcttttagagcttgtttcattgaagataataatttatctcatattgaactacattaacgatgttctgggtaggtgc

SEQ ID NO: 99669 - DNA, 331 bp, Homo sapiens
ggcacgaggagactgcatagggctcggcgtggtggaatgagactcgtctcaaaaaacaaacaaacaaaaaaaacactttgggaggtcagagcaggaggatcgcttgagaccaggacttcaagaccagcctgggcaacatagagaccctgtctctacagaaaaattaaggaaagggaaaaaaaaaaagccaagtgtgggggatcatgcctgtaatcccaacactttggaaggccaagatgggagaatcacttgaaaggccaccctgggccacataaggagacctccatctctacaaaaaatttaaaacttagctggacatggtggcacagct

SEQ ID NO: 99670 - DNA, 338 bp, Homo sapiens
ggcacgagggaaatatatatataatagagacaagatctcgttctgttgcccaggctggaatgctatcatagctcattgcagccttgaacttctgagctcaagcgatcctcccacattaaccgcccaaatagctgggactacagatgcatgccatcccacctggctaatttttaaatttttcgtagagacgggggtcttgcttcattgcccaggctgggcactggttggcttaaatcctgactttgttatttattatgcctctgatttgggcaagttactaagcttttctaatctgcattttttgttgttgttgttgccccagaatggaccccatgtaa

SEQ ID NO: 99671 - DNA, 324 bp, Homo sapiens
ggcacgagaataaaacaagcttaacttgtaggaagtaaccagagcgatgaagtaaacttccactttcagaattggttccagcatctagagataggtcaagactgtagtgcctggggaacaatctaagaatagagaatcaggaaggccattaaatattacaggggtaggccaggcatgttggctcatgcctgtaatcccagcactttgggaggccaaggcaggcaaattgcttgagctcaggagttcaagactcacctggagaccaggcacagtggctcacgcctgtaatcccgcactttgggaggccgagacaggcagatcatg

SEQ ID NO: 99672 - DNA, 345 bp, Homo sapiens
ggcacgagggccagagaggttgtgggaaggccctggagggcaagagtcacattccgtctccagatgtgcagccctgcacagggtggtgggagcccatagtcccagctactcacgacgctgacgcacgagaatcacttgaacctgggaggcatactttgcattgagcaaaaatcaggccacttcactacaacctgggctacagagtcttgctgacgcttaagctgcagtgcaacgatgtgatctcggctctgtgcgatctggcatatatgcactcctctaagatcctctcaccttaccgcatcagctatcgtggactatggcgcacccactttgactggaacgtgg

SEQ ID NO: 99673 - DNA, 444 bp, Homo sapiens
  misc_feature (1)...(444): n = a,t,c or g
ggcacgaggaaccatcatgccctgctcttcctctgatgagtcacctggcaaaaccgcaaatgtgaccaactctaactgtccactcactccctgacagctgcttctgctgattctttttattgctcctccccgcttttttcttctcccttgtccttctcctcctccttgacttccatgtccaccttctactttctacctcttctctcgtcctccacctctacctcttctacctcttttttttgggagggttctttttatttctcttattcctcttatttttcttttcttttccttctcttcctcctcctcccctcaagttttgaaaaaagtgatgacagacaatattttttttttcatttttcgagattgcaagctaattgaggaccaagtttgtgttttttattacttngatttctggaaatttgcacaaaaagtacctggggg

SEQ ID NO: 99674 - DNA, 362 bp, Homo sapiens
ggcacgaggcaatgagaaaggaagccagccccttggaagcgtgcgtgacatcccaagaactggggaaactcctgcagcttgacttgttgaagccacgagtttgagatcagtctgcacaaaatggacctcgcctctacaaaaaatttaaaaattatccagacatggaggcaaatgcctgtaggcccagttacttgggagttagcctaccgtacatggggaaaagttagccttgattgcctgggagataccaggataatctgggctgcacgtttctaaggagtaaatgtgtttggtgacttgagctttgaatattaggatattggattagtgatgaggattcttgcttgcgaggtacgatattg

SEQ ID NO: 99675 - DNA, 339 bp, Homo sapiens
ggcacgaggtggaagggctggtgagaagtttaaaagtctgcattataagagaagatgcacttttggagacctaggcaggaggagtccttgaggctaggagtttgaaaccaccctgtagtcccagctacttgggagattgaggtgggaggattacttgagtctaaggctaaggattacgggagtctaaggctacagtgagttatgatcatgccactgaactccagcccaggtaacagagcgagaccctgtctctaaaaagagagagacagagagagagaagatgcagatcatctaattatgactctctctattaggctggtggaattggcccctccatcg

SEQ ID NO: 99676 - DNA, 332 bp, Homo sapiens
ggcacgagtaaaatttattctgtatgtagtgcaagatatggattaaagcctgtaatcccagcactttgggaggctcaggtgggaagattgcttgaactcctgaccttaggtgatccgcccacttcggcctccgcaattgctgggattacaggtgtgagccactgtgcccagccgattttttgcatttttagcagaggtgactgtacgatatatattaccttatctgcacctgtcctactcctcatttgacggacgatctctatgccctagagcttgccagcatactagtctgactaggacaccgcagaggatggtaccactacccccccccg

SEQ ID NO: 99677 - DNA, 351 bp, Homo sapiens
ggcacgagtcactatgttgcccaggctgatctcgaactcctgggttcaagtgatcctcccacctaggtctcagaaaatgctgggattacaggtgtgagccaccatgtccagctgagatttcatttatttcttctgggtacttaactaggagtggaattgctgggtcatattgtaactctgtttaagtttttgataaactttcagactcttttcaagaatggccgaacctttttaccttcgcatcggctatcggctgatggctcctacttattgataaaccctacccgtctcgacggtcatgagtccctggtcactgcatcttcgagtactcggaagtgacgtgacttattt

SEQ ID NO: 99678 - DNA, 520 bp, Homo sapiens
aaaaactaactatctgggtaccgtgttcactacctgggtgacaggatcatatgccctccaaacctcagtgtcatgcagtacattcatgtaacaaacctgcacaggtacccccgaatctaaactagaagttgaaattataaacaactgggacagcgtgcccctgggccagagctgtgtgtgtgcatgcatgtgtgtgctaaccagctgcaccagatgttaaccccgtagttgctgactgaggggaaggggtctgggggagggggacagtggccagagcagcagggatggggtacttaagagcctgcagcaggctgggcgcgatacgtcatacctgtgatctcagcacttttgggaggccgaggtgggcagatcacctgaggtcaagtgttcgaagccagcctggcctacatgatggaactaattagtctccactaaaataaagaattagccgggcatgatggcaggcacctgtaattcagctaattgggaagctgagatgcaggaaatctctgtaaccaag

SEQ ID NO: 99679 - DNA, 484 bp, Homo sapiens
ggcacgagcagcttaaaccaaaagctattgggttaggaaaaaatgagttagggaaaatggattgggggaacgggttagggaaaaaaccacgagacaaacccaagtttttttggtcctgttttttttgtttgtttgtttgtttttgagacagggtcttgctctgttgcagtggcgcaatcatggttcactgcagctttgacttcctgggctcaagtgatcctcccacctcagcctcctgaatagctgggactacaggcatatgtcaccacacccaagctcatttttaaaattatttttttagagatggggtcttgctatgctgtccaagactggtctggaacaatgagttcaagcaatcctcacgacttagcttcccaaggtgctgggattacgggtgtgagccaccatgcctggccagtcctaaatgttatacattttggtggaactctctttaaggatggaaaaaaacattaggtatgaaaca

SEQ ID NO: 99680 - DNA, 340 bp, Homo sapiens
ggcacgagagaaaaaatagtgaaaggttaatttgccactattacttatatgtaaaggccagagactaataatgcatgttaaggtgatttatttattttttttttagagacagagtcttgctatattacccaggctggaaagcagtgggtattcacaggcgagattatagcatgctatacagccttgaactcttggcctcaaaagattcttctgcctcagcctccggagtggctgggactactgtgtctggctaattttttttggatgtatgtaatgcaaaagacaagatttatcaataattccttggcaaaggtccttaataggccaataataggatttg

SEQ ID NO: 99681 - DNA, 346 bp, Homo sapiens
ggcacgaggtagatagtaaataaactatatattccactgtatgtctctaaggcttttctcatttgcagatgagaacatttataatgtgataatttatcatataatataattattttggggtagagaccagcctggccaacgtggcaaaaccccatctctgctaaaaatacgaacattacctgggcgcgctggcatgtgccttgtaatcccagctactctggcagctcacgctcgaccataacacgcacgtgtcagaccttcgattcacatctctattatgatctctctgatatcagccttccgctctactttctatcttattaccatcatcctcatagcaccttcg

SEQ ID NO: 99682 - DNA, 313 bp, Homo sapiens
ggcacgagggtagagatggggtcttgtcatgttgaccaggctggtctcaatcttctggtctcaggccatccttccacctcattctccccaagaactgggattacaggtatgagcaactgcacctggtccatatgcttcttatagttgaagaagtgaagggtcaatgactttactaaaatactattaaagtaataaagctaggacttagccccaattattcatccttaaagtccaatactttcaatatattaagttgctctttattatatgaattctaaatatcttttttaccttttgttatctaatctggaag

SEQ ID NO: 99683 - DNA, 696 bp, Homo sapiens
  misc_feature (1)...(696): n = a,t,c or g
ttttttttttttaagatggagtcttgctctgtcgcccaggctggagtgcagtggcgcgatctcggctcactgcaagctccgcctcgcgggttcacgccattctcctgcctcagcctcccgagtagctgggactacaggcgcccgctaccacgcccggctaattttttctatttttagtagagacggggtttcaccatgttagccaggatggtctcaatctcctgacctcgtgatctgcctgccttggcctcccaaagtgctgggattacaggcatgagccaccgcgctcggccagcagtatatattttaacatctacaagtaactaaaatttcctaaccctcttacgagccactactttgtatgataaaactgctttagacacacagtcatgtgtcgctctgagaaatgtcttgttaggcaatttcgttgctgtgtaaacatcatagaatttacttacacaaacctagatggcgtggcctacaccacgtcgaggctctatggtatagcctattgctcctaggctacaaaactgtacagtgtgggactgtactgaatcctgtcggcagttgtaacacaatggtgagtattctaaacacagaaaaggtacagtgaaaatacggtattataatatgatggggtaagaactcaactggagagggctcagagcgccaaggctgctgnaagggtagtcaaaa

SEQ ID NO: 99684 - DNA, 340 bp, Homo sapiens
ggcacgagtcagattctgttgtgtggctcgttacaattttcttgatgacgtttcaaattcattatttttttctgacttagaaaaaaattttgtttttccgtttatccattcattcatcgatggacatttgagttgcttccactcaatgattttttaatgaacttttattttagaatagtttttagatttatgaaaaaattgcaaagataggccaggtgcggtggctcatgcctataatcccagtacgttgggaggctgaggtgggaggatcagttgagctcaggagttcaaaaccagccctggcaacatagtgagagacttcatttctacaaaaaatatg

SEQ ID NO: 99685 - DNA, 358 bp, Homo sapiens
ggcacgagatttttttgaggcgaaatcttgctctgtcgcccaggctggagtgcaatgtcgcgatggtgcctcactgcaacctactcctgccgtgcccacactgagacacctgcctcagcgaccaaagcttgatcccataaatttgagactaacctggccaacattgctaaatctcgtctctacaaaaactaaaaaaattaactggacatggtggcacacacctgcagtcccagctactcaagaggctgcggtgggaggattgcttgagctgggatgtcattgttctcaccactgcactctggcctgggtgacacagtgagatggtgtcttaaaataaagataataaaaatcaataaat

SEQ ID NO: 99686 - DNA, 344 bp, Homo sapiens
ggcacgagagtgtgtgtgtgttgtggatgtgtgtcttcatctatggtgctagtggaaaggttactgtttgaaaaatgtagttccaacacagccactagtttgtgctactttagacaagtatttaaatctttgcaatagagatattataatagagcattccttgccttggcacaaggctgttgttaaattggaagactaaggatatgaaagaattttgtaatgtataaagaaatcttggccaagcacggtggctcatgcctgtaatcccaacactttgggaggccaaagtgggaggatcacttaaggccaggagtttgagaccagcctgggcaacatagtgagag

SEQ ID NO: 99687 - DNA, 376 bp, Homo sapiens
ggcacgagggctcggcgtggtcatgcagtctgggcctccatcccaggagagctctccagtgacagatccaactgaaggagctgggggtggggggccctgtgaggtgcaggtgaggagcacaggctttccagctccttaacagacagctcagcggttctgaagagcctgtcccaactcccagacccactaactgtgtggaagtgacgagggagaggcccagctccactggactcagtaggcctggtggctatggaacatagctgtagacatggtgaaaccttgtctctactagaaatataactattagccatctgtggtggctcacgactgtaatcccagctgattgggaggctgaggcaagagaattgcttgaatt

SEQ ID NO: 99688 - DNA, 1477 bp, Homo sapiens
  misc_feature (1)...(1477): n = a,t,c or g
ctgggttcaagcgattctcctgcctcagcctcctcagtagctgggattacaggctccagcaccatacctggctaatttttgtatttttagtagagatggggtttcaccacattggccaggctggtctcgaactcctgacctcaggtgatccacccactttggcctcccaaagtgctgggattacaggtgtgagccaccatgcccagcctctgattattttctaatttcctccctcagttcttctttgacccatggattatcagaagtgggttgtctgatcagcaaacatttgttttttttcctcttaatatcttcttgttgctgatttctactttaattccattgaggtcagaaaatatcctctttatgatttcaatcctcttagttttattgagactcgttttatgacccaatatgttgtctgtcatggtgagtgtaccatacacagtttaaaagaatgcgtattttannnnnnnnnnnnnnnnnnnnnnnnnnnnnnnnnnnngagattacatgctgagattacagctgtaatctgtannnnnnnnnnnnnnnnnnnnnnnnnnnnnnnnnnnnnnnnnnnnnnnnnnnnnnnnnnnnnnnnnnnnnnnnnnnnnnnnnnatgtaatttgaattgttgggttaatatgttttgtaatatcgatgagattaagtggttgatagtattgttcagatcttctatgtctttactgatccttttgtttatttctatcaggtgctgagaaaggatgttaaaatcttcaattatgattgtggaattgtctatttcttaaattctaccagtttttgtatgaagctctaataacttatgtcttcctaatgtattgaccattttatcattatgaaatttccctctgtctctggtaatttgggtttgaaatctactttatcttatgtgaatatagccactgcagccttcttaagcttagtgtttgcacagtatacctctttctattaatttactttgtgcttctgtgcctatttaaagtagtttctttaaacaacatatacttgagacttgcatttttatctgttctctctgtatcttttaataagtttaacattaaatgtaattattaataggtttctaatttacatgtttcctgtttagataagattattttataattgtattttaatttattggctctttagctatactgttttaataatttttttaagttggatgttctagtgattacaatatacattcttaatttttcagtctacctagagttgatgtgccacttcacataaaatgtagaaatcttgtaagtatgtacatccatttatcatacctgtcttttatgctgtagttgtcatacatattaaatctacatatttaaatattgtaagtcctgtcataagttacaatttctgctttaaataatgatatgtattttaaagaaattaagaggaaaaaataaaatcttttgtatttcgcggccgcgtcgac

SEQ ID NO: 99689 - DNA, 1246 bp, Homo sapiens
  misc_feature (1)...(1246): n = a,t,c or g
atgtatccaagaaatcattgcccagaacaacatcatagagcttttcccctatattttctactagtagttttacagtttcaaaggcaacatttcaggctttaatccattttgagttgatttttctatatgctatgagaaaatggttcaatttcacatatagatatacagatatctcaaaacaatttatttatttatttgtcctctccccattctgtgttgccacttttgtcaataatcttttggattgaaatgtttgagttattgtctgtgctttcctgttctactggtcagggaatcttgtttttatgctggtaccacagttttttgataatggattacaaaatcaggtagagtgatgcctccagctgtgtccttgttgctcaagattactttgattatttaatgtcttttgtagttccatacaagttttagaattttttttgtatttctattctcagtgggtacagggagactcagggaatgaaggagcctctttcaactccagagctgggtgatacaggagccagtacctgtaatctcagctactcgggaggctgaggcaggagaaccacttgaactggggaggcagaggttgcagtgagccaaggtcatgccattgcattccagcctgggcaacaagagcgaactccatcagtcgtcaatgcaatttcaaacaaacaatgcaaaattggtaaaatgttttagtctttatgtagatttcatcaagtgttttgccttctcccaagggttaggaagtttaaaactaatgttctggccgggcgcggtggaatcaagccctgtaancccccagcactttgggaggctgaaggtgggcgggatccacctgaaggtcaggagttcaaagaccagcctganccaacatggagaaacccccatctcccactaaaaaacacaaaattaagctgggtgcggtggcacatgcccgtaatccccagccactcggcaggctgaggcaggagaatagcttgaatcccaggaggcggaggttgcagtcagccgagatcgcgccactgcactccaaccttctgcaacttccaagcttcgtcagtagaagttaggcgatcagcgagaaagaaattattctccgatattttgaagagacacaatactattaactggcgagtttctggacttttgttagtggactcatacttcggacgccttgcaacccccgtaaggacgcagtgattgcactccgtgcaaacgccgccatcttaagtcttcc

SEQ ID NO: 99690 - DNA, 344 bp, Homo sapiens
  misc_feature (1)...(344): n = a,t,c or g
tcgaaatcattcaggcactgcttattacaattgtactgggtctctatcgtaccctcctacaagcctcatagtacttatagtctgccttcaccatttccgacggcatctacggctcaacattccttgcagccagcaggcttacacggacttcacgtcattataggctcaactttcctcactatctgcttcatccgccaactaatatttcactttacatccaaacatcactttggcttcgaagccgacgcctgatactggcattttgtagatgaggattgactatttctgaacggctaatctattgatgagggcccttaggtagaangaaaaaagggggggccgtn

SEQ ID NO: 99691 - DNA, 1658 bp, Homo sapiens
cggcacgagggaggactattcaaaacaatacttctaatttaaacttccttaacaattggcagcttggcattggcaggattacttttcttcacaggtttctactccaagaaccacatcatcgaaaaccgcaaacatatcatacacaaacgcctgagccctatctattactctcatcgctacctccctgacaagcgcctatagcactcgaataattcttctcaccctaacaggtcaacctcgcttccccacccttactaactttaaggagaataaccgccgccctactaaacccctattatatacgtggcggccggaagcctattcgcaggatttctcattactaacaacatttcccccgcatcccccttccaaacaacaatccccctctacctaaaactcacagccctcgctgtcactttcctaggacttctaacagccctagacctcaactacctaaccaacaaacttaaaataaaatccccactatgcacattttatttctccaacatactcggattctaccctagcatcacacaccgcacaatcccctatgctaggccttcttacgagccaaaacctgcccctactcctcctaggcctaacctgactagaaaagctattacctacacacaatttcacagcaccaaatctccacctccatcatcacctcaaccaaaaaaaggcatattaaaattttacttcctctctttcttcttcccactcatcctaaccctactcctaatcacataacctattcccccgagcaatctcaattacaatatatacaccaacaaacaatgttcaaccagtaactactactaatcaacgcccatagtcataacaaagccccggcacccaataggatccttcccggattcaaaccctgacccttttccttcataaattattcagcttcctacactattaaagtttaccacaaccaccaccccattcatactctttcaccccacagcacccaatcctaccctccattcgctaacctcacctaaaatcactcaccaagacctcaacccctgacccccatgccttcaggatactcctcaatagccatcgctgtagtatatgccaaagacaacccatcattgccccctaaataaattaaaaaaactattaaacccatataaccttcccccaaaatttcagaataataacacacccgaccacaccgctaacaatcaatactaaacccccataaataggagaaggcttagaagaaaaccccacaaaccccattactaaacccacactcaacagaaacaaagcatacatcattattctcgcacggactacaaccacgaccaatgatatgaaaaaccatcgttgtatttcaactacaagaacaccaaaaaaaaaaaaaggggggggcccttttaaaagaacccttggggggcccaaatttaccgggggagggaaaggaaaaattttttcctttaaggggggccaaaaaaaacccacctggggaatttttggaaaaaaacctttttttgggggggggaaaaattgggcacaccccccccaaaaaatttaaggctttaggggaaaaaaaaatttttaaaggggaaaagggggaaaaaaaaccccaatagcctggtggttggaggtttttttttctgggttgggttttagaaaatttttaa

SEQ ID NO: 99692 - DNA, 375 bp, Homo sapiens
cattactattgtgcggctgcaggaggtgtcgagcggcgttatttttttttgcggtttgcctttttttgtgctttttttttttttggaacccggggtggttaaaaacccgggggaacccggaaaggggcctccaatccctaacctttttccccccaatttgggaaccccaaaagggccaaggggggcccggttttggggggcccccggggcttggccaaactggggccccaataagggccccgaaagggtacccaatggggggtcttgcccaaaacccggaaggggcccaaaccccccgccggaaccctggggggaaacaatgggcctttaacccgtaaggtgcttaaaaaccaggcggtccaaatgcctttgaag

SEQ ID NO: 99693 - DNA, 999 bp, Homo sapiens
gtctgcatgacccatatggttatgaagtttttttcctagcaaatgattgcagattatttatgggggctagaagatattttgctatcaatgtaaggatttttttccccttaggtcagtctattcactgtttagatctggtaaattacttgtatgaattgaataaattctctgtatcattgtactgtttaatagtctctgatacaattgtgatactcataaggtattttcccccctttattatgattacattctagatcataaacattgtaagggcatcttttcattatataatccaatattgattgtttgaattcctccttgtacatcctggctttgtgctcaatttcttgaaataatataaccaactctaaattacttgtgttaatagatcggtaacatgacacaggtaagttaaatcctggataaatgagccccacagaataaaggtttttcctcttgctgtggcctactggaagccttcctaactctatagctggtaaagtagagcagaaagggccagaatggcttaagatggagctaaatccctatagcattccattttctgctcttgcctcttgaacttagaaggcttgcccatatatcctaacaatctgttctctgagctgttaggccaatccctggcaagagatattgatgtagtcactgaatctatggctcacaaataattgaaaattggctttgggagctgggcgcagtgactcatgcctgtaatcccagcactttgggaggctggggcaggtggatcacttgaggtcaggaggttgagaccagcctggccaacatggaaaaactccatctccactaaaaatacagaaaaattagccagggttggtggcacatgcctgtaatcccagctactcaggaggccaaagcaggagaattgcttgaacccgggaggtggaggttgcagtgagccaagatcgcaccactgcattccagcctgggcaacaagagtgaaactccgtctcaaaaaaaaaa

SEQ ID NO: 99694 - DNA, 374 bp, Homo sapiens
ggcacgagcggcacgagaatggtttatttatgaatctatattacggatattgggtaagatactgggtgtacaaaaagactaagtcgaaaaatctcagctgtgcacagtggctcatgcttgtaatcccatctctttgggtggccaagggaggaagactgcctgaggccagcagttcaagaccagtataggcaacatagcaagagcccatctctaaaacaaaacataacaaaacaaaacaaaattagccaggtgtcgtggttggcacctgtgttccaacaacttgagagactgaggtggcaggaggattgcttgagcctaggagttaggggctgcagtgagctgtgatcgtgacaccgcactccagtctgagcaac

SEQ ID NO: 99695 - DNA, 687 bp, Homo sapiens
  misc_feature (1)...(687): n = a,t,c or g
ttgagtcttctcattcacaagagccagagatgggtgcaggctcctcccagctgtaagtttgtggtggcaaccatggacttccagggtttcggcatatagggcaacctctcttctaaggacaccattccttacccacgtttcaacatctcccaccaaccaaacaagccatccatttgatcattataagaccctgttcagttctttaggtgccgaggataagacacaataattttatgaggatttttctgagctctaagcataaatccatctttcatattagatgctaccacctatgtgcaggatgttttaattattttaatttcataccgtttcaaagacatcatcagatagatagtgctcctcaagggaaattttggcttggggtggaggcacatgttcaaatttctgcacttaggccagtatggtggctcatgcctgcaatcccagcactttgggaggccgaggtgggaggattgcttgagcccaggagttccagagcagcctgggctacatagtagaacctcatctctagtaaaaaaatacaaaaaaattagccgggcatggtgatgtgcacctgtagtcccagctactcaggagactgaggtgggaggatggcttgaaccagggaggntgaggttgcaatcaaccatgattgcaccactgcactccagcctgggtgacagagcc

SEQ ID NO: 99696 - DNA, 389 bp, Homo sapiens
ggcacgagaataccctgctaatttttttgtttgtttgttttttcttattttgtgtagagatggggtttcaccatgttgctcaggctgatttccaactcctggctcaagcgatctgaccgcctcagcctcccaaagtggtaggatgaccggcgagagccaccacaccaggcctactgagctttgtcatgctcccacccactacattatatttcatccctgcttcccagctgctttaacatttacagattccatttccagctctctctggaagttcttcccttgatattgagctcccaaacttcctaggtgtcctggaccatcactttcccattatatgactatagaccctgcctacataaactccatccactttcacaattttcgcgacc

SEQ ID NO: 99697 - DNA, 329 bp, Homo sapiens
  misc_feature (1)...(329): n = a,t,c or g
ggcacgagggttcatggtgttccaaaacaattacaatagtaacatcaaagatagcatggtagctcactcctggaatcccagcactttgggaggccaaggcaggaggatcgcttgagtttgagactagcctgagcaacatggtgacaccccatctctataaaaaataaatcagccaggtgtggtggtacatgcctgttgtcccacctaccgatgaggctgagcacttgagtccggaaggttgaggctgcagtgagctgtgattgtgccactgcactccagcctgggtgacagaacaagaccctttctcaaccaaaggaaaaaatatatan

SEQ ID NO: 99698 - DNA, 776 bp, Homo sapiens
ctcaccatcgtcagtgcgcaaccgttcgctaactgaaatgatggcgactggaacgccagagtctcaagcgcggttcggtcagtccgtgaaggggcttctcacggagaaggtgaccacctgtggtactgacgtaatcgcgctcaccaagcaggtgctgaaaggctcccggagctccgagctgctaggtcaggcagctcgaaacatggtactccaggaagatgccatcttgcactcagaagatagtttaaggaagatggcaataataacaacacatcttcaataccagcaagaagctattcagaagaatgttgaacagtcatcggatctacaggaccagttgaatcatctgttgaaatagaatgacatgtaagagtgctgtaggactcctttgcctaatgctgaggagtaaataccttacacagctgtcctctgggtttggttttctattttcttctccaaaagttaagttagaaaagttctgtgttagggccgggcgcgggtacgtcacgcctgtaatcccagcactttgggaggccgaggcgggtggatcacgaggtcaggagttcgagaccagcctggccaagatggtgaaaccccgtctctactaaaaatacaaagaattagctgggcgtggtcgcgggcgcctgtaatcccagctactcgggaagctgaggcaagagaatcgcttgaacccaggaggtggaggttgcagtgagccaagatcgcgccactgcactccagcctgggcgacagagtgagatcccatctccaaaaaa

SEQ ID NO: 99699 - DNA, 344 bp, Homo sapiens
ggcacgagtctctacaaaaaaattttaaaaattagctgagtgtggtggcatgtgcctgtgatcccaactactcaggaggctgaggcgggagaatctgttgagctcaggatttagaggctgtagtgagacgtgattgtgccactggacttcaatctggatgaccgtgacatgctgtatttatttatttattttatttattattattattatggctttttttgagactgagccttcctggaggatcctggctgaaggctgttggcccatttttaccagagttgaacagggaaatgccactatggagaaaccgcatctctactaattatacaaatattagactggcg

SEQ ID NO: 99700 - DNA, 332 bp, Homo sapiens
ggcacgaggagattttactttaccggctctcaggaaatagaattcttcttcttcttctccttcttctccttcttcttcttcctcttcctcttcctcttcctcttcctcttcctcttcttttcttcttcctttcttcttcctttcttcttcctttcttcttctttttttttttaaaagggaccctgtggcccaggcttgaaggcaggggcacagcctgggctcactgcaacctctgcctccaggaaaagggggtgaacctggaaggcggaccttgcagggacctgaaatccagccacagcactcaaccctgggggacaaaccaagactttgcg

SEQ ID NO: 99701 - DNA, 498 bp, Homo sapiens
ggcacgagaaatgataattgcgtttaaaatcattaatatagtctttgacacatatgaccttctataatggttacctgcgactttttattattattaattctttctcctcccaaacacactgattcaagttttgacctgttgtggctactaacttctcccaccatccaccagctgtgcaggtttgcattttagatttgaaaatactcctgcatgggccaggcgtggtggctcacacctgtaatctcaacactttgggaggccaaggcaggtggatcacttgaggccagaagttcaagaccagccttgccaacgtggcaaaaccccgtctctactaaaaatacagaaattagccaggcatggtggtgcatgactgtagttccagctttttgggaggctgaggcacaagaatcacttgaacccaggaggcggaggtttcagtgagccaggatcacaccactgcaccctagccttttgacagagcaaaactctgtctgtcga

SEQ ID NO: 99702 - DNA, 1921 bp, Homo sapiens
agagatggagtcgcccaggcgggagtgcaatggcgcgatctcagctcactgcaacctccacctcctgggttccagcaattctcctgcctcggcctcctgagtagctggcactacaggcacgcaccaccatgcccagctaatttttgtattttttagtagagatggggtttcaccatgttggccaggctggtcttgaactcctgacctcaagtgatccacccacctcggcctcgcaaagtgctaggatcacaggcatgagccaccacgcccagtcagtcttgttcctttttatggctgtatagtattccctggtgtgtatgtaccacatttttttaatccagtctgtcactgatgggcagtgctgcaacgaacatacgcgtgcatgtgtctttataacaatgatttctattcctttgggtatatacccagtaatgagattgctgggttgaatggtatctctgtctttatccccacactgtcttccacaatggctgaactaatttaatttacatttccaccaacagtgtataagcatatttttttctccacaacctcaccagcatctgttattttctgacatttttataatagccatttggactggtgtgagatggtatctcgttgttgtttcgatttgcatttctctaatgatcagtgatgctgggcttttttccataggattgttggccacagatgtcttcttttgaaaagtgtctgttcatgtcctttgcccactttttaatggggtggttttttcttctaaatttgtttaaattacgtatagatgctggatttcagacctttctcagatgcatagtttgcaacaattttctcccattctgtaagctgtctgtttactctcttgatagtttcttttgctgtgcagctctttagtttaattagatcccatttgtgaatttttgcttctgttgcaattgtttttggcgtcttcgtcatgaaatctttgcctgtgcctatgtcctgaatggtactgcctgggttgtcttccaggatttttactgttttgggttttacattaagtctttaatccatcttgagttaatttttgtatatggcataaggaaggcgtccattttcaatcttttccatatggctggccagttatcccagcacgatttattgaatagagaatccattgcccattgcttgtttttgtcaggttcatcgaagatcaaaaaaattataggtgtgtggtctcatttctaaattctctattctgttccatcagtctacgtgtgtttttgtgccagtactatgctgttttggttactgtagccttgtagtatagtttgaagctgggtagcgtgatgcctccagctttgttctttttgcttaggattgccttactatcaatatttctttagatttactcaagtacttaccatttactcattattacttcttacctctcagatttactttctgagataatcttttaaaagttcctttgtgaagaaatattggtggtaaattaatacaaagtttaattgctaaaatcactttgattcaacagcctagaaacagaatagtctttacttttactgtgctagtttaacaaatccattctgtaaagaaatactgttaattcccctagagtttaaaactttagggctgggcacgggcctgtaatcctagcactttgggaggccgaggtgggtggatcacttgaggtcaggagttcgagaccagcctggccaacatggtgaaaccccgtctctattaaaaatacaaaaattagccaggcgtggtggtgggtgcctgtaatcccagctacctgggaggctgaggtggaagaatcacttgaacccaagaggcagaggctgcagcgggccgagattgtgccactgcactccagcagcctgggagacagagtaagactgtttcaaaaagaaaaaaaaaa

SEQ ID NO: 99703 - DNA, 433 bp, Homo sapiens
ggcacgagaaaaaaattagccaggtgtggtggtgtatgcctgtagtccccagatactctggtggctgaggtgagaggatagcttgagccccaggaaattgaggctgcagtgaagctatgattgcactactgtgctcccagcttgggcaacagagtgagatcttgtctccaaaagtccttgaaggattttaggaagttgttaaaagtcttgaaacgatgtttgggggcatgttagggttcttgaatgtttaattcctctaataactgcttattcaagagaagcatttctgactgggtgcagggcagtggctcatgcccataatcccacgtacttttggggaggctgaggccaggagcattgctttgagcccagggactttcaagaccagcctgggtaacatagggagacgcccgtctctacaaatagtaaaaat

SEQ ID NO: 99704 - DNA, 369 bp, Homo sapiens
  misc_feature (1)...(369): n = a,t,c or g
cactacacctccgacgccgactcgtccacgaactgctgaatgttagtccacaccgactccttcagcattcctttgcttggccttctacgtcaaagggtcgtgctctgctggccagactggggggcagtaactacagcacacgtactcactgcctacatgactttcaattctcaaacaggactgacctctcaacctgctgggaacaggagctcccggcgtgtggcagcatgccccgaaaatcagatttatcgcagaaatggggtctcgtgttgcccaggctggtcttgaactcctggactcaagtgattctcctgccttggcctcctaaagtgtgggattacaggcctaagccacctcactgggcctttn

SEQ ID NO: 99705 - DNA, 808 bp, Homo sapiens
aggcagagaatttttctgctggagtgcggtggtgcaatctcggctcactgcaacctccacctcccaggttcaagcaattctcctgcctcagtctcctgagtggctggaactacaggtgtgcgccaccacgcccagctaatttttgtaattttagtagagacagagtttcaccatgttggccaggatggtctcgatctcttgacctcatgatccacccgcctcgacctcccaaagtgctgtgattacaggtgtgagccactgcacccggcctgaaatttttttaaggtgaaaatgttttgacaagttcctttttcagaataggtttttgagcagaactctttcagcttgttagacccaactttgcttttgtttagcttcacagcatagctgaaagttgccaaactggacattgtgcaataaagtagaattctatattgataagcaaactatttccaaactaaaaatgtgatagataaaagtgtgattaatcaaatgatatgatcagagtaaagaattttgccattttgatccttttactttgttttagccacctatagtgttaccaaccatctttatccttgtctgcagggataataatgaactaatgtagtgttttaagataatttaatgatactatctttccaaactttgttagattttaaatgtattattgacctgagaccttaatgacaaatcactgctattagacaattgaagtgttcatttactttgtaattccaataatcatagttatggaattatggtaaggttttgcttttctgtcctaataaatatgtgtattttttga

SEQ ID NO: 99706 - DNA, 313 bp, Homo sapiens
ctttggaagacactttggcagtttgttttaaaacttaacatactgttgccatacaacccagcaatcgtgccccttggtatttacccaaataagatgaaaatctatgtccacacaaaaacctgcacgcagatatgtataggagctttattcataattgccaaaacttagaagcaaccaacatgttcttcaataggtgaatggaaaaaaaactatggtatattcagacaatggaatattattcaacaccagaaagaaatgagccatcaagccatgaaaatacatggaagaaccttaaatgcatataatatataac

SEQ ID NO: 99707 - DNA, 284 bp, Homo sapiens
ccagactggagtgcactggcatgatcagtaacttactgtagccggaaactcctgggttcaagagattctcctggctcagcctcccaagtagctggaactacaggtatgcatcagcatgcccgactaaattttttttctttctctttctttctttctttttttttttttttttctttgggaaaaaccctgggtttaggtttggaattcttcccccgttggttgcaaatgtctggcccgaaaaaaattttaaggctgtaccttcaaaaccctaaaaataaaggccc

SEQ ID NO: 99708 - DNA, 315 bp, Homo sapiens
ctcccgagtagctgggattacaggcgtgggccaccacgcccggctaatttttgtattttttttttttttttttttttggaaagggattttctttttgtcccccgggttggattccaggggcccaatttgggttaattgaaatttccgcttccgggtttaccccttttttctggcttaaccctcccaaaaactggggattaaggggcccctttacaaccccgggttaatttttggattttttaaaaaaaagggggtttaatattgtggcccaggttggtttgaaattctggacctcaggggatcccccccctttgc

SEQ ID NO: 99709 - DNA, 751 bp, Homo sapiens
  misc_feature (1)...(751): n = a,t,c or g
ttttgagatggagtttcactcttgttgacccaggctggtagttacaatggcgcaatctctgctcactgcaacctctgcctcccgtgttcaagcaattctcctgcctcaggctcctgagtagctaggattacagggcatgcaccaccacgcctgggctaattttgtatttttagtaggaggatagtgtttctccacggttgggtcagggctgggtctcggaactcctgaccccaggatggatctgccccgcctcaggcctcccaacttgctgggattacagggcgtgagccaccaccacacctgggcccctcattttctgttttttaaaaactcaggctgcagcacacagaatagatagcaagtgcacaaggttggagacaaagaaaccagttaagagacagctttggtaatctgaaatgatggaggccaagattagaaggcagtacaacagaaattaagagtaaatcctctgaagtcatttgcctatattcaaatccctctttttccacttaccaggtatacaattttaagcaaagttgcttcctgctatggtttgaatgctacaaaaagcatgtgttgaaaacttatgctaactgttgcattggannnnnnnnnnnnnnnnnnnnnnnnnnnnnnnnnnnnnnnnnnnnnnnnnnnnnnnnnnnnnnnnnnnnnnnnnnnncttgaggttgcaacttccatctcttgctcactcttgccctctcttacccttctgtcgtcttctcgcagc

SEQ ID NO: 99710 - DNA, 386 bp, Homo sapiens
  misc_feature (1)...(386): n = a,t,c or g
cgtgcatttatcagatcaaaaccaacccaaatgcccatgaatgatagaatgtataaagaaaatgtggcacatagacaccatggaatactatgcagccataaaaaaggacaagttcatgtcctttggagactattactctaggtgaagaaactcaggaatggaaaaccaaacatcgtctgttgtcactgatacgtggaagctaagctatgaggacacacaggcatgagaatgatacaatggactttggggacttggggagagcttgggagggggcaacgagggataaaagactacaaatagtgtggaatgtgtactgcttgagtaatgggtgcaccaaaatctcacaaatcaccactaaagaacttactcgagatcggatgtggcgn

SEQ ID NO: 99711 - DNA, 383 bp, Homo sapiens
  misc_feature (1)...(383): n = a,t,c or g
gaataacttaatgttgagtcagataaaagtctcagctaagtaatgttccttttgtgtaacattttttaaaaccacaaaatggcaccttaaattatctttggacatatatatgattttatatatgattttataattgtgggcatgtgtgtatagatatacaaaacatgtatatttacatataaacattcatgtatacatacaagcacacccacagttatgaaatcatgcctgtaaagacatntagaannnnnnnannnnnnnannannaanaaaaaaaaaaaagaaaggataaaaaaaataaaaaaaagaaaaaaaaaaaaaaaaaaaaaaaaaaaaaaaatagatatnatatgaattataattgtataggtaatagattgatc

SEQ ID NO: 99712 - DNA, 288 bp, Homo sapiens
ctgtgttagccaggatggtctcgatctcctgacctcatgatctgcctgcgtcggcctccccaaatgctgggattacaggcgtgagccactgcacttggtcttttttttttttttttttttttttaccttataaaacctaaggggtcattgattcgttcccgggcaaatttttaaaatattttttccacttttgacatacccagttttcggggttcccccttaaatccaattttgccccttacccaaataaccaattatgggggtaacaaagactgccctttttcaaaa

SEQ ID NO: 99713 - DNA, 304 bp, Homo sapiens
cccaccccggcctcccaagtagctgggactataggtgcacatgaccatgcctagctaattttgttgttgttgttgttagagactgggtctcaccatgttgcccaggctggcctcgaactcctggactcaagtgatcctcctgctttggctccccaaactggcccaaaatacctcattaatcaataatttttatattgatcaaatgttgaaatgataatttttatatattaaagtatattgttaaaattaattttatttttactttttattgtgatacagactaagaaaattacaattggagctc

SEQ ID NO: 99714 - DNA, 351 bp, Homo sapiens
ggatagagatggtgtttcactatgttgcccaggctgatgttgaactcctaacctcaagtgatccacccacctcagccttccaaagtgctgagattacagtcatgagccactgcgcccagccgaaagagctttatttttagcatgggtcagtagagcttattagcagtttggggaaacaagaatatttccaattttaaagagacgagacaatcatacaaatgatgtgagcactattacatagaaagcagagaagtgtttttgagttggtttgtgtttaaaaatctcaacccactgcttatacgttgttttaattattagctgctaacaccacacgtgctgctgttcctagtg

SEQ ID NO: 99715 - DNA, 344 bp, Homo sapiens
ggcacgaggtccaggaaggtcgtctaagccaatcaactccactttaaagaaggggaaactggccggatgccgtggctcatgcctgtaaacccagcactttcagagcctgagatgggaggattgcttgagctcaggagttccagaccagcctgggcaacatatcaagaccctgtctctatttttattaaaataaataattttttttaaagaataatagccaggtatggtggttcacacctgtaatcccaaagtgctcggatgacaggcatgaaccattgttcctggcctgggggctgctttatgactataaggagcagaacactctgtggatagtgctagggtga

SEQ ID NO: 99716 - DNA, 335 bp, Homo sapiens
ggcacgagcttatttacctctctgcttcttcattatcttcttcatataggtaagtgtaatctattttatttggttactgtgaggattaatttagttaaacaagaggtacttggcacatcctaagtgattagctaaatgttagctattctgtttcattctgtaaaactcacttttttcctaggcataaagagaaggctattattcagctgggcgtggtggctcacgcctgtaatcccagcactttgggaggccaaggcgggtggatcacttgaggtcctgagttcgagaccatcctgaccagcatggagaaaccacgtctatattactaatacgac

SEQ ID NO: 99717 - DNA, 341 bp, Homo sapiens
ggcacgagaaaattctcggattacagaggtaagccaccacacccagccaagaacagaaaccttttgttttccattttcttttattttgagacattgtcttgctctgtcttgctctgtgaagtgacatcatcacagctctcaatagttttcacttcccagacctcccaagctcaaatgatcctccctcctcagcctcccgagcagctgagaccacaggcgcatgccaccatgcccagatgattttttaattttttgtagagacaggcccagactggtcttgaactcctgggctctagcagtcctcccacctcggtctcccagaatgttggaattacaggcag

SEQ ID NO: 99718 - DNA, 352 bp, Homo sapiens
  misc_feature (1)...(352): n = a,t,c or g
ggcacgagggggtttcaccatgttggacaggctggtctggaactgctgacctcaactaatccaccctccttggcctcccatagtgctgggattacaggcatgagccacctcacccagcattttttttttttaatttttttaatganacanattntttctttgtnacctatgctggagtgcaatggnacgacttggagtcatagcatcctatgcctccggtgttcactcctggatgctactttattctcgctgatagctgtttactacctgcagtcatgagcctcgaatccttaccaatatggtttctcgaatggctcggaccgtagctcacgctgcacacccctttaaggtc

SEQ ID NO: 99719 - DNA, 1390 bp, Homo sapiens
  misc_feature (1)...(1390): n = a,t,c or g
ttttttttttttaagacaaagtcttgctctgtcgccaggcggaggttgcagtgagcggagatctgggcactgtactttagcctgggcgacagagagacccatctcaaaaaaaaaattggaacctgagaagggggtcgtggggtccccggggcccaccgtctgcacttggcatctgaagtcggggtggtcttgtgggactgaccccttaccctgtgggttctgtactagctccgggcaattggtgacagaatcgagttaaattgtaggacatcgcgttggtgtctgagagggagttggagagctggttggtgtggagggaaaggcttacacacatgtgatttcagaagcgttctgtgggtagaggaatcgttttctctttgagactgttatgagtatgtacaaatgttatttcctgtaaaatattttcattttttaaaatgttattttctagatagaaaagtagaagtgtctctttggggagcgtttttgggggcgtatagtaaagctctgtcatcatgaattaagcgaggtgggctttgagtttcttgggatgacagggaaatgtgagccgcctactggccgtgagcccctggggtgcggttgcaggattcgcccatcctggtctgggtgtggcttgtgaccacctcctgcagttctctgcccaggtaaggactaattgggaagaattctgggtcctgagctggctgccgcttccaagacagtcgctttgagggctcttggcaccgattttgttaaaatgcatgagcttanggttgtgcagcctgtaggggcaggggtggtctcagaatggatttggtggccccaccgttaattaagctcctgacccctgggccggtggtgaggtgggaagatgagcctgtgtctcccatgctgagccaagatcctcaggtaccagtagcggtcaaagcacctgctccctgaaggaagcttacctggcttagcctcattcctgctcgtaagtcaggcattcagcttgcaaagatccccaagcacacaaggagagtcagctgactgagggccaacagaaacagcaggcagccgctgtcagccacaaagaaacgcagatcctgaaactgtcatcatacaggtgagaggatagttatgtgtgaggtgttcaaagaagtcgcgcagtcagtgatgagaaagctgtagggtacatactgtcacgcatgaataggcaggactccttaaagaacttttggaaatgaaaaacaggccaggtgcagtggttcatgcctataatcccaacactttgggaggcctaagggggaggatcacttgagcctaggagttcaagaccagcctgggcaacatagggctgggcacggtggctcacgcctgtaattccagcactttgggaggctgaggc

SEQ ID NO: 99720 - DNA, 383 bp, Homo sapiens
ggcacgagactggattatttaatacctctcgttatatctcctgctccttcttcctaaagagagataattacctaattcatgactatttcttttctccaaattctatggagtaaccttttctccaaacatatacagacaaactggcccatgttaaaatctacatgattagctgggtgtggtggtgtgcacctgtaatcccagctacttgggaggaggagaatcgctcccagctacttgagggaggagaatcgcttgaacctgggaggcggagattgcaatgagctgagatcgtgccactgcactccaacctgggtgacacagcacgactctgtctccaaaacagaaaaatctacatgatgatggggctggctgcagagcctcat

SEQ ID NO: 99721 - DNA, 380 bp, Homo sapiens
ggcacgagttgcatgacggcgaggagtgtagcaaagatagaaaatcccaggccggaagactgctgaacgattaacatgataagattctcctggccaacatggtgaaaccctgtctccctgtctctactgaagatgcagaaaattagcctggtgtgcttacggatgactgtggtcctaactgcttgggaggctgagataggacagtcgcttgaacctgagaggcggaggttgcagcgaactgagattgcgccattgggagacagagtgagactccagttcacacaaggctggcaaggtttttaattaccggacgaacagctttttccttttggggcgggcacatttaccctggcgattgcctgtcttcctactccaggccg

SEQ ID NO: 99722 - DNA, 351 bp, Homo sapiens
ggcacgagctccagcctgggtaacaccatgaaactctatctctaaataaataaatatcactttaaatcctggcatagaatttaaaagacaaaaaaatacaaactatgttaatggatgtatagtataaaaagatgtaattggtaacattaatagcaaaatggggggtcagagatataaaggagtagaattttgtatgtgattgagttaagttgttagcagtttaaaatagattatgcagtcgggtgtggtggctcatgcctgtcatcccagcactttgggaagccgaggctggtggatcacctgaagtcaggatttcaagaggagcctgtgcaacatggtgaaactccatct

SEQ ID NO: 99723 - DNA, 2118 bp, Homo sapiens
tagtgattctagacattttgcatggccctcattcagtggctcacaaacatgagggagcatcagaactacttgaggggcttgttaaaacccagtgcgttagaagtcggatgcggtggctcacacctgtaatcccagcactttgggaggcccaggcaggcggatcacttgaggttaggagttcaagaccagcctggccaacatggtgaaactccgtctctactaaaaatacaaaagttagccgggtgtggtggtgcatgcctgtaatcccagcttcttgggaggccaaggcacaagaatcgcttgaaccaggagacggaggtttcagtgaatgaagatcgtgccattgtattccagcctcggcaacacagcaggactgtgattttctttggagactcctagattttctgtggttttgaactgaatttgttggatgttggcaagtgcctcttatgagctgtttctttatcctgcatttgccccacaaagacttatctggaggtgagcaaagtatgtttggtagtgaggtcacaaaggcaatcagccccttcctccccactcccattgccatcttctcagtccttctccctttctttccaagtagtttacccacccctcctctttcctcccctgtccctaaaataatccacgtgtcttcctaaaatctctctttgatcctgtcctttgataacaccgtcagtgcctactactgggtctagacagacctctgttgagcagtcagagtcttccctgactccacaatgcccctttccttggctgaccagtatgactactggtccccacctttcccttgcctatccctacctccctcctactaggttgtcccatccctctcttcacccattcattcatgaccatttttcactaccaagctccccccctcccgaaggaggctgaggtttttgtgactctctagactctattgtgggatggaatgaacattgctaaagaatcttgtgttcgctttactttaaaaaggtatttttttcctaattataaaactgatgtgtcagttacggaaaaattagaaatgcagcacaaatacatgaatattttaccacaaaattgccatataatatcttgtcttttttgggggtgtgaattttttgcattgttctgatcatattctttatcatgtaatttatgttcttttttactaagtattatgtgtggttattatagattttcacaaagatatattgctggtaatatattttattgtgtagtcttataatttacttaaccttctttcaattgttagaaatttaggctatttccagattttcagtattgtaaataatgctgtgatgaccaattttgtgaataaaatgtttttatgtatttcagattattcccttaggatagtctctcagtgccaagttgtcaaaaacatctctattttgcttatcttcctgctctcttgctgccttagggggtagtaaactgaaacataaagtaaacatgcatacaaataaaaaacataaaacaaaaataagcaacctgatggtaataggtgaaagtggtaacctgttttaactttgaattcttgccgggtgcagtggctcacgcctgtaatcccagcactttgggaggctgaggtgggtggattacgaggtcaggagattgagaccatcctggccaacatggtgaaaccccatctctactcaaaatacaaaaattagccgggcgtggtggcgggcgcctgtaatcccagctacttgggaggctgaggcagagaattgcttgaacccaggaggcggaggttgcagtgagccaagatcgcgccactgcactccagcctgggtgacagagtgagactccgtctcaaataaaaaacaacaaaaaacaaaaaaaacttaaaattctttgcttgttagtgaccttgatcatggttctctttgtacgatagttgggcatctgtatttccacttgtgtgaatttgcctttaaattttggttatgggtttcaccttttaaaataatcaaacatatttatcttttcctgtgtgataggtttttttctgtatcttttcctgttaaacacacagacccctccccaatctggacattgaataaatattcattttcctttgcaaaaaaa

SEQ ID NO: 99724 - DNA, 381 bp, Homo sapiens
aaaataaggcctacttcacaaagcgccttcccccgtaaatgatatcatctcaacttagtattatacccacacccacccaagaacagggtttgttaaaaaaaaaaaaaaaaaaaaaaaaaaaaaaaaaaaaaaaaaaaaaaaaagggggggggcttttaaaaaaaattttaggggggccaaaattaaaaggtgtaagaaaaaaaaaaatttttttttaaaaggagaggttttaaaaaaccttgttgaattttattaagaaaaaaattattttttaggtaaaaaaaaaaaatatttttggtgaggagggtattaaatgcaataagaaataatataaataattataatgtgagagataataataaaaatttaaaaaaagatgta

SEQ ID NO: 99725 - DNA, 374 bp, Homo sapiens
cacgcgaccgagcatactagtgacagccctatactacctgtacatatttaccacaacacaatggggctgacgtcacccaccacattaacaacatagcaccctcattcacacgagaaaacaccctgatgttcatacacctatcccccattctcctcctatccctcaaccccgacatcattaccggggtttgctcttaaagaaaaaaagaaacaaggagacaatagagataaacaaaaagaaagaaaaacgggggggggccgcttaaaaagaccctgaggggggcccaattgaaccgggggggggcaccaaatactctatcccttttggggggtcttgaatagaccgaggggggatttttggaaagaacccctccg

SEQ ID NO: 99726 - DNA, 702 bp, Homo sapiens
  misc_feature (1)...(702): n = a,t,c or g
gcataaattaaaagtagaatgagataccattatgctcctatcattatgtctaaaatcaaaaagatggaaaataccaaggattgctgaggacattggcacaactggaactctcctatgctgctcacagggatgtaaattggtattaccactttggaaaattgtttggcaatgtctaggaaagctgaatacgtgcataaactatgactgggtaattctagttctgtttgtagtcaaaatttgggaaccaatagaaaggataaataaatggttgtaaatctgtgcaatgcaatactacacagcgatgagaatgaatgaattactgctacatatgacatggaaggagcatataaacataatactgagtgaaagaaaccatacacaaaagggtacatttatttaaagttagaaagcagggcctggcgcagtggctcacgcctgtaataccagcactttgggaggccgaggtgggcagatcatgaggtcaagagatcgagaccatcctggccaacatggagaaaccctgtctctactaaaaatacaaaaattagctgggcgtggtggcacgtgcctgtagtcccagctactcaggaggctaaggcaggagaatagcttgaacccaagaggcagagaatgcagtgagctgagatcgcaccacttcactccagcctggtgacagaagccgagctccatctcaaaaancaa

SEQ ID NO: 99727 - DNA, 377 bp, Homo sapiens
caggttaggatgtcaacacatgactctggggtgatacaaataggccattgcagcatatacaattaaaatgtgggtatgaagaaaaaaggaagtttttgtttttttgtgggggagatgggggttaaggaagaagatagtaatttcaggactaggcatggtagctcatgcctataattcctgcactttgggaggccaaggcaggaggatcacttgcggccaggagttcaggaccagcatggttaacagaggctaaggcaggaggattacttgagcccaagagtttgaggctgcagtgagctgtaatcatgccactgcactccagggtgacagagcaagaccctgtacctaaataataataataatttccacttcatttg

SEQ ID NO: 99728 - DNA, 216 bp, Homo sapiens
ctctacacaacatattttgtcaccaagaccctacttctaacctccctgttcttatgaattcgaacagggtgacccccgattccgctacgagcaactcatacacctcctatgaaaaaacttcctaccactcaccctagcattacttatatgacatgtctccatacccattacaatctccagcattccccctcaaacctaaaaaaaaaaaaaaaaagg

SEQ ID NO: 99729 - DNA, 379 bp, Homo sapiens
tattcataggcacagtcattatgcactacagcctcaaactcctggccttgagtggtcctcccatctcagcctcctgagtagctgggactacagacttttttttttttttttttttttttaaaagggggtttggttgggtcccccgggctggagggcaggggcctgattttggtttacggctttttccttttcggggattcggggacttttcggggtttttcctctggattagggggattttcgggccccccccacctggctaggttaattttggggtttttagtaaaactgggggttttccttggtaggccgggtggattcgtatttcaggactccggtgggtcttcttgtcgttctatcagacgattaggggtactgg

SEQ ID NO: 99730 - DNA, 338 bp, Homo sapiens
ctcaaactcctggcctcaagtgatctttccaccttgggctctcaaagtgctgggaatatagtaggcatgagccactgtacccagcctaaaattaatatgggaatacttctcaaactggtgtacagattcaacataaaccctgtaaaaaccccagctggactgtttaaaaaaaaaaaacatgaaaaacagaaattgacaagcggatcctaaaattcatatggaaatgcacggaacatagaatagccaaacaatctttaaaaagaacgaagctagaggacttccttctcaatttcaaaacttactatgaagccacagaaattaagacatcgtagtaccac

SEQ ID NO: 99731 - DNA, 282 bp, Homo sapiens
cccaaggaatttttttaaccaaaagggtaaaaaatttttaaaggggaaaatttaaaaccctggtaaaaaaaaaccagggggacccaaaaaaagggaaaaaccccccgggccccaaaattggaaaaaacaattttgggaaaacccccttttgggctaaaaaaatttaaaaattcaatttaatttccaaaaaaaaccccacctttttttttccaaaaacttaaaaaaaccggggtaaaatttttttgggccccaaaaggccccaaaggttttcttagcaaaaaa

SEQ ID NO: 99732 - DNA, 382 bp, Homo sapiens
agcctcagtcagatttcactttatttgtatcgatgacaatattaactcttcagatttataaaatgacaaaacttgataattacctggaaacaatttattattaactaggttaaccctaaatccatcaagaaaaaccacctaacatattcagtgttaaaaagagacattacgactagccttggccaatatgggcaaaaccctgtctctactaaaaatacaaattttagcagggtattagtggtacgtgcctgtaagtcccagccactcaggaggctaaggcaccagaatcgcctgaatctgggaggcagaggtcggcagcgagcagagatcgtgccacttgcactcctggggcggacacagcgagactgtctcaaaaaaaaaa

SEQ ID NO: 99733 - DNA, 376 bp, Homo sapiens
ggcacgagggtttttgagatgtaagcttaggtgattgacctgagagcttttcagagataagcacttgaaattataaatttccccttgagtactaatttggttacatcctacagattgtatggtttattttttttttcaatcagttcaaaatatttctaaatttccctttataatacctctatgaccatgcctggctaatttttgaatttttttttgcaaaaagggggtttttccatgttgcccacgctgggcttgaactcctgggctcaagggatcctcctgcctaagcctctcaaagtactggggttatccgcatgaacatttcgcctagcgcctcttcttattgattgtatccaatcatctccataaggcttcg

SEQ ID NO: 99734 - DNA, 490 bp, Homo sapiens
  misc_feature (1)...(490): n = a,t,c or g
ggcacgaggtgtttcacaacggcattgtgctatgatgttccaccagctatgacatcacaaagcagtaggaatttttcagctccagtataatatgggaccacagctgcacacggtccgttgttgactaaaatgttatatggtgcatgactatgtttaaatattcctatatttttatattgtttattttaaagttctatggccaggtgcagtgactcacacttgtaatcctagaactttgggaggttgaggcagaaggatcccttgaggccaggagttgaagaccaacctgggcaacatgacaagacccccgtctctacaaaaaatttttttaaaaaattagttgggtgtggtgccatatgcctgtagtcacagctattcgagaggctgaggcaggaggattgcttgagcccaagagttgaggttgcagtcaactatgatcatgccactgcactccagcttaancaacagagcatatcaatggtngtcgatg

SEQ ID NO: 99735 - DNA, 1208 bp, Homo sapiens
  misc_feature (1)...(1208): n = a,t,c or g
ccatgcctggcctattctggtctctttaactctctcctctttatttctcttctctctctgtacacttttcctgggtggtctcatccattcctttgctttttcataccatttatttgttaatgattcccacatttatttatgcacttggagagctcacaggaatctcagaaactgatgaggtacaattctgaaccctcagtctcttccctttaaacctttctttttctctactttaatttttctaaagactgtcttgctatgttgcccggggtgggtctccaactcaagtggatcctcctgccgcagtctcccgaagtgctgggattactgacatgagccaccacactcagccctttaaacctttccctggcctttcccatagctggtgaaggacacctccatccattccacgcagttgctcaaagcagaaattttcagtgcaagtcttgatgctgcgccgtcccccactccctacatcagaacgcatccctcatctggactccagcggtggcttcttgatgctgcgcggtcccccactccctacatcagaatgcatcccgcatccagactccagcggtggtgctctacctgcacgctgttgccaagtccaagctaccatactcctgcctgagctatgacaacagcctcctcactgatctcccctttcttccctttgcctcctccagctcatttttcacagtgtagaatgacattttgtttgtttgttttgttttgtttgagatggagtctcgctctgttgcccaggggtgggagtgcagcggtgcgattctcggctcactggcaacctccacctcccgggttcaagcgggattctcgtgcctcagcctcctgagtaggtggggattacagggcatgcaccaccatgcccgggataatttttgtatttttagtagagatgggggtttcactatgttggccaggctggtctcgaacacctgacctcgtggtccacccgcctcggcctcccaaagcactgggattacaggcgtgacaccccggcctggctagaatgacttttaaaagatcaaattaaatcaggtcactcctttgcttacaacgcagtgggttagaggtacacccatgtcttcanaaggnatacaagattcgatttatctggatccaattcngggcntttttccagtanccaaagggccaaacccgggggctttttctnaaattntcgggtt

SEQ ID NO: 99736 - DNA, 384 bp, Homo sapiens
ttgcttccttgtcaaagatcagttgactatatttgtgtggggctatttctgggctccctatttggttccagtgattatgtctattatttcaccattaccaccctatcttaattactgtagctttatagtgagtcttaaagttgggtaatatcagtcttctgacctttttctctttcaatattgtgccagctattctgggtcttttgcctttccatgtaaactttagaaccagtttgtcaggatccacaaaatactttgctgggttttgattgggattgcattgaatccacaggtcaagttggcaaaaactgacatacagcaatgccagtttattgttttgtgatagccttaatccagctagtttcttcacagggatgattgttg

SEQ ID NO: 99737 - DNA, 512 bp, Homo sapiens
tttttttttttctttacatgaacacacagagtagctttatttgtaagaacctgaaactggaaacaacccaagtgtccttcaacaggcgaatgtttaaacacactatgttacatccatactatagaatattaatactattcagcaataaaaaggaataaactctcgatacatgtcaaaaccttggatagatctcaaagggattgtgctgaatgaaaacaatcaaatctgattccatttatgtagcatttttgaaatgacaagacataaagatcagatttagtgactgcccaggggttagggaagtaccagggagggagggaggtagctgtggctataaaagggtagccatgagaaatctttacactgaaaatgttttgtatcttggctgtggtggtggtcatcagcatacatgtgataaaattatatagaactaaatacagacacacaataagcatgtgttaaactggtgaactctgaataaggttgatggattgtatcaatgtcaatttctg

SEQ ID NO: 99738 - DNA, 406 bp, Homo sapiens
cccacgcgtccgtttgtaaagtgtcacttagttttgttcccataaatatagaggaagtagttgggttaaagttgtgggatttgcactatgcctatacattgttatttatgccattattttgagaggctgattattgcttttttaaaatgatgcactggtgaagatgtgaaagtaaaattgccacgtggcattatttgccaagaataaatgaaaagggtaaataaacaattttttctttttttaaacatttttcagaaaagattcaattaccttttttaataggtgagcgccatcacgcccgtctctactaaaaatacaatgattacctgggtgtggtggcgtgcacctgtaatcccagctactcaaaggctgaggcatgggaatggcttgaaccttggatgcttct

SEQ ID NO: 99739 - DNA, 405 bp, Homo sapiens
attcattcatattcttgtctgtattggtagttcattttttattgttgagtagtagttcctgtttgagtataccataatttgtttggtcattctccttttgatagacaataaccagtttttggttattatgaataaggcttggagcattcatttataagtattttttgtggacatatgttttcatttctcttagaggatatctaggagtgaaattgctgggccatagggcacatttttgtttaactttataggaaacagccaaacgtttatttccaaagtgggtgtgacattttatactccaaccaacagtgtatgagagatctggtttctccacttcctcaccaatattctagtttcagtccttttgattttagccgttcatctggtgtgaaatggtatctcatt

SEQ ID NO: 99740 - DNA, 394 bp, Homo sapiens
cccacgcgtccggacgagttctagatcgcgagcggccgcccttttttttttttttttttttttttttttttttttttttttttttttttttttttttttttttttttttttttttttttttttttttttttttttttttttttttttttttttttttttttttaattttatatattaaaaatattttttttttttttcattttggaaattttatgttatttatcaaattatggggtgggggtgacatacaaagaatgagttattataagtaaatgttagagagttactttttcttcacaataaatatcttttttattggaaataactacctcatttctttgatttacaacatttacgcggttaagaggcaattataaatctctaataaaaatag

SEQ ID NO: 99741 - DNA, 365 bp, Homo sapiens
gaagggaaccccccgccacggggccctgcgaggtgggagcccgggtggtcttcaccacaggctgtgcagacggtcaggcatcgaatgacctcgtcacgtccacctgcagcccagggcagtccaggaaaacgttctcgatgacggacgtatcccccggctctaaggtttcgcacgtcagccccacatggccaccaagcactggaaacgtggcccatgcgcctgtggaactgcattttttttttttttgaaacagggggggaccctggggcccaggctggagtacaggagcacattggtggttaattggggcctgggcctccggggcttaaaggatcctcccgcctcagcctcccaaggggttgggg

SEQ ID NO: 99742 - DNA, 441 bp, Homo sapiens
tttaaatcattataactaggctcaaacacatcttattaatcaaaataggaacgattataatcaacatatttttcccaatgagaaataaatgtgtttattcttgtagtgcaaaaattgcacttcaggattcagtgaactcttggaaagcattttctgcatcctgctggttgtagaagcgtttttcctttaaaaagatgttgatacacttgaagaagtggtagtcagttggcgagaggctaagtgaatatggccgatgagacaaaacttcatggcccaatttgttcaacttttgagacactggttgtgcaacttgtggtcaggcattgtaagagagaagaactgggccctttctgttgactgcagacgtttcgctttttggtacatctcattgaattactgaacatacttctcagatgtaatggcttcgccgggattcagaat

SEQ ID NO: 99743 - DNA, 442 bp, Homo sapiens
caataattgacgaagctgtgttgaattccatagtagaggacttgtcagttgctccctatagttctgtcaggttttgcgtgtgtatattttcatgccattgtattagtggcacagtggctcacgcctgcagtcccagcactttgggaggccaaggcaggaggattgcttgaggccaggagttctagaccagcctgggcaacataagaagaccatgtatcttaataaaacagaggaccattgaaaaaaagatggccaccggtaatcattttcttttggaaaagttttttctgccgggaaagactcaccctacccccgccctatgctttttttattctaaccgtaatccttggtataaatcttttttaaaggggttctctacaagtggcaaggttctttttcttgcttaaccccccccttgtttaaaatgccagtgttgtcttcg

SEQ ID NO: 99744 - DNA, 420 bp, Homo sapiens
caaaatctgcagccacattggaagacacttcggcaatttcctataaagttaaacatatgatgttgagcccagcaattccactcctagacattacataagggagatgtaaaccgtgtccatacaaaggtccatatgtgaatgttcattgaagctttattcataatagccaaaaaattgaaactctccaaatgtggatcagctggtgaatagataaacaaagtgtgagatatttacacaacagagtactactcagcaataaaaagcaacaagcaactgacacacacaacaacatggataaagctcaaaagcattacgccaagtgaatgaagccagacataggagactgcgtgctttacgatgctgttaatatggcattctcgcaaaggcaatattatagttactgaaaatagatcaatgttt

SEQ ID NO: 99745 - DNA, 415 bp, Homo sapiens
tcaccactcctagctaattaaaacaatttttttttgtggagatggggtctcaccatgttgcccaggctggtcttgaactcttggcctcaagcccacctcatcctcccacctcagcctctcaaagtgttgggattacaggcaagagccaccgtgccccacctcagaagctaactttttttttttttttgggggggaatttcccttttggtccccaagctggatgcccaggggctgaatctaattacccggaaccttaaactccggggttaaaagcatttttcgggcttaacctttccaaatgcttaaaatacggggattcccccacggccccgggtaaattggagatttttttttttaaatggggaggggtttcccccagttgtgccagccgcgttttaaacccccaacctcgggg

SEQ ID NO: 99746 - DNA, 436 bp, Homo sapiens
aatatttttctgctgtagtaagtgtagtagacagcatgatttatatttttgcagatgttttaattgagctaaaatatgtataacaaaatttaccattttaactgtttctaactatatagtttagtgacattaagtacattcatagtgttgtgcaaccatcatcactatccattttcatcatcccaaacaagaacctctgtatcaataaacagtaaactcccaaattcctcttctccccagaccctggttaacctccattctactttcttttctaggtatctcatataaatggaatcatatatttgctcttttgtggttttcttgttttatttcatttagcatattttcaaggctcatccaggttgcatatagtatgtatcagaattgcattcttttttaaggctgaataatattccattgtatgtatataccacag

SEQ ID NO: 99747 - DNA, 416 bp, Homo sapiens
cccacgcgtccggtcacatgttttttataataaaacataggtgatttcaccttataaaaaaaaaaaaaaaagggagaaaatgaaaaaaaacaaaaggaaaaaaaatgaaataacaaaaatataaaaaaaatgaaagggggggataacaaagaaaaggaagattgaggggggcgctggccaacgtggagaggccccggctctactgttttttctggggggggaaaaaattatttttttttgtgtggggggaaacataaaaccccattttggggggggggaaggggcggaaactttttttgggggggggaagccttgcctccccccccccaaaatttttagggtggggggggaaaaaaaatgttttttgggggggggggggaaaaaaattcccccgccggcgggtgtgtgaagaatcg

SEQ ID NO: 99748 - DNA, 474 bp, Homo sapiens
  misc_feature (1)...(474): n = a,t,c or g
gtggccanaattgaaacttatngtacgcctcagaaccgcaccggattcccggtcgacccacgcgtccggtatctttttgcttatgaatattctgtattataaccattgtttctgtagtttaattaaaacattttcttggtgttagcttttctcacaaaaaaaaaaaaaaaaaaaaaaaaaaaaaaaaaaaaaaaaaaaaaaaaaaaaaaaaaaaaaaaaataaaaaaaaaacaaaaaaaaaataacccggggctggccgtcgcgaaaaaattaaaaacatcccaaataaaatacctactaacaaaaaaaaaaaaaattcacatatttcaaataaaaataataaaacacctatttattaagtcataaaaaaacacaaatactcttagccctgatataacacaacaacaacaaataaaaacctgattgaaaaaaaaaaaaatcaattttataaacatttcaatcaaaacaaccacg

SEQ ID NO: 99749 - DNA, 392 bp, Homo sapiens
cccacgcgttcgcccacgcgtccggtttcactatgttggccaagctagtcttaaactcctgacctcgtgatgcgcccgcctcggcctcccagagtgttcagattacaggcgtgatccatcattcctggctggtgcatcttatatattatttccttgggacaaagctatacacgtgtgtagggttccttcgggtcagtattcattgcgtttttggaccttttacttttatctgtgtactagacttctttagtctcttgcgctcttacgcgctcgcttatatatgtgtcttgccctatgccttttgtttttatcctgcgttcatgtatttcttgctctgctttaagtttactatctcgctcttctgttctattcctgacatgttcataattccg

SEQ ID NO: 99750 - DNA, 422 bp, Homo sapiens
  misc_feature (1)...(422): n = a,t,c or g
caattatttaaaacaaagaaaaaatataaaaatcttttattgctcaaaatgctaatgatcacctgagccttcagggagtcttagtctttttgctggtgaagggtcttgccttgatgttgttggctgctgcctgataagggcgatggttgctgaatattgaagtggttgtcacaatttcttaaaagaaaacaatgaaatttgccacattaactgactcttccttccacgaaagatttcagtgtaccatgcgatactgtttgataagcattttacccatagtagaacttctttcataattggagtcagtcttctcacaccctgccactgttttactatgtttatcaatattctaaatcctttgttgtaggctaaacaatattcacagcattntcaccaggagtaaatttcatctcacaaaaccc

SEQ ID NO: 99751 - DNA, 427 bp, Homo sapiens
  misc_feature (1)...(427): n = a,t,c or g
gcctagtattgtaaaatatggcagaagaattcactttcatgcctgtaatcccaacactttgggaggccaaggtgggcagatcccttgagttcatgagtttgagaccagcctggaaaacatggcaagaccccgtctctacaaaaaatacaaaaaaatccaacctgacccacatggcaagaccccatctgcacaaaaaatacagaaagttccagcctggagcctccacctgcagtcctgcagctccaccctggctcttcatgaaatcggctaagtccaggtgtgggtgcgttcagtgcagcacccacgtgcaggtgacacgcccatgcaccgncacaaccacgctcacaccagaacattccatcatccggaaggccgtgtctccgctccagtctgcttttcgtggatgcaaactcatttccctgaggcg

SEQ ID NO: 99752 - DNA, 424 bp, Homo sapiens
  misc_feature (1)...(424): n = a,t,c or g
caaaattaataacacaaagagccagtgctttgaaaatattttaaaaattgagaaaactctatcaaacctaacaaagaaagaagagagaagacacaaattactgatattgggaataaaatatggacatcactgtagaaagtacagatattaaaaggataataagaaatactacagacaactctacataaatttgacaacttaaaataaataaaccaatttctcacaaaatataaactcaaaatatttctcaaaaaaaataaaacacctctctccaggtccctcatcccaacattaggaattacaattcgacatgagatttgggcaggacacaaacccaaaccatatcaataccaaaaccagagaaacacagtacagaaaaataaaattacaggccaatattattcataaatatagatacaaaagn

SEQ ID NO: 99753 - DNA, 434 bp, Homo sapiens
tttaaaaatgtatacgtatgtaactaacctgcacaatgtgcacatgtaccctaaaacttaaagtataataataaaaaaaaaacaaaaataaagaaagaaagaaagaaaaaaaaagtcttaattaaatggagagatatagtatgtttatagagacaatgaagatttgcacaatatcccaggaggattggagagacagggataaaaagtgaaatcctaagaaagtaacttcaaatttgcataaatgagttaaaaaaaaaaccaatacaaatgttttgtaaaaataaaaatgaaaggcatttgccttactaggggttaaagtggatttataaatagtataattctggcccaaaaataaaattaatggaaaagaatagtttagaaacaggtcttaaaatatttaggagtttactgatgctgaagaaaatatgacaaat

SEQ ID NO: 99754 - DNA, 1237 bp, Homo sapiens
caaaaatgcagagggaacagggcaggcggatagttgataactggagctagttcttctatttaattatattccatctttgatgagagatttgaggtagctcctgttgcagtattaatttataatattttaaaagttagagaactttcctttgggatgttctaaaattatttccctgggcataattaatattagggtctgtttatttcaaatacaaaatattttaatcttttcttcctactgggttaagaccaaatgagatgtttgtttttaatgtataaaatcttatacagtgtatgttagctgcaacttctcaggaattctgaatcttagaacttttttattgaaagagatcttagaagccatctaaccaacccagactgcttaatgattgtctgggttcacatagctatgggtgatagaaaccgggattcgttgtgaccagtaattctccattctttctccctaatgtgcagcacatctccagtacttctgaatagattacacagcttttctttggctagtttgggggcttgacctgatgcaaaaaggaatttttttcctctgccaacaaaatttctcactgcactgcttgctacacagacaagattcaaaataaaagtaatggtgggtcaggtgccatggctcatgcctgtaatcccagcactttgggaggccgaggtgggcagatcacgaggtcagatcaagaccattctggccaacatggtaaaaccccgtctctactaaaaatagaaaaattaaatgttacatgaaaaacatatttgaaactgtactgccatttgtgtaaaacaaggtatgtggtgtgtgaacatcttatttgcatatgcatataattatctctaaggatgcacgagaaaccagtgataattatgcctccaagaagaggttcaactaggtgggctgcttagaatctagttttgtattatttggacttttgttcacattatcctttcaaaatacattttaaaaatactatatgcaccgaggtgggtggatcatctgaactcaggagttcgagaccagcctgggcaacatggcgaaaccttgtctctaccaaaaatacaaagaattagctggctgtggtggtgtgcgcctgtagtcccagctactcaggaggctaagataggaggatcacttgagcctgggaggtgcaggttgcagtgagctggaattgtgcaactgcactccagcctgggtgacagagtgagaccctgtctca

SEQ ID NO: 99755 - DNA, 503 bp, Homo sapiens
cggacgcgtgggactttttgggacattgtaagtgttgttttatatcctttctaaatacaatcctgtattctgtgactggaaacttctacagctggcactctatgtgtgacattactagagggagcaatgcaggaggaacattagctgttcccaaatcgaagggaaaaggtacctaaatatatatctcaaatttgttttttgattctagaattgacataagattggctgggcgcagtggcttatgcttgtaatcccaacactttgggaggctgagacaggtgaattgcttgagtccaggactttgagaccagcctgggcaacatggtgaaactctgtctctacaaaaaatatgaagatatttttgtattttttagctgggtgtggtggcgcaccctgtgtcccagctatggggaagggtgcggctgaggcaggaggatcccttaagccccagaggtcaaggctgcagtgagccctgatcatgagaccttgtcttaaaaaaaaaa

SEQ ID NO: 99756 - DNA, 408 bp, Homo sapiens
  misc_feature (1)...(408): n = a,t,c or g
ataatatataaaaaataattatgcccccatcttgtatgatatttaaggccagacacagtgactcatacctgtaattctaccactttgggaggccaaggcaggaggatcacttgaggccaggagtttgagaccagcctgggcaacatagcgagacctcatctctaaataataataataataagtgttttaaaaggttagtatttgagtttaaaaagaggaggggagagagaaaatggatgttgtattcttggttttatattatatagcaggactttttaagtaagttttcataaacttggaaattgcagttatataaagatccatgctgaaatttattgtggaatagatttaacagttcttaaaactgtaaggaagggaaaaggagtcaggtcattcagtcactggacn

SEQ ID NO: 99757 - DNA, 396 bp, Homo sapiens
  misc_feature (1)...(396): n = a,t,c or g
ttagccaggatggtctcgatctcctgacctcatgatccgcccgccccggcctcccaaagtgctgggattacaggcgtgagccactgcgcacagcttttttttttttttttttggagacagcctcgttttttcctccgggcgggagggcaggggcgaaanctcggaaaagtgaaacctctgctttccggggtaaggccatttttgagttgaaccctcccaactgaggggagaaaatcggggccccccacccactttggataagtattacgcgaataatttgggggaagccacctcagtctcttctctgtggtagcaaaacctgttgaacccggcggtcgagggtccatgaaggcctaaaaaacacaacaaacccaaggggggggcggtgagactttc

SEQ ID NO: 99758 - DNA, 402 bp, Homo sapiens
cccacgcgtccgcccacgcgtccggaaacatcctatcatatgtaggctcattcatttctctaacagcagcaatatgtaataattatcatgatttgagaagccttcgcttcgaagcgaaacgtcctaatagtagaagaaccctccataaacctggagtgactatatggatgccccccaccctaccacacattcgaagaacccgtatacataaaatctagacgcataagaagaagcctgattgaccaggatgctgcccggaaggaaacccaacaaggggccgcggactgaaagcattacctatggcgcggaatttgtggatggaaaacgccaagggctccttttctccaaggggttggacacaaaaaaaaaacccggactgtttagaggacaagccttattgtg

SEQ ID NO: 99759 - DNA, 645 bp, Homo sapiens
ttttttttttttaggcccatttgagtattttgttttcaattagggagatagttggtattaggattaggattgttgtgaagtatagtacggatgctacttgtccaatgatggtaaaagggtagcttactggttgtcctcccgattcacggttagaaatgaaggagggtctgcggcctaggaagtcaataaaagtgattggccttagtgggccgaaatattagtgcctttgcttgtttggatatgatggaggatgggggaattattgcttaggatgtaggatggataagtaatagggccaaggacgcctcctaagtttgttaagggaccggatccggagaaattgtggtaggcgcaatagggaaatatccattcgggccttgcatgtggggaggggttgtttaaaggcgttggctaagggagtaataggcctgtggcccctacgaggtctcgtgtgggaaagagtgtaagtcctttaggagagaatgaagagaagtaagcccgagggcgtctttgcattgtgtagtaaagggttgaaggtgattttatccgaatggggaagtgattcccaagggggttgtttgaatccctttcctgccagaatagggagttgaaattcctgcaagggctgcaataaataaagggtaa

SEQ ID NO: 99760 - DNA, 408 bp, Homo sapiens
cccacgcgtccgaaaagaggcctaacccctgtctttagatttacagtccaaagcttcactcagccattttacctcaccccctttaaaaaaaaaaaaaaaaaaaaaaaaaaaaggggggggggcttttaaaaaaaccctggggggggcaaaatttaaggggggggggaaaggaaaaactttttccttaaaggggggggaaaaaaaaaccaaggggggatttttggaaaaaaacctttttttgggggggggaaaaaaggggaaaaaccccccaaaaaaatttaagggcttaggggaaaaaaaaaatttttaaggggaaaagggggaaaaaaaaggggaaaagggggggggggaaaaagtttgcttccggggtttgatttaaaaaaaattttccccccgggagtggtgtaa

SEQ ID NO: 99761 - DNA, 409 bp, Homo sapiens
  misc_feature (1)...(409): n = a,t,c or g
cggacgcgtggggcagtggctcatgcctacagtcctagcactttggaaggttgagggaggatgatcgcttaagttcagttgttgaaatgcagaatacacatttttggatccaggaagtgttacttacgtgcctgtaacaatgtaattttaggccaggtgcagtggctcatgcctacagtcctagcactttggaaggttgagggaggatgatcgcttaagctcagttgttcaaggctatgtactaaaaataaaactagccaggcatggtggtacacgcctgtagtcccagctacttggagggctgaggcaagaggatcgtgaggtggcagtgagttatgatcgagccactgtactccagcctgggtgacagagcaagaccttgtctcaaaattatacatgttaatatatn

SEQ ID NO: 99762 - DNA, 477 bp, Homo sapiens
  misc_feature (1)...(477): n = a,t,c or g
nttctgaagctctcgnacggccggaanactgagtatcctcccgcgnccgccttgccagagagctcccatttgccacttttagcagcagtatgatgccctcgcaccccgtcttgacttatcagtgatgggggctgcccctgttgctagtctggggggctttattactccttggtgtcctctctaaactctgccctcacttttataggtggtgcctatcttacctttctgcacactcccactctaggaatgtttctgtctctgggataatgattgatatgggtattatgctttcaaaaaacaaaccttccctagaatattatataaatattcacgtttttttttctactggcatttatttaatttttttgtagaaataggatcttgctttgttgcccaggttggtcttgaactcctggcttcaagcagtcctcccaccttggcctcccaaagtgctgggattacagacatgaaccacac

SEQ ID NO: 99763 - DNA, 405 bp, Homo sapiens
cactttggaagacaattcgactattccttgcaaaactattcaatctagcagttgcactccttggtatgtaacccagaaagctgcatgtattacactcctcagtatgtaacccaaaaagctgtggtatgtctacacaaaaagctgcacacagatgtttatagtagctatattcataattgccaaaaattggaagcaaccaagatgtctttcagtaagcgaatgaataaataaactgtggtacatttagacaatggaataatatccagtgctaaaaagaaatgagctatcaagccacgaaaagacatggaggaaatgtaaatacaattactaattgaaagaagccaatcttaaaaggctacatgtatgattccaactatatgacattctggaaaatgcaaaactagg

SEQ ID NO: 99764 - DNA, 408 bp, Homo sapiens
aaagatacttaacattagccattagggatatgcaaattataaccccagtgagttaccacttcgtaccctcaggtgactatggtcagaaagacaataacaagtgttggtgaagggggtgaaaaatgggaagccttatgcattgctgatggtaatgtaaaatggtgcagcctctttggaaagcagcctggcagttcctcaaaatgttaaacgtagagcaattctatttctaggtatttacccaagagaaatgaaaacatatgtccacgcaaagacttgtatgcacatattcacattagcattatttttatatgtgcatctgaatgccctcatctccgttatggattggatgttaggacaccctatagaggagatttccagggatagctactcttgtgtttgtcttcttat

SEQ ID NO: 99765 - DNA, 424 bp, Homo sapiens
ctgggtgtggtggctcatacctgtagtcctagctgcatgggaagctgaagcaaaaggattgcttgagcttgggagttcaaggttatagtgagaccatgccattgcactacagcctgggcaacagagcaagactctgcctgaaaaaaaaaaaaaaaaaaaaatttaaggttttcccaccccaaaaaaaaaaaaaaaaaaaaaaaaaaaaaaaaaaaaaaaaggggggggccctttaaaaaaatccctggggggggcccaattaaccggggggggggagagaaaattttttttttttaggggggggttaaaaaaaacccctgggggttttttggaaaaaaccctttttttggggggggggacttttgggcccccccccccccaaaaaatataccccttgggggaaaaaaaaattttttaggggggg

SEQ ID NO: 99766 - DNA, 385 bp, Homo sapiens
aattataataaaaacatccaaaattgataatcacacatcaccataacagatagaataataatgaaaaagttggaaatagcacaaaaattaccagacacagaggcagaaagtgaatatatgctgttgcgaaaagtggcaccaataggcttggtcaactcaaagctgccacaaacctttgatttgttaaaaaaaatacaaataaagataagggctgggcacagtggctcacacctgtaatcccagcactttgagaggccgaggcgggtagatcacctgaggtcaggagtttgtgcctgtaatcccaggaggctgaggcaggagaatcactcgaacccgggaggcggagcttgcagtgagctgagatcacgccactgcactacagcct

SEQ ID NO: 99767 - DNA, 275 bp, Homo sapiens; identical to SEQ ID NO: 86981
  misc_feature (1)...(275): n = a,t,c or g

SEQ ID NO: 99768 - DNA, 325 bp, Homo sapiens
gaattatgacatcgttactgtctttatttggaaattaagtatggtttaaagagatgtatatgtgtgccaagttgacaaggggtagactgtgatggttaattttgggtgtcaacttgacttggccatgggatgctcagacatttggtcaaacatttttctgggtgtgtctgtgagggtgtttctggatgagaccaatatttgaatcagtagactgagtaacacagattattcccccgatatggcggtggggggtgggcatccaatcagttgaagacctgagtagggaaaaaaagctgaccctcctccaagtaagcgggaatttcct

SEQ ID NO: 99769 - DNA, 339 bp, Homo sapiens
ctcactgtagccttgacctcccaggctcaggtagtcctgagcctcaggtggcatgtgccaccacacctgggtgatttctttttagtttttgtagagatgagggaactccctttgttgcccaggctggtctcgaacttctgagcttgagcaggcctcctgccttggcctcccaaagtgctgggattactggtatgagcctggccagtgtttccgtttaatttccttgatttataaacgcgctctttctctgaaaatcttgggtccttttaatttaacttaatttagttgtttaaaacattttcttgtagagacgagttcttgccatgttgcccaggctgg

SEQ ID NO: 99770 - DNA, 416 bp, Homo sapiens
ggcacgaggggcaaagtaaactggaaaccttctggaaaggattcaccatttaagatgtcattaagaacattgatgatttatgaggggggtcaaaataccaatattaacaggagtttgggagaagttgattccaaccctcattaataattttgaggtgtttaagacttcactggaggaaataactgaatatgtggtagaaataggaagagaactagaattagaagtggaacctaaagatgtgactgaattgctgcaatctcacgaaaaaacttgaacagatgaggagttacttcttatgcataagcaaaaatgaggtttctcaagtaaaagctactcatggtgaagacgctatgaacactgttgaaatgataacaaaggacttagaatgctaccttcttagttgataaggcaggggg

SEQ ID NO: 99771 - DNA, 360 bp, Homo sapiens
atactatccagcaatcccactactgggtatccacccaaagtaaaagaactcaatatatcaaatgcatacctgcactcactggtttacggcagtactattcacaatagcaaaaatatggaatcaactttagtgttcatcaatgggtgaatgtataaagaaaatgtgatgcacacacacacacacacacatatacacacaatggaatactatgtacccataaaaaagaaatcatctcatttgcagcaacatgtatggaactgggggttattatcttaactgaaataatccaggcacagaaaaagacaaagggtattttttctcatttatatgtgggagctaaaatatttgattacatgtaga

SEQ ID NO: 99772 - DNA, 430 bp, Homo sapiens
tcaacccaggcaagttgtctgtcagtattaaccaggactgttttccttggactccatgccccttccagatgggccgttgccctaccctgcttttcttcattctatgggggtcaggccatccccttaatcactcccagtgtgggaacccagatatttcggttgaagatgctgaagtcactcaccattttcattcttttccatgagagccattgacggcagcagctctgaatcagccatctttgcctctctcccttcttgtggattttaagataggggcttgttctgtcacttaggctggagtgcggtagactgatcacaccttactgcagccttgaattcctgtagttacacaattatcctgccctagcttcctgagtagctgggactacaggcgcatgctaccatgcctaggtaatttttaaattttttt

SEQ ID NO: 99773 - DNA, 728 bp, Homo sapiens
tttcgtgctgctcctgctgctgcagggaaaagagcatgacatttgtcatcagaaggctggatgtggaatcccatcctctcccaccactgcacactgggcactttcggataagtcagttcttctcccaggctggaactcaatccttgcattcatgttataaaggaaaacctacgccctgaaagatggcaaggtcaactgtaagcaaacaaaaatgcaaacatgctgggtttttgttttagctttagcttttgtcttatttttttcacaaaagatcttcatgtaaccaaactgagttgacagactccttatttcatggcccactttaaaggaaacactttaccactcatttggtttcatgtgttttcttaatgtgtatttttatgtatagagatggagtcttgctatgttacccaggctggtcttgaactcctgggctcaagtgatcctccctccttggcctcccaaagtgctaagattatagccatgaactaccactcctagcttaatgtgtgtgttttttttaatctttactaccttcatcctgagctgcactgcctacccttccctcataggcatcttcttaataatcatatttcatattttccatgtctatttgcatgcatgtagattcttgaaaatatatagaattgattttgtgtgcttttgttttttacacatttcactctgttgtagaaaaaaatctgcaattaaactgaaacttctgcatt

SEQ ID NO: 99774 - DNA, 720 bp, Homo sapiens
agcgatcgatcactgtcagagtggaggaacctcataccagccctctcggactgaactggcttttctattaactggagtccaaagattgagaattaacttcttttgttctgtttgccttttggctgtggcctccctttctctatgtctgtggagacccgggcctagttctaaggaaaaagggaggaagagggagtcacgaggagctgccgccctcgcactctgtctcgcgtcctgagggagggcagcatggaattcgtgtggttttgtgtgcgaggaggatcttgtatttattgctctgccacttctgggcagcattaagaatagcgtcacgtgaccaagaacacacatttcttacaaatcagcagccccaatacatgatgcctaagatgtcccaaaaaggccaggtacggtggctcccacctgtaatcccagcactctgggaggccacggtcggagggttgcttgaagctaggagttcgagaccagcctgggcaacacagaccctatctcgacaaaaatcaagaaaaaaattagccacgcgtggtggtgcacacctgtggtcccagctactctggaagctgaggtgggaggattgcttgagcccagaagttcaaggctgcagcaagctgtgatggtgccactgcactccagactgggcaacagaatgagatcctgtctctaaaataaaattgttcataaagatctcccccaaaaaaaaaa

SEQ ID NO: 99775 - DNA, 438 bp, Homo sapiens
  misc_feature (1)...(438): n = a,t,c or g
aaggaagcacatgtgcacctttcctttacactaatgcacttaggatgtttctgcatcatgtctaccagggagcagggttccccacagtttcagaggtggtccaggaccctatgatatttctcttctttcgttctttttttttttttttttgaaaagggattttttttttgtggccccactttttgggagggctgggggggaaaaaggttttacccccggggggggggggttgcaggaacccagaataatgcccttgcctttaacccgggggaaaaaacccaaaccttgttttaaaaaggggaggggggggggaggggttttaaaaggcttggaaccacccatttaagggccggggcctaggggacccaccccccacgtttccctgggggaaccctaggatttgaattaacctttttggaccccaaggtttttggtttn

SEQ ID NO: 99776 - DNA, 410 bp, Homo sapiens
aactgatctatgtattgaggtctatacagacatgagatgtgaatagaaaaactgaccatgagctaaggccaaaaagcattaaaacaaaatgtttaagatatttaggtttaggtttttggttttttgggacagtcccactctgtcacccagggtggagtgcagtggcatgatcatagctcactgcaaccttgaactcctgggctcaagagatcctccctcccaacatgctgggataacaggcataagccaccacacttggtcttattttgtttttattacaggttgtagtaggctatgcttcatttttccatctgttgaatgggaaataaaaacacatacagccaatttgaataatgtttttgtttacattttataacttaaaaaatgtagggagaatttttaaactcccg

SEQ ID NO: 99777 - DNA, 1012 bp, Homo sapiens
ttttttttttttgttttaaaaagcattaaagtttatttttaaattacacaaaaagcactgtttaaacaatggttataactagtgaacattaagaaatcttgcaggcaggtggatgggattgaaatactctttcttgattttatagtttaagggccaaattgagcactgtttatgtctgcatcagctaccattaaaaactttgaggctgctggacactcagtaaggaatcagaagttttttaaaaagatgcaaatgaatggaatgtgtcatttcaaagcctgtttggtaaaggagaatggatgacccacctttttttaaatatttttttgagagaagggtcttggtctgtcaccaaggctgctcctgagttcaagtgatcctcccacttcagcttcccatgtagctgggaccacaggtgtgtgctatgccacacccagctaattcttaatttttttcatacagacaagagtctcactatgttgcccaggctggtctcaaactcctgggctcaagtgatcctctggcctctgcctccctaagtgctgggatttgcaggcatgagcccctgcccccaacccccatctcaattttgtatagaggctgtatagtctgagagacataaaagtttttgtagctcaacagacctagttaacattcctggcttcacccctttgtagttgagtaaacctctgcaaattattttctctgaagcccagtttccttacttgtaaaatgcctggtgaagtgcctggcaaacagaaggtattcaagaaataccagttcctctgtgagggtgtttttttcaagctaagggttgcaacccattggtagatatcaatttagtgggttgcaactggcatattttaaaaactgaaccattaaaaagcatcagaatggtaagtattgttcatttaacatattttaaggtttgatataaaagggttttttactgtgggttacagccaaaaggttttaaagtttttgctttacaaagaaattttccgattatgtt

SEQ ID NO: 99778 - DNA, 428 bp, Homo sapiens
  misc_feature (1)...(428): n = a,t,c or g
gcgatatatttttgagaaagtttttgctaaatactcagagctgactaacgatagtctgtcaatcctttcaggtaaaagtggtattctatggaaaaagcgacttagtttattcagctagcagtagtcatacaaatggttttccttgggagccatatactgtggtatgcattagaagcgctttttgggtacatccattttatcacagaataagtggagactgggtttcaccatgtcgaccagggtgggctcgaactactgacctcatgtgaaacgcttgcctcagcctactaaagtgctgggattacaggcataagccactgtgccgaatcacagagtactttgaaaaaatatattccagggtcaacgatctagtaaaagtgataatttgtagggctttatcaaggacattcttaatcaaaacgtggcgn

SEQ ID NO: 99779 - DNA, 529 bp, Homo sapiens
aagctgaggcaggagaatagcttgaacccgggaggtggaggttgtagttagccgagatctaaaaaaattttaaaaaaaaagagtggatttggagctacgagacaacagctgaatagctatactctgacataagaatttaatttcttgaaatttattcaatggaaataattacgaatgtttgtaagtgatgttctccacagcattatttataaagcagtgcagtgaaaataataaaaacaactggccgggctcagtgactcacgcctgtaatcccagcactttgggaggctgaggcaggaggatcacctgaggtcaggagttggaggcttagtctggccaaaatggtgaaaccccgtctctactaaaaatacaaaaaaatttagctgggcgtagtggtgcacacctatagtcccagcttctctggagtctaaggcagatgaatcacttgaatcagggaggcagaggttgcagtgagccaagatctgccattgcactccagcctgggctacaagagcaaatctccatctca

SEQ ID NO: 99780 - DNA, 375 bp, Homo sapiens
aatatttacaaataaacgtgtgtgtgtgtgcgtgtacacacaattcaatgaaatagatgtgaaacaagttttcttttttttttttttgaaaaaaaattttggttttgccccccaggtggaggggaatggcgaaatcttaagtaaatggaaccttttgcctccggggttaaaggaattttcctgcttaaccctccggagaggggggaattaggggcccttccccccactccaagaaaattttggggtttttagaaaaaaaggggttccccattgtaacccggggtagttccaaactccggaccctagggaattggcccgcctaacctccccaaggggtggagatgggggggggaggccccctcctcgggttaaaag

SEQ ID NO: 99781 - DNA, 352 bp, Homo sapiens
attttttctttctgcttttaaattgtggtttaaaaaaagagacagggggctgggcgtggtggctcacgcctgtaatcctagcactttgggaggccgaggcggttggatcacgaggtaagagttgaagaccagcctggccaacatggcagaaccctactaaagatacagaaaaaaaaaaaaacatgcgcctgctcaggttaaaagggccgcttaaaccctgttaaaagaccatccttgccctttttttttaccagcattttgtggttgcccctcccccgagcccttctttgcccttggagggggcaattccgagggaccttttttaaaaaaaaggggaaatgccctgccaagg

SEQ ID NO: 99782 - DNA, 1041 bp, Homo sapiens
ttttttttttgagacagagtctcattctgtcgcccaggctggagtgcagtggtgtgatcttggctcactgcaacctccgcctcttgggttaaaagaattctcctgcctcagcctcctgagtagctgggattataggcacacaccaccacacccagctaatctttttgtattttttttttagtagagacagggtttcgccatgtcggccaggctggtcttgaactcctgacctcaggtggtccacccgcctcggcctcccaaagtgctggcattacaggcgtgaaccaccgtgcctggccggaagtctttaaaaaataaagggattctactcttctaagcttacagagaccagaccaggtgaatgtaactggggaaaatcaagatggtacctctctgcattatcccgccagacactgtattttatgcattcatgtctaggatacagtgtgaaaattaaaaagtttagagggcagatgcaattgtggcaagtgacctgccaataaagcaggtgcagctatagaagctggcataggtatatccttaatggtgctttctccctgggcttgtctttttgttgtttttttccccctatattcagagctccttgagaagtgataaacacctccagctttctaacatcctccccacaccatctcaccatatccatctcccagcatccatctgcattcagctaagggcgggaaactgacctagtgcctgtgttgcagaccatttctgaggtctccaccatccaaggaggcacagccgtcattactgtcctccatgccttcagcagcccccctcacagctaaggtacataccaccccttctgccgcgcctccacccctggcaccaaggtcttctgctgcttatgtctaaagggatcacctatatttaactgcctcagtgacctaacctctttcttctcatgtgccagatgttaagatgaaggaggaatacaacacatactcaagcctcagcctgtttagttgttttcactgggggctcgcttttctggggacggtatttattatcagactg

SEQ ID NO: 99783 - DNA, 405 bp, Homo sapiens
ttcattctgccgagttcctgggattgcatgtgcgcgccgccactcctgactgggttttgtattttttggtggagacggggtttcaccgtgttggccgggctggtctccagctcctgaccgcgagtgatctgccagcctcggcgtcctgaggtgccgggattgcagacggagtctcgctcactcagtgctcaatgttgcccatgctggagtgcagaggcgtgatcttggctcgctacaacctccacctcccagccgcctgccttggcctcccaaagtgccgagattgcagcctctgcccggccgccaccccgtctaggaagtgaggagcgtctttgcctggccgcccatcgtcggggatgtgaggagcccctctgcccggccgcccagtctgggagtgaggagcac

SEQ ID NO: 99784 - DNA, 619 bp, Homo sapiens
ttttttttttttaaaaaaaaaaaggtttttaatgagtcaaatttattacaaaaacttagtgtgtaatcaaagccaaatacattcctcaggcatgccagcggcaagcaaaataatgttaatagaatgttattaaaaaataaaactttttctgaatgatatatataaaacatcatggcacattatcatcatttgacaacagaaaacaggaagatatgtttcaatactgactttttgttgtttcaataaaggtaaaaaaacaaaaatttcaacagaacacataaattagaaattctagagggtaagccataaagaggtgttctcttccatgcaactgccagccgggcatggtggctcactcctgtaatcccagcattttgggagactaaggcaggcagatggcatgagctccagagttcaagaccagcctgggcaaggtggcaagatcctgcctgtacaaaaaataaaaaattagccaggcgaggagtgcacacctgtagtcccagttactcagaaggctcaggtaggaggatcacttgagcccaagtcaaggctgaagtgagccaagatcatgccactgtactccagcctgggcgccagagcaagaccctgtctcgggaga

SEQ ID NO: 99785 - DNA, 385 bp, Homo sapiens
ggccgaggcaggcggatcactggaggtcaggagttcgagaccagggtggccaacatggtgaaaccccatctctactaaaaatacaaaaattagctgggcaagacagcgacactctttatcaaaaaaaaaaaaaaaaaaaaaggtccgggggcagggcctaagcccggaaacccaaccctttgggggggcgggggggggcaaatccttggaaacagggagggcggaaccacccggccaaaagggggaaacccccgtttttacaaaaaaaaaaaaattaacccgggggccaggggggccttttgaacccccagttgctcaggaaatggaggcggaaaaataattggaccccagggggcgaaatttcctgggccccaaaatggccccc

SEQ ID NO: 99786 - DNA, 499 bp, Homo sapiens
  misc_feature (1)...(499): n = a,t,c or g
agagaatntanaaagttctataaacttggttgataaagcaatggcatggtttgagaggattgactccaattttgatagaagttttactactgttaaaatgccatcaaacctcanatcaatcatcaatgcctgctgtggagaaatctttcatgaaaggaagagttaatcaatatggcaaacttcattgttgtcttatttttagaaattgctgcagctagccccaccacttttagcaaccaccatcctgattagtaaggagccatgaacatcaaggcaaanaggttattacttgctgaaggttgagatggtcattagcattttttagcaataaagtactttttgtaaggggtgagggcagagtcttgctctgtcacccaggccgnancggnnggcatgatcttggctactgcaacctccacctcctgngctaggtgattctcccatctagtctccaagtactngaccacggtaccatcccatgctcactaatttttgattt

SEQ ID NO: 99787 - DNA, 394 bp, Homo sapiens
aaactttataatagtacttaggtattatttgccttttttactacattaacattttcactgatggtacaaaaatattgatcggtaaaactgctggcactttttttttttttttttggggaaaatttttgttttgccccccaggttgaattgaaggggcccaatttgggttaattgaaccctccccctccagggttaaaaaatttttctgggttaaccccccaaagaagtgggaactgggggggcatcccccccccccaagcaaatttttttttttatttttttgaaaaaagggaatggccccattttcccaaggttggtttaaaactctggggttaaaccaatttgcctgcttaaccctcccaaagggtgggaatttaaggcgggagggacctcc

SEQ ID NO: 99788 - DNA, 388 bp, Homo sapiens
ctcggcctcccatagtgctgggattataggcgagagccactgtgcctggcccatcatgcctgtttattccttagtacttaacttttttttttttttggaaaaaaagcccccttttgttacccagcttgaagggcaggggggaaatttgggttaatggaaccctccccttcggggttaaagggaattttctgccttgggccccccaaaaagtgggaattaagggccccccccccctgcccgggttatttttggtttttttagaaaaaagggggtttaccaatccggcccgggcggttttggaaatctgtgccttaaaattggccattttaaccttccaaaggggttagaataacgggcggaacccttggggccaacccaatatttaatt

SEQ ID NO: 99789 - DNA, 2213 bp, Homo sapiens
aactcggggaagaaccttttactttcccgttcccctttttatgcatggaaggatggtgtgagcttttcagcaggcccggaaaggtacgcaggtgacgccttagcagccccgcagctggtgctctgccccgcggtactggcgccatcagggcctcccttgcccgcctgagagcagcagcagtctctgcatccgtcgccccttaccccccaccccaggccactgggcccctcccacaccacctggggagctgagaagaggaggctggagtaagggaggacttgatcatccaagaaatactttttattgctgggagtcttctgaacctcaccaaactgaggccagagctgagctcctgggggagttaattcagaggggagaggccagcacctccctcctccattgctcgctgtgtgccttaaactccatctcatgtccctccccatcccctggctttccctccctccttgccccatcctgggccagccagcagggctcctcctctggctcttcagacctttcagccagtgctgtcagtgcccctgggagggaagggcatccctgaggcacccgaatggtccctcagggtgcagggaggcagaagcctggccacagaggagcctcctaaggcagcagctgcagcaagcgcaccctctccccactctccccacgccagagcggcttccagagcagatgctgtttccatcctcctcgtcaaaaccattctcgctgctgagcttgacaatctgggcaaggcttgtggggcgcttgacaaacagaatctgccctgtgccgcctggttccgtggcctccagcatgagcctgcaggcagggcgctgcgggaacccagttgtgctgccccagcccatgcctccgggtctgctgtgcatgaatgagtgctcacttgtcccgggtttaggacgtggtcaagtgaacagcagggtctaactgtgcttacttagcccagttcaaacagaacaaaggaaaaatatagaaagcaacatctgttgatcatttaggtttttttttaaaccaccatgtcactttgagtccttcatgggtttttgaacagcatttatcaagaagaaaatgtgggctttttcccctctcccgtgttttgtttgtcctgtagatagagggaggaaagccgtgcagtggcaggcgggaccccctctggtggcgggaccccctcttgcggtggtcttgcggggccagccgggacctgtcactttattatttaaggagtgtgtgtgtagagtcgctggcttattaacagtattgtgtgtgggttgggtttttagtttgttccttctttttgaagtcccttcatttcaatccttgactctctctccccttcccttgcccagctctgttgaatgctgctgtgcgcgtgtgagggccgctctgcacacagggcccttgggttgtgtgaactgaaattctccctgtatttgtgagactcgcaggagtccccatctgtagcacaggcaatgccagtgccatgctgcagcctcagaaaccaggcctctcactccagcagcaggcagaaccgtgtctgtggtcgggtgctgtccacagctctgtctgccttgttcttgggcttgagctggatagaggtggggtctcttcaccttccctgaattcagaacagaccctgtgcctggccccagtgtgcccaggcaattccccaggccctcattgggagcccttggtgttctgagcagcagggcccaggcagcacatgagcagtgcccaggggctccctgcgtgaggacggcaaggtgcgatgtatgtctaacttattgatggcaggcagccccctgtgccccctaagcctggccctggttattgctgagctctgtgctcagtgctgcggcctggccgtggctcgtctgttcctttggggggcccgggcgggttgtgggaatcagtcttcacagacagacgtgagccaggcggaggactcgttccttgcagaggtcagtcctcacctgcaggtgtcggggtgggggggggcaaggaggggcaggcacacaccatgtctgacctgaacccgattctggggagcatcttcccgctccggccccacgacctccacagggttacattgtaatatatatgccccagctaacctgtctgatggtggcatcttcctgcagacatttcaaacatgtaacttttatatgaaaaaaaataaacacagatgaaagctgccc

SEQ ID NO: 99790 - DNA, 425 bp, Homo sapiens
  misc_feature (1)...(425): n = a,t,c or g
ttcttttacaaatgtaacagtttgtatttccattcacctattgaaggatatcttggtttttgcttttttttggccattatgaataaagctgttataaatattcacatgcagtttttttgtggatgtacattttcaacacagttggatacctgggagtgctattgctggatcatatgctagactatctttggctttgtgaaaactgccaagctgtcttccttaatggctatactattttgcattcccactagcattgaataagaggtccttttgctccatatccttactaacatttggtattgccagttaatggacgttagccattttaatacctgtgtagtgttacctcattgttattttaatttgcgggtccctagtgacacatgatatgggtnatcttttcatattcttctttggtcatgggg

SEQ ID NO: 99791 - DNA, 370 bp, Homo sapiens
ttttaataaaaaaatagaaactcctatattacaaaatatattgcgtattgatgtcacaatggaaattttacaaacacaaactttataaaagggtgttaagccaattccagatgaagcaaagacatgaaaacaggaaagttctagaaaaagtctaaataaatgtattcatattctatgagtgaaaaagataattcaaaaggatgtccgtaaggctgggcacagtagctcacgcctgtaattacagcacttggagagggtgagatggggggactgactgagcccaggagtttgacaccaccctgggcaacatggagggacctcgtctctacaaaaaatacaaaaattagtacggcgtggcagtgcccaccta

SEQ ID NO: 99792 - DNA, 407 bp, Homo sapiens
  misc_feature (1)...(407): n = a,t,c or g
ctaggacattgaaacaatggtcatcatggtattctaatacctaaaatagcgttagcatagagaaaaggaattagataaatattagtttagggccaagcacagcggttcacacctgtaactccaacactttggaaggcccagggtggaggagcacttcaggccagaagtttgagaccagcctgggcaacacaatgagaccccatgtacacacacacacacacactaaataaatcacatatcaaatattataaagtttcgcgggcatggtggcatgcccctatagtctactctggaggctgaagtgagaggatcgcttaagcccaggagttaaggtttaaatcatgtgggccatgattgaaccatggcactccagcccaggtgacagagttaagaactccgtcttaaan

SEQ ID NO: 99793 - DNA, 376 bp, Homo sapiens
  misc_feature (1)...(376): n = a,t,c or g
gaagacttttataaaaggcctcaagaaaaatgcaaattgaaactacactgagatactatctctcacctatgagactggcaaaaatgcaaatgcttatcaacacatcctgttggcaaagtcacaggaaacgagaacactcatatgttagtggtaggaaggcaaaatggtgcaacccctcagcaaaggaatttggccatatctaatacaagctgagtatccctaatctgaaaatctgaaatccaaagtgcttcaaaatctgaaactttttaagcattgacatgacacccaaagaaaatgaccagtgaagcatttcaggtttcagatttttggatgaaggatatttgacccatanagtattatgcaaatattccaaacc

SEQ ID NO: 99794 - DNA, 381 bp, Homo sapiens
aaaggaaaaaaaattatattaaaaagttgcctgcacttgtatgtttatcacagtactattcacaatagtaaagttataaaatcaatctaggtgtccatccacagatgactggataaagaaaatgtgctgtgtgtgtgtatctatagtagtgtgtgtgtatgtttgtatgtatgtatagataggtagatagagaggcatgatatatatgtatatattatggaatactacttagccctaaaatgaatgaaattatgttttctgcagcaacacgggtgaaactagatgccattatctaaagttaaataactcagaatgtcaaatgctgcattgtttcaactcatagtgggaacttaattatggtttccacttagatatacaaaa

SEQ ID NO: 99795 - DNA, 511 bp, Homo sapiens
  misc_feature (1)...(511): n = a,t,c or g
ggcacgagggaattaaacagactgattccagactgtatgtaatcactaagctatatatctagtaaaaatagtaagtgatacaaaactaaacatagttttgtggtaaacatgatcagcagtcacactccttgttatttacctaaatgatttgaaaacttatgtccacacaaaaacctgtacacaaatgtttacagcagctttattcataattgccaaaatttgaaagcaactaagatgtccttcatcttatctggataaactaatgctaaaaagaaatgagctatcaagccatgaaaagaagttatgcgaggaacttatggagttccaagaagttatggaggaaccttaaatgtttgttactaagagaaagaagccaatctgaaaagtctgcatattgtgtgattccaactatatgacattctttaaaaaggcaaaattatggagacagtaaaaggatcaaagttaccatgggtntgaggaagaanggtgaatangtgagcacagagaattt

SEQ ID NO: 99796 - DNA, 513 bp, Homo sapiens
  misc_feature (1)...(513): n = a,t,c or g
ggcacgaggtgactagcangggcagggactgttttcctactgttggtagtagcacaggttcttgaaccctactcagtctctgcagtgagtgactctcccaggtgtcattctgactggaagtcaagagctctggatgtcacaggcctgtgatgtgggttgcttgctcattgagcttggaggtggattttcatactaaagtacctgatgcatttttttttggccattcctccacctgatgctaatgcttttaatagtggtagaatcctgggcaacatagcaagaccctgcctctacaaaaggaaaaaaaaaaaggctaggcacgggggttcacactcgtgatcccagtgctttggaaggctgaggcaggaggattggcttgaggccacaaggttgaggctggcctgggcaacatactaaatctcatctcttaaaaaaaaaaaaaaagccaaaaccataggcgcctatgccctggctctttgggagagagggggagattgcctgacccagacctta

SEQ ID NO: 99797 - DNA, 419 bp, Homo sapiens
  misc_feature (1)...(419): n = a,t,c or g
ggcacgagacaggtctagacagcagtctgaaagggggctcaaggaagtagctgtgaaaggcccctgggatgttttctgctcccctttctgcaaatcccctggagggagatcctgttagtcactacgggatgtgtgtgtgtgtgtgtgtgtgtgtgtgtgtgtgtgtgtgtgtgtaanacatcacttggcgcggggggggggaagagacaaccaccacctacagaatccatagctctcagtatatctcccatcctagcccaatcatgggctaacattcttatctaccgatcgcagaagagactgcgcatttgtgttcatgtggccttggatggtgacaaatacagattggcgccccacgcatgtgtgctgtaactgcagtttcagcgggctcaagaccacgctaaagggcctccactctt

SEQ ID NO: 99798 - DNA, 259 bp, Homo sapiens
caggaaccggccatctggatgtgtaccctccactgtgagagttacgcgaagctcggcatccgtgatggtcttgtagggggcttccgaggcgatcgggcagcatcagtcttcagccgctaagccaagaagatgtgggaagcagtcagagagccttgggccagaattccaggggcgctgggagtggctgccaggtgagttagacagtccgatttccagtggggtcccgcacagatgggactcagcttaggaggaatcctga

SEQ ID NO: 99799 - DNA, 566 bp, Homo sapiens
  misc_feature (1)...(566): n = a,t,c or g
ggcacgagggagaagataccaccttgatggatggaagccttaaggtaaagatgctcattctccccacactgacctgtacattccccacaggcctaatcaaaacccccacaggcttctgtgtagaaattgacatgctgatcctgaaatttatatgaaaatgcaaagagtctggaataaccaaaataattttgtaaaagaacaaagaagacttctactacctggttataagacttctctgaagcacagaagtcaaggcagtgtggtggtggcataagtaatgtaaatcatccaggtgtggtgctcaagccagtcatccagcactttgggaggctgaggcaggagaatcgctagagcccaggagttggaaaccagcctgggcagcatagcaagactcatctctacaaaaaatacgaaacaattagctgggtgtctgtagcacatgcctgtagtcccantgcgcgggaggctgagctgggaagatcactttagcctgggaagtcaggggagctgtgatcacaccactgcactccagcctgggcaacagagcaagaccccatctcaaaaac

SEQ ID NO: 99800 - DNA, 495 bp, Homo sapiens
ggcacgagcctgtagtaatctcaacaccttgggaggctgagacaggaggatcacttgaggccagaagttttagaccagcctgggcaacatagggagatcctgtcgctataaaaaaaaaaaaatagctaaccattgttggggggcctgggaaccaaaggggggggcaggaggattgctaaacccctggaggttgaggctacagggagccatgagggcttccttgcactggggcctgggggccaaagggaaaccctgtctcaaaaactaaaaaaaaaaaaaaaccattttggggggaccctgtctttttgggagcccctttgggaaacaaagggaaaacacccccccctcctcccgggctggaggggattatcggaaaagggccttttgtttaaagtgggcccggccccaggcctcatgtttttaaccccacccttttttaaacccgggccaaaagaattaattgaccccaggatttcaaaactttcctggcaacaa

SEQ ID NO: 99801 - DNA, 462 bp, Homo sapiens
  misc_feature (1)...(462): n = a,t,c or g
atgtaacagcaggaataataataattttcatgatttgagaagccttcgcttcgaatcgaaaagtcctaatagtataagaaccttccatatagtcactccaggtttatggaggggtcttctactattaggaagccccccaccctaccacacattggaagaacccggatacgtaacatctaaacgaaaaaggaaggaatcgaaccccccaaagctggcttcaagccaaccccatggcctccatgactttttcaaaaaaaaaaaaaggggggggccttttaaaagaatcctggagggggccccttttggagggggttggggacatagagagtttttcccttaatgagagacttattaccctctctgcacggccgggtgattaaaccatcggtatgggaaaaattgggacagttgggatttttgaaaaagacccttacttttggggggagcataatgtggacaacn

SEQ ID NO: 99802 - DNA, 494 bp, Homo sapiens
attgaagcgatcacttttctccagattgatcacagaatcagtcattgtagttccagtaaaaatcccaacaaaattttttttgttttgagacagagtctcgctctgtcacccaggctggaatacagtggcaccatttcagctcactgcaacctccacctcccggattcaaggttatctcctatttgatctaaaatcaaatttttctggttatccctaagatttcttttgtaacggccctccctgcagctgaggtccaatcaggttcacatattacatttgtgtaatcccaagtagctgggattacaggcgcctgccaccacacccagctaatttttgtgtttttagtaaagacggtttcgccaggctggtctcaaactcctgacctcaggcgatcagcactttgggaggccgaggtgggcggatcacaagttcaggagatcgagaccatcctggccaacatggtgaaaccccagctctactaaaaaacaaaaatt

SEQ ID NO: 99803 - DNA, 413 bp, Homo sapiens
ataaaagggtatttctgtgttaatttggtttggttgtttttgtttgtttgttgagacggggtctcactatgttgctcaggctggagtgcagcgtcatgatcatggctcactgcggcctcaactttctgggctcgagcgatcctcccagctactcaggaggccgaggggggaggatcgcttgggcctggaaggcagaggttgcagtgaaccaagattgctctactgcactccaacctaggtgacagagtgagactccatctctcaaaaaaaaggagcgaaggaacttcataaaaaggggccgcccgttttagagaacccttggggggcccaacttttaccggggaaggcaaggaataagttcttcccctaaggggagtggacttacaagaaggccgggccggccgttacacaaa

SEQ ID NO: 99804 - DNA, 403 bp, Homo sapiens
cagtcttcttctgccattagttcaactgcctttacgcttgtgtttttttttttttttgaaaagggggtttaattttggtgccccagataaaagggaatggggggaatttgggttaattgaaaccttggcttccggggtaaaacaatttttcgggccaaaccctcaggagaagtggggattaaaggaaaaccccccatggcggggtaaatttggttttttaagaaaaaacggggttttccaatttgggaagggggggattaaaacccccaccctcaggaaataccccggcctggccccccaaaggggtgggaataacaggggggacccccccccccccaccggttttttgttttttgggtttttgtgaaaatacaaacctaagggccaaaaaaaaatttattgt

SEQ ID NO: 99805 - DNA, 425 bp, Homo sapiens
gaaaatggagcagacactttggaagacagattgggagtttcttacaaaactaaacatactctatccatacagtccagcatttgcagaccttggtatttacccaaatgagctgaaaacatgtctacacaaatacctgcatatagaagtccatagcacctttattcatagttgccagaacttggaaacaaccaggatgtcctttaagggatgggtgtctaaataaattggggtgcatccaggctttggaatattattcaccatgaaaaagaaatgagctatgaaaccacaacatggcatacaaaaaacttaaattgatattcctgctgaggcaggaggatcgcttcagccttggagttcaagaacagccgaagcataatggggagatgtaatctgtcccaatcaaacgaaacagaaaaacaagtgaa

SEQ ID NO: 99806 - DNA, 420 bp, Homo sapiens
  misc_feature (1)...(420): n = a,t,c or g
cccacgcgtccgggctgcagtgagtcgagattgtgccactgcactccagcctgcataacagagctagaacctgtttcaaataaataagtaagcaactaaataaataaataaactagcaagctttgtaagttgaatttaaaagcttgaagactggatatggtggctagtgcctgtaatcccaggtatccaggaggctgaggcaagagggtaacttgaggtcatagtttgagatcagctgaccggcctgggcaacatagtgagacactgtctctaaaagaaaaaaaaaaaaaaacaagggccgggggggggggctcacccctggaatcccagccttttgggaggccggggggggggaatcatgaaataaggagttcaagaccaccctggccaacatgggagaacccccttttttataaaaan

SEQ ID NO: 99807 - DNA, 1523 bp, Homo sapiens
  misc_feature (1)...(1523): n = a,t,c or g
ctaggtatgggcaggaggggtctgagcaatatggcttgctgcctggaaggatattgataagatgtccccatgatgaggtggttctgacccttgttccggcagaatgtggtactccttgtactttctcccagcagaatatgataagaggcaggctctttcttcagttgggcctttgtccaccttgtggtcaggtggtttatcaaggcccgaacccccatgaattgtttcactttgaccaaggtctgtaataccagcactttgggaggccaaggcaggcagatcacttgaggtcaggagttcgagaacagcctgggcaacatggtgaaaccctgtctctactgaaaatacaaaaattagctgggcgtggtggtgggtacctgtaatcccagctacttgggatgctgaggccaggagaattgcttgaaccccaggaggccagaggttgccagtgagccggagatcatgcccattgcactccgactctgggcaacagagcaagactctgtctcgggggaaacaaaaaaaaagtgtgctttgtcaagagaagcaccagcagacctctaagaactgctctctaaggctgcggtagcaaattatctactattgcaggtgccttattggtagagggctctgaagagccaaaactgtatatgcaacacttgtaagataaaagggactttaataatcaagattttcttgaagatttgttagaaataatgtcttatttctggtaacctttccctttttgtatttataactctactaaccaaattacctatcaataaaccattactataatattttaaaacaacctatgtttatcaagcttactctctgagtgacagaatatactaaataaagaattttttaatgaactttggctggaagcaaggttaatcctttaaaggaggaggacaggagaacttaaacctataaatagattaggaagacatgtttcatgcttatgttcagattgtatgagtagtgaaatgccttcatgtgacataaacattttgtgatactagaactatgcttattaagagaatctgnnnnnnnnnnnnnnnnnnnnnnnnnnnnnnnnnnnnnnnnnnnnnnnnnnnnnnnnnnnnnnnnnnnnnnnnnnnnnnnnnnnnnnnnnnnnnnnnnnnnnnnnnnnnnnnnnnnnnnnnnnnnnnnnnnnnnnnnnnnnnnnnnnnnnnnnnnnnnnnnnnnnnnnnnnnnnnnnnnnnnnnnnnnnnnnnnnnnnnnnnnnnnnnnnnnnnnnnnnnnnnnnnnnnnnnnnnnnnnnnnnnnnnnnnnnnnnnnnnnnnnnnnnnnnnnnnnnnnnnnnnnnnnnnnnnnnnnttttannnnnnnnnnnnnnnnnnnnnnnnnnnnnnnnnnnnnnnnnnnnnnnnnnnnngcaacgggcgcggcttttaacaaacggggggatgggaaaaaacctgggggtttcacccaatttaattccgcctggggagcaaaggnnnnngtggttgnggggttgtgttttgggggggttc

SEQ ID NO: 99808 - DNA, 496 bp, Homo sapiens
  misc_feature (1)...(496): n = a,t,c or g
ggtgtggcaatgagccttngactgagagcatgggagaccgnccggattccgggtcgacccacgcgtccgcccacgcgtccgcttgaactcctgacctcgtgatccacccacctcaggaagtgctgggattacaggcgtgtgagccaccacgcccggccatgaaatatttttacttaaaaattgggaataagctttttggttttttgggggtttttgtttttgttttttgttttttgttttttttttttttggaaagggggttttcttcttgttgcccaggttgaagggaagggccaaagtttgggttaattgaaccctccccttctggggttaaagaattttttttttttaaccctcccgaggggtgggattaacgggcttgcccccccccccggggttattttttgggttttaataaaaaacggggtttcctttttttgccgggcgtgggttcaaacctctggccttagttggatcaaccgccttaaccttccaa

SEQ ID NO: 99809 - DNA, 421 bp, Homo sapiens
  misc_feature (1)...(421): n = a,t,c or g
cagagaggcaggctcacagcgatatcgcgagagacgagtttcactctcgttgcccaggctggagtgcaatggcatgatcttggctcactgcaacatctgcctcctgggttccagggattcccctgcctcagcctcctgagcaccaacagggaattgctctgtcacgcaagctggagtgcagtggtgccatctcggctcactgtgacctctgcctcctgggctcaagccatcctcccacctcagcccttcaagtagctgggattacaggttgtaaaaaccccatcagggcagtgactgagtgtgtgtcactgtgtgcagcatccccagaacctaataccatgactgcatggaacaagccccccgatattagaatgaaggagaccctcttgttgcccccgtccagttctgagaaaatgctgcn

SEQ ID NO: 99810 - DNA, 432 bp, Homo sapiens
atgcctattgtatagtaaaacccagcccatgacccctaacaggggccctctcagccctcctaatgacctccggcctagccatgtgatttgacttccactccataacgctcctcatactaggcctactagccaacacactaaccatataccaatgatggcgcgacgtaacacgagaaagcacataccaaggccaccacacaccacctgttcaaaagggccttcgatacgggataatgctatttattacctcagaagcttttttcttggcaggatttttctgagccttttaccactccagactaggccctaccccccaactaggaggggactggcccccaacaggcatcaccccgctaaatcccctataagtgccactcctaaacaacgaacgaataactcgcataaggagtatcaatcacttgagctgacaaa

SEQ ID NO: 99811 - DNA, 895 bp, Homo sapiens
ttttttttttttaagaggaaaacccggtaatgatgtcggggttgagggataggaggagaatgggggataggtgtatgaacatgagggtgttttctcgtgtgaatgagggttttatgttgttaatgtggtgggtgagtgagccccattgtgttgtggtaaatatgtagagggagtatagggcctgtgagcctagtattgttgagtccctgtaaggtaggagaagtgatatttgagtcaggagaaccgttggttactagccacagagcagttctccccagtagggttaataagtgggggggtaaggcccatggttagcgaaggcttgcctaggaagtcactcaaaaaggcctataagttggagttaggagtttgaaagtccttgagcagcaggatttatgcatgcgcactgtgaagtgcgttccgtaattttgaagtttgcctaggcagaataagtaatgtaggcatgataagtcccgtgggcgattattgagaattgacctgcgccgttgaagcttccaggggggtttggatgagaattggcgttaactacgaggggctatgtgggctgatttgaggagtatgccatgagccgattttaggtcttgtttgtcgctaggcagatgggagcttgttataaattatgcctcaataagggatagtacagggaaggggtaggctatgtgtttttgtcagggggtttgagaatgagtgtgaggccgtatataacattagcccgccagttttaagaagtactgcggcaagtacaattaacccagcgaatgggggcttcgacatgggctttaaggagtcctaagtgggagtccgtaagagggatccttccactaaaagcaatttgtgtagccagttcaaattagttgttggcccaggaatttgc

SEQ ID NO: 99812 - DNA, 405 bp, Homo sapiens
ataatataatcctatagcttttcacatgtactgggaattccaaagacagaccttctttggaatataacatagttatgctcttgtttacaatcccgtgggaattagggtaaaagtccatctttctaaatgtatattatatacttggcatatttcaaattctagtcaagaagtatgtgagatgcctaatttaaacttgaaacgggtcccaactacactagctccaaggttttaaaacattagttagggaataagtcagctgggtgcagtggctcacacctgtaatcccagcactctgggaggctgaggcaggtggatcagcagttgaagaccagcctggccaacatggcgaaaccccatcttttgttaaaaaaaaaaaaaaatttcccaaattttcccaaacggggg

SEQ ID NO: 99813 - DNA, 591 bp, Homo sapiens
aaagaggtaaacacaacaaatagccttcctctgcatgaaaagtgagagaaatacatactttgaaaagaaagttcagatttttaatttgagagggtttttatttcatggaggcagtgttaactaaaattaagcttagatttagctcctgtattattcataatatgagaaattttattaaaggcagactttggtaaaagtgccaacacacttacttgtatagaaaagacttcattctatgggatttatataagtaagtgctttctctatattcaaaatatttcataaggacctgtggtttttttccccttaaaaagcaactctaggccgggcacagtggctcatgcctgtaatcccagcactttgggaggccaaggcaggtggatcacttgaggtcaggagttcgagaccagctggttaacatggtgaaaccccatctctactaaaaatacaaaaattagccaggtgtggtggcacgcgcctgtaatcccagctacatgggaggttgaggcaggagaatctcttgaacccaggaggtggaggttgcagtgagccgcaattacaccactgcactccagcctgggtgctcgtgcc

SEQ ID NO: 99814 - DNA, 300 bp, Homo sapiens
gaaattttaaaacaatatctgaagaaattaattttctgaatgagcttaacagaaaattagaggtggcataagagtcagcgaaattggggacagaccacctcaaattacacaatctgaaaaacctttagaaaaaaattgaataaaaatgaacagaggcctggtgtaggggctcatgcctgtaatcctagcactttgggaggccaaagcgggaggatcacttgagcccaagagttcaaaaccagcctgagcaacatagtgagaccctgtctcaacactttaaaaagaaagaaaaaaaaccgg

SEQ ID NO: 99815 - DNA, 417 bp, Homo sapiens
aaattattttcctgggatggaagaaatgtgaaagagaaacagccatgcttgcaggaggtattgtcctctgctttatttagcttagaaaatcattcctttttttttttttccggggaaaagggttgaaaccaccgaaaaccgggggggcttgggggttttcccccacaaaaaaggggcaagggttcccccggttggtaaaaaaaaagggggttttttaaaaagggggtaaagggggaccaaactttttttaaaaacccccccattttttggaaaaagggcgggcccggggttttgtcggaaaaggaaaaacctggaaccggtttggggaacccccccccggggggggggaactgttctctcgggcccgctgggggggccccctaaaaaagggggcgggggggggcccctggtctgtgt

SEQ ID NO: 99816 - DNA, 474 bp, Homo sapiens
  misc_feature (1)...(474): n = a,t,c or g
nattgagatcttgaaaggactggacggacttncngaaangaccgacgcgaccgaaacatttcactttacatccaaacatacactttggcttctaagccgccgcctgatactggcattttgtagatgtggtttgactatttctgtatgtctccatctattgatgagggtcttaaaaaaaaaaaaaaaaaaaaaaaaaaaaaaaaaaaaaaaaaaaaaaaaaaaaaaaaaaaaaaaaaaaaaaaaatgggggggggcggtataaaaaaaaaccccgcgggcccccaaatttccgccgcctaaaaaaaaattttttttttttttttagggggggaaaaaaaaacccctcggggttatttgaaaaaaaaaacctttttttgggggggcaaaatatggcccccccccccccaaaaaaatatatccccccaaaggaaaaaaaattttttttcggggctcctgtgttccccaccccgccca

SEQ ID NO: 99817 - DNA, 504 bp, Homo sapiens
  misc_feature (1)...(504): n = a,t,c or g
cgcgcgaaaggttatgatcgtgcgantangaggacatcgaanngcccacgcgccgccacgcgtccggaaggttataggacactaagcttttttcacccagagatgtactaactcgagacattgaataataaaattcccaaaggacaaggataaagcaaggatactaaaaggagcaagagaaaagaaacaacatacaatggagctccaatatggctggcagtaaacttttcagtagaaaccttacaggccaagagagtggcatgacatgtttcaaatgccgaaggaaaaaaccttttaccttagaatactatatccaatgaaaatatccttcaaacatgaaagagaaataaagactttcccagacaaacaaaagccaagggattttatcagctccagacctgtcctacaagaaatgctaaagagctggccaggtgcaagggttcacaccggaaatcctacccttttgggaggctgaggtgggtgattacctgaggtcagaagtgg

SEQ ID NO: 99818 - DNA, 447 bp, Homo sapiens
cccacgcgtccgagtcagtacaaacacaatgtcatctaaaatgctacaaaggtataaaactcaaaagagaaattttatacctttgtagcattttagatgacattgggtttgtactttgttgggtacaggggaagaattgtgttgaataaacccaagatcggaatgcaaatcttagaaaaaaaaaaaaaaaaaataaaattgggggggggggcttttaaagatcccttgggggggccaaattttccggggggggggaagctttgatttttttcttttaggggggggaatttaaaacatcgctggggttttttgggaagaaccctttttttgggggggggacattttgggcccccctccctccagaattttaggccttttgggaaaaataaaatttttaagggtgataggggtgaaacctaccggctttgcttttcgtcttagaaattt

SEQ ID NO: 99819 - DNA, 448 bp, Homo sapiens
ctaatgttagtataagtaacatgaaaacattctcctccgcataagcctgcgtcagattaaaacactgaactgacaattaacagcccaatatctacaatcaaccaacaagtcattattaccctaaaaaaaaaaaaaaaaaaaaaaaaaaaaaaaaaaaaaaaaaaaaaaaaaaaaaaaaaaaaaaaaaaaaaaaaaagggggggggggttttaaaaaaaaacccggggggggcccaatttcttgggggggggaaaaaattattttttttttttttggggggggaaaaaaaaacacccttggtattttttaaaaaaaaacattttttggggggggggggaagtgggcccccccccccaaaaaaaaatgagtttttgggggaaaaaaaaaattttttgggggttgaggggggaaaaactccatcatctcttgtgccggaagaaattttcaa

SEQ ID NO: 99820 - DNA, 440 bp, Homo sapiens
tagctaaataaataaataaataaaagcctctcaaggttatgaattcagggacttgccatcaaactatgcgtatggggctataatactggagggattaaaaaaaaattataagcaggcagctcagccccatgtaattcttattcttcctgatgaggacagcagggcttctttttctttttattttctgaggcggagtctcgctctgttacccaggctggagagcctcggttaaatgtagcctccgcctcccgggctcaagcgattctcgtgcctcaacctttggagaggctggaattgcaggtgtgcaccaccacactcaactaaattttttgttttggttgcatttttaggaaagatcgggattctctatgttggccagggctggctcgagcttctggccctaaaagaccccgcctgctgggccctctaaaatgctggat

SEQ ID NO: 99821 - DNA, 420 bp, Homo sapiens
  misc_feature (1)...(420): n = a,t,c or g
tttgttaagcatggtgcttgtactggtttaaataaaatgttaacattaaaagacaaaaaaaaaaaaaaaaaaaaaaaaaaaaaaaaaaaaaaaggggggggccctttttaaaaaaccctgggggggccccaattttccccgggggggaaaaaaaatttttttttttttttggggggggttttaaaaacccctttgggttttttggaaaaaacccctttttttgggggggggaatttttgccccccccccccccaaaaattttaggcctttggggaaaaaaaaaattttttagggggaagggggggaaaaaaccctttttttttttggcggggaaaatttttttttcccgggttttttttaaaaaaattttccccccggcggcgngggnnnnnnnnnnnnnnnnnnnnggnggggcagcgt

SEQ ID NO: 99822 - DNA, 447 bp, Homo sapiens
aaatttacctcatatcactattggtttgatcccacaagttttaatgttttcattacattttaattctaatagtttttattttttgagacattctctcttagccatgaattatttaatagtatgcttaattttctggggtttggcatatttgttactgatttctaatttgttccatgtttgatctgactgtttaaatgtgttaacatttttttatgacccaggatagggtctatcttgtttcgtatagctgcttgaaaagaatgggtgttctgctgttactgggtggagtttctataaatgtctctatgatcctgctcattgttattcaagtcagctatgtccttgctgattttctgtccagcatttctgtcagttgctgagaggggtgttgaagtcctgagcataggccgggtgcggtggctcacgcctgtaattctagcactttga

SEQ ID NO: 99823 - DNA, 455 bp, Homo sapiens
  misc_feature (1)...(455): n = a,t,c or g
catggatcaaggaataattttgactttgaatcttattatttaagaaatacattttgtcaggccatagttgccagagatggtgattcctctgatggatctggacaaaggaaattgaaaaccttttggaaaggatttagccttctagatgccattaagcatactgaggattcatgggggagataaaaatatcaacaggagtttggaagttgattccaatcctcgtggatgactttgaggggttcaagacttcagtggaggaagtgcagatgtgatggacctatcaagagagctagaattataagtggagcctgaagatgggactgaattgctgcagtctcacagtcaaacttgaatggatgagaacttgcttcttacggataaagagagaaaagtggtttctttttttaaaaaaaatgtcattaatttttgggggacaaagtgggtttttgtttcan

SEQ ID NO: 99824 - DNA, 381 bp, Homo sapiens
attttcacacttacaattctttacttgtctgtcattcaaatctttgttaccaaaacagtttgctctttttcatcattcactaagcattcctttcacagctaagctaaagtgtctatatggaaacatacatatacacacacacacacacacacacacacacacatgcacacacactttttccaggccacagacaggaagatatgtgtaaatgtatacatgttttcagtagcatatatacacaagggtctccaataagatttttctagaaacaaaggctgatactacttcatttcatattattggaaagcgctaattctaagtaaaagtagactaaaaaagagataaaaattaagaataaaatgggggggctctcacaccttg

SEQ ID NO: 99825 - DNA, 381 bp, Homo sapiens
taattattacattttgactaccacaactcagcgggtacatagaaaagtccaccccttacgagtgcggattcgaccctatatcccccgcccgcgtccctttctccataaaattcttcttagtggctattaccttcttattattggatctagaaattgcgcctccttttacccctaccatgagccctacaaacaactaacctgccactaatagttatggcatccctcttatgaatcatcatcctagccctaagtctggcctatgagggactacaaaaaggattagactgagccgaataaaaaaaaaaaaaaaaaggggcgcccgttttaaaggatccttgggggggcccaggttaacccgggctggcaagagaatagttcttt

SEQ ID NO: 99826 - DNA, 403 bp, Homo sapiens
cccacgcgtccgcacgtgggttcattcgacccaaaaccaatggagatgagcattggtctctatatgactagcctgagccatgcagatggcaggtcttcatccatcagccaatggacagtcactgttcccttatgtccaggaaggcaggaacagtggcacacagaaggacaactggccttcaaagaacccatagaagagatgagcttaaaaggaatgagatgaaggctgggtgtggtgggtcatacttgtaatcccagtgactcaggaggcctaaacaggaggattgtttgaggccgggagtttgagaccagcctgggtaacatagtgagacccctgtctctataaaaaaaaaaaaattaaaaactagccgggactggttaattagcttacatctgtcgccata

SEQ ID NO: 99827 - DNA, 393 bp, Homo sapiens
cccacgcgtccgcccacgcgtccgagtagatcgagcggccgccctttttttttttttttttaaaaacaaaacttttttggccccttaattttaaaccttttttttttttggggccccaaagaaaagggggggccccccgaaaattttgaaaacccccctaaaaaaaaaaaaaccccccttttttttgggaaaaaccaatccccttttttttggggaaaaagatcccccccgggggggaaatttttggggggccttggaaaattttaatcggggggggaaaaatgggaagggggggcaaagctccccgggaaaaaccctaaaaaagggggggggcccaaagaaaaaaaaaatttgggccccaagggaaaaactttgggatggggaaaaaaggca

SEQ ID NO: 99828 - DNA, 1066 bp, Homo sapiens
catcacttctcagctaagatcaagtgttaaaataaataaataaataaataaataccaagttatgagtgtcagagcaggggagccctccacgcagccacggagccagtctgagggaagaggtacataggatagaaaaatctctaggctccaacgcttctgcttcggtgtctttccatttcccagggtctatgtgttgccttctcttcattttccagcaaaattccttttgagatatgttggccttcactcggctgaactagggggtgaaggaaggttgtcctctgtgggccactattgctggggaaacagctaaaccctgcaggccaagtggaacttggaggtgccaagaaaacctataaggtgcaatggggctgcgacggatagaggtgtcaaaccagaagggaggaacccgtcggaggtgggctgtgaccaccggaccttttcataagtggtggcagtggtagaattgagggggcaagtaggcttggagaatgtttttagccaggggctgttgagagatggcagaagggggtcttaatgtggggactgtggacagtggggcattcgtgggaaccagagggattttggacaagtccagatggaatgtgcagggcataggtagagggaaaagaaaatccctttctgggaaaaccatttcttgtttattgaaacaatgcaggacatcatcaaagtccgggtggacacattccattatctacaaattacaaaggtaggcacagcaaagaataatgaagattataagaaaaccaagcgccaggcacggtgactcaagcctgtaatcccagcactctgggaggctggggtgggtggatcactcaaggtcaggagttcgagaccggcctggccaacatggagaaaccccatctctactaaaaatacaaaaattagctaggcgtgggggcgggcgtctgtggtcccagctacttgggaggctgaggcaggagaatcatttgaacccaggaggtggaagttgcagtgagctcagatcgcaccattgcactccagcctgggtaacaagaatgaaactccatctcaaaaaaaaaga

SEQ ID NO: 99829 - DNA, 389 bp, Homo sapiens
  misc_feature (1)...(389): n = a,t,c or g
cccacgcgtccgcccacgcgtncggttagatcgcgaggcggcggcccttttttttttttttaaaagagacccccggaaaacttttatcaccccgccccctgtttcgggggaaaggcaaatccggaggggacctacttgtaagtgggggtttttgggcctggtggggcggggcggcccacctgagggagaaaaatcgaatttgttgttatggaacccgggcccccccttggggccaaatataaaaaaagggccccggttaacaacctgggggggggggggggggaacttccaaagggaaaaatttcacccgggagggggggctcccccctgaaaccccaccttttggggaggccgggggggccaaataaattggggtggggagttccccc

SEQ ID NO: 99830 - DNA, 384 bp, Homo sapiens
cttggttatagtatataatacttttaatgtgcttctgaattcagtttgctagtatttgtaatgaattttttcatctatgttcatcagggatattgccctatagttttttttggttttttttttttttttggaagggtaaaaaggattgggtataagggcaaggctggactaaaaaaaggagttgggaagaatcccctccttttaaaattttggaaaaagtttaaaaaaacgggggtaagtttttttttaaaggttgggcaaaaaaccccagggaacccattgggttcgggacttttttttgtggggaggtttggactacggattaagcccccttactataatgggccggtcaaaattttttattttttataatttgtgacccta

SEQ ID NO: 99831 - DNA, 439 bp, Homo sapiens
cggacgcgtgggctagttctagatcgcgagcggccgccctttttttttttttttttttttttttttttgtctaccccccccccctggggggaatccctctttttcttttttaaaaaaaaaaaaaaaaggggggggggggggggaaaacccccctaaccccccgggaaaagcccccaacccccaaggggtgggggttccccctttccccccccccccggttttccaaaaaaacccccccccccctttttttttttaaaaaaacccccccccttccccaaaagggcccccgggggggccccccttttttttccccccggggggggggggggggccccccccaacacttactttttaaaaaaaaagggggggtgggggggccccccttttttttgaaaaacaaaccccccccccaagggggaaataacaccccttgtggggc

SEQ ID NO: 99832 - DNA, 346 bp, Homo sapiens
tacattcaaaacctgttgatgggctcaagaaattctcaagaaattctcttgcctcagcctcctgagtagctggaactacaggtgtgcaccaccacatgtggctaatttgtgtattttttgtagagacagggtcttaccatgttgcccagtctggccttgaactcctggactcaagggatccaatgacaggcgagagccaccatgcccagccacatttttgctaaattctttacactggtgaatctcaaagaattctctgatcatcacaccatatcctgctaagtgtgcaattaacctgtggacttcagttggacactttcagattagcattagctatgtggggccg

SEQ ID NO: 99833 - DNA, 375 bp, Homo sapiens
ctggtgccaaaaaggttggagaccgctgatctagactacagtatgttccagaaaaggaaatttaacagcttctcagtatgtgtctccatgtctataccccttaaatgtggttatgaaatctgttaggccaggtgtggtggcgcatccctgtagcactttgggaggccaaggcagggggattacttgacaccaagagtttgagaccagcctgggcaacatggtgagacctcatctctataaagaattaaattttaattctacaaagaatttttaaaaattaggcatagtagcacacacctgtaatctcggctacttgggaggctaaggtgggagaatggcttgatcacgccactgcactccagcctaggcaacaga

SEQ ID NO: 99834 - DNA, 285 bp, Homo sapiens
cgagatcacaccactgcactccagcctgggtgacagagcaagaccctgtcttgaaaaaaaaaaaaaaaaaaagcaggggattaacggctgatttttttttatcaccatgggaaaaaaaggacggaccaatactttaaccttgctaaaaaaaactaatcccacctgggatttttttacataacaaaaatttttttcaaaaataagggcaaaataaaaactttttcaaagaaaaaaattttcccggtccccctactttaaaaataattccaagccgacccggccgca

SEQ ID NO: 99835 - DNA, 384 bp, Homo sapiens
agaaataattttgactttccagtcttattattaagaaaatacatttaatgaggccataactgccatagatagtgattcctctgatggatctgggcaaagtaaatggaaaagcttttggaaaagattcaccattctaggtgccattaagaacatttgtgatttgtaggattaggtcaaatatcaacattatcaggagtttggaagaaggtgattccaagcctcatggatgactttgaggggtttcaagacttcagtggaagaggtcattgcagatgtggtggaaatagcaagataactagaattagaagtagaacctgaagatgtgattgaattgctgcaatctcatgataaaacttaagcatgacaaattgcttcttatggatg

SEQ ID NO: 99836 - DNA, 355 bp, Homo sapiens
gtcctgatcacagcttactgcagactccaactcctggattcaggcgatcctcccacctcggcttctcgagtagctgggactacagactggagccaccacactcagtatgtgtgtgtgtgtgtgtgtgtttgtgtatatatatacttttttttttttttggaaaaaacggggtttggttttgtcccccaggcgggtttgaaccttggggttaaaagaatttttaaggcctaaccccccgggggggtggaaattccgggattaacccacaccccgggcccctggggggggcccataaaaggcaaaggggctaacccggccccctagaaatggcccccactataggtttgttggaaaa

SEQ ID NO: 99837 - DNA, 1487 bp, Homo sapiens
cggacgcgtgggcggacgcgtggtatagatacttgctaagggctttgtatatacttattattgttatttctcagcacgtatgtagcagatgaggaaatgaaggctaaaggtcatatatctacaaagtggggaggtcagactttgaacccacaacctgactgtggagccacttcagtatactctctccccataagaaagttccaatagaaaaaaaatgctacttaagtagggaaatcacaaaataagtgccaatgaacaataaatgttcaacctcactacagttaaaatgtatattaaagcaagagttgagatgacacttttccttataaaacagacagggattcagggacattgggactctaatgctgctggtaagacatgaataaatacataccatctctggcaatcaataccagaagctttaagcattgccttttgactttgaaattgtacctggaaatgtatgtttcagtaaccatcatgaatgtacacaaaatcctgaaactcttaaaactgatgtcacaggcgtgagccatggcgcccaaccatcttttgcaaattttattaaagacaatgctaaaaggaagtgacaactgaaactaatggtcacagtcagtcaagacttcccttttctgaggggcctagcaggaagagaatatttagactgatgcttagtgtaagaaggaatgttgtacaggttaaccagcaacacaaagacatattcaaaagacctaataggtcagaagaataacataccacaccaaaaacaaatctgtatggaaatctagaatcatgtgcatagaaaaagaattttcatgaggataaaaagaagcaaagagaagtaatgctcttattggggcgtgcatcagtggacatgtgctaaccagtaagaacagcaggaggcctaaatgcccatgtttagggagagaatatggaaaaaatggatgggattatttggaaaagatgtaagagattaaaatacgtggtaagagctactcaactcttgtttttctccttttccatagataaagacctgaacaaactgaaaaggtaggacgtaaagtaggaattgtaaaacggaaatactctttatataagaaagctctactgtatgtcagaaagcaatgtaatagatagaccaagcacagtggctcacgcctataatgccagcactttgggaggccaaggctggaggattgcttgagtctaggagttcgagccgagcctgggcagcatagtgagaccccatctctacaaaaaataaacagaatttgccagacgtggtagtgcatgcctgtagacccaagtatttgggaggctggggtgagaggttcgcttgagccctggaagtcgaggcttcagtgaggcaagatcacaccactgcactccagcctgggagagcaagaccctggaagtcgaggctttagtgaggcaagatcacaccactgcacttcagcctgggagagcaagaccctgtctccaaacca

SEQ ID NO: 99838 - DNA, 339 bp, Homo sapiens
  misc_feature (1)...(339): n = a,t,c or g
gtgatccacccaccgcggtcttccaaagtgttgggattacaagcgtgagccactgcgcctggatgcctccaggtttttaaacaagttagtgctattagatggcttcacacattgcagcttttatatgacaggctgtaaactgcctttgtgtaataagagttgtcagccttcagcaatgttgatgatgacatgctccttttcctgtctccgtcatttcactgtcctgtcagaaacggcgtagactggctggccatggtggctcacacctctaatcccagcactttgggaggctgatgggggtggattgcttgaggtgaggagtttgagaccagtcagtcn

SEQ ID NO: 99839 - DNA, 357 bp, Homo sapiens
attcctccccagcttcatgggcttttggcctgtcctcggtcacgggcgcgcctcgactgtgaccccttctgagcctttgtccttgcccttcctgctgcctgcagagccctttctttttttttttttttccctttttcggaaaagggagtcaatttttggggcacaggtggattggaaggggggcaatttaactttttggaaccttccccccccgggattaaagaaattttttggcctaaccccccaaggggttgggaattaaaaatttggccccccccccccattaatttttgtgatttttaagaaaaaacggggtttaccatggtggcccgggcgggcctgaaactctgaacctag

SEQ ID NO: 99840 - DNA, 361 bp, Homo sapiens
ctcacaggcaggttatcaagtgtgaagtggtcagctggagatttgatgtgcagctcaaagatctaaaaagatggcagaatcatctgctcctgtcccagcagctggcctgcattgtgctgacctcagctggcatcatggaccacaaagagatgagatgaaaacacacaggaggaaaaagcctgggattctttttctaggggtgtaatacacccatgaaaaaataaataaataaataaataaaaataaaataaaaatgcctcaatgggggaaaaaaaacgcaccagagacaaatacttatttaggatctgtaatgtacccattgccatacctaggcatcctagatacagcaacatatccctgc

SEQ ID NO: 99841 - DNA, 374 bp, Homo sapiens
gcagccttgatctctcaggctcaagtcatcctcccacctcagccttccgagtagctgggacctcaggtgtgagctaccacatctggctaattaaaaaaaaaaaaaaaaattggtaaaaatggagtctgactgggttgcccaaactggtctcgaactcctgggtttaaaccatcctccctcctcggcctccccgggcgctgggattgcgggcgtgagctaccacacggggccccttgtatttttttcagttaaaaccttttgggtttttttgtttgatttttggagggctagtttgtttgttgggagagttggactctgaatgtcgcccggactggatcacagctcactgcagcctcgacctcttgggctcaagc

SEQ ID NO: 99842 - DNA, 460 bp, Homo sapiens
  misc_feature (1)...(460): n = a,t,c or g
ctgagacagaattgcttgaacctgggaggtggcggctgcagtgggccgagatcacaccactgtactccagcctgggcgaaacagagactctgtctcaaaaaaaaaaaaaaaagttttgggggcgggccatagggcttctcccttttatccttaccaaatggaacctttttgggggcccggggcaggagatttccctgcccccgggggttaaaacccccccccccccccttaatttccaaaattcccaaatttccccgggtttggggggggccccccgggggccccacttcctcagggggttgagggggggggatcttttcccctggggggccagggttgaaggaacctgaaatggcatccttgtcctccacttggggggacaaaacaaaaccttttttcnnaatntnaactgggaatgaaaatggatgggaaaagggtctttttttttgtggttttttct

SEQ ID NO: 99843 - DNA, 362 bp, Homo sapiens
ttttttgagaaagacatataggatatgagattggcttgaaaccaattttagggggttcgattccttcctttcttattttacttttacataggttggttcctcgaatgtgtgatatggtggagggcagccatgaagtcattctaaatttgttgaagcatacgatactgatattacttctcgttttgaagcaaaggcctctcaaattataaagatcatgatgagaacagctgttagtgaaataaatgatcctatagaagagacagtgtttcatgtggtgtaagcatctgggtagtctgagtagcgtcgtggtattcctgaaaggcccaggaaatgttgagggaagaatgtatgtttactcctac

SEQ ID NO: 99844 - DNA, 357 bp, Homo sapiens
tgatgtgaggcctctccagccacgtggaattgtaagtccattaaacctctttcttttgtaaattgcccagtctcaggtatgtctttatcagcagcatgaaaacagactaatacagaattcttctaagactgcctttgttcatgtcgcatgatgcatttgagatccatccaggttgttgtggtgtcaatagtttgttcttttttattactgagttgtattccatggtatgagacatgtgggctgattccagtgtttggcaattaggaataaagctgttatgaacatgtgtgtacaggaagccttacatttttcagaatgcttttgtgttgcctctccatgagaatgacaacttagatc

SEQ ID NO: 99845 - DNA, 359 bp, Homo sapiens
gcagtggtgcaatcacagctcactgcattccaacccgggcgagagagagacagtctcctccctaaaattaccaaaagcctggaacccccgacatatgctactatgcccaactacttcttttattctgagatgggggtttatctatgtagcccaagctggtttcgacacccgggggcatgcgagcctcccgcctgagcctcccccagtgtgggtattacaagcaagagccaacgtgtccggcctgtccatgatattgcttgtttccacagggaatctacaatgttctcggcagaaaatttcaattaacacgcacacacatccagagttggctacacctccccacctcctcctgccccccc

SEQ ID NO: 99846 - DNA, 369 bp, Homo sapiens
gagaatcacttgaacccaggaggtggaggttgtagtgagccaaggttgcaccattgcatcccagcctgggtgaaagagtgagactgtctcaaaaaaaaaaaaaaaaaaattttggcccaggcccccccctttaatccccccttttttaggggccgggggggggggactccggggtcgggaaataaaacccttcttttttacccgggggaacccccgttttttttaaaaatccaaaatttcccccgccgtggggggggccccctgtttccccccttttttgggggggtgaaacaggaaattggggtaaccccgggggggggactttggaagggcccggatatccccccttggccctccccggggggaaag

SEQ ID NO: 99847 - DNA, 313 bp, Homo sapiens
gcacgagggaggttttactgtgttctccaggcttgtctcgaacttctgggctcaagtgacccacctgccttggcctcctaaagtgctgggaataaaggtgtaagctaccacacctggcctgaaactagagttactaacctttcatctttggtggtggtgagtgggaaggagtaaagccgttgggcctttgtatctttttgacttgatagagtgggctataattggctaccgtttattgaaccctactatatgctgggtgctttattatgttattcagtatcaaaagattcatgtgagatagaagtataattaa

SEQ ID NO: 99848 - DNA, 306 bp, Homo sapiens
ctcaagaggcagacgcaggaggatggcttaagcccaggagtttcagtccagcctggacaatatagcaataccccatttcttaagaaacatatataggacccagtgtagtggctcatgtctgtaatctcagcactttgggaggccaagataggaggatttattgaggccagcctggacaatgtagctagaccccatctctacacacacaaaaaattaaaaattagctaggcgtgatggtgcacacctgtagtcccagctactcaaggctgagatgagaggatcactggagcccaggagttcaaagct

SEQ ID NO: 99849 - DNA, 571 bp, Homo sapiens
cagtgcttagaatttcaatgctgtgtcatactgatgattaactccatactcctagtggtgatgtggtccagatactggaatggaagtggcaggatgtggagtccagacatagtctaccactcatgctacttactagtaatattaaggtgttaaacttaggaatttgtcacatgtaggttcctgaggagatctaaaagttaatacaaaaccaagctgtttactgattttcatgagaacatttaagttagtttaggtctacctgatttattttaaaagaaggcagagggctggacgcaatgggctaacgcctggtaatcccaaggccccttaggggaggccggaggggggcggatcacgaggtcaggagatcgagactatcctggctaacactgtgaaaacccatctctactgaaaatacaaaaaattagctgggcgtggtggcaaacgcctgtagtcctagctgctacagctgaggcaggagaatggcgtgaacccaggaggcggagctggcagtgagccgagatgaagcccccccactctggcctgggcaacagagaggatgtctgtctca

SEQ ID NO: 99850 - DNA, 356 bp, Homo sapiens
gtttcaatctcaaaggaaacaaggatactctgccttttataaatagaaaactgcccattggtgagaggaatggtaaagagaaaactggatcccacatcctttatgcaatgtgttaatatgaaatggtgttgaaactaaaaatacataaattagctgggtgtggtggctcgtgcctgtagttccagctactcaggaggctgaggcaggagaatcacttgaaccccctcaccacctgcctccgcaaaaaaagaggagaaggctgggcacagtggctcatgcctgtaatcccaacactttgggaggctgaggcgagaggactgcttgagcccatgagttcgagaccagcctgggcaaag

SEQ ID NO: 99851 - DNA, 375 bp, Homo sapiens
ggcacgagcggcacgagcggcacgagcggcacgagcaaagtgctgagattacaggagtgagccatcatgccggcgggggtattggtcttttaaacttttttttgtttttgttttttgaggcagggtcttgcactgtcacctaaactgagtgtagtggcatgatcatggcccgcagtagcctcaaattcccaggttcaagtgatcctcccacctcagcctccatagtagctgggactacaggcatgtgccaccatagctgggactacaggcatgtgccaccatgcctggctaattttttattttttgtagagaccccatctcagaaataaataaataaataaagtaaaaaaaaaaaaaaaaaaaaaaaaaaaaaaa

SEQ ID NO: 99852 - DNA, 514 bp, Homo sapiens
  misc_feature (1)...(514): n = a,t,c or g
aggctgcagtgagctatgattgcatcactgtgctccagcctgggccacagagcgactctcactcaagaaaaaaacaaaaaataacancaaagatctctaaatctgttttaattttgtgttttgacaggcattaggattaaggttaactaaaggccattgagaacccgcagaagcaggaaaacctgtttgcctcccccattagctgcctaaaaaaataaagtgcctggcctggcgcgatgacttatgcctgtaatcccagcactttgggaggccgaggcaggcagatcacctgaggtcaggagttcaagaccagcctgaccaacatggtgaaaccccatctctactaaaagtacaaaagttagtcgggcatggtggtgggcacctatagtcccagctgcttgggaggctgaggcagaagaattgcttgaacccgggaggcagaggttgcagtgaactgacaccgcaccattggattccagcctgggcaacaagagtgaaactccatctcaaaaaa

SEQ ID NO: 99853 - DNA, 370 bp, Homo sapiens
ggcacgagctttcttccttccttccttccttcctttcttttttaaaatttttaaacttttttcagatagtgtctcactgccgcccaggctggagtgcagtggcatgatcacagctcactgcaccctcaatctctcggactcaagccatcctctcagctcagccgcctgagtagctgggactacagatgcccaattaatttttttaggtctccctatgttgcccaggctggtctcaaactcctgacctcaagcgatcctccccactcagcctcccaaattcctggggctacaggcatgagccatggttcctggctaaattttagagatggggtctccctgtggtgcccaggctggcctctaacaatcctac

SEQ ID NO: 99854 - DNA, 1292 bp, Homo sapiens
gcacgctgcagacccttgccccggctacggtgcagacagttgctgcgccacaggtgcagcaggtcccggtaagtggctggaaaggattcagggaggcactggttggggctgttaactggtccttggttgaagatgtggtctttatggctgcggtccagaacccggccctcaccgccctcaccacccctatccagacggctgcccttcaagtaccagtaagagctgccttctcccccaccctcctccctccccctttattcctggaggtgttagtcttcagagatgttaagcaggtacctgggggagtcaagcagcttgagccccccaaagaaggagaaaggcggacaaccccataatatcattgagaaacgaatacgctcctcccatcaatgacaaaatcatcgaattgaaagacctggtcatggggacagacgccaaggtgggtgccaagcaaaattgtgttttatgttccaccatctcccctctacctgtttttgcctcaggagcctagagaagtcccaggctcaaggtaagtgaatacaagaccgagttagaggtgcttttttattaaagcatcttggtgtcatgtcaagattataaaatattaaaaaacataagggactggtgagggttgataaggcagtgacccgctgagacctttgactcctttggctatgctctgcagttgatggggactccactgtcagaggcagagaaagatgcctgccactcagtagttccagatacaggactgtgtgtaccttggagtcagctgatggcatagttttagctgtgtttaggggttaccttttaaggaaaagaaagaaaaaagaggttgagtctttgaccagcaacacatagaggaaactgatgttccaaatgtttctggtgtttcagtgtatgtgtcttctagaaagtaggagattttatttttaaaacctatctatgtttaaaccctattttgaaagaaaatttcattttccttgcctacaaatctgaaagctgtacatcctaagtaaaaatctatgcccaaagtgctgggattacaggcgtgagccaccgcgcccggccgaaagccaactcttatgcctagaaatatgtgcacctatgaccaagcccatgaattatacaggaattatgtaattatgagtgatgtacttcaaagttattgcacatacacttgtttactttgtatgtttgcaggattaaactttgtataatctttttacaaaaattttttttcagtatgcaagcttgcaagatgaaaataaaacctgtttgcctgatagttg

SEQ ID NO: 99855 - DNA, 367 bp, Homo sapiens
aatcaggatcttgaagaagtatctgtacgcctgtgttcattgcttatgcttataagcatattattcacaataagcttataagtattattcacaatagccaagatatggaaattgcattgatagatatgcaaatatctatcaatagatgaatggataaagaaaatgtggtatatacatacagtagaatattattcagccataggaaataaggaaattctgtcattgtgacaatatggatatacatggagaacattatgctaagtgaaataaactagtgacagaaggacaaatgcatgattgcacttctttgaggtatccaaaataatcaaactcataagggcagaggcaaaatggtgcttgccacggg

SEQ ID NO: 99856 - DNA, 402 bp, Homo sapiens
  misc_feature (1)...(402): n = a,t,c or g
ctatcacatggatttatgtgatacaaaacagctcaagaagataatctaatcagtgaagtcataagatgatgggcatatgatgccagataattaacaggagaataggcaaacatctggagaaaccctttgaaccaaagtgtctatgaatttctacaaagatagtgatcctaaaagaaatgaggtcagtcaatttaaaagacaaaataaaagttttcaatgtaaaatacagtnaaaaaaaaaaaaaaaaaaaaaaaaaaaaaaaaaaaaaagggggggggcctttttaaaattcctttgggggggccaaatttaccggggggtgggaaatataattttttttttttttgggggggggtttttaaacgggggcgggggggggtttttaaaaaggggggggggggg

SEQ ID NO: 99857 - DNA, 207 bp, Homo sapiens
agaacggggtctcgctatattgcccaggcaggtctcgaactcctgggctcaagctatcctcccgcctcttagcctccctgagagctgggattacaggcgtgagccactgcgcctggcccttttatgtaggcttttaatttgtaaatgtttctttgtgtgatatcaatgaaagcatgattgttaagtaaaaaaaaaaaaaaaaggggg

SEQ ID NO: 99858 - DNA, 1108 bp, Homo sapiens
ttttttttttttgataaatgtaatttttttttttttaaagaaaacacagaacaagtcctaaatcagacaaattgcacaaaagagagagaagaaaattgtaagcttcctgggagaggaagagatgtcccatgagaaaaccaactgggatgagcctaaaaaagcatgtccctctctctcctaatttacttagtctcaactgagcccaacaggagctggcctctgtcccagctgcaggatgctcccaaggcagtgtccaagagcctggaaggaagcttttatcagcaggttcagtacagcaggaaaagccatcctggcaaagagtcccagtgggtcctaattagcgtaggcttgctggctgctgctgggcctggggaagctgcccataccctgggtgggtctgggactatgtcgattcttctttttcttcttctctttcttcttccttttccgttcaggatcctcttcttttttctttttcttcttcttgtgatctgaatcagatggtgtttctggggggacaggatcctgggtacggctctgtttgtgcttgtgcttattcttcttcttgggaggctgaatatgcatcagacgacactgctccggcaacgggccagtgtggaggcggaagccggccagcatggtccctgtgataggattgaaagagctactgagaatagggggcttctcaatgagagagcggaggctgctgttatcatgggaaccaggcagatcaatcatccctggcaggtcaggcaggaagttacttagcttctccttcaccttcttcccacagaatttattataggcttgttccaagttgtagtgtgtgatcagattcgtgctgcctgtcagctctgtgctacctggcagttccctcatgaggtaaaaagggccacagccagctcctgacttgtccgcgccaggaggagccgtggccgcggtgggaggcggggccgtgccgggtcccccgcccgcaggaggcggtggcgggggtggaggctttcctggtccgaagccgagtgcggttgggggcggtggtgggtcagcctgagccccaaacagtgccgtgaaattctccatcgtaccctccgccccggcgctgtctccg

SEQ ID NO: 99859 - DNA, 410 bp, Homo sapiens
ccacacccggctaaattttgtatttctagtttagacagtttttcactatattggctaggctggtctcgaactcctgacctcaaatgatctgcctgccttggcctccctaagttgttgggattacaggcgtgagccactgtgcctggtcaagaaatggaactcttacacactgctggtgggaatgtgaaaaggtaagccacttcggaaaacagtttgacaatttcttatgctaaaaatacacctatcagatgatttagccacttctaggtatttacttaagaaaaaataaggcatacattcatatgaagactttgaaataaatgttctcattatttttatttgaaatagctaaaactggaaacaacccaaatatccatcagcaagtgaatggataaactaattgtaatatt

SEQ ID NO: 99860 - DNA, 282 bp, Homo sapiens
cagatcttgtgaatcaaattcacaaacatcagcttgttacaaatcattttatttataccctttaaagagtgtggatttaagattcttgaaaggatgtagcctatatattttctcattccatatgttgtaactatttttaaccaaaggtactacttttatatatggaatttgaagaaaaccaggggtatttatactgttttgtataagatgtacaaatctttttgacaggaaatttttgatgaaacaataaaataaattttaagtataaaaaaaaaaaaaaag

SEQ ID NO: 99861 - DNA, 793 bp, Homo sapiens
tttgaactcttcgacgcccgtaccgagcggcactcgccgcgtagacccacgcgtccggtcttggaacatggatccccaaaaaagagggaataattttacggagcaaatgatactccacagtaccaatcactcatcatgtttaaaaactgcatatctaattctctttccatgtatccatcttggaagaatactgtttccgaaaaacatctcagaaaagagaaactttagaatgaatacaatatacaggctttaatttctgcttctctgtagttgtgcctgtaggtctctaatttttattcaggccaaagattatgagaattagcataaatgatatttttaaaatttgttacaatacagaggggtctccttattcaacggtagctaaaattgtcccctcgttgacagtatccacagaggccagaaacaactctgcttgttatgataactttggcttcttcatgactgctaaagagttgtcccagcacttggggagactgaggcaggcagattgccctgagctcagaagtttgagaccagcctgggcaacatggtgaaacccgtctctacaaaaaatacaaaaaaaaaatttatccagtcatggtggtgcacacctgtagtcccagctacttgggaggctgaggtgggaggattgcttgagcctgggaggtggaggttgcagtgatctgagatcacatcactgcactccaacctgggcaacccccagactttctctttcccacctccaacagtgagaccctgtctcaaaaaaagagaaaaaaaaaggtaactagtc

SEQ ID NO: 99862 - DNA, 399 bp, Homo sapiens
attttgtatggcaatagctgccatagatagcagttcttctcatggatctagggaaagtaaactgaaaaccttgtggaaaagattcagcattctagatgcaattaagaatacctgtgattcatgggaagaagtcaggtatcaacatgaacagaagtttggaagaagttaattccaaccctcacggatgactttcagaggttcaagacttcagtggaggaagtaactgctgcagttacttgtggtggaaataacaagagaaatagaattagaagtggagcttgatgatgtgactgaattgctgcaacctcatgatcaaacttgaatggattaagaatctactcctggtgaagatgctttgaacattgctgaaaggacaaggatattaaaatattacattaa

SEQ ID NO: 99863 - DNA, 426 bp, Homo sapiens
  misc_feature (1)...(426): n = a,t,c or g
agggaacagcatattctattgcacgtctacaattcccaaaagaactcttactttgggaggccaaggtgggggggtcacttgaacccaggagtttgacatcaacctgggcaacatggagacctcccgtctctctcggagaaaaaaaaaaaaaaaaaaaaaagggggggcctttaaaaaaattccttaggggggccaaatttaaccggggaaggaaaaaaaataactttttctttatgggagggagaaaaaaaaattgacagggggccgcgttttaaaaaattctccaacgggaaaaacagatttctggaattttttgaaaagaaccttatttttggggggggaacaaaagaggacaacctccccacaaaaattaaagcttcaagggaaaaaaaaaaattttaaagggaaaaggggggaaacccaccn

SEQ ID NO: 99864 - DNA, 411 bp, Homo sapiens
  misc_feature (1)...(411): n = a,t,c or g
cccacgcgtccgcggacgcgtggggcatagaaaaggaaagaaaagctttgtacactgttggtggcaatggaaattattatagccattatggaaaacagtatggagggtcctcaaaacattaaaaaatagaactaccatattatccactacaaagctactgtaatcatacccgttagaatgactattatcaagaagacaaaagggaagtgttggagaggatgcccagaaaaaaaaattaaaaaaaaaaaaaaaaaaaaaaaaaaaaaaaaaaaaannttaaaggggggccctttaaaaaaaaaccttgggggggcccaatattaccggggggtgaaaaatattattttttttttttaggggggggatattaaaggcgggccggggggcgcgttaaaaaaacaggggaaaaga

SEQ ID NO: 99865 - DNA, 397 bp, Homo sapiens
atttttattgaacatgttcacctttacattattacaaacattttacaaataaaaagtttttgtaaaaaaataaaaataagggatgctttttgtgattttttacggggcggttgtaataaaaaaaaaaaaaaaaaaaaaaaaaaggggggggggttttttaaaaaattttgggggggggccaaatttttggggggggggaaaaaattttttttttttttttaggggggttttaataaaggccgggggcgggggttttttaaaaaaggagggggggggaaaatttttttttggtgtttttttgaaaaaaaactttttttggggggggggattttttgggcaacccccccaaaaaaaaatctttctgtggaggaaaaaaaaaatttttggaggggggggg

SEQ ID NO: 99866 - DNA, 858 bp, Homo sapiens
ggagacagagtctcacactgttgcccagtctggatgcagtggtgctatcatagctcaccgcagtctcaacctccagggttcaaccaatcctcccaccacagcctcctgagtagctgggactacagatgcgtgtgaccacgcttggctaatgttttgatttttgtgtagagatgggttcccactatgttgcccaggctgagctggaacttctgagctcaagcgatcctcctgcctcagtctcccaaaatattgggattacaggcatgagccaccacgcctagcccattttatcacgtttgctttatcattttttctctgtagagaaatagccatagatacacacacacatacacacttagatgtagatatacattttctttctgtgtcttttgaaagtaggttgcagacatcatgtttctttaccccttaagtacttcccgaaacaaagcccttctgtagcataatcactgtatgattcttaagatcaggaaactcaacattgacacaatactacagtctacagtctatattcaaatttcaccaatagcctcaaaaatgtccataatagctcatgtttttttctgtccaggatccaatccagaaacgtgcattacctttcctcgccatatctttttcgtcaccacctttaaactggaactgttttcccacctttgtcttttatgtcattgacgtttggggaagagtacaaaccagttttctgtagactctccctccgtttgagcttatctgacatttgctcgccgtgagatccaggccttgcatttgtactggaccctgttcttacacaccctgatccagcccacttgtgtagtctgggagtctgggacaacctctgtc

SEQ ID NO: 99867 - DNA, 393 bp, Homo sapiens
  misc_feature (1)...(393): n = a,t,c or g
gcatcagatgctacagaaaaatcttttatgaaaggaagcatcaatggctgcagcaaatttcattgttgtcttattttaagaaattgccacagccaacccccactttaagcaaccatcaccctgatcagccagcagtcattaatatctaggcaagatcctccacctgtaaaaagatgatgactcactgaaggctgagatgattgttaggatattttaacaatgaagtatttttaaattaaggtatgtattttcttaggcataatgctattgcacacttagtaaactacagtatagtataaacgcaacttacatgcactgggaaactgaaaaaattatgtgacttgctttattgagatactcactttattgtggtggcctgaaaccaaacccgcn

SEQ ID NO: 99868 - DNA, 568 bp, Homo sapiens
ggttagaaattgtaatgagggtctgttgggcaaaattccatataagcaaagtataaattaataaagcaaatcgtgataaattagtacgattgactttctggagtttctgacaataaaagtaaggaaaatgcagaacacaaagacagagagtaaaaagagaaattaggaaagcattctacatgttgaataggaagacactggccatgttcgtgcagcggcagtatgtcgtgacatgacataccttggagagaagttaacagatgaggaagttgataaaaatcatcagagaagcaaaatactggtagggtcactcaagtaaaccatgaaatttccataacttatgtcagcaaagtgggaatattgtacagtgtgtgttgaagttcctatacaacaatgtttatctgccttttgtttgtaaggaatgtacatactaaaagttcttcttactgtcaaaagaatatgtgtgaataagtcatataacttattcttatgtttatcatatatcttcctgacatcatacaacagacttacttaagaaattaatataatagaaaattgaacaagtagc

SEQ ID NO: 99869 - DNA, 420 bp, Homo sapiens
  misc_feature (1)...(420): n = a,t,c or g
acccacgcgtccgctacatgcacacaccttcacagatcacactcaaaccctacatgcacacacattcacaaatcacacacattcacacacatgcagatcaatcacatgcatgcacacacattcatacagcacattaacacaagtcatacgtatacaaacacacacatgtattcatatatccacacacatttttgtgtgcacacccactcatacacaaacatgcatgcctttnnnnnnnnnnnnnnnnnnnnnnnnnnnnnnnnnnnnnnnnnnnnnnnnnagctgcagtcctggggctggctaatcccatgggtgggtgggtgagaagcgagatcctgcggctccctgcaggtgtgtaggtagttcaagaaagcagcctctctcgtagagactctcttgtggaggttctcttgtatggag

SEQ ID NO: 99870 - DNA, 458 bp, Homo sapiens
gtaaattttattccagggatctctctatgccagtgctacttggtagtatgttgaatggcagcctcagcttcagctgggagcttgttagaaatgcaaattctttgaccaaccccagatctactgaatcggaatctctaagggagggggtcaagcaagctgtttttaataagcccttcaggtgattcttatactgtacagccatactgcagggatattgtgggcttagttccatatcactgcagtaaactgaatatcacaatagagtgagtcacacacatttttttgtttcccattgcatataaaagttatgcgttttggccgggtgtgatgtgacaggcctgtagtcccagctacttgggaggatcacttgagctcaggagtttgaggctgcagtgagtcatgattgcaccactgcactccagcctggatgacagcatgagaccccatttcttaaaaaa

SEQ ID NO: 99871 - DNA, 504 bp, Homo sapiens
  misc_feature (1)...(504): n = a,t,c or g
catgggcnnnnnttcgatttcatagccctgcgcggnggacttcaatttacactggcgagaataaatgcttgtcatatgtttaatggtcatttcattgagacaagaaaacgcaacttcagtagcatcatagtatcatgtttaagtgagggctctagggcatcagaaaacctggtcctccacaatgcttcacccaattcatgtggactgggaattgccttcacttgtctgtgtaatgtagtgagcagtggaaacaaaatcacagattgttatgattaactatctagcagttgttaggattttttttttttttttttttgaaaaaaagtttactttttgttgcccaggttggggggcaagggcggaatttgggttaaccgaaacttttgcctccggggttaaaacaatttttgccaccacgccgggttaattttgcattttaagaaaaaacagggtcttcccatgtgagaaaggctgggctcaaactcttgacctcaggggacgccg

SEQ ID NO: 99872 - DNA, 389 bp, Homo sapiens
  misc_feature (1)...(389): n = a,t,c or g
tcctgatttattacacattgtgtacgtgcatcaaaatgtcactgtgtcccataaatagtacaattattacatacaactaaaaaagagaaaaaatgatttangaaaaaaaaaaaaaaaaaaaaaaaaaaaaaaaaaaaaaaaaaaaaaaaaaaaaaaaaaaaaaaaaaaaaaaaaaaaaaaaaaaaaaaaaaaaaaaaaaaaaaanggggggggggggggtaaaaaaaaaaattgggggggggaaaaaaaaagggggggggaaaaaaaaattttttttttttataggggggggaaaaaaaaaaacgggggggggattaaaaaaaaaaaattttttttgggggggggggctttgccccccccccccaaaaaaaaaaaaaaatggggggaga

SEQ ID NO: 99873 - DNA, 444 bp, Homo sapiens
  misc_feature (1)...(444): n = a,t,c or g
taatgacgagcatcgatggagcagcctcggaaanaccgggncgacccacgcgtccgtggtaagggaaatatatagtcaaaaccagaatattgttgtactgtaaaagcactgtgtaattcacttttagtatcagagttagacaaatatataaaaaacaactataattgtaaacaatgaacagatacaaaatgtaaacagatgtaaagtgtgacatcaaaagcataaaatgtgggattgaaatataagtttagaatctctgtatatgattgaagataaggtactttaaacagacaaattagaaaaaaaaaaaaaaaaaaaaaaaaaaaaaaaaaaaaaaaaaaaaaaaaaaaataaaaataattaaataaatataataaaaaaaaatcaaaaatgtctctatctctgggggggggcccccctttatatatcaaactgtctgatgtg

SEQ ID NO: 99874 - DNA, 366 bp, Homo sapiens
tggctcagcaataaaatatgtgggtaaaatagtaggatcatttaataatattgttaaaatgcagatttccttggagttgaatgaaattatactttaaaaaataaagcttaaagagtgagagagaaaaacatgaattaaaggaaactttgtttttgaattcaaaaaaaaaaaaaaaaaaaaaaaaaaaaaaaaaaaaaaaaaaaaaaaaaaaaaaaaaaaaaaaaaaaaaaaaaaaaaaaaaaaacatacaaaaaagaaaaaaaaccaactcaacctaaaaaaaaaaaaaaaataaatagggggggggtgttttaaataatcgtggggggggcgccattcctgcggtgggggggggttattattttt

SEQ ID NO: 99875 - DNA, 390 bp, Homo sapiens
cccacgcgtccgcccacgcgtccgcccacgcgtccggggctcttctatatattttgtaaagtaagaaatataccagatctaataaaacacaatggctatgcacaaaaaaaaaaaaaaaaaaaaaaaaaaaaaaaaaaaaaaaaaaaaaaaaaaaaaaaaaaaggggaaaaaaaaaagaaggaaaaaaagaaaaaaaacacccgacctaaaaagaaaaaaaaaaaaagatcctcaaaaagttttggaaaaacacataaaaaccacggtggctgaggtaaactctctagaccactaggaaatgaaacccgaaccaaactggcagaaaactaaaatttaaaagagtaaaattaaccacaaaatttacttttatgtgaagattggctcattgtg

SEQ ID NO: 99876 - DNA, 338 bp, Homo sapiens
  misc_feature (1)...(338): n = a,t,c or g
caaggagtcgcttttacttttaacttagtatttaagaaatacatttcataaagttatagccataataggtggggattcctgtgatggatctgggcaaaataaattgaaaaccttctggaaaggattctcttctagatgcaattaatggcattcataattcacaggaggagatcaaaatggcaacattaactggagtttggaagaaatagattccagttctcaaggatgattttgaggggttcaggacttcagtggaggaattatgcagatatggtgaaaatagcaaaaacccctagaattagaagtggagccttgaggatgtgacttaattgctgcan

SEQ ID NO: 99877 - DNA, 394 bp, Homo sapiens
tgggtgcagcgcaccgtgcgccagctgaagcagggtgaggcattgcctcactcgggaagcacaaggggtcggggagttagttccctttcctggtcaaggaaaggggtgacagacggcacctggaaaatcgggccactcccacccgaatactgcgcttttccaatgggcttaggaaacggtgcaccaggagatgatatcccacacctggcttggagggtcctacgcccaccgagtctcactgattgctagcacagcagtctgagatcaaactgcaaggcggcagcgaggctggcggaggggcgcctgccattgcccaggcttgcttaggtaaacaaagcagcctggaagatcgaactgggtggagcccaccacagctcaaggaggcctgcctgcg

SEQ ID NO: 99878 - DNA, 301 bp, Homo sapiens
cacactttaaaggacactgaagagacttgatgggccgggaaccatggctcatggctcacccccgtaatcccgtcaatttgggagacctaggcgagcggttggcgcttgcctgtggtccaagctactcaggaggctgaggtgggaggatggcttgagcctggaggtcgaggctacagtgagccgggttcgtgacactacatgccagcgtgggcgacagagggagaccctgtctcaaaagagacttgacaactaaatgcaaagcatgatgtttggttggaaagagaattttgttagaaagcag

SEQ ID NO: 99879 - DNA, 386 bp, Homo sapiens
  misc_feature (1)...(386): n = a,t,c or g
ctcatttctatatggtattatattgcataaacgtaccacactttatccaactactgttaaatatttgtgcattttctacttgggggtgatttcaaatagtgctgctatgaacattcttgtaaatgtcttttggtgaacatatgcaacacatatatgcgttgttgttggttcccaggaggggcattcctgggtcataaacaatgcgtgtgttcaggtttagtacagtataatgccaaacaggtttccaaagtgtttgtgccactttacatacctgccattattgaaaaagagttctgtttgctccacattgtcaccaatacttgatattttctggtttttttttcttttaaaccgtactantgggtgtgcagagatattgcaatgtg

SEQ ID NO: 99880 - DNA, 335 bp, Homo sapiens
  misc_feature (1)...(335): n = a,t,c or g
aaagcgtttaaacctttcagcctctctcgtttaatctgagtggaatagggatgggcgccttcggcacgcggggttggatggcgggcccctcgggtccttataccccagatctgttggccagggtaggcctggagccaggggccttcagcaaggggtgggaattgctggcttgggacgaacttaaagtacctgggacagggagatagacaggatcggtcccttaggagggatggatctatctgcccccacagggggtccatcggccattgcggngagcgggatgggggagggggaagagagnnnntnnnnnnnnnnnnnnnnnnnnnnnnnnnnnn

SEQ ID NO: 99881 - DNA, 392 bp, Homo sapiens
tttagtagagactggctatcaccatgttggccaggctgatcttgaactcctgacctcaagtgatccacatgcctctgcctcccaaagtgctgggattataggtgtgagtcactgtgcctgacaaatataagcctttaaagagaagaaggttttcattttgaagacaaacattaggtacataaagagggttgtagtgtctttacttgtatcacagattttattgtacacattatgtactaaaggaaaatcctgaagcagtgctcaaactttgatcaacatcagggagtttatattggagaaaaactgcaaatgtaatatatttggaaaaacatttttcaaaaactactgcttagaaaacaccaggggatttatactaaaatatatttttgcag

SEQ ID NO: 99882 - DNA, 535 bp, Homo sapiens
aacatactgtgacatttccgtaacctacaggtctagaaatcctgtgccaaatatggttaacttgtttgctgagaaggatgtggaagaactggaaccctcatacacagctgatgggaaaacagtctggaactttcttaaaacattctggtaaatgggggcccggcaagctagaaagtgtggctataatcccttgcttttttccttttttaaactttttctctctcagtcctgacctaaagatgaccctagtcaggctggacacggtggctcacgcctgtcatcccagcccttttgggaggccaagacgggtggatcacctgaagtcaggagttcaagaccagcctgaccaacatggagaaaccctgtctctactaaaaacacaaaattagctgggcgtggtggtgcatgcctataattccagctactcgggaggctgaggcaggagaatcgcttgaacctgggaggtggaggttgcagtgagccgagatcgcgccattgcactccagcctggacagcaagagcaaaactccgtctc

SEQ ID NO: 99883 - DNA, 339 bp, Homo sapiens
  misc_feature (1)...(339): n = a,t,c or g
gcacgaggcagatttgggtaccacccaagtattgactcacccatcaacaaccgctatgtatttcgtacattactgccagccaccatgaatattgtacgggaccataaatacttgaccacctgtagtacataaaaacccaatccacatcaaaacccccccccatgcttacaagcaagtacagcaatcaaccctcaactatcacacatcaactgcaaaccccaaagacaccccccacaannnaaaaattttaaaaaaaaaaaaaaaaaaaaaaaaaaaaaaaaaaaaaaatggggggggggggccccccccccatctccttttaagggggggaaaaaaaat

SEQ ID NO: 99884 - DNA, 705 bp, Homo sapiens
  misc_feature (1)...(705): n = a,t,c or g
ttttttttttttaatgggagtttcactattttgcccagggctgggagtgcgatgggtgcgatcttgggctcacttgcaacctcttgcctcctgggggttcaagtgattcttctttgcctcagtctcccgagtagtgggaaattacaggtgtgtgcttacccacatcttggctagtttttgtatttttaggcagaagatggggggttttcaccatgttggccagggtaagtctcgaactcctgacctcaggtgatccacctgccttgggctcccaaagcactggggattacaagcatgagccactgttgcccagcctgtttccactgtacattttttagacatttcaggcaaaacccccaccttaacctctttttcttccttgaggggttgggcctgtccccacctccaccctcccaacccctggaaggagggaaggggcccgggaattaagtgggctaagtccaaattaaaatatggggcttngggggatgggaatgggtggtggtaagttcacagagtgtagttagatcccaactcccatgacctctggcttcagtggtgggttggggcagggcagatgaaagggcttcagtgggaacctctgagagcattttcctgttccccctatcaaccgcccccagtgataacatctgtgaagccagccattactcaataaactgcaaacttgtctaaaaaaaaaaaaaa

SEQ ID NO: 99885 - DNA, 254 bp, Homo sapiens
  misc_feature (1)...(254): n = a,t,c or g
ggccgaggagagagagagagagagagagagagagagagagagagaggagggagagagagagagagagagagagagagagagagagatgagtagagagagagagggggggggtccccctccggacctataggtaggtatttaaaaaaaaagagggggggtttttttcccccggtgagtgaggaaaaagnggttttctgtcaaaccctcctgatacggaatccctaagggtttattaaaacctggaggaagggaag

SEQ ID NO: 99886 - DNA, 363 bp, Homo sapiens
ggcacgattattcttcttttctagcccccccggcgctagggtacatgcgtatgccactacacccggcttattttattttattttattttatttcatttatttattttttagccaagacgaggtgttgctatgttagctaggctggtctcaaactcctgagctcaaccaggcctcctgccttggcctccaaaagtggtgggattacaggtgtgagccacagtgcctggctgagtgtgacagttaaaggtttctttttggggtgctgaaaacattctagtattgatcatgttgatgatttgcacaactctcagtatactaaaaaaccattgaattgtgtactttaaatggacgaatcttatgggg

SEQ ID NO: 99887 - DNA, 362 bp, Homo sapiens
  misc_feature (1)...(362): n = a,t,c or g
ggcacgaggcgttctgctatgttggctaggctggtgttgaactccgggcctcaagttacctgcctgccttggcctcccaaagagctgggattacaggcgtgagtcactgaggctgcccttttttttctctcttaaagaaaagatggaggtctcactgtgttgcccaggctggagtacagtggtttttcagagggtgaactcctgggctcagctgcttctcttgcagcctcccgagtaactaggactacaagtgtgcaccactgtgcccaccttaggatactgtattttgagtgagggctgtcagctctgaagtaccacttactattacctatagaggagagggtgctggagtctgggctatn

SEQ ID NO: 99888 - DNA, 372 bp, Homo sapiens
ggcacgagcggcacgagctggaagaattaataaagaaccttttttttttttttttttttggaaaaaaaattttttttttttttcccggggggaaaaacgggggccctttttagtttattggggccttttccttccggccccaagggatttttctgccctaccccccttaaaaatggggattgggggccttggcccccctgccggggtgatttttggtttttttaaaaaaaaacccctttttccattttggcccgggtggttttaaactccccaccttggggaatcctttccccttacccccccaaaggggtgaggtttccggggggaaccccccgccccggcccggtttaaaatctttacccgggccaaata

SEQ ID NO: 99889 - DNA, 436 bp, Homo sapiens
gtcgacggcgagttctcctgcctcagccttccaagcggctgggattgcaggcgcgcatcaccatgcccagcaaattttttgtatttttagtagggatagggtttcgctatgttggccaggctggtcttgagctcctgacctcaggtgatctgctcgcttcagcctcccaaagtcctgggattacaggcatgagccactgcacccggcctagaaaacatcattaaatagcaaacagtagcagtgtgcttggggattttaggattgattattttcaaatctctagaaaagctcaatggattaccttaggctataatccctgggcagagtctcatctgttaatgggagctggtctaagggtccttccagctcccagattgatgatttcccaggttgatctgctccctgccacccacccatcctcgggtcgacgcggccg

SEQ ID NO: 99890 - DNA, 379 bp, Homo sapiens
  misc_feature (1)...(379): n = a,t,c or g
ggcacgaggggttaaagcactctgcctgcctcagcctccagaagtgctgggattacagctgtaatcctgtaatcccactgtacctcgcctcccatgtgattaaggtttaaacattttacccattccagcacctctaccccctttttttttttttttttgggaaaaaaattttaatttttgttccccaacctggagggaaagggcccaatttaagttaattgaaacctttgctttcttggttaaggaaattgccctgcctcaccctttaaagaggcggggattatccgggcttccccccccccccccagttatttttgtttttttattaaaaagggggtttaaccttgtgggccaggcgggaactcctgacctaaggggn

SEQ ID NO: 99891 - DNA, 632 bp, Homo sapiens
  misc_feature (1)...(632): n = a,t,c or g
aaacacttttttttatttacttatttatttagagacagggtctccgtctgttacccaagctggagtacagtggtagagtgctgtgatcatggctcattgcagcttcaaactcttgggctccaaatgattctctcacctcagcctcctgtgccaccatgccctgctagttgattttaattttttataaagaaggagactcattaggcagcccaggctggtctcaaactcctgggcccaagcaattctctcatctcagcctcccaaagcactggaattaaaaacatgagccactgtactgagctgtgtctacttcaaaagactgaaaataaaaaatcaataaatctttgccaaattaaaaaacaaaacaatagtttccaggtcttagacaaagacaattctgtgtcatgaaggtggcaaaaggcttatttagctgttaaaatgatttgcttatatttcaaagaagcagagaaaaaaagatacatataaaagttttccannnnnnnnnnnnnnnnnnnnnnnnnnnnnnnnnnnnnnnnnnnnnnnnnnnnnnnnnnnnnnnnnnnnnnnnnnnnnnnnnnnnnnnnnnnnnnnnnnnnnnnnnnnnnnnnnnnnnnnnnnnnnnnnnntaaaat

SEQ ID NO: 99892 - DNA, 357 bp, Homo sapiens
ggcacgagggtgtttattttttccctttaaggctcaagggttaaaagctttgtagataagagcagtcctgatcataaacttgactgcatctgcacaaaacagtggatggagttagcctatcctttcctgccataaatcctgtgcttgcttctcttctttactaatatcttgtggcatttttttcccaaaatagggcactttcatctgcattaaaaaacctgttcagtgctagacacagtggcctacacctgcactcccagcactttgggaggccgagatgggagggtcacgtgagcccaggagtttgagaccagcctgggcaacatagtgagaccccatgtctataaaaaataagag

SEQ ID NO: 99893 - DNA, 353 bp, Homo sapiens
ggcacgagatgttagattgggtatatgcactgatatttcatggctcctgtgacttattaaaataaaaacatggtatgtggcggatgaacagaaaccataaagagaaagaaagtagaggaagggaatatgttatcaggaaataagagattttaacaaatacttgggagattgaaagcagacaagagtgtaaagaagccaggcatggtggcttactcctgtaatcccaaaactttgggaggctgaggcaggaggattgcttgagcctataaattcaggaccagccagggcaacatgaaaagactgtctctacaaaaaatgaagaagtcagccagtcatatggcatgtgcctgtat

SEQ ID NO: 99894 - DNA, 392 bp, Homo sapiens
ggcacgagtagtcttcaactcatctctcttcactcctccccaacagcttcttatccaccaaaacatctgcacacaagactgactgaactactttcagtttctttgatggcccatgttctctctgtttcccctgccacatcctctcaattctccaaccccatcccatatatccctgcacctggataatgtttacgcattcttcaggctctggaaagccttcctgccaaacacacacacatacatacacacacacacacacacgcatgtgtgcgcatggctcaggtcatgccacgcttcctccatagcatcctctacatccccggcacagtgcttatctcctttggtgaaatgatatcatctattttcctcaatagactctaagcaagctctgt

SEQ ID NO: 99895 - DNA, 394 bp, Homo sapiens
ggcacgagatttgagtatgtgtgcatgggtgttaagctctgtgcctttttaccagttacatatgtttgtggctccgccacaggcaatatactgaacattcccatcatcacaaggctcccttttgttgctctttaatagctacacccactttcctcctgcccgcaccccctccattattctggcaaccacaaaacagttctccatttctgtgactttttcatttcaacattgttatataaatagaattatacaacatgtcacctttgggaattgtcttttttcactcagcataattccctggagattcatccagggcgagtgtatcaatagatcactccttttcattgccaagaagtagtccacagtatggatgtaccacagtgtgtttaaccat

SEQ ID NO: 99896 - DNA, 718 bp, Homo sapiens
cggggttttaccatattggccaggctggtctcgaactcctgaccttgtgacccacccacctcggcctcccaaattgctgggattacaggcaagagccaccgcgccctgccgagaatttgcatttctaacaagttcccaggtgatgctgacactgctggctcatggaaccactgctgtagtattttccaaattatcctgattctaagaaccacctatgacctgtgctgttttttcagtggttactggctcatgtcacataaattcttttaggattcaaacatgtttgtgatattactcagtatttacatcttgcttttactgcagcatgatagaaaaattaaccacaggtatatcataacaaaaagaacatgagttaccattttcacaaagttcagatatatttaaattagcctatttaatctttttttggttgttgttgagatggagtctcactctgtctctcaggctggagtacagtggcacaatctcagctcactgcaacctctgcctcccaggttcaagtaattctcctgcctcagcctcccgagtggcggggattacaggtgcccaccaccacacatggctaatttttgtatttttagtagagatggggttttgccatgttagccaggctgggtcttgaactcctgacctcaggatggatccgcctggccttcggccttttcaaagtgctggggatttaacaggcatggaggcc

SEQ ID NO: 99897 - DNA, 376 bp, Homo sapiens
  misc_feature (1)...(376): n = a,t,c or g
taacttctgggctgtggttgtaaactgtgagcactacaaaatgtttttccttattgataccatattatggtaggaaagacatggaataaaaaatttagatggtnnaaaaaaaaaaaaaaaaaaaaaaaaaaaaaaaaaaaaaaaaaaaaaaaaaaaaaaaaaaaaanggggggggggtttttaaaaaaatttttgggggggcaaaaatttagggggggggaaaaaaaaaatttttttttttttaggggggggaaaaaaaaaaccctgggggtttttttaaaaaaaaaatttttttggggggggggcaatttggggacaccccccccaaaaaaaaaaaagtgtttgggaaaaaaaaaaaattttggggggggggggg

SEQ ID NO: 99898 - DNA, 427 bp, Homo sapiens
caaacctacgccaaaatgcatgtcactatcattttcttcggcgtaaaggctaactttcttgccacaacgctttctcggcctatccggaatgccccgacgttactcggactaccccgttgcatacaccacatgaaacatactatcatgtgtgggctcattcatttctctaacagcactaatattaataattttcatgattagagaagccttcgcttcgatacgacaagaactaatagtggaagagccctccattaacctggagtgactattgggatgccccccaccctaccacacattctaagaacccggatacttaaaacctaaacgaaaaaggaaggaatctagccccccaaagctggtttaaagccaaccccatggcctccatgacttttttaaaatgggagagaacacgacttgggcttgaaac

SEQ ID NO: 99899 - DNA, 412 bp, Homo sapiens
tgtactcccaacactttgggaggccggagcgagaggatcacttgaggccaggagttcaaggctgcagtgagccatgatcacgctactgcactccaccctgggcaacagagcgagtccgtatctctaaaaacaaaaactaacccaactttgttcagcaaagtagcagagtggagtgcccatgagacacgactgtagggcgcagacttctaaattctagggaagaaccctctatgccaccatgtggcattaggcaagccatttctcatctgtatgcttattcaccataaaactggaaaagtaatatcatgagtgaggtttcaaatgttaattttgaaaaagtttatggaaagtactgaagtgtattgcaaagtgtttggactggactctctttgttctggacttttgactcaag

SEQ ID NO: 99900 - DNA, 500 bp, Homo sapiens
  misc_feature (1)...(500): n = a,t,c or g
gaagggccccgggggttcnctcctgatgcttcatancagcctcggaanncncgggncgacccacgcgtgcggaaacatgctatcatatgcaggctcattcatttctcttacagcagttttattaataaccttcatgatttgagaagccttgcgcttcgaagcgaaaagtcctaatagtaaaagaaccctccataaacctggagtgactatatggatgccccccaccctaccacacattcgaagaacccgtatacataaaatctagacaaaaaaggaaggaatcgaaccccccaaagctggtttcaagccaaccccatggcctccatgacttanaaaaaaaaaaaaacacatataaaaaaaaaaaaaaattggggggggcctttttaaaagaccccttggggggcccaaattttcgggggtatgggagggtttttttttttttttttggggggggctttaataaacactttggggcctttgggggaggaccctttctttgg

SEQ ID NO: 99901 - DNA, 412 bp, Homo sapiens
taaaacccagcccatgacccctaacaggggccctcttagacctcctaatgacctccggcctatccatgtgatttaacttccactccataacgctcctcatactatgcctactaaccaacacactatccatataccaatgatggcgcgatgtaacacgagaaagcacataccaaggccaccacacaccacctgttcaaaaaggccttcgatacgggataatcctatttattacctcagaagtttttattcttcgcaggatatttctgagccttttacacactccagcctaacccctaccccccaaatatgagggcactggcccccaacaggcatcaccccgctaaatcccctataagtcccactcctaaacacattcgtattactcgcactaggagtatcaatcacctgagcc

SEQ ID NO: 99902 - DNA, 390 bp, Homo sapiens
  misc_feature (1)...(390): n = a,t,c or g
aaaaaaatagataaacaaaatgtggtaaatataagtaaggggataatattcagtcattaaaaaagaatgaaatcctgtcattcatggcaacatggatggaagtggaggacattttgttaagtaaaataagagaggcccagaaagttacacaccctgtgttctcattcataagtggaagcttnnnaaaaaaaaaaaaaaaaaccccggtgtttttttaaaaaaaaaatgtaaaggaaaggtcctaaaggctggaaaaaataaggccaaggggggggataaaaaaaaattttttaagggtttgaaaattcccccccgaaaaaaaaaaaaagttctaaggttttttaaaaaggggggaggacttttgttaacaaaaatatatcccatagttta

SEQ ID NO: 99903 - DNA, 422 bp, Homo sapiens
ctattcaagcctcaacaatggcaggcgcccctccccaagcctcgttgctgccttgcagtttgatcttagactgctgtgctagcaatagtgaggctctgtgggcgtaggaccttctgagccatgcacgggatataatctcctggtgtgccttttgcttagaccatcagaaaagtgcagtattagggtgggagtgacctgattttccaggtgccgtccatcacccctaggaaagggcattccccgaccccttgcacttcccgcatgaggtgatgcctcgccctgcttcagctcaggcttggtgcactgcacccactatcctgcacccactgcccaacaatccccagtgagatgcacccgatacctcagttggaaatgcagaaatcattcatcttctgcattgctcacactgagagctgtaactg

SEQ ID NO: 99904 - DNA, 399 bp, Homo sapiens
gacaagggcatgaatgttttcatgcctgctaacacagcttctgttctgtggcccatggatcagggagtaatattgaatttcaagtctttttatttaagaaataacattttctaagtatatatctgctatagatagtgattcctctgttggatctgggcaaagtaaatttaaaaccttctgaaaaggatttaccaatctagatgccattcatgattcgtgggaggagatcaaaatatcaacatgaacaggagttgggaagaagttgatttccaacttttagggatgactttaaggggttcagtacttcagtggcagaagtatctgcagatgtggtagaaataggaagagaactataattagaagtgaagcccggagataggactgaattgctgtaatctc

SEQ ID NO: 99905 - DNA, 466 bp, Homo sapiens
  misc_feature (1)...(466): n = a,t,c or g
gggatttgatagccctgcganactgtgatggccgttgcgggacgccccacgcgtccgcccacgcgtccggngaaaatttctatgtagggtttttatggctgacaaaattatcgcatgcttccctctgattttctttcctgctaggagttctgtcaccttaattaccactgttcttcccaatagacccaagggtgtactgctccacattagattttgatccaactgtgggtgaaaatccctttcctttaaaaaaacaaaacaaaaaacaaaacaaaacaaataaacgacaacagtctgggcacaatgactcacaattgtaatcccaacactttgggaggccaagatgggaggattgcttgaggtcaggagtttgagaccagcctgaacaacatagtaagatgccatcttgaagaagaaggagagggagaaggaggaagtanaaaaggaagaggaggagaaggaggag

SEQ ID NO: 99906 - DNA, 404 bp, Homo sapiens
ctaacccagatatatgatagtcaaacttctgaaaatcaaagaaataaaatattggaagcagcaagagagaagtgacactttacctctaagggaaaagcaatttggataatagtggatctctcatcagaaaccatggaggtcagaaagaatttgcacaattttcaagtgctaaaagaaaaaaaaaaacctgggaagtcagaattctatattcagcaaagatatctttccagaagaaagggaaaatcaaaatattctcagatgaaggaaaactaagataaagtttcaccagtaggcctaccctaagagaatgataaaggaagttttctaaatagaaataaaatgatagaagaaggaatcttaaaacatttggaagaaaaaaagaatacccgaaagagttaaaacct

SEQ ID NO: 99907 - DNA, 394 bp, Homo sapiens
ccacaatcaattttagaacattttccttacacctaaaaagcaactctgttccccttaacctatccattcattattccattccctacaccccatccccaaataccaggcagccactaatatataggtttccctattctggacatttcacataaatggaaccatgcaatatatggtaccttatatatgggagccatgccatatatggcttctttcacttagcacagtgttttcaaaaaggattcatgctgcaacatgtatcacaagttcattgctttttatggctgagtaatatttcattgtgtggatatatcacatgtattcacccattcatctgttgatagacatttaggttgcctccactctttggctttgctgaacatgccactataaacat

SEQ ID NO: 99908 - DNA, 379 bp, Homo sapiens
ttccttatgctaaacatcctctacagtatttggtgtggtcagtgttatagattttggctattctttcaggtgcatagtggcatcttattgttgttttgatttgcaattccctgatgatgtatgaggggacttcaaaaatttatggaaaaattgaactaaaaggtaaaagtaaaaaatataaacttcttaacataagctccatcgagttcaagatactttgtaagcaatgataccagccatttggttcatccctaaggaactgagggttctgagaatttaatcaggtcaatgaagtcttttttacgttatgaactgaagaaaaatgtgtgcaatttaaaggtttgttaagactttgaaacaaaaagaagtcagaaggagc

SEQ ID NO: 99909 - DNA, 391 bp, Homo sapiens
atcacttgaggtcaggagttcaagaccagcctggccaacagaggtgaaaccccatctctactaaaatataaaaattagccgggcgtggtgtcagaggttgcagtgagccgagatcacgccactgcactccagcctgggcaacagagtgaaactgtctcaaaataaattaaaaaataggattctaaaagttcaaccatctgtaataaccccaatcacagacacagcagatccccaaatataagttgaagcacttaacttgggttggtaggctaaaacaacatctattttagtaggctcaaatacaaaaagctacattaaagccttgtctttgtctgtactgctatactggaatacctgagactggctaatttatatttacttggctcatggg

SEQ ID NO: 99910 - DNA, 397 bp, Homo sapiens
ggattcttaaaagaaataatgacagaaaactctaaatatggagaaggagatgaatatctacattcataaaatgtaaattaccccaaatagatcaaacataaagagatcgtcactgagacatattacagtcaaattctcaaaagtcaaagacaaacagaggattataaattagcaatagaaaagcaacctataacatacaaggaaaccacaataagactatcagaagatttctcagcagaaaccttgatgccagaagatgatgggatgatatagtcaggtactggttaaaaaaaaaaaaaaaaaaaaaaaaaaaaaaaaaaaaaaaaaggggggggggccttttaaaaaattctttggggggcccaattttaacggggggggggaaggaaattttttt

SEQ ID NO: 99911 - DNA, 412 bp, Homo sapiens
  misc_feature (1)...(412): n = a,t,c or g
cttacacttaggagatttcaacttaacttgaccgctctgaccaaaaaaaaaaaaaaaaaaaaaaaaggggggggggcctttaaaaaaaaccttgggggggcccaatataaccgggggagggaaaattaaattttttttcttaaggggggggaaaaaaaaaccccgcgggggatttttggaaaaaaaccttttttttggggggggcaaaatggggccccccccccccccaagatttaagcgctttggggaaaaaaaaaattttaaaggggaaaagggggaaaaaaaccctaaattttttgggggtagaaaatttttcttcccgggttttgtttacaaaaaaattcccccccgggggcgggggttcnnccccnncccacaactgggcatatatgtgaacatatggccctttgtg

SEQ ID NO: 99912 - DNA, 393 bp, Homo sapiens
gttgcagtgagccgagatcacaccatggcactccagcctggacaacaagagtgaaactccctctcaaaaaataaaataataatttaaaaaaacattcaaatgatccaaaacttagtaacatttcatgaacatagggaccagatatggtagcctcaaccaaacatgtaaaacatgaacacaaatctgccaacaaagagccttcaagcaccaagaaaaatacttgtataaaccttcaagaagtacagatctatccttgggttcaagcttactgcaattttaaaagtgattaacctgcgggacgtggtggctcatgcctgtaatcccagcactttgggaggccaagccaggtggatcacgagggtcaggagtttgagaccagcctggccaacatgg

SEQ ID NO: 99913 - DNA, 359 bp, Homo sapiens
ctcaacattatttagtttttagggaaacgcaaattaaagctgcagtgagatgccattacatacccactggaatggccaaaattataaagactggcagcaccaagtgttgacaatgatgtggagcagctggaactttaattcattgctgggaggaatgcagatatgaaacagccactttggaaaacagcttggtagtttctcatatagatgctttgtgactgaacagtcccattcttgcagatttacccaacagaaatgaaaatgtgtgtctgcagaatgacatgcctgagttttcttatcagttttatttataatagcgtcaagctggaaacaaccgaagtaccacaaactagttaatg

SEQ ID NO: 99914 - DNA, 378 bp, Homo sapiens
tttttttttttgagacggggcctaattttgtcaaccaggctggagggcaggggcatgatcttggttaattgcaacctccgcctcccaggttcaagaatttttcccgcctaaacctcccgagtagctggaattacgggcttgaaccaccacccccaccctttggggtctattttttaaggaagaaaatttttgttgacagcccatgctttttttttgatggccagaaccaggggccatcctcatgaacagtagggattcagggaaaaccaattaggaggaaacttcggcttaaagggggtggtataaaaaggaaactgcctccttctgggtcaccaggggggggcagcctaggataatcactgggaaaggagacattgg

SEQ ID NO: 99915 - DNA, 263 bp, Homo sapiens
tgaggggggtgctatagggtaaatactggccctatttcaaagatttttaggggaattaattctaggacgatgggcatgaaactgtggtttgctccacatatttcagagcattgaccgtattatacccccggacgtgtatcggagaaagtggtttaggtttagacgtacgggaattgcatctgtttttaagcctaatgaggggacagctcatgagtgcaagacgtcttgtgatgtaattattatacgaatgggcgacgcggtct

SEQ ID NO: 99916 - DNA, 361 bp, Homo sapiens
gccatttccactttttggctgttgtgaataatgttactatgaacatctgtgtacaagtctctgtgtgaactggtattttcatttcttttgagtatacacctaggagtggcaatggcccaaatatctatcagccgatgaatggataaataaaatgtgatatatctggaccgtggaatattatttaaccataaaaataagtgaagtactgatgctacaacatggctagggcttgaaaacattatgttaagtaaaaggagctagacataaaagaccgcatcgtgtatgattcccatttatgtgaggtgttcacaataggcaaatccatagaaaaggaattcttcccacagctgggagaagggaa

SEQ ID NO: 99917 - DNA, 335 bp, Homo sapiens
cctgggctcaatcactgctcccacctcagctgggaccacaggcatgcactgcaatgcccagctaattttggtatattttgtagagacacggttcactgtgttgcccgggctggtctctaacgatcctcctgctttggcttctcaaagtgcagagattacaggtgtgagccactgcgcccagccttaagtgtgttttcattattgccttacattttttagtctacagtgatttaaaatgggttaaaatgtaatgatttaagttggggattgacaaacctcttctttaaagggccagaaactaagtactttaggcttacaggccgatagacaaaacc

SEQ ID NO: 99918 - DNA, 345 bp, Homo sapiens
ctttaatgctcttccttttttaaatagagatctatatcattttccttctctctataaaacttcttttaacattgcttgcaaggcaggtctgctggcaacaaattccctcaatttttgtgtctgagaaagtcttcacttttcaagaataattttgcaagggatatgattctaggttgttggggttgcttttttcctctcaacactttaaatattttactccactgccttctacctggcatagtttctgaggaaaaagtcaggcttttttcattatctttttttttttttggaagttggaaagggaataacccccgggaaatttttttttttttttttttaggcaag

SEQ ID NO: 99919 - DNA, 349 bp, Homo sapiens
aagtagctaggaccacaggcgcgcaccaccatgcctagctaattttttattttttgtagagatgggatctcgctatgttgcccaggctggtctcaaactcctgggctcaagtgagccacagtgctgagccttgtcttctggtttgttgaagcagtaagtcagacaatatttgccacaataatgtctgtcaattgtttgtggctggccataaaaactccagcatcacattcatctgaaggacactgctaatgaaggccactcattttgctgttgtcatccaccttattgtatctcaggacatccagcttaatctttttctattatgcttattcttcttgggagtggtatg

SEQ ID NO: 99920 - DNA, 319 bp, Homo sapiens
atttagaactcatatccaacactcaggcaccataccatatagattatggaggtcttgaaatcagatagagtaattcttctaactttattccttttcaagttgttttggctattctaggccctttgcatttccatataattgctagaatcagcttatttctgtgaaatttctgttgagattttgattgtgattgcattgaatcggttgatcaatttggagagaatcaacatcttaacagtattgtgcctttgcttccatgaacacattgtatatcttttcatttatttagggcttatttagtttccggtcgacgcggccg

SEQ ID NO: 99921 - DNA, 552 bp, Homo sapiens
atttatctaaccttaagtttcttacttaggaaaacctgaaattcgcagtctataaaaatgattaactgggaaataactttcaatgataactctcagttttcaaaagtaatctgagtaaactattaaaaaaattaattaggtaaatgtaatggaataaatgcttgtgattaaacttgttatataatttagaatctaaaattatattaagttaaataataggtactcattaaacatctgggtcatttccaatttaaaatattaggccaggtgcagtggctcacacctgtaatcccagcactttgggaggctgaggctggcagatcacctgaggtcaggagttcgagaccagcctggccaccatggtgaaaccccatctctactaaaaatgcaagaatcagccagtgcgtggtgacgggcacctgtaatcccagctactctggaggctggggcaggagaatcacttgaacccaggaggcggaggttgcagtgagctgagatcgtgccactgcattccagcctcagcgacagagtgaaactctgtcttcaaaaaaa

SEQ ID NO: 99922 - DNA, 331 bp, Homo sapiens
tgcaccaccactcccggctaattttttttgttctgtgctagggacgagttctcactatgttgcctaggctggcctcgaactcctgggctcaagcaatcctcccgacttggcctcccaaaatcctgggattacatatgggagccactatgcctggcctgatattcctgtattctaacttatccatcccttatggtatgatttttagttttttctaatttatgctttcatacttttatctatcgtgctacctgtaaaagcttcatatagttttctttcatccagtgattttagccccctgataatcttctctatcagttatggcactggtgac

SEQ ID NO: 99923 - DNA, 339 bp, Homo sapiens
ttttttgttgttttttgtgttttcatgttgttgattactcttcccacaccatgcgctttctggaggatgcatggggacgaaaaaggggacctatcctaagggggggaaaagcccaaaaaaagagagagaggagatgcaagaaatccagtcaagaaaaaaaaaaggacgcaagaacaactggcgggggagaacaccaagatacaacaggggaggggggagggcgcacacctggaggaccaaaaaaaaaagggggcccccccccccggagaggtcaaaaaaaaagggggggggggggggggggaaaaaaaaacctttaaaaaaggggggggggggggaaaa

SEQ ID NO: 99924 - DNA, 331 bp, Homo sapiens
  misc_feature (1)...(331): n = a,t,c or g
gtttttaaaggtactcattatatttctttaacagttattaaatcattcagttattgtatttcttctaagttttgatcattcatattttttgagaaatttgtctctttttcttgctttcaaattaattggtgtaaagaattcatagtatataattttatcttttagatatctgctacatccatagcatctacttaatttttttttttttttaaaaggcagggtctccctgtgttgaccaggctggtctcaaactcctgggctcaagggatctgccagccttggcctcccaaagtgcggggattacgggcttggagccccggactcagcctcn

SEQ ID NO: 99925 - DNA, 333 bp, Homo sapiens
  misc_feature (1)...(333): n = a,t,c or g
ctttgttctgcttcaaattacaatgccagttctgatggagcttttatggtgacacaactccagtattacttttgcatctgcttgggcttgttcacatttacaaccagactttcggcatatctgggaactggaaagctcacaacagctctaccaaataccccaggactcttagattcttgaaagatctctgttaccaaatgctactttccaagactttttttctgagatggagtttcactcttgttgcccaggctggagtggtgcaatctcagctcactgtaaccacgacctcccaggttcaggtgattctcctgtctcagcctcttaagtagn

SEQ ID NO: 99926 - DNA, 336 bp, Homo sapiens
gtttaccaagtgtacagcagcgtggtgtctgagaaaacacagcatatatcttaattttaaaatacgttattactaggaaatgctatcaatctaccttcaacaaatcataatcattttgctgctggagggtcttgctttgatgatgaaggctgctgactgattagggtggaggctgctgaatgttgaggaggctgaggcagcttcttaaaataagacacagatgaagtctgatgtacccgaggactcttccttttaccaatatttctctgttgcacatgatggtgtttaagagcatttttcacccacagtaaaacatcttttttatttgtttttgct

SEQ ID NO: 99927 - DNA, 358 bp, Homo sapiens
ttttgtagacaggggttctcccatgttacccagtctcaaatgcctgagctcaagcaatcctcccacctcggcctcccaaagtgctaggattacagttgtgatccaccatacccaacacaggttcttttttgactatcacaagctgtgtgaacctagatgccaagtcacagctgagctaaacctcactttctctgcctaccacagaaaattactaccatatattctcttccttatatttatttcttcttttcaacgtttcattcccctatgccatctatctgtaattttagtagaaaacataaatattacatttaaaaggtcttgtaaaggagcggggacaggtaggtgaattgatact

SEQ ID NO: 99928 - DNA, 319 bp, Homo sapiens
tacgtgagcctgtggctttttgccagcctgtgatgcatggattgagaagtaccctccagcataagctcacaaatctctctttttagtggtgacttctcttcagttcctttggaggagctttcaaatcttttttttatgttttgtccagaacatataattgttacctgtgagagggttacttcaaattattccactataaatggaagccagaattttcctacccttaaattttttttttaagatgagtctcactatgttgcccgggctgtctttgaactcctgggctcaagtgattatcccacctcagcctcccaagtag

SEQ ID NO: 99929 - DNA, 278 bp, Homo sapiens
tgacagactacattgagaggaacaacagttcaaataactaagaacttgtcttcagaaactatgaatgccagcagatgtgaaaaaaaaaatctttaaagtgcttggggttgggggatgtgggagaataattatcaaccaattctatactcagcaaaaatatccttcaagaatggagttgaaataaagacctttacaaataacagaaaattaagaactcattaccagtataactttggtataagaaatattaaaagaagttcttcaggctgaaggataat

SEQ ID NO: 99930 - DNA, 713 bp, Homo sapiens
ggcacgagctgtgaatctgagaggtatgaagtagtatctcactgtaggggtttaaaaaatcctttgtattttgaaaattttcaaccacagctaacttttgaaagaattttacggggaacatctgtatactcctcctagatcctgctattaagattttgctatgcttaggccgggcgcggtggctcacgcctgtaatcccagcactttgggaggccgaggcgggcggctcacgaggtcaagagatcgagaccatcagatcgagaccatcctggctaacatggcgaaaccccgtctctacgaaaaatacaaaaaaaaaattagccgggtgtggtggtgggctcccgcagtcccagctactcaggaggctgaggcgggagaatggcgtgaaccccggaaggcggagcttgtagtgagccgagatcgcaccactgcactccagcctgggcgacagagcgagactctgtctccaaaaactcccaaacacctcattttaatactttcatattaattccgtgattcttaaccctgacccacactttagaatccctggggagttctttaaaaaagctactgattatattggccccaccctaaagtaactggatcaggatatggacagagttggaaatcgctgcgtcgggattgcttttgtagtaggatggcagctgcttttatggtgcccttgtgttgattttgctacatgaaatatgatc

SEQ ID NO: 99931 - DNA, 340 bp, Homo sapiens
  misc_feature (1)...(340): n = a,t,c or g
agaagacctgcgagtaaaactgaagaaagaaggatattctaatatttcttatattgttgttaatcatcaagatccaatgctaaactccaatggttcagtgactgtggttgctcttcttcaagccagctgatacctgtgcatactgcaggcatcatgagcatcatcacaatcatggacatcagcaccttggcagcagtgagctttcagagaatcagcaaccaggagcatattcctgtttatcaacaagaagaaaaccaaacagatgtctggactcttttaaatggaagcaaagatgacttcctcatatatgatagatgtggccgncttgtatatcatcttg

SEQ ID NO: 99932 - DNA, 343 bp, Homo sapiens
ctaatggctcatgcctgtaatcccaaaactttgggaggccaacgcaggagaatcactggaggctgagagttcagtatcagcctgggcaacacagtgaaatcctgtctcataaaataatttaaaaattaaccgggtgtaatggcatgctcctgtagtcccagccacttgggaggccccatctctaaaaaaaaaaaaaaaaaaaaaatttgggcatgtccatgcatgtatgataagtccatttatgaaaaggccccaattaatctattcttctattaaaaggaattgggatggctttggttttctccttgcgcgatagtggctactttgggtatgaaaccaaaat

SEQ ID NO: 99933 - DNA, 342 bp, Homo sapiens
tttattggcatttgagctgtttctagtttttggctattacaaataaagctgctatgaatattcgtcttttatggacatgtgcttctatttttcctaggtaaagatctaggaaggaaatggctggatcatagggcagcatctgtttaactttgtaagaaactgcctcactattttctcacatgactgtaccacattaattctaccagcagtggggaggggttcagttcttccatttcctcaccaacacttgctatgatcaatctttttagtttttgacattctaataggcatttagtggcagctcctgtggttttaatctaggtttcccaacgactaaagacc

SEQ ID NO: 99934 - DNA, 334 bp, Homo sapiens
caaaattattaccagttgaaaggttacaggagaaaaataataggcggtctttttttttttttttttttggggggggcctttgggaacttggcggaattagggtaggggggccaataattcccctttttttttaaagctggggggacccccttggatttcaaaaattttttttttttttaaaagccggggccccccaagggggcccttttggcttttgggggcattaaatttttttttttttttttggagaaaaattttctttttttccccaaggggaaaacacttttggcccctttttttaaggggggccttcccctcccgggttagacggttt

SEQ ID NO: 99935 - DNA, 383 bp, Homo sapiens
aaaagtcttccttggaggctaagggagaaaagtgaccttttgaagctcaaggtgagaaacagcatgatgggtagcacacagtaactcacacctgtaatcctaacactttgggaggccgaagagggaggatcacttgagctcaggagttcaaaaccagcctgggcaacatagtgggacctcatctctacaaaaacttaaaaaaaaaaaaaaaaaaaaagggggaaaaaaaacctggcgggggcttttcccctctttaatggggggataaacaaaagttttgttaaaagtggcagttcctttccagggctgttaaagtggccctgcaaaaccaagctgtccatagaaatttggcaaaggcaatttttttccaaaaacggaaaaaa

SEQ ID NO: 99936 - DNA, 395 bp, Homo sapiens
cctccctcccctggcaaccacccttctactctctgtttcaatgagacaacagcatcagataccccatataagtagaatcatgcaaaaatttttcttctgtgactggcttaacattctttcacttagcataacatcctttaggtgcatctatgacagaatttctttctttttagctgattaatattgcatcatatgtataaaccacattttctttctatgttcaccatcgagggacatttaagttatttccacctcttggttatgctgcaatgaacatgggagtgcaaatatctcttgaagatcctgatttaaattcttttgaagaagtacccaaagaagtattgctgcatcatatggagttctatttttttttttttttttttacaaatctccaa

SEQ ID NO: 99937 - DNA, 314 bp, Homo sapiens
ctcaggcttactttctactgggctcactgcagcctcgaccttctgggaaccacacccggctaatttttgtattttttatagagacagggctttgctgtgttgctcaggctcattttgaactcttgagctcaagcaatccatgtgtcttggcctcccaaagtactaggattacaggtgtgaaccaccacgtccagcccaaatttaccatttttatgtgttcgattctgtggcattaagtatattcacgttgttttgcaaccatcaccaccatcagccttcaaaactttttcatacacttctggtcgacgcggccg

SEQ ID NO: 99938 - DNA, 358 bp, Homo sapiens
cttcttatcacttggcattcattttaactactgtctggtcaccacggagtcaaaactttcaaaattaagattgacttactttttttttttttttttggaaacggagtttcctttttgttccccggcctaaaggccatgggcccaatttgggttaattgaaattcccccctccggggtcaagggaaacccccgccctaaccctgccaagaacctggaataataggagggcccccccacatccagctaattttggttttttaagaaaaaacggggtttaattttttggaccaggtgggtttaaaactcttgacctagggggacccacccgcttgtggttccaaaagggcgggaataacgg

SEQ ID NO: 99939 - DNA, 346 bp, Homo sapiens
gcagtgagtctagcttcttttacttaaaataattagcatttgagattcattcatgtctttgtgtttattaatagttaattccttttaaatgcctactagtattccattatatggatgtaccatagtttgtctattggccagttgaagatatttgactcatttctagtgtttttggccattatgaatgaaactgctgcaagcatttgtgttcagggttttgtgtaaatttaagttgtcatttatgttgggtaatacctatgagtgggactgctgagtcatatggttagtgtatgtttaattttataagaaactgccaaactgctttccaaagtgactataccatttt

SEQ ID NO: 99940 - DNA, 353 bp, Homo sapiens
cacatacataaggctccactgatttgctttgttaaaagaactctgttccatcacaggaataactctactaccttgaggcaggagaatcgcttgaactccggaggcataggttgccgtgagccgatatggtgccactacactccagcctgggccacatgagcgaaactacatctcaaacacataatggaataaacaaaaaggttcaagccacattgatacatatctggcctatcactttccatactgacgacgggaaaactaggacatgcacacaggggttgaagatggtcttttcctgcaaatacatttatttaacgttaaacagcagtagcaggcgtctctttttgactatg

SEQ ID NO: 99941 - DNA, 355 bp, Homo sapiens
gcgatcttcacacctcagcctcccaagtagctgggactacaggcgagcaccaccacccagctaattgttgcattttttgcagagacagggtttcaccatgttgcccagcctggtcttgaactcctgaattcaaaccatcctcctgtagcaggaagagctgcagacaaaacccctcagacaccgagttaaagaaggaagggatttatttgtccgggagcgtcggcaagactcctgtctcaagagccgagctccccgagtgagcaattcctgtcccttttaagggctcacaactctaagggagtccacatgagagggtcgtgatcaatggagcaagcagtgggatacgtgactgggg

SEQ ID NO: 99942 - DNA, 354 bp, Homo sapiens
  misc_feature (1)...(354): n = a,t,c or g
gaacagagagataaactactttctcaccactggaagcagtcaggacaattcaaatgctggcctaactggttaagagccctcaatctgtggtcagatatatctaagtttctcaatctataaaatacagaaataaggccaggtgcagtggctcaagcctgtaaaacaagcactttggaaggctgaggtgggtggatcacttaagcccagttcaagaccagcctgggtaacatgatgaaaccctgtgtcttttctaaaaaaaaaaaaaaaaaaaaaccccacccggggggggggggaaggaagaaaaancccttgttccaaaccgggggcttaaaaaaaaggtttgatcccggccca

SEQ ID NO: 99943 - DNA, 348 bp, Homo sapiens
  misc_feature (1)...(348): n = a,t,c or g
taaataacaaaaaaatatggactttaaaaaatctcaaattttttagagacagggtcttgctctgttttccagattggagtacagcagtgcattcgcggctaactgcagcctcaagcactggggctcaagcaaacctcctgcctcagcctcgtgagtagctaggaccacaggtgcatgccaccatgcctggctctaaagagaaaaaaaacttgataccatagagccttgaatatggtcgnnnnnnnnnnnnttttntttatgggttgtgntttgtttttnttggaaagggggggttntttgnggagggtggtttgttatttttggattataaataaagatattggtttg

SEQ ID NO: 99944 - DNA, 628 bp, Homo sapiens
  misc_feature (1)...(628): n = a,t,c or g
cggacgcgtgggcgggttcttggttccaatgagggacttagcagaagcctccaggggccagcagggccaggtgaaactgggagaaatgaagccctctgtgtcctgtgtgtgtggtggggtttaatgcattagcaaatttaaacttaaaaactaactctaggccgggcacggtggctcacacctgtagtcccagcactttgggaggccaaggcgggtggattgcctgagctcaggagttcgagaccagcctggacaacatggtgaaactcttgtctttatttttttaaaaaaacaaaaactaactttcgatgtgatcataccaggaaagttttgcgtggtcaccatgccaagaaaatgactttggttgcccagcagatccacagcgactctttctcaagggctactgtggattctagattgaggaaaggggccacttaggactcagtgctggtatcctccacagtcctttctcccagactctgggccctccctttgggaacccagggaaatcccctcttagggttgacgcttgctgggntagggaaggacttnaggtctggttgcgccaaggggccttcaagtttaggaaggggccntgccttcagtgggntgattttgagcgttgatt

SEQ ID NO: 99945 - DNA, 584 bp, Homo sapiens
ggtcctaaccagggttaaggatcagtgtgtccgttgctagaatccagagcccacctgctgctctgaaaagcaggctcctgaggccagtgggggagcagtgccccccatgcccttcaccgaggagcctctgtgcctgtcccttgtcctcggccccaggagtctcctcaactgacactgaagtggtggaagcagttgagtgccaggtcatcccccatcaccacactggggcagcgtccccaggcttccagcagctcccaggtgggtcccaacgtggaaggattaattaattctttctaaagcagttgcagccgggcttggtcgtcacgcctgtaatcccagcactttgggaggcccaggcgggcagatcacttaaggtcgggagctcgagaccagcctggccaacatggtgaaaccctgtctctactaaaaatgcaaaaattagccaggtgtggtggcacacgcgtgtaatcccagctacttgggaggctgaggtggaagaatcacttgaaccctggaggcggaggctgcagtgagccgagatcacgccattgcactccagcctgggcaacgttgtgaccttgtct

SEQ ID NO: 99946 - DNA, 446 bp, Homo sapiens
ggcagtttacccacagtagaaatgttttatgaaattggagttaatctcaaaccctgccactgctttatcaactaagcttatgtcctattctaaatcctttgcttttattttgatatctttgatagcatcttcaccagaagtagattccatctcaaaaaggtgctttctttgcttgtccataacaagtacttcttcattattcaggatttatcatgagatttcagcaatttggttacatcttcaggctccacttctaattctgattctcttgctatttccaccacatctgcagtgacttcctccacttaagtcttaaaccccctcaaagccattcacgagggttggaatcaaccaagtcttccaagctcctgttaaggttgagatttagacatccttccatgaatcatgaatgtcttaaatgcattcacttactagagtagtgaatt

SEQ ID NO: 99947 - DNA, 398 bp, Homo sapiens
gcgatcgtagctcactgtagccttgacctcctgggctcaagtgatcctactacctcagtcttccaagtggctgggaccacaagcgtgcatagccacacccagccaatttttgtttgtttactttttgtaacagagaggtctcgatctcctggcttaacatgatcctcccgcctcagcctcccaaggcaactagattacaggcatgagccaccgtgcggggccaccactgactttctgaagcccaagtgtaatagccaccataacaaacaccttttgactgatacattctgaggatcatattccttttttatatataattgtaccttttattttaaatttgagaggtacaggtgcaggtgtggttcatgggtatatcatgtgacactgaggtttggaag

SEQ ID NO: 99948 - DNA, 408 bp, Homo sapiens
gggtgcaatcgtagctcactgtagccttgacctcctgggctcaggtgatcctcctacctcagtctcccaagtagctgggaccacaagcatgcatagccacacccagccaatttttgtttgtttactttttgtagcagagaggtctcgatctcctggcttcacatgatcctcccgcctcagcctcccaaagcactagtattacaggcatgagccaccgtgtgtggccaccactgactttctgaaccccaagtgtattagccaccataacaaacaccttttgtctgatacattctgtggatcatattccttttttatatataattttaccttttattttagatttgagtgggacaggtacaggtttgtttcatgggtatatcatgtgacactgaggtttggaatgcagat

SEQ ID NO: 99949 - DNA, 506 bp, Homo sapiens
gttaggacaactaagttccttttaaatgactcaactttctggtcataagttgtaaaagttgtaaatcaaccctacctcttcttctacccccttttccttttctcgcaaatcgcgcatttactttatttggaaaaagtttgggtctaagcttaccaggatcagcttagattgtgcggtctgatcccagccaataggggatggaaacaaaaacaggaactgcattagggttcaaaacccctttcttgctgggcgcggtggctcaagcctgtaatcccagcacttcggaggccgaggcaggtggatcacgtggtcaggagttctagaccagcctggccaacgtggtgaaacccgtctctactaaaaatacgaaaactatcggcgtgttggcacgtgcctgtagtaccagccacttgggaggctgaggcacgagaattgcttgaacccgggaggcggaagttgcagtgagctgagatccaatcatcgcgctccagcctgcgtgacaaagc

SEQ ID NO: 99950 - DNA, 637 bp, Homo sapiens
ggccattgtggtagggtaagggactcactttctcataccatgggtacagaaaccaattatctttgaccaccgttctcaaccacataatgtgccagtcatcactggtagcaaagatttacagaatgtcaatatcattccgtgcatcctctttgggcctgtcactagccagcttcctcgcatcttcaccaggatcggagaagactatgatgagcgtgtgctgccatccatcactactgagatcctcaagtcagtggtggctcgctttgatgctggagaactaatcacccagagagaactggtctccaggcaggtgagcgacgaccttatggagcgagcagccacctttgggctcatcctggatgatgtgtctttgacacatctgaccttcaggaaggagttcacagaagcagtggaagccaaacaggtggctcagcaggatgcagagagggccagaactcactggccactgcaggggacggcctgatggagctgtgcaagctggaagctgcagaggacatcacgtaccagctctctcgctcttggaacatcaccaatctgccggcagggcagtccgtgctcctccagctgccccagtgagggcccaccctgcctgcacctccatgggccaactaggcct

SEQ ID NO: 99951 - DNA, 348 bp, Homo sapiens
ctggagtcattttattttcttctctactattacaagtgatcaagttaacctctacgtctaaaaagactaattctttttatctttgagacagagtgttgccctgttgcacacactggagtgcagcggcacaatctcagctcactgccacctctgcctccagggttcaggcaattctcctgccccagcctatagagtagttgggattacagattcctttagaataacacactgtattctaacctgtattccttcagaataacacactgctacagatcagacttgcaatattttctaactataatgaaaaattttaaagaaaatcgagaaatcaaatgaggaaatactgtg

SEQ ID NO: 99952 - DNA, 386 bp, Homo sapiens
  misc_feature (1)...(386): n = a,t,c or g
atggtcgagtcgacggtaaactaatgggagtagggaatgctgcaaacaggcccatttaaaatacaactaagctgggcatggtggctcacacctgtaatcccagcattttgggagcccgaggcgggaggatcacttgagtttaggagttcaagaccagcctggacaacatagttaagaccctgtaccccaccaaaaaaatcattaaaaataaaattaaattaaatacaacaacagaaggcaagcaattaagcaattccccactatggcaatttattgactagaaagcttaagtcctaagatacatacatgcatacaaatacatacagtgaaagagagaatctgcacgcgcacacacacacacatacaccctatgtgctcccccgcan

SEQ ID NO: 99953 - DNA, 394 bp, Homo sapiens
  misc_feature (1)...(394): n = a,t,c or g
ggatgagccggnngnngnnnnaattgaagngcatgagtatacatcgaacnatnccgangatgnaagaataccccaccacaacccaaaaanaagaagaatctctcgaggggatccgcaattctgcggccgcgtcnnngacgtcaggtgcatttgcggtggctttcgtgcctcgcaatcccaacnagtttgggaggccaaggcagatcacttgagtcaaagagtttgaggccaacatggntgagaatccggaaaaattagccgggcatggtggtgtgtgcctgtagtccccgctacttgggaggtcgaggcacgagaatcgtttgaatccagggtgtggaggttggagtgagccgagattttgccattgcactccagtttggggtcgacgcggccg

SEQ ID NO: 99954 - DNA, 358 bp, Homo sapiens
caatgacgtaattgatgatgcatcaattccaaaattatgcagtcatcaagaataactacattatgtaaaatggtgcagccactttagagggctctttggcagtgtcttataaaactaaacatacctcatccctatgactcagcaattccacttctgcatttctaccaatgtaaatgaagacatatgaatccacacaatgacttttacatcaatgttcataacagctttattcataacagccaaaaactgaaagcaatctaaatgtctatcaataggacaatggatgaagaaatgatgatgtattcatacagtgcagtaaaactcaggaatataataacatgaatagatctaaaaaagt

SEQ ID NO: 99955 - DNA, 350 bp, Homo sapiens
gccaccgcgcctggccaaagtacagaaatttttattatttttttatttagttttttgagacagagtcacactctgtcacccaggctggactgcagtggtgtgatctcagctcaccgtaactttggctcaccgtaatctccgcctcccgagtggctgggattacaggcatgtgccacaacgcctggctgatttcgtatttttagtagggacggggtttctccatgctggtcgggctggtctcaaactcccgacctcaggaggtgtgagccacctcacccagccagtctttgctttcttaaatactggatcacttgctattttttgtcttcttcaaactgtcgcacctcagg

SEQ ID NO: 99956 - DNA, 636 bp, Homo sapiens
gactgcatcaagttggcaaattgattccatttatgattgttaaaataggtgaataagattagatgacaagataacaaaaaaggaatacgttatttatttgtttatttcagacagagttttgctcttgttgcccaggctggagtgcaatggcatgatctgggctcactgcaacctctgtctccctagttcaagcaattctcctgcctcagcctcccaagtagctgagattaccggcatgcgccaccacgcccagctaattttttgcatttttagtagagacggaatttcaccatgttggccaggctggtctcgaactcctgacctcaggtgattgacccgcctcaacctcccaaggtgctgggattacaggtgtgagccactgcactgggccaagaataagatttttaaaaacattttcgcatctggaggctccagggggcttccctgagaaacggcagcctctgcggtcagagaggctgcaattcagagcgttcccacaaacagcaccatgtgctcatgcttacctgcttgggtgtgtgagtcacctggagatggggtgcagaaacattgacatacctgagctatctttcttcctctgccctttgcagtgtttgatatacagaggaaagtcaccta

SEQ ID NO: 99957 - DNA, 368 bp, Homo sapiens
cgagatcacgccactgcactccagcctgggcgccattgagcactcaagaccatttctatgtattttattttttcttacattttctcattggaagtctatttatttttgcctgttttgtaagcagctactttattgaattctcttactgtttataattttttcgtggattcttttgggttttacaggtatacaatgaaataaaatttaaactcaaattattttaaactatctgctgaaattttacctcaatgaaaatgaagattttctattacttttactcttctacctcgagcacttagcatattaccttgcgcaaagtgggtaatcaatacgtatttgttaaatgaattatatcaatgtaccttact

SEQ ID NO: 99958 - DNA, 352 bp, Homo sapiens
ggcccatgcttgtggtcccagctactccagagctccagaggctgaggcgggcggatcacggggtcaggagtgccagaccggcctggccaatatgctgaaaccctgtctctactaagagatacaaaaattagccagtcttggtggtggctcatgcctgtaatcccaggactttgggaggccgaggagggcggatcacctgaggtcaggagtttgagaccagcctggctcttcccataaatctccctatttttagatgccacaggaacaccttgaaaaaaaaaattggccttacaatatttggctttggccataagaactagttttttaaatcatcatttggaagagaattaag

SEQ ID NO: 99959 - DNA, 498 bp, Homo sapiens
  misc_feature (1)...(498): n = a,t,c or g
attgancctgtggnacattgtacgactttccgggncgacccacgcgtccggagatgcggtttcaccctgttggccaggctggtctcgatctcctggcctcaagtgatctgcctgcctcagcctctcaaagtgttgggattacaggcatgagccaccgtgcctggttagttttctttctttacatatatatatatatattttttttttctttttttttctttttcctttttagaagagatggggtttcaccatgttgtcaaggctggtctcgaactcctgtgctgaaatgatccccctgcctcggcctcctacagtgataggattataggtgtgagccaccaggcccggccttttttttttttttttttttaaaaaagccttaaccaaaagggcccatctaaggcttaaaaaatattttttgggaccaggggtttggaaactttaggggggggcgaaattatttttttaaaaaccgaaagggaaaaccttatccccttt

SEQ ID NO: 99960 - DNA, 376 bp, Homo sapiens
agacattcaaatgattgacagaaacataaaaaattctctacatcacaaagtatcaggaaattacaaattaaaagaataatgtagtatcatctcacatctgttagaatggctattaccaaaaagacaacacataagtgttgaagatgtggaaaaaagtgtacattgttgatggcaatgtaaattagtacagccattatgaaaaacaatacagagatttgttcaaaaaacagaaaataatattaacatttgaccgagcaattcaaaaaattgaaatctgcatgttgaagagatatctgcactgctatgtgtattacaacgtaattcataagggctgagcatggtggctcacacctgtaatcccagcactttgggaggg

SEQ ID NO: 99961 - DNA, 429 bp, Homo sapiens
tcaatcttgtgaaattttaatcagtttaacaccctgcctctaaaattgtttgcaaaaaataaataaatgaataaaatgggaattctcaaaaaaaaaaaaaaaaaaaaaaaaaaaaagggggcccccccttaaaaaaaccctcgggggggcccaatttacccccgggtggggcaaaaaaatcttttccccttaaggggggccaaaaaaaacccccggggggatttttggaaaaaaacccccctttggggggggcccctttgcggacccccccccccaccgaaaaaacggcctcggggaaaaacaaaaccctaaggggggtaaaggggaaaaaatcccgccaagccctggctcggaaaaaaaatattgaaaccctaacttggcattctaggaacacacccggatcttccaaggatgagtctcaactccccg

SEQ ID NO: 99962 - DNA, 604 bp, Homo sapiens
  misc_feature (1)...(604): n = a,t,c or g
cgcgtgactcttggggattgtacacgtcagttcgtcttcaactantacaaaccgtactactcgctcgccgcacgctctaaccacanaaagagaagaaaagagaaagaganttagatcgctttgagtacccgtcccggaatcccgggncgacccacgcgtgcgatttttagtagagacggggtttcaccattttggccatgttggtctctaactcctgacctcaggtgatccacctgccttggcctcccaaagtgttgggattacaggccagaaccaccacacccggcccacccatacctcttagtcatcaccattctactctctacttctaggggatcagcttctttagattgcacatatgagtgagatcatgcagcatttatctttgtgtgtttggcttatttcacttaacataatgttctccaggttcatccatgttattgcaaatgacaggattgcattctttttttatggctgaataacttgcgtatatatagcacattttcttttttcatctattgaaagatggctaagttgctttcatagcttggctattgtgaataatgctgcaataaacatgccaaggcagatacctgttgagatg

SEQ ID NO: 99963 - DNA, 378 bp, Homo sapiens
ggggctggaaactgtgctgctgtattagcatgaaaatgtgccctgctcgaattgaggatctctcctgaattaactgcaaagggaaagtgacactttcataattttttctgacaaaaaaaaaaaaaataaaaaaaaaaaaaaaaaaaaaaatggggggggccattaaaaaaaatcacaaggggggaccaatataaaaccccctgccataaccaaatacctttctcaaatggggggatgaaaaaaactactcacaggatttttaaaaaaaaaatctcttttagggggaggtgctggcgtcactatactactaacaaaaccgaaccttttcaacaaaaataaacgatcccgacggaggaggagaccacattctatctcaac

SEQ ID NO: 99964 - DNA, 1021 bp, Homo sapiens
ttttttttttttattctaaaataaagaacatttattatcacaagttggataaaaacacacagcttttacaaaaatgatttttgatagaaaaatatgtttgaatacactgtgatatttgtaggaacaccacactattgctgtatctccagctaaagcttcaaggaaactctatttcttataatcaaaatatccactatttaccacaacccgtctttggaaagaagttcatagtgtattctgaacaaaccaaagcatttactcggaagttacattccccatggcctgggcagtcacttgtgtatgtttaatacagttacacatgatgtaattacagaatgggcggcgctggaagggaccttgtagatcatttagttggcaccctaattttacagagggggaactaaggccagagttgagagatgtcctcaggatacctgagtcccattccagtgttcgttcagtaattcataaggaagtcatcataaaggtttaaaaagaaaacgttaatgactcgctccctttattcttctgtgctgagagtatcattctggtttattcagattaagaaagaaatacactactgaaatggtatgaaactcactgtcaaagggcacttaggtccgttggctccgtttcccacagttccccaaatgaacaggtggtacaagactcaggctttcccctaattacttacttgggtaaagtgacttgggtaaaatgaaagatacagccaggcgctgggctcatgcttgtaatcccagcactttggggggccaaggcgggcggatcacgaggtcaggagttcaagaccagcctggccaacatggtgaaaccccgtctctactaaaaatacaaaagttagctgggtgtggtgatgggcaccagctactcaggaggctgaggcaggagaattgtttgaacccgggaagcggaggttgcagtgagccgagattacaccattgcactccagcctgggcgacagagcaagacttacttaagtaagtaagtaagtcagtctcaa

SEQ ID NO: 99965 - DNA, 1955 bp, Homo sapiens
ttttttttttttacttttaaagatatttaatgatgtttttcaaatcagtacaaaaatttaaataccaaaaatggatttgctattgacaagtcctcaaatctgtcatggggaactcaaacaagttaccagtctgttcaccgttcattgtattctataaaatattttgataacagtcacccactacagacattcttttcccctgtgggatgtcatactgcattaaaactctgtatttacataacaataatatgagtttggtccatttcacatggaagaattctggttaattttgaactaaatagggattatagcacaatccctaagactttagaaacacgtggttgtttcatctgcttttacactaatatgttaacatgttggtgcagcactccaaaaggggaaatacagggcacatagataattatttaaaactcttttttaaattaaatggagtatcatttaggtctgagattagcaccattgtagaatgcacagtatttggcatagatgttgctcctcttctatctaaaagttagaaacctatgtgtgataatacacatacacacacatgcgcacggcatacacacacgtgcgctcacgcgcacacacacacacacatatatatatatatataggcaattgagtgacaaccaataaataagttggaagatattttgaaaagtgaaatttggttttaactaaaaagataatttctctctttcttggtgggaattaaaagcccatacatgtacagataaatacaattttacaaatcacctgatctgacttgcttttaaaccatttcaatgtggctgtttagcagaaggagcccaatggatccatgctgcccaccatagtcatcagcccaaaaccagtatctcaagaacaacccaaagtatatttggccacatagatgctgtctgctttgaaaacaaaggttgtggaggacatctttttgttgggaaaagattgttgtataattagtagtgacaagaacccctgtggtaatggactaatttctcttcttaaaaattgagaagaaatggtgcttgtatactatatagggaaatgagatattggccaagagaagaatttttgtgatggtaataatgattcagatttgacaaagacacatttccatgtgttttcataccgtatttatttgtgtatttttccatctatatctatccccttaactcatggttttatttttgacaaaaatatacaagattccaccaccataaccccacattattgctccaagtgatagagtcagcagcaggctaatagcaggctcgaaatgggtctttggtgtttggagaccagattagaatgcccaaagcagttagtatgtgcccaagcaaaaacctggaaaaatatttatttctgcttttcagacttgtattggcctttgatttgtgccgagtacaggatgacattaaaaacacaggctcttgttgccctttgacattctacatagcccttccacagtccgcttataaggaaacagttcttttcctatacttttactacctacacccagaagcagcacatctgtttttaaattcgaaatttcagaattattttttcaaatattaatttttctatgtaattctgaaactcccccctcaccaattatggcttggattttgaaagctgactttggccgggcacggtggctcatgcctgtaatcccagcactttggaaggctgaggcaggtgcatcacttgaggccaggagtttgagaccagcctggccaacatggcgaaaacccatctttactaaatatacaaaaattagccaggcatggtggcgcaagacagtagtcccagtactcgggaggctgagacaggacaattgcttgaacctaggaggtagaggttgcagtaagccaagatcgtgctactgcactccagcctgggtgacagagtaagactccatctcaaactcgtgc

SEQ ID NO: 99966 - DNA, 405 bp, Homo sapiens
cccacgcgtccgaacaaaacaaagtcacggggggggggctgacttgaagactcatctttctattacttagaaagggaatttaccaagtagtagaagacacaggaactccaaaataagatatctcattgtcttatcagaagggttgacaggaaaatgggctgggcactgtggctcaaggaaaatgggctgtgcactgtggctcacacctattatcccagcaatttgggaggccaagatgggaggattgcttgaggcctggagtttgagaccagcctgagcaacataacgagaccccgtctctacaggaaaaaaaaaaaaaaaaaaaacgttttccaggcttggcccttgtggtctaactttctcaggaggttaaggcgggaaattcgggctgaaaaaagcttttag

SEQ ID NO: 99967 - DNA, 463 bp, Homo sapiens
  misc_feature (1)...(463): n = a,t,c or g
ctaacactgacaccctcggtaccggactgaaagtcctgggacgacccacgcgtncgtgtgatagtacatgatttttaaacttatagcaaactttctgatatatatgccctaacgcaaattcttgagaactcaaaaaactttctaaattaacctcatatattttttctttttctttcttttttttttttttggaaacaaagtctccttttgccccccaggtgggagggcaggggttgggccccttttgggttaaggggagccttggcctcgggggggcgggaaattttctggcctcaccctcccaaggggtgggaatggagggcttgcccccccaccccggggggattttttgggttttttaaaaaaaaacggggtttctccacgtggggggggggggtctttataaaaaaaaaaaaaaaggggggggcggtttaagggatcccttggggggcccaagtttacc

SEQ ID NO: 99968 - DNA, 207 bp, Homo sapiens
cactggaataccaggtggctcagaccatgtgcattatttcgagtaggatccagcttgttgctgaaaaggcctctgtcccgttcgtggataagacagtgctttccaaccatgggacagctttaggaggcaaaagctgaagatggattttttgtacctggctgatatggtttggctgtgtccccactcaaatttcagtcgacgcggccg

SEQ ID NO: 99969 - DNA, 328 bp, Homo sapiens
ctcatctgcaaggtagccccaagggaggcaggagggaatcagagcttaaggatctgacctgttggagctagtcactcacttcccacatggggaaaccaaggcaaagaaaggagtaggaaattgtccaaggtctcctaacaagggatcagcagtgccccaactagaatctaaatgtggccgggcatggtggctcacacctgtaatccaagagtttgagaccagcctgtgcaacatagtgagacattatctctactaaaagttggtctgggtgcagtggctcatgcctgtaatcccaggaccttgggaggccgaggcgtcgacgcggccg

SEQ ID NO: 99970 - DNA, 152 bp, Homo sapiens
tgatgggcctaagtgatcttcctgcttcagcctcccaaatagacaggactacaggcgtgtgccaccatacccagctaatttttaatttagctgagacacagtctcactatgttgcccaggctgcttttttgaactactggtcgacgcggccg

SEQ ID NO: 99971 - DNA, 396 bp, Homo sapiens
attttcagaggagttgataacaggaatgtcagaaaacagtatattactgtcaagtgtaggaaaatagctttttgtcaattccttgatgaatttaacacagaatgcttttacatttaaaaaaaaaaaaaaaaaccgcccccttatgaaaaaaaagcccctttcctttgtttgggcagtttaccacccactatggcatgacttcaggaaaatcgtttgacccaaaaagtcaaaggttgcagggagctgaaatctcgccacagcactccaccctggggagagagggagagtccttctaaaaaaaaaaaaaaaaaaaaaaaggtgggggtaaaacccttggcctttttaaaaacaagggccaaaacaaaggggtccagaaattaaaccccgggggaaaaa

SEQ ID NO: 99972 - DNA, 336 bp, Homo sapiens
  misc_feature (1)...(336): n = a,t,c or g
cgcggccgcgtcgacaaaattttttatttgttttttgagacagactctcagtctgtcacctaggctggagtgtagtggctcaatcctggctcactgcaacctcttcctcccgggtttaagtgattctcttgacctcaagtgattcacctgccttgacctcccaaagtgttggtattatagacgagagccactgtgcccagtctattaaagattaattagtaataatattgtcttaatccattttgtgctgctataacataataactgagactggataatttataatgagcagaaatctagttctcagatttcttaagactgagaagtccaagatcn

SEQ ID NO: 99973 - DNA, 374 bp, Homo sapiens
tgacaatataggcatgggtttatttctggactctctattctgttccactagtctatatatctgtctttttatttatttattttagagtctcatccaggctggggtgcagtgacatgatacaatcatagctcactgcagcttcaaactcctgggctcaagcaatccttctatctcagccttcctatagtacttgggattacaggagtgagccacagtgctcagctatatcagtgtttatgccagtactatactgttttgattactgtagctttgtaattagttttaaaattagggaggtgtaagacttccagctttattctttttcaagattgttttggctatttgaggtcccttgaaatttcaaataaatttta

SEQ ID NO: 99974 - DNA, 357 bp, Homo sapiens
  misc_feature (1)...(357): n = a,t,c or g
cgcggccgcgtcgactaattttagagacaggatctccttgtcacccaggctggagtgcagtggcacagtcatagctcactgcagtctcaactcttaattaggctcaagggatcgggatcctcccacctcagcctcttaaatagcttggactacaggtatgcaccaccactcctggctgtcttattgtgttgcccagggtggcctcaaaactcctggcctcaagtgattctcctaagtcagcctcccaaagcgctaggatacaggtgtgagccaccctgcccagccccattgctgttgaactttttttttttttttaaaaacaggctttggttttgttgcccaggctggagtgcacan

SEQ ID NO: 99975 - DNA, 338 bp, Homo sapiens
tttttttaaatatatatgttatttataaatatgtatatgtgcttttatatatttataaatatatattcgcttatatatttataaatacatatttataaatatatatttgcttatatatttataaatacatatttataaatatatatttgcttatatatttataaatacatatttatatattatagataataaatatatattaataaatacatataaatatatttttatataaataataaaagattgtatgaaaatataatttaccagcacggcagggcttcttggcgttccctagattttgcccccaaggtgagtgccgcatggcctcaccctagtcc

SEQ ID NO: 99976 - DNA, 244 bp, Homo sapiens
gtgggcaaccaaatgtaggtaaggatgaagaagaacaggaactctcactggtggctgatgggattgcaaagcgtcagggcagctttgaaaaacttttcagcagtttcttataagcataacttatcatatggcccagccatttcactactagaaattgacccaagtgaactgaaaacttatgttcacacaaaaactcgcacatgactgtttatagcagcttcattcataattaccaaaaactaga

SEQ ID NO: 99977 - DNA, 431 bp, Homo sapiens
tttcgtttgattccacatattagtgatatcatgtagtgtttgtcattctgtgcctgccttatttcactcaacataatggcttccagttccatccatgttgctgcaaatgacaggatttcattctgttttatggctgaatagtattgtgtgtgcatatatatatacatttttctttatctattcattttcttctgcactttctttacctattcgtctcttcatctgctcatcttttctttttttttttttttggaaaggggggtttgtttttccccccgggggggggggggggggaaatatttggggctatggagattttttccccccgaaaaaaaacaatttccccccccccccttttaaaaaaccgggaataaccggccccccccccccccccccattattttttgtttttttaacccaaggggggcccc

SEQ ID NO: 99978 - DNA, 467 bp, Homo sapiens
  misc_feature (1)...(467): n = a,t,c or g
agatgagcattgtgaannnnnacgggaagttcttcgtgcatattccctaagaacaaggatattctcttactaatttaagtatagttattttattcaagaaatttagcattgatacaataatttactattcatattccaattttgtcaataaacttttattatttgttttttttttccccttcagccagggatcacaaattactttagtggccatgtttctttagcctccttaaatctgggaccgttctttaccttttttttatgctccatgacattaccattaaaaacatttttttaaaatttttccagccaggggttaatgcctgaaattctaccgttaaggaaggccaaggcaggagggttgcttgaggccaggagtttgaaaccagctttggcaacatagggagaactcattgtttaaaaaaaagaaaaaaataattgggcatggtggcgtgcgcctgtggacc

SEQ ID NO: 99979 - DNA, 1084 bp, Homo sapiens
gtctaacaatgtgcttgtgtacgacttgctgaagaaccatttagagacactttcaagagtagcagaagagacaataaaggattactttgaagctcgccttgctctgctagaaccagtttttccaatcgcatgtcatcgactctgtgagggtccagatttttcaacagatttcaattacaaacccccacagaacataccagaaggctctggcatcctgctgtttatcttccatgcaaactttttgggtaaagaagttattgctcggctctgtggaccgtgtagtgtacaagctgtagttctgaatgataaatttcagcttcctgtttttctggacagtcattttgtttactcattcagccctgttgcaggtcccaataaactcttcataaggttgacagaagcaccctctgccaaggttaagttgctaataggtgcatacagagtgcagctgcagtgaccaaacagaagggactgggcggagttctcttcagaccgattcctatactctctttgacagcagtttggaattcttctagcacatctatgtaaagttttgtctgtaaacctcttgcagttaagcctgttgtctgttgtagtctgtaagatgcgacatagctgtgtctgtgccagtatgccggaatctcagtgcagtgtccagactgcgtatttcagtttttccacaatgtggatagtacatatgaggattatttaagaaaattaaagacttcactttcttttttctggagacggagtttcgctcttgttgcccaggctggagtgcagtggtgcgatctcggctcactgcaagctctgcctcctgggttcaagtgattctcctgcctcggcctcctgagtagctgggattacagacacccgccatggcacccagctaattttgtattattagtagagatggggtttatccatgttggtcaggctggtcttgaactcctgacctcaggtgatccgcccgcctcggcatcccaaagtgcttggattacaggcatgagccaccgcacccagcaagagttattttcttaacttgaaattttctactagccctggtgaacttctgtgcttaaaa

SEQ ID NO: 99980 - DNA, 414 bp, Homo sapiens
gctgcgagaagacgacagaagggttctaacgcggggccgccctttttttttttttttttttttttttttttttcccaaaaaggggggggtttttttttggcgggggggggggttttttaaaaggggggggggggccccaaaggggggaaaaacccccgggcccggggggttttttttttcccccccccccccctgggtttttgggcccccggttaaaaaaaaaaaaaattttgggggggtttttaaaccccggggtgggaaagggggtttaaaaaaaaaaaaaaaaaaggggtttttttaaaaaaaaaaaaaaaagggggccccctttaaaaaaaaaaatttttactccggggggggggaaaaaaaaaatttttttttggggggcaaaaaaaaaaaaagcggggggggggggag

SEQ ID NO: 99981 - DNA, 339 bp, Homo sapiens
ctaaactcaaaccaagttctcatggattactaggttggagaaacgtacggtaaggatataacctcccggggcaaagacaagccgattgccgtatgtaaaactttcagtccacttagttaagctttctctggtctatcatttcacttagttgctaggattactgtagcttacagcggaaacggctggcagtgattaagaatgggcacgccgggagaggcgattgcgatcggcgctttcgttactgctatgactcgtgcgctggcgatggtgggcgtgggattagtataaaggggaaacggtatctagaatagggataacgaggaatgacatgggccagct

SEQ ID NO: 99982 - DNA, 204 bp, Homo sapiens
tagacagggtctcgctctgtcgcccaggttggagtgcagtggcatgatcatagctcactgcaacctctaattcctaagctcaagcaatcctaccacctcagcattccttaaggcagctgggattacagttgtgtgccaaccaccactgggctaacttgtgatcctcttgcgtcagcctcccaaagtgctgggattacaggcgtg

SEQ ID NO: 99983 - DNA, 536 bp, Homo sapiens
  misc_feature (1)...(536): n = a,t,c or g
aaagtacatcacatggatgtggtacatttaatttaaccaggtacctgttaatggtcacctaggttattttgtcatctttttccccctataatgtggcattgaacattttagtaccttaatctctgtgtgtttttaattctttacctaggataaatgtctctatgtgatattaggataaaaaatgattaaaaaattagaaagtttgtaccaattttaactaatgaaaatgtttgcattggctgggcacagtggctcatacctataaatcccagcattttgggaggctgaggtgggaggattgcttgagtccaggaattcaagactggtctgagcaacatagtgagacctcgtctctacaaaaaaatattttttaaaaattagccggacatggntgctcatgcctgtggtcctagctactcgggaggctgaggtgggaggaccgcttgagcccaggaggtggaggctgccataagccatgttcataccacttcactccagcctaggtgacagagtaagacccagtctcaaacaaaaaa

SEQ ID NO: 99984 - DNA, 393 bp, Homo sapiens
  misc_feature (1)...(393): n = a,t,c or g
cccacgcgtgcggagcaattatgaatagtaaaccccatgccgtaacccaataccatacgcccctcttgatgtgatccgtgctaatcacaactagtactacttctcctatttgtgacaatcctaaatgatggtatcactatactactaacagaccggaaccgaaacaccaccttattctacccctccggaggaggagaccccattttataccaacacctattctgattttccggacacgctggaggatagatacttncctgccaggcttcggaacaatctcccatattgtaacttactactccggaaaaaaagaaccatttggatacataggtatggtctgagctatgatatcaattggcttgctagggattatcgtgtgagcacaccatatac

SEQ ID NO: 99985 - DNA, 383 bp, Homo sapiens
taagattcagattgagacttctctccaaatcacacttatagaagattataccactctttgaacagttattagatagtgtttggcctattttattgattaatttgatagcccaactcctggcatagttcctggtacatggcaaacaatacgttcgttgaatgtatacctgactcgattgaccacaagcttttccttaatgccaagctgcctttttaatgaagaatactcaggttgggtacagtagcttatgcctgtagtcccaacattttatgaggctgaggtgagaggattgcttgaggccaagagtttgagaccagcctgggcaatatagtgagaacccatctctacaaaaaaatataaataaaaattagctaggcatggtg

SEQ ID NO: 99986 - DNA, 396 bp, Homo sapiens
cacatatcgaagtacatttttttcttacgtaaagattgatttcatgtgtaatatttctatcttcctaccttattttattttgctgtttctaataccttgatttaaaatgtgttaatttttacaagggaacatcatttaagatgataggtttcaaatgtaacagatgtggccaggtgtggtggctcatgcctgtagtcctagcactttggaaggctaaagcaggaggatcacttgagcccacgagttcaacactagcctgggcaacatagcccccatctctacaaaaaaaaataaaatacacaaccccatctctacaaaaaaataaaaaattagctgggtgtggtggcacatgcctgtaggaccagatacccaagaggctgaggtaggaggatcact

SEQ ID NO: 99987 - DNA, 388 bp, Homo sapiens
  misc_feature (1)...(388): n = a,t,c or g
ctgagatcacaccattgcactccagactgggtgacagaatgagaccctgtctaaaacaaaaaaaattaaaaataaaaaaaaaaaaaaaaaaaaaaaaagggggggccctttaaaaaaacccctgaaggggccaaagttaacccgggcatgcaaaaaaaaacctttttccttaaagggaggcgaaaaaaaaacaacctgggaatttttgaaaaaaaaccttattttggggggggaaaaaaatggaacaaaccccctacaaaaattaaaagctttaaggaaaaaaaaaaattttaaagggaaaaaggggaaaaacaacctcaaaatcctggctgttaaaaaattnggnnnnnnnnnnnnnaaaaccattttttgggggggagaaaataaa

SEQ ID NO: 99988 - DNA, 464 bp, Homo sapiens
  misc_feature (1)...(464): n = a,t,c or g
gtgcgggngnatttaaattgcagctgcgcgatgacacccaaccccggncgacccacgcgtccgctcaaatttctaggctcaagcggtcctcccgcctcagcctcccaaagtgctaggattattggtgtgagaggaatccctttcaacccttgaaaataaatcaagcggtgatgaactccctgagcttatatttgcctaggaagggctttatttctctttcatttttgaaggacagtttggctggacatagtatgtcttatttggcagtttgtccccttctgcactgtgaatatattatgtcagtcccttctggccatctggcaaggtttctgctatgaaatccactgttttatgaaggatctcttgttcatgacaagttgctttttgattttaaaatgactcaatgtggatgtctttgggctcattctagttggagtcctttggaattctcgaatctggatgtg

SEQ ID NO: 99989 - DNA, 721 bp, Homo sapiens
ccgctcgtgccgaggtcaggctggtctcgaactcctgacctcatgatccgcccacttcgtcctcccagggtgctgggattgcaggcgtgacacttgcacccagcggattaagtcttaacgtatgagtttttgggagaaactcaaacattcggacaatagcaaggagaatacaaaaccacagtgagctaccgcttcagacaccagagaagtttaagtgaaaaagactggcaataccaagtgctgatgaggatatggagcaaccagaactctcagacattgctgatgggaatctaaattagtataaccaccacgaaagcatccgtaaggtttaattgtgttgaacacaccctgccctctgaccaagcatttccactcctgggcattacaggcaaaagaaatgcatcccacgtgttcatcaaaagatgtaaacctgtgcccgggtgaggtggttcatgcctgtaatcccaggcacatcgggaggccaaggagggaggattgcttgagcccagaagttcgagagcagcctgggcaacggggcgaaacctcgtttttattaaaaagtagccaggcatgatggtatatgcctgtggtcccagctactcgggaggccaaggcatgcagattgattgaacccggaaggtggaggctgcagtgaattgtgatctcgccactgcactccagcctgggtgacagagcaagatcttgtctcaattaaaaaaaa

SEQ ID NO: 99990 - DNA, 523 bp, Homo sapiens
  misc_feature (1)...(523): n = a,t,c or g
agcgtggttttnngctggggcttcgaatggnncatgatanctgncgaaccacccgtccgggcacctgtaatctcagctactcaggaggctgaggcaggagaatagcttgaacctgccactgcactccagcctgggtgacagagcaagactctgtctcaaaaaaaaaaaaaaaaaaaaatttccgggggaatttaatgggccttgggggggaccatccctgaaatcctgtacccccaggtactcgggaggttaaggcataagaattttttgaccccagggggggggggcggggaatggaaattaccttattgccctccacccggggcagaaaacccaaaccttgtttcaaaaataaaaaaccaaacccaaactttgtttcnnaatttttnaaaaaaaaaaaaannnnaagaaanntnnaaaaaagggggggcctttttaaaaattccttgggggggcccaattttcccccggggggaaaaaaaaaattttttttcttttgggggggggattaaaacccccccgg

SEQ ID NO: 99991 - DNA, 430 bp, Homo sapiens
aaaattctactgaggaggttccaagataccattaactgagcctaacttgcctcttgtgggtgtggcaggggagaactccctgcctgtggtagagtcagttgaaatattcctttcacatgccttataaaaaaaaaaaaaaaaaaaaaaaaaaaaaaaaaaaaaaaaaaaaaaaaaaaaaaaaaaaaaaaaaaaaaaaaaaataaaaaaaaaaaaaaaatgtgtgggggggggttgtaaaaaaaaagctggggggggactaattttccccggggcggaaaaaaaatcctttcttttttttggaggggacaaatttaatttgaggggccagtgtggaaaaaaactcttctttgggggggggataatgtcccacaccccccctcccgatagtagagggcgggggggggatcaacacttatgtgggagggtgggg

SEQ ID NO: 99992 - DNA, 471 bp, Homo sapiens
  misc_feature (1)...(471): n = a,t,c or g
cccccgccngganaaaatgatcgcctgcggaaagcggcacgaggagcccagaaggttgaggcttcagtgagccataattatgccactacactccagcctgggtgacacagtgagacctgtctcacaacatacaaatgaagcttaaggatttcttccctctttatcaggtcataaagaactttctcttttctttcttttcgagacagagtctcatcctgtcgcccaggcatgatctcggctcactgaaacctctgcctcccgggttcaagtgattctcctgtcagcctcccacgtagctgggattacaggcgtgtgccaccatgctcagttaatttttgtgtttcaccatattagccgggctgatctcaaactcctgacctcaggtgatccgcctgctttggcctctccaagtgctgggattacaggcggcagccactgtgcccaacctatcaggtcataaagaatttttta

SEQ ID NO: 99993 - DNA, 658 bp, Homo sapiens
ttgagacggagtctcactccgtcgctcaggctggagtgcagtggcgtaatcccggcccactgcaacctccgcctcccaagcccaagcgattcccctacctcagcctcccgagtagctgggaccacaggcacatgccaccatgcccagccaactctgcattttcagtagagacagggcttcacacgccggccaggccggtctccaactcctgaccccaggcgatccacccacctagacctcccaaagtgccaggactacaggcgcgagccaccgagcccggcccagtttaaaatattttctaatttcctttgtgatttcttccttgttacatgggttatttagaagtgtattaggctccatgtatttgaggatttcccaagtctttttctgttgttgatttctaatttaatttcattatttcatttttttttttatttaccaaggcttgttttatgtcccagaatggtgtcttttagtggatgttccatgttcacttgagtagaatgtgtagtctgctgtcattgggtggaatgttctgtaaatgtcagccaagttaagttggttggtagtgatggtaaggtttgcttgttctgtcagttaccaaaagaggagttttgaattattcaactaaattgtagatttgttcctcccccgcacc

SEQ ID NO: 99994 - DNA, 499 bp, Homo sapiens
  misc_feature (1)...(499): n = a,t,c or g
tggcgggagaanaaaattttgaccgcgnttgcagattgacgcgccctgcagaattccgcacgaggaagactcacacactgcgagaaaccatatgaatgtaaacagtgtgggaagttcttcagttgtaagtcaaacctcattgtccatgagaaaactcacaaggtagaaaccatgggaattcagtaagtaatgtggctttttttgtaaaaaaatgttaagtcatagtaaaccctgtagatgatgttgcttgcaagcgtaatatccaacagtttaaggtactataccacatggtgacctactgtttgccagcctgtaaaacacacacacacacacacacacacacacacaaatattattagacaaattagatgacaaaaatcattaagaagtccaaactttttttttattactagcttcagcagaccaaaacttcctctgtcaaggtgttataaacatttaaaaacacattttccatttccatacatatctttttggtcan

SEQ ID NO: 99995 - DNA, 624 bp, Homo sapiens
tcgcgaggaaaattacaggatattaaatatccaaaacaatagtgtttctgtacacagtgaactagctgaaaaagaaatcaagaaagcaatcccatttacaatagtgccaaataaataagataactaagaattaaatttaaccaaacaagtgaaagacccccataaggaagattataagatactgatgaaagaaactgaacaggatacaaagggaaagacatcccaagctcatggatcagaataattaatattgttaaagtggcagtactctccaaagcaatctacagattcagtgcaatctgtatcaaaatacgagtgacattcaaaacagaatgtcactggaagaaaaaaatctggataggcaaggtggctcacgcctgtaatcccaccactttagaaaaccaaggcaggagatcacttgaggccaggagtttgagactgtcatagtgagatctctctacaaaaaaatgcaagaactagccaggtgtggtgtcgtgcacctatagtccaagctacttgggagactaaggtgtggggatcacttgatccaggagtttgaggttacagtgagctatgaccgctactgcactccagcccaggcaacagaacaagaccctgtttcaa

SEQ ID NO: 99996 - DNA, 481 bp, Homo sapiens
  misc_feature (1)...(481): n = a,t,c or g
ngaccgcccatttcccggctgcggattctgcacgagctagaccaccctgccttgtatccccaggctgtgggatactcaggaaggggtgaatggtgtagtcaacagactgaggggaaatcaaagcttttagagacatttgcaggatgaacagatgttcaaacgttcctttatttggtctccagacagacgcagaggcctcccttttatcccagtaatcggtgcattatgctttaatttgcaaatgacattaaaaatattaaccgggagaaaaaaaaaaaaaacacaaaaaaaaaaaaaaaaaaaaaanaccctggggggggggccgggccccccattcccccttagggggggggtattaaaattccgggggcggggtttaacaggggggggggggggggaaaggggnccccnnnnnngcnggnnggcttnttcgntttttgtgggggctttttnntnnntggnggnttgtgctgttcttttc

SEQ ID NO: 99997 - DNA, 923 bp, Homo sapiens
  misc_feature (1)...(923): n = a,t,c or g
caattattgaggatcccttgtgcatgatgagtcagttttctctcactactttcacagtgctatctttgtttctgtctttcagcagtttgattataatgtaactcagcataggactcttttgagtttatcctacgtggagtttgttgacctttttatatatccatgtcttccctcaaagttggggagttttggccattatttcttcaaataagctctctgcctctttctttccggtataaagattagtgtgggggtgtctccattgttcttttttttcccctcaaacttagagctggaagaaaccttagacatcctgtgggccagaatttcatattaccttccacaaaactaacttccagagaggtcttcaggaagttggcaaattttagttacgtatttttaaagggtctttgaacttttaagaactacatctcgttaattatatgtattccgtatatattattatcccaaatttttaacaaattagagtgcattggtgctttaaagtgctgtcaactactctgagaatgccaaaattccttggttnttaaaatgtgtaatcttacaactccttcccttggatgaatttagatttttttagatggagaaacccaaaatccaagtacagccataccttgggagacattatggtttggttttgttttaggaacccaggctggtcttgaattcctgggctcaggcagtcctcccccctcagtctcctaaagtgctaggattacaggtgtgagccgctgcacctggcccagcatgggttcttttccataccaccacaataaagcaaatattgcaataaaagaagtcacatataaaagttctgttttcactatactctggtctattaagtgtgcagtaacatgtctaaaaaatgcacgtgtcttaattagaaaatgcttcattgcttt

SEQ ID NO: 99998 - DNA, 380 bp, Homo sapiens
gtagcacctagcacagcgcctagcccataacttgtgttgaaaattaagagaaccttcttaatatcacttttccccactctagttctgaatttaaagaaagaaaaaggtaggttagcaaatataggtatcagttatttctattgacagatcatttggagaacatgtttttgggcgtgggagaaaaaagattcctaactctccgccccagaaataattttgctgacacaaaaatcagccagacatggtggcacaggcctataatctcagctacttaggaggatgagtttgaggataaggatacattgtgaaaaaggtgggaaaatcacttgaacacaggaggcagagattgcagtgagccaagagtgtcccactgcactcca

SEQ ID NO: 99999 - DNA, 554 bp, Homo sapiens
  misc_feature (1)...(554): n = a,t,c or g
ctctgtccccnnnnnnnnaaattccccgctcagcgggcaatgtcctggcaccctggtgctcggtcacagtgacaagtacaagtaactatcacacatgccctttgtcatattggtgatttccactgtttttctcccaaactgcagcttatatttgttctcttaatactgttgagcaaaaacttttaatttttataaagtcgaatttatcaatgttttctttaatggtttgtgtttattgataataaagaacactttgcctannaaaaaaaaaaaaaaaaaaaaaaaaaaaaaaaaaaaaaaaaaaaaaaaaaaaannnggggcccccttaaaaataaagggccccttaaaaccccgtaaaaacccccggggggtctttttaaagccccccctttttgggggtccccccccccccgttttttttttgacggggggggggcccccccccctttttttttttaaaaaaaaaaaaaaatttcctcctttttgccgggggggggctcttccttctttttggccnnnnncnnncnccncnccaccacatcatctcattttt

SEQ ID NO: 100000 - DNA, 562 bp, Homo sapiens
  misc_feature (1)...(562): n = a,t,c or g
naatcgaagcactattgcagngncgnggaattctttntttttgagacagggtctcgctctgctgctcaggctggagtgcagtggtgcaatcacagctcgcagcgggctccgcctttcgggctcgggcgatcctcccatctcagcctccctggctggatggagtgcagtggcgtgatctcggctcgctgcaacctccaccttccgggttcaagtgattctcctatctcagcctcctgagtagctgggattacagtcttgctctatcacccaggttggagtgcagcagtggcgtgatcttggctccctgcaacctcctcttcctgggttcaagcggntctcctgcctcagcctccccagtaactgagactataggcgcctgccaccacgcccagactccagcataaccttctccaggaagctnttccagagcccccaggctaggaacctccccccaacccctgaactcaagccccagcagcccgtgcctgcgccatctccatcagagctgcatctctcttggtcttctggtaacaagtgccatttcttgtggtttctgtgtccc

SEQ ID NO: 100001 - DNA, 413 bp, Homo sapiens
aagtattatcttaagcatgttatttaaaaatatggagataaataaaaataactgaaagtaggtagttgcttctgaggagagaaattgggagttggcaagagagtactgtttttcaaccatgtaaatgtatttgttttattaaaaacagattagaggcaggcgtggtaatcccagcactttgggaggccgaggcgggcagaacatgaggtcaggaccatcctgaccaacatggtaaaaccccgtatctgctaaaaatacaaaaattagctgggcgtggtagcacacgcttgtggtcccagctactcaggaggctgaggcaggagatttgcttgaacctgggaagtggaggttgcagtgagctgagagtgcactccagcttggcagcagagtgggattctgtctcaaaaaaaaaa

SEQ ID NO: 100002 - DNA, 456 bp, Homo sapiens
  misc_feature (1)...(456): n = a,t,c or g
tggcaatgtagacatgatgtccntcggaggaactccccggcgcccgggcttaatgtttgtttatataggttattaagaatcagtttgtgacaggctattagtattgttacttctctttgttactgtcgattttaacaacaatttatgtgtgtactgttacctttaaagtaaaacttatttttaaactaagaatgctttttgttcttaaagttctgggacatttaaataactttcatgtctttattaacttgttcccacaatcataaatattttataacgaaaagtgctcaacccccgaaatatataatccaacaaatttaacgtgtgtgtgtgtgtgacagagagagagagacggngtctcactctgtcgcccaggctggagtgcagnggtgcgattatggctggctcattgcagcctcgaactcctgggctcaagcaatcctcccgcttcagcct

SEQ ID NO: 100003 - DNA, 464 bp, Homo sapiens
  misc_feature (1)...(464): n = a,t,c or g
nggggacgcttttnactggagaccctagtatagagtggcggaattcgttaccaaatatcagagaatttagagtcaattgtaaataaagctgaatgttaagtccctcaaatgtcagccagtagtatggtgcttttctaaagcagtgacgtgcactagttaattcactttttttttttttttttttggaaagggggttgggttctcttgcccagggtgggggggaggggggccttttggggtaaccggaaccaaacccttcgggggtcagggggattttctggcctaaccctccaagggggggggaatagaaggctggcccccccaggggggggaatttttggggttttggggggaaagggggtttccccgggggggcagggggggggcgaacctcccaccctaagggaaccggcccccctggggctccaaaagggtggggaaacaggcggggaccctgtgttcag

SEQ ID NO: 100004 - DNA, 500 bp, Homo sapiens
  misc_feature (1)...(500): n = a,t,c or g
cggggtnnnnnaagggcggggnncngagggagatgnaccactaaaactcctcccagctaccctccgcagnnccnggaannnnaggnnnaaattttttgaggcgaggnttnnaggacttnangttattattggnttaantttntnattatntggtggatgcccaggtaatatttnactttacatncaaacatnactttggcttcgaagccgcgcgcctgatactggcattttgtagatgtggtttgactatttctgtatgtctccatctattgatgagggtcttanaaaaaaaaaaaaaaaaaaaaaaaaaaaaaaaaaaaaaaannggggccccttatttaaagggggccccaaaaaccccggggaaaaccccggggggggctttttggggccccccctttggggggggcccccccccccgggtttttttttggtggggggggggcccccccccgggcttttttcaaaaaaaaaggaaaaaatcccccctttgggggggg

SEQ ID NO: 100005 - DNA, 465 bp, Homo sapiens
  misc_feature (1)...(465): n = a,t,c or g
naggcccccccctgnccccnaaagtttccanagannngcgctnnnntnagngaancacggcagagcactttcatctcgtcaaaaggaaacgtctttcctgttaagcactcactcctattccccacacgcctgagcccttggcaacaactaatctgctttctgtcactatagatttgcttattctgaatgtgtcatataaatgggatcatgcagtttttttttttttttttttttgaaaacgaagtttttttttgccccccagcccgaattgggaattgaaggggccaaatttgggttaattgaaacccccctttccgggtttaacccttttttcctgcctaacccccccaagaagttggaataaaaggcccccccccccggcccgggttatttttttgttttttaataaaaaaggggttttccctttgttacccggaagggtttgaatccccgcccctaaggaag

SEQ ID NO: 100006 - DNA, 475 bp, Homo sapiens
  misc_feature (1)...(475): n = a,t,c or g
tggggcttttttcgtagcatacgatcgngcggngcaantcanataaacacatgcatacacatataaacacatgtacgcatgcgcaagtcccgagatctccacttctagagtctttgggctcttcaccatctagatgcccacctggggctccccatagagctctgacccatctcggaggagctgcctcttctctttttttttttttttttggaaagggagtttttttttgccccccgggttgaatggcggggccccaatttttgtttgttgacccctccgcccccggggaaaaagcatttttttgccccctccctccgaggtgggggggattacgggcacttgccccatgggccagttatttttggcactttaagaaaagcggggttttccccttgtggcccgggggggtcttgacctccggcctttgggaccaccccccctggccccccgaaggggttgttttacacgcctgcgg

SEQ ID NO: 100007 - DNA, 458 bp, Homo sapiens
  misc_feature (1)...(458): n = a,t,c or g
ccccccctggttagcactacatcgnngcgggcaantccacacagganagagtccctatagatgcagtgaatgtcaaaaagctttactcagaaatcggctattactaatcatcagaaaccccagcagaaaggaagaaagtccatgcagtgacttagaatatgagagagcttttttgattagtcacatcagctcagacacaatagaagttccatgaatactatgattgtaatgggcccttttggaactcttgtgggagagaaaccttatagatgcaatgaatattttaagccttcttttttgaagatatccctcgtttaccgtagagatctcacaagaagaatcattggccaggcgcattggcccatgcctgttatctcagcactttgggaggctgaagcaggcagatcacttgaggttgggagttcaagaccagcctggccaacatgatgaaaccctgg

SEQ ID NO: 100008 - DNA, 496 bp, Homo sapiens
  misc_feature (1)...(496): n = a,t,c or g
agggtccnnnnnnnnnnnnnnaattgatgaccactaggacagactggatggccctcgcacattgctgacccttctgctttcattcacataaaactgattntctcagctctatcattaatcttggggatcacattttttttttgtgagacaaggtgctccctgggttgcacaagccagttttaaactcctgacctcaagcgatcctcctgccttggccttccaaagcactgtgtgagccactgagcctgacctcaaaattgtacattcaaaacaagctgacgtcctgggcacaggaggcacgtgcctgtagtcccagctactcaggaggctaaggcaggaggatggcttgaggccaggagtttgaggctgcaatatgctatgatcacacgtgtgaatagccactgtactccagcctgggcaataaagtgagaccctgtctctaaaaaaatttaaaaaaaaaagctggcagaaacttagttatttgggattgatttgc

SEQ ID NO: 100009 - DNA, 464 bp, Homo sapiens
  misc_feature (1)...(464): n = a,t,c or g
ntctagatccctagtccagtgtggggaattccggggggcgagctggggctcctaggaaatgcctggcggtgacgcgctgaggctttgcaggccatggtgagctgggcgcttctgccaggtgtctgggggctgtgggtgttgggctcctcctgggggtgggggacgggggttcccaaccaggccaggaggggatccttagagagggaccctcagcacatgtgcagcagtggatggtggggngnnnntnnnnnnnntnnnnnnnnnnnnntnntgnnntntntnntnnttnnnnnttttttntnnntttnnntttttnnnttntcccctnntnnntttntnnnttnnttgtntntttttnttnttggggnntttttttnnaannttggtntttnttggttttnttttttgtgggggtttggtgggaaattttttgttgtttgggtttttgnggccttttgtgtttg

SEQ ID NO: 100010 - DNA, 479 bp, Homo sapiens
cgcggctttgcagtcctattcagtgcggtggaattccccagttcctctaagtcacacttggacctcgaaacctccccaaaggcctacaagcatggtgctccctgctcagccccaggcagcctccaagcctcccttcccaaagggagaaatcagagaaatcccttctccaatttttttgttttgttctgagataagatctctctctgttgccaaggctggagtgcagtgatacaatcctagcttactgtggcctcgacctccccaggctcagatgatcctcccaccaccccaccaccaccccatgctccagatacctgggaccataggcatgtgccaccacacccagctaagttttatattttttatagagacagggtttcaccatgttgcccaggctggtctcaaactcctgggctcaaacagtttgcctctcctctttgtttatgctgctgccctctctgctctggtccctatccccc

SEQ ID NO: 100011 - DNA, 480 bp, Homo sapiens
  misc_feature (1)...(480): n = a,t,c or g
gggagcggcntttgagatcatattcagtgcggtggaattcggctggagtgatcatggctcactgcagactcaacctcctgggctcaagtgatcctcccaccttagactcctgagtagctggaactacaggcttgcaccaccatgcccagctaatgttttaactttttgtagaaatagggtctcctgggctcaagtggtcctctgtctcggcatccgaaagtgagccactgtacccagcctgatttatgtttttaagagatgtcctggctgctgtgtggagaacagatggaggccaggcaaggctgaggagaacaattcagagcctggtacaacagactgagctagagatgacggtggcttgaaacagagcagtaataataacggaggaggagaaaactggtcagataaaggaaattacctgaaggcagagctgacaggatttgcacacggactggatgaggaacgcaacagaaagggaga

SEQ ID NO: 100012 - DNA, 489 bp, Homo sapiens
  misc_feature (1)...(489): n = a,t,c or g
gcgcccccccggncgnnaattgagaccatggaatgagagcataggccagngcggnggaattcggtggctcacgcctgtaatcccagctctcagggaggctaagaggcgggaggatagcttgagcccaggagttcgagacctgcctgggcaatatagcgagaccccgttctccagaaaaaggaaaaaaaaaaacaaaaaaacaaaaaaacaccaaaaaaaaaaccttaggaaaaactttggaaagggtaaaaaaaaatccaaaaaaattttgccacaaaaccaacttgtcaccatgacccaaagggatggcaggggaacaaaaggaggtcatattccacaggttttccaccttaaaaaatgggttttaaaaaaatggtcttgcaaggtccaatcatctgatcaaaataaaaaaagggggcaaaagtctcacctgtctaaaaaatggggctttcatcttttctgggtccatcaaagttgaaatgaaaagtt

SEQ ID NO: 100013 - DNA, 453 bp, Homo sapiens
cccaagtaatctccctacacacaagacctcatggctctgctgtcactcagctcgattcaaggaatagcgagcaagcaccctgacaagtactgtatcagtcaggactctgcgagaagtgctagaacttggcagaggggcagaaaatccactcagattcactaacaaagacgtcacatgcttgctttggcaggacacatactaaaattggaacgatacagagaagattcacaaaaataaaaaatagaaaaaaaaaatgtcagaccttgttgactttacctgtatctgcctttctttcctctattggggaggattcattttcaagcgggttctccaaatgccggaaagataacatccttcagctcacattacaataagaaagagagacccagccgggcgtggtggctcacgcctgtaatcccagcactttgggaggccgaagcgggtggatcacga

SEQ ID NO: 100014 - DNA, 1599 bp, Homo sapiens
  misc_feature (1)...(1599): n = a,t,c or g
ttttttatgctggaattgcctttaatctatcaatcggattggaataaactttacattctacaacgagcatacaacagaactgactagatacatccatgtggtgcagcaacatggctgtgtcctccagcagagcacacaaagcttttcttaaaaatgggctgtaatgagctttacatcctactgcatagcatcctctatgcttgtaattctgctataccctgtgtctggccagctcttagattcagatattccctgactgcacttactaaatgacattaaagaaaaatttataatgtttgctttttaaaacatttaaatacattcaagtaatcatttagttgatttcacagttgggtggcaactcaagctaaaaattctcactaaataacattctagcaagccttggcataactaaagaaacactgagcacacagggttgaagttaaaattttatttatggctggagtggcataaaagatttgttttccatgcttcaaaaagaaaaaaaaagttttcagggcttctctccctccctatgcatcctacccttctgtttcctgttcttaactttatctgtacctatgggagtcatcaatggggagtgtcacagggcttggcaagaaatgtcacattgaagataagtggcctcaaactgaaaccaagcagggctgtttgtttccaaagagaaccctccactgtagggccgctcatgcaccgccacagaagcctctgccgggtcacagtcagagaagctccccgggcaccggcagcacactcagcacagccgtttcatgtgggtgaacctgagaaggtttaaagtgttgcaggcccttttcaagttttgcctccctcactctctgcaaactcccttaatgtgggccatggaagagaattttaagagccaataacagaaagactggatattaccccagagaataaagacttgcaaagcctggaacttataatgtttgaaacctggtctttcgaacttgagctatcccggttgtcagtcccacagtggccgtgcacaatgttggcctggactgaaaagggcctctggctcctccgatttcagttcttagcaatatcagacctgtgtttctttggaacagaagttactaaaacaacctaattccaaagaagcccttttgatccagctgttctccctaaaaacattttcgctagcggattcattctttactatttaacagtggacctttaaaacgtacctttaaaatgctttctatagtaacatgtttccacatacaaattataaaatgtgtttattttgctgggcgcagtggctcatgcctgtaatcctagcactttgggaggccaaggcgggtggatcacctgaggtcaagagttcgagaccatcctggccaacatggtgaaactccaactctactaaaaataaaaaaattagctgggcatggtggtggacgcctgtaatcccagctactcgggaggctgaggcaggagaatcacttgagcccaggcggtggcggctgcagtgagcttgagatcgtaccactgcactctgtcctgggtgacagagtgagactctgactcaaaananaaaagtgtctatttcgtatc

SEQ ID NO: 100015 - DNA, 454 bp, Homo sapiens
  misc_feature (1)...(454): n = a,t,c or g
gggaggcccgcccccaataggccctcgacggaacgcgctccganagncnggnggaattccactcaccttgatgagctgggggagcagcaagtcctcatttcttctctgagttttagtttcctttttgagagagagctcataaaggcctttctctctctccttttttttttttttttttgggggaaaacaaattttctttgggttccccgggtgggatgcctgggaagtaatattatttattggggctttggccctccgggcctaaaggatttttttgtttccaccctccggagccctgggaccaacaatggggccccccccccttgggtaatttttaaattttttggaaaaaacgggggcccccctttgtgccccaaattattttgaacccctggccccaaaaaaatttttttgcttggcctcccaaaaccttgggattcccgggggtaccccg

SEQ ID NO: 100016 - DNA, 445 bp, Homo sapiens
  misc_feature (1)...(445): n = a,t,c or g
natgatcatatcgccaatgatggcatcgaagnngcncccgctggctcagtgacctccactctaatttaatcgcagcagcattatttaccaagtgctgttgtatgcattagctcttgcggctgcaaaaatgctacaagtgggtgttaaattgttcttaccattttccttctgtgatgtggaatctgaggcacgtggcttgccccaggccactcaggcagtaagtggcagagccaagactagaacccaggactgcaggcccaggagcccagcatttgcgtcctggcgctgagtctgtggctgccatccctctcccagaagggccacaaagtacccgcatgccaccacacccagctaattttttgtatttttcgtagacgcagggtttcaccatgttggccaggctggtctcaaactcctgacccaggtgatccgcccgccttggcct

SEQ ID NO: 100017 - DNA, 2916 bp, Homo sapiens
  misc_feature (1)...(2916): n = a,t,c or g
ggcacgaggagaacgcatatgagacaaggtaaaggtctgtggaaatcctgtctgtgaatccttctagctatatctttttaagtgaaagagtgttaagtactcagtaaatatgattattattactattattatttgagtcagagtcttgctctgttgcccaggctcgagtgcagtattgtgatcctccttggctcactgtaaccactgcttcctgggttcaagcagttcttgagcctcagcctcctgagtatctgggaatacaggggactgccaccatacccagctaatttttttaaatttttagtagagatggggtttcatcatgtttgccaggctggtctcgaactcctgacctcaggtgatctgcttgcctcggcttcgcaacattctgggattacagacgtgagccaccgcgcccaaccagtaacgatttttttaaagggcctttcttaattgacagttttaagctgtagacattaatattataacaaacaaaacatgccagttttactgattccgctttttgcttgattcaggaacttttcattgtttggggaagcttttgaatgcagtactgtggaggaaatcatccttaaaatagcatttcacacatagggccaaaattgaaattgtcaaggaaacccctcagcatctaacgtcatcttgtagaagagctgggcatacctcttcctctaggccaattcagaggccactggccacccaagtagagtggggcccactggcatgagtagtccctgtgcccatgcccatggtggtgcttgactttgctttggggcttaatcctagtatcatttgggcattaatttttaattaagtttatacttgaataatcagttttactcctgaaaaattttgaagccagcactgactttgtttatattcacttaccttgtatatgaacttatgacattagagtttgtgaaactgtcttaacgtggctcatacacgtgatgtcagagggactggtcagttctttacagggtgaattaatcggcagctggctagtcagagcaactgatgggtggcttttttttcnnnnnnnnnnnnnnnnnnnnnnnnnnnnnnnnnnnnnnnnnnnnnnnnnnnnnnnnnnnnnnnnnnnnnnnnnnnnnnnnnnnnnnnnnnnnnnnnnnnnnnnnnnnnnnnnnnnnnnnnnnnnnnnnnnnnnnnnnnnnnnnnnnnnnnnnnnnnnnnnnnnnnnnnnnnnnnnnnnnnnnnnnnnnnnnnnnnnnnnnnnnnnnnnnnnnnnnnnnnnnnnnnnnnnnnnnnnnnnnnnnnnnnnnnnnnnnnnnnnnnnnnnnnnnnnnnnnnnnnnggnggccctatttttaaaccattcgttacgctgtgtagacagagctttattgccctggaaaagatttttttttaactctcatgcagttcagtctttccatcatttcactttgtgagtcactcacataattgtcaatcattcctctgaccttcttaagaatttacaccttaccgtctctgtgattgaagcagacttctcgctttatttcccttaggctcatttttctgtgggctctcccttaaagacacatggccacagacacctccttcacatatgtaatctgccttcccctgcggccttccgtggtcacagcaacagggactgctcaccccctccagctggggcttttctaacaagcacagtcagaaatgcgcaggcctggggttggggatgaacagaagttgaatttagtggggcacaggaattacagttaggataggaagggattagttccagcatttcggtttttacagtaggggagactgcattttaacattatttgattgtatatttggaaaacagctagaagaataagaatattcccaacacaaagaaaagataagcgaggtgaaggaaatcccagttaccctcattcagtccattacacattcgatacaggtatcaaaatatcataggcacctcaaagacatgtacaactcttaatttaacatttttgaaagaaaaaaaaaccggccagagcattaaaacaaataaaataagaaacacagaggccagtgttaggtgaagaactccgctgcttcagaaagagaatagcagcgctcgcttaccgtgggaacacggccagttaacaaaatgggttttgggttttttgtttttgttttgttttaccattggtaataagatagttaacataagtggtcagaacttcgctgaatttgtaataaagcatttgttaagcgtgtaaaagtccaaattaaaagtcttgaagaaaaacagctatggcaatgagcctagacatttttcaaaaaaaaaaagctaagccgtcctaccagcaatctctctttctcctaaaaatgtcatgccttctcaagacctgatgaaaggaataagatatttgtgcctttttataaaagcatctattacgaaagtaaaattcagttgcttacagttttggccgctttgtagcactattataaacagcccaaatttatggccttggacttactgcatgacacatggcctggttacctgtcatggaatgctgcagtggtggtttgccaagcttctgtggatgtttgaagactttatttttgcagtcttaaccttgggctggacctaagtgtatgtaaaccatatgatgcctgtattgtttatagatgctgacaaaagaaaactagaccttttgttttttgttgtaagatttttgttttcatgcctatgctcatagtagatagtttgcaaatgaaagttgatttgccatacttttaaataatattgttttagcttgaatattctataatacacttttatagagtataacatgctaaatcactgttttgttgtaagaagggtgtaaacattttgttaataaaatgctatgtttacaaataaaaaaaaaa

SEQ ID NO: 100018 - DNA, 380 bp, Homo sapiens
gggaggtagataacagtagtatggtgggactaagaaaaggtttgataggttaaaaaagaaacaaagaaaaattatgatgacttttatattcaggcaatgaagccatatcaagacaataataaaacaaattatttaattaaacatgaagagaatctatatggatattcatatattaatattacatatcatataatgttaaatatgaaatatattaaataagttaatgttggaacttgttcgggcatggtagcttcacacctgtagttccagctacttgggaggctaaggtgggaggattgcttgagcccaggagatcaaggttacagtgaaccatgttcctgccgctgtattccagcctgggtgaagagacaatgtctcag

SEQ ID NO: 100019 - DNA, 509 bp, Homo sapiens
agccaaaaccacgccactgcactctagtctgggcaacagagcgagactccatctggaaaaaaaaaaaaaaaaaaattaggggccataccttaatataatattcctcccccccctggaaacaaaaaaaaaataagggcttcttaagcctaatttaaggaaatgggccccaaaacccttttgaaacctggttgcagtttaagtataaaacggggtcttgtttttttaaaagaaaaaaaaaaaaaaaaaaaaaaaaaaaaaaaaaaaaaaaaaaaaaaaagggggggggggtttttttataatttttgggggggggccaaaaaacggggggggagaaaaattttttttttttttttatgggggggtttttttttacccctcgggggttttttggagaaaactcttttttttggggggggaattttgggcaaccacccccccccaagattgcggctggggggagaaaaaaaattttgggggggtggcggggaaacccttcccttgttgtgggg

SEQ ID NO: 100020 - DNA, 426 bp, Homo sapiens
ctcactcgtgggaatcaatatgaaaaagaggggcctgttttaacatatttattgcggcgcaatttacaatagcagatatatggaattaatttatgtgcctatcaggggatgaatagataaagaaattggggcttatatatacaatgattgctattggggcgtgaaaaagaaggaaaccatgccacttgctacaacatggatagagctgaaggtcaatatcttaagtgaaataggccaggcataaaaagacaaatatcacgtattctaaatggagatagagggtgaaaagatagtgaacagagactggaaagaatgtgtggggagaaagtgagagcatgaatagaaatgaattaaagggcaaaaatatacagttagatagaaaaaacaaattcaatgtttgatagcagtgtagggtgactataagta

SEQ ID NO: 100021 - DNA, 460 bp, Homo sapiens
  misc_feature (1)...(460): n = a,t,c or g
aattttctcattatatctcatccctgtctcagttggctgattcttacagattaacatcatgtctttggtccgatttgagtgtgacttcaaagataaaacatatcaattctacatataatatataaattacctattgaaaatgatatctgaaatagttgatattgactcaaaatgattattgcttttttcataataatcccatagggaagaaataaatcgtttcacttggataatttatgaaagtaaaaaatatttatgataattctatttaggtgatccacctgcctcgacctcccaaagtgctaggattacaggtgtgaaccaccactcttggccaatttacggtcattttaaaggaagctacatggtagaggtggttgaggagagtttctgaatttcgtcttcttggaaagttagttgttctttgtagagcatgctgactaataatgctatcctcccn

SEQ ID NO: 100022 - DNA, 396 bp, Homo sapiens
tgatttggagatatctcgaatatacattggtatataaaaaaagcacggtgcagaatagtgtatatagagagctcagcatgaacaatgggattcttctgagacagcatttaaaaaaatgagaaaggatatctatgaaaatattcacttgaacattcctggacattctttgggaaacaaaatgatcacctctttgcctgtgaaagaagaactgtgtggccaagtataggagaagacttcttgtgaaaaagttcatactttcgaatttggaactattggaatgtattaccttttcaaaaatttaggttggccaggtgtggtggctcacagctgaaatcccagcactttgggaggtggaggcaggaggattgcttgatgccgggagttcacgacaagcct

SEQ ID NO: 100023 - DNA, 435 bp, Homo sapiens
acagcctaattattagcatcatccccctactattttttaaccaaatcaacaacaacctatttagctgttccccaaccttttaaaaaaaaaaaaaaaaaaaaaaaaaaaaaaaaaaaaaaaaaaaaaaaaaggggggcccataaaaaaaaaaccctgaggggacaaaattaaaacccggcaaaaaaaaaaaaactttttccctaaaagggggggaaaaaaaaaccaacctgggaaatttaaaaaaaaaaacaatttttggggggggaaaaaaatggaaaaacccccccaaaaaaaaaaaaacctgtaaggaaaaaaaaaaaatttaaaagaaaaaaggggaaaaaaaacctcaaattgctcccgaaaaaaaaaaagggagttaacgaagaacaaaaaataccatgccgggcgcgaaaaattacaataacatttgta

SEQ ID NO: 100024 - DNA, 489 bp, Homo sapiens
aagaaattcagagaacacctgtgagatactatacaaaatgaacattgccaaggcatatagtcaccagactgtcaaagtcaacactaaaaaaaaaaaaaaaaaaaaaaaatttttaagggcacctactgaaaaggggcaaatccctccaaaaaaaattccttcaaactaacagtaaacttttaaaaaaaaagctaacggcgggaaaaatggggggcctattttcaacattttaaaaaaaaaaaaattttaaccaaaaattttttatcctgccaaactaacctttataagggaaggaaaaaaaaaattttttccaaaaaaacaagggctagggaaatttgttaccactagggcacccttaaaaaaaatcctcacaggagttttaaacttgaaaatgaaaaaaggatacctgttcccccaaaacacacttaagtacttagcccacaaccacccctaattccataggccccacagtaaaaactacaaagcggt

SEQ ID NO: 100025 - DNA, 422 bp, Homo sapiens
  misc_feature (1)...(422): n = a,t,c or g
cccacgcgtncgctagttctagatcgnaaaanaccgccctttattttttttttttttttttttttttcttgtgttttttttctttttttttttttacagagggggggccccccccccccgggggggatttttaaaaaaaaaaacccggggggggggggggtttttaaaaaaaaatttttcccccccccccaaaaaaagggggggggggggaaaatttttttggagtttctttcttcccccccaaccatttttaaaaaaggcccccgggggggggggtttcccttttggggggggggggggccccctttttttccccccccctaaaaaaaaaaaaaaaagananngggggttccccggggggggtttnttctaaaaaaaaaaccccccccccccccccccttgggggggaaaaaagaagtttc

SEQ ID NO: 100026 - DNA, 530 bp, Homo sapiens
aggagatcgattgctgtgctgcagtttggaagcaacctaagtgtccatcagcggatgaatagagaaagaaaatgtggtacttatacacaatggagtactgttcagccacaaataagaatgagatccagtcatttgcaacaactggaaggaagtggagatcattatgttaagtgaaaaaaagccaggcagagaaagaaaaacatggcatattctgaaacatcacatgttctcagttatttgtgggttctaaaaatcaaatcaattgaactcatggagatagagagtagaaggatggtgatatcccttggctgtgtccccacccaaatctcatcctgaattgtagttcccatcatccccatgtgtcatgggaagtgcccagtgggagacaattgaatcgtgggggtggtttctttcatgctattcttgtgatagtaagttctcacaagatctgatgtttttatatgggcgtttcttcttttgctggcacttctcttgctgccgcacatgaagaagatgtgttgcttcctgtt

SEQ ID NO: 100027 - DNA, 459 bp, Homo sapiens
  misc_feature (1)...(459): n = a,t,c or g
aggagattcatggctgagctcggctcctctcccacttgcgtaggcctgtactcagatgacttcctcttagtcatcttgttagcaaagctttccttgaatatcctgccgaaaatattcctgctgggtgcagcggctcacgcctgtgatgcaaacactttgggaggccgaggtggaagggctgcttggggccagaagttcaagaccagcctgggcaacctggagcctggtccaaagacagctgacccccgaacatcacacgggtgtgaattgcgtcggtccagttatacttacgcgcttacccatggattttcctccacccctgagacagcaagaccagcccctctcctacctcctcctcctccgcctactcaacgcgaagactacaaggaggaagacctttatgatgatctacttaataaatagcgagtacattttctcttanaaaaaaaaaaaaaaaaa

SEQ ID NO: 100028 - DNA, 455 bp, Homo sapiens
  misc_feature (1)...(455): n = a,t,c or g
catcgagatcatcggccatcgcggnggaattcgttggtaccaactagagtttaagtgaagttttgcatctgtggagaccaggaaggtttttatcctaagaatcagtcctgttctaaaccagaacttcagtattctgttttatttctttcttttaatttttaaaaaatgtattgttattattattattttgagatagggtcttgcttatgttgcctaggctggtctcaaacttgtgggctcaagagatcctccctccttggcctcctaaagtgctgagattacaggcatgagccnccntgcctggccattgtcattaaagtgactatgtttaacagtcaccttaaggccatgcatggctgctcaagccctgtcatccacccctcttggagggctaggctgggcgatctccctcgatgccctctcttttctaccctccttcccacccgcgcgacccg

SEQ ID NO: 100029 - DNA, 460 bp, Homo sapiens
  misc_feature (1)...(460): n = a,t,c or g
aatcgcacctnatttgaggcgtcgaaaacnccaanaaacgcataagaacgngcataacaccattagctattaggaaaaggcaaatcaaaaccacagtaaaaagcagcttcaaagccactacatggttgtggtcaaagagaccacaaataacaaattggaatctttatacatagctggtgggaatgtaaaatggtgcagctgctttggaaaacagtttcacaagttttcaaaaggttagacctaccatataacctagcaactctactcatatttatatgtcagctacaaataaaaacattaagttcaccaaaatatttacacatgaaagttcatagcatcattattaaaatcagaaaaaaatatattaaaaaaaacctcaaatgtccatcaactgacgaatggataatcaagatatagtgttagtctattcatacaatggaaaatgaacgggcataaaaga

SEQ ID NO: 100030 - DNA, 476 bp, Homo sapiens
  misc_feature (1)...(476): n = a,t,c or g
gagggtngnnnnaatcgagatcgataggcatngcggaggacttcgccatatttgactttgtttctgagttatttcaccgaggataatggcctccagttccacccatgttgctggaaaacacatgatttcattcttttttatggctgagtagtattccactgtgtgtgtgtgtgttgggcgatgataatgatgtccattgctgtgtgacagcttggaatttaatttattaaagtcaagttggagtttataaactgcattttctttatcactcactacattaactacgttttctttatccaatcctccattgatggacacatcgatttggttgatttttatgtagtgaaatgttcaattctaagtcatgaaaattcaaagagatttttcaagctgtttccccagtctaagaaatgtaactcttagtggttcacagaggaacagtttttctaccagtatgacacgacaaccaaacacag

SEQ ID NO: 100031 - DNA, 465 bp, Homo sapiens
  misc_feature (1)...(465): n = a,t,c or g
ntttgatcgacgatcactagtccagngcggnggaattcacctaccatacagttcaactgttccactctaaggtttacccagaaaaatgaagcagatgtctacagaaacacaagaatgtttacagcagctttattcttaatagtccaaaactggaagtaacacaattatctacaaacaggtgaaaagataaataaattgccatatatccatacaatggaatacttttcagtaataaaaagtaaccaacactctataacataacttaatctcaaaaatgtttatcttgcatgaaagtgttgcatgatttagatgattatctaaatcagagcagtggttgcttttggtgaggtggggattgaccagaaaggaacttaaagaaccttctgtgataatggaaatgttaactgtattgattggcatggcagttactcaagtgtatatatttggcaggtttcttcagactgt

SEQ ID NO: 100032 - DNA, 441 bp, Homo sapiens
  misc_feature (1)...(441): n = a,t,c or g
catcgaatagcactacgctagngcggngcaattccccacatacatcaaggtatagaacatttgcagcacttgagaaggctccctcatgctcttcctagttaataacgctcctcctcagaggtaactgctattctgacttctaacaacacagattaattttacctatttctgaacttcatacaaatgaaattatatggtatgtagtagtgccttaagttaggctaatttcagttagcataatacttttgagattagtccatgttgtgtttatctgtagtttgttctttttattactatatattagtccattgtatgaatatgccataatttatttatccattcttcttttgaggatgcttaggtcgctacccaggagcgggattgttgggtcagagggcaggtatatatatagcattagtagatacaagtaaggcaggcatg

SEQ ID NO: 100033 - DNA, 427 bp, Homo sapiens
  misc_feature (1)...(427): n = a,t,c or g
cactgatctttttactgtctccatagttttgccttttccagagtatcatattgttggaatatacagtatatagcctttttagattggcttctttcacgtagtaattccctccatgtcttttcatggctggatagctcatttcttttttagcacagaagaagaatattccatcgtctggaggtaccacagtttatttctccattcacctactgaagaacatcatagattcttccaagttttggcaattatgaataaagctgctataaatatttgtgtgcacatcttagtatggacataactcttcattcctttcagtaaataccaaggagtgtgagtgctgaatcatgtaacaagagtatgtttagttttgtaagaaactgccaaactgtctctaaagtggctataccattttaaatccctaccaccn

SEQ ID NO: 100034 - DNA, 443 bp, Homo sapiens
  misc_feature (1)...(443): n = a,t,c or g
ggggttcccntttcgagaccatagacagcgtggtggaattctagcanaattataaaaacaacctaaaattctctaataaggacatgcttgtgtaaaatggaatttgtagtcccagctaccctggaggctgaggcaggagggttgtttgagcccaggagtttgaggctgtagagctatgtgattgcaccactgcactctaacttgggtgacagagtgagaccctgtctcttaccaaaaaaaaaaaaggggagggatttttattttgggggtatccttaccaaacgggcttaacctgcttggaataagaaaaaaccttgtgcaaccccaattggggggactttccacaaaatacccagcctttacttttaaattttaatacctttaaaacccaaaacttactcaggaggcttgccaaagtcaaaaaaactaaggagacttgacgg

SEQ ID NO: 100035 - DNA, 652 bp, Homo sapiens
tgcttgttgatttgtctaacaccaatattgctttgcttctttttttttttttaataatttttttaagactgagtctcactctgttgctgaggctggagcacagtggcacgatcttggctcactgaaacctctgcctctcagattcaaataattctcctgcctcagcctcctgagtagctgggattacaggtgcatgccaccacacctggacaatttttgtatttttagtagagacggggtttcaccatgttggccaggctggtctcgaactcctgacctcagatgatccacctgccttggcttcctaaagtgctgggattacaggcgtgagtcaccgcgcccggccagtcgaactctttcttctgaggaggcaaggattgagattgctgcagaacataggcattggccgtcagtaatataccgtgtgactcagaacctcccccgcttctccctgcatcaagagctggggagacggcagcgtgggactcgtgggtaatcccctgcagcggcctgccactcctcccccactgcctggtctgggtggggcacaagactcaggcctaagccaatcagagccttccctggctgcagcaatgggtctaagggccctccccctgtgaccctggccttggccaccaggcttgctttggca

SEQ ID NO: 100036 - DNA, 370 bp, Homo sapiens
  misc_feature (1)...(370): n = a,t,c or g
ttttcttgtcgacgtatgcacttaatactcaatatggaacttttgagatagactctttggcctccactaaacagaatgtccttgagatccatgtaagttttctcatgtatcaatagcttgttccttttcatttccgcgtagtattccattgtatgaatgtgccatagtatgtttaaccattcacctattgagtgacatttgggatatttctagtgttgggttattatgaataatgctgtcatgaacattgatgtgcaggtttagtgtcgacataggttttttttcctctgggataaatgcacaaaagaacaattgncaggtcataaggtaagtagcgtttagtcttaggagaaactgacaacctattact

SEQ ID NO: 100037 - DNA, 357 bp, Homo sapiens
  misc_feature (1)...(357): n = a,t,c or g
ctttatcataacacacaggcagggccctattttcagagagtttaacttggggaacatctgaggcagggtccaataatcttaaaagtttgccaggtgattctaactcatcagcaatattttgagagccaatggtctataatggcgctatccaacagaaaatataatgcaaactgcagatataatttaaaatgtcctaatagttacattaaaaaagaaatgttgggccgggcgcagnggctcatgcctgtaatctcagcactttaggaggccaaggcaggcatattgcctgagctcaggagttcaagaccatcgcgaaaccctgtctctactagaataaaaaaaatcagccgggcatga

SEQ ID NO: 100038 - DNA, 381 bp, Homo sapiens
tctttgctcactagtattcactcacatatgttcaatttttctttttttcttttttttttttaaagacagggccttgctgccgctcatgctggagggcagggccatgatcatacctcactgcggcctcaaactccggggctcaagcaatcctctaatctaagcaggggcaagcccctatgtcgggctaactttgggagtttttggtttttggttttggaaaaaagggggtcccaccatgtggcccaggctagtctaaaacaatcctcctgcctcagcctcccaaagttaggggattataggcatgagccatctcaccgggccaatatgttcaattttagaagcctccctggcctccgaaaggcggactgcctatacccttac

SEQ ID NO: 100039 - DNA, 355 bp, Homo sapiens
aaaaagtgttggctgttggcgagggtgtggataaattggagccctgtgcactgttggtgggaatgtgaaatggtgcagctgctgcagaatgcagtatggcagttcctcaagaactgtaaaatagtaccacactattgagcaatccacatctgggtatacacccaaatgcactaaaaacggcaactcaaagaaatatttgtgcacctatgttcatagctgcattatgtgcaacagccaaaagacaatgcaaaccaagtgcccatcaatagacaaaacatgatatacccatacaatgaaatatgattcagcctaaaaagggaaattttgacacacgctacaacatgaaccctaaaga

SEQ ID NO: 100040 - DNA, 383 bp, Homo sapiens
  misc_feature (1)...(383): n = a,t,c or g
attttcaaacatttgagatttttccatgtatctttgttatagatttataatttaattccactgtggtcaggggatatactttaagatctaaatcatcttaagaatattgagccttgttttatggcctaaaatatggtcaatcttagtaaatgttccatttgcactaaaaaaaaaaaaaaaaagggggttcctgctgttttggggaagggggttctataaatgccaattaggggaagtgggttaatactgttggacaagccttctatatccttactgactttagtgcgacatgacccattggtcaggggaagcatctaggccattaagtctgtcctacagcatctaaaaagccctgtgacaagaagcaggaagccatcagtgtn

SEQ ID NO: 100041 - DNA, 353 bp, Homo sapiens
atcgtgttaccagctgaggaagaatttctgtgccaaatttcatcaatgtatagttgagaagtttttgttctgctttgttttgttttgagacagtcttgctctgtcacctaggctggagtgcagtggcatgaccacggctccctgcaggctcaagcaatcctcccccctcagcctcccaatcccaagtagctgggaccacaggctggtgccaccacaccaggtttttttggaggcttttttttttttttttttttttttagaaaaggggtttttttttttttgcccgggggggtttaaaactcgggggttaaagggaccccccgccctaacccccccaaggccctaaattaacc

SEQ ID NO: 100042 - DNA, 366 bp, Homo sapiens
cccagccaagattttgtagcatcttcctttctgtagcttctactacaagacaatagataggtctgtctgtgtgtttgttttccaagtgtaagattataaacttgaatatcccttttcacacttaacactgttccctcctgctaattctccccacttgtttctgatcagtcaacctaagtgaaacatattggcctccttaagaattactggcctggccgggcactgtgactcacgcctgtaatcccagtactttgggagtctgaggtgggtggatcacctgaggccaggctggtctcaagctcctggcctcaagtgaccctcacgcctcggcctcccaaagcgctgggattacagatgtgagccacc

SEQ ID NO: 100043 - DNA, 365 bp, Homo sapiens
aacattttaaaattaaacaacaagcttttaaataacctgggtcaaagaggaagttgcaaaggaaattaaaaagtaattggtattgaataaaaatgaaaatacaacatataaagatttgtggaatgaagctaaaacagtgctccatttatagcattaagtgaaatttatagcattaagtgcttaaagaatagtctcaaatcaatgttctaaatgagcttctacattaagaaaccataaaaagaagagcaatttaaacccaagactaatataacagcagaaatcaataacattgaaaagagaaaaatcaatgaaaccaaaagctggttctttgataaggtcaataaaattaataattagactgacag

SEQ ID NO: 100044 - DNA, 363 bp, Homo sapiens
cgctgctgttgctgcctgcttttgctgaagaatgatatcttgccaggcacggcggctcatgcctgtggtcgcaacactttgggagaccaaggcagaaggatcccttgagctcaggaatttgagaccggcctgggaaacatggtgagaccccatctctacaaacaaacaaacaaataaataaataaataaaatttaaaaagaagattggccgggcatggtggcatgcccctgtggttctagctgcttggaaggctgaggtgggagaactgcttcagcctgggagataaaggcggcagtgagccgtgatcctgccgctgcactccacccaacctgggccacacagagcaagaccttgtctctggg

SEQ ID NO: 100045 - DNA, 320 bp, Homo sapiens
  misc_feature (1)...(320): n = a,t,c or g
attatactgacctggccaccacacaggaagcaaaaagaaaaggtggtgctaacttctctcctcacactgagacagggaaagctcctctgaggccatgcaaggcatttcgggaggccaaggtggggggattgtttgggcccagaagttcgagaccagcctgggcaacatggtgagaccctgactctgcaaaaataaaaataaaaattagccggcatggtggcacacacctgcggtcccagctactcaggaggctgggattacaggcgtgagccaccgcgcccggccttgccccccaaattntactaaatgtgtcacataac

SEQ ID NO: 100046 - DNA, 327 bp, Homo sapiens
gcgattctcatgtctcagcctcccaagtagctgggactacaggcatgagccaccacgcctggctattttttttttttttttttttggaattttaaaaaaagggggggtttccccttgtgggccaggtgggtttcaaactcttgacctaggggaattggcctgctttggcctcccaaagggtggggattacgggcttgacctcccacccccacccaagtaagggttttttttttacaataccaaaattggggggggttttcccttaatagggaataaattttaaaaagggagggttcggggacctttttaaaatggaaaaaaaatcgc

SEQ ID NO: 100047 - DNA, 523 bp, Homo sapiens
  misc_feature (1)...(523): n = a,t,c or g
ncgtgatcgacccataattggaggncgtctctacagatcttcacagcagngctattcctacttgccaaaaagtggaaacaacccaaatgtccatcaactgatgaaatgatacacaaaatgtggtatgttcataaaatgaaatattaatcagtaataaaaagaaatgaggtgctgatacattctgccaatgtggatgaattttgaaaacatgttaaatgaagaagcctgttgggaaagaccacatattgtataattccatttatatgaaatgtccagagtaggcaaaactggggaaacaaaaagtagattagtggttgtctaggactcgggtggnggtaggtggtagaaatggagtgactgctcacaggtactgggtttctcttgggggtgatgaaaatattctaaaattctattgtgatgggtgcacaactcttgatgtactaaagctaatttaattgtgatgttaaatggatgaattgtactgtacgtgtgtgaattacatctcaataaaagttaaaaaaan

SEQ ID NO: 100048 - DNA, 474 bp, Homo sapiens
  misc_feature (1)...(474): n = a,t,c or g
gggttgcccccaggtgcccccaactgaaaccncgtangatgccntcgaanccncaaaagaagccttgtaccctttagctattgcccctctttatacttccgtctctctctccaacagctcctggcaaccactaatctactttctgtctctatatttgcctattctagacatttcaccactgtgatcatggaatacgtggtattttgagactggcttttttcactaagcataatgtttgcaaggttcatccatgtcatagcatgtattatcagcacttcattccctttcaaggctgagcaatgttccattgtatggatataaggtatcttttttttacctatttatcagtggatgggcatttgatattcatctcttaccattataagcgttcatatacaagttttggtaccattaagtatttttgggaatgacagtatagcaacaaagacctgtcttaggtttgtataatttgga

SEQ ID NO: 100049 - DNA, 484 bp, Homo sapiens
  misc_feature (1)...(484): n = a,t,c or g
aggttcccccnagggtcccccctggggnacaagcctaaatgcctnagnannnncncgaannnngnaanaaaagcagaacgataccgcagngttgttacaagcttgttttttgcgcacagtactcattgactataaaatgtgggcagagaaggggatggttggcatgtgtgttctaatgagaaacatgacggtgattattatttttagagacagagtcttgctctgacaccctggctggcatgcagtggtgcgatcacagctcacttcagcctcaagcgatcctcctgcctcaaacccccaaagtgctaggattatagatgtgagatactatgccaggtagagatagcttttacacatagatcattgtttaactctttcttgaaacgttccatgcgggttatattgctaaactattggaaggatccatctcttggcttttgttcctatgactcaacaggcatggcattattgagaaacttctcan

SEQ ID NO: 100050 - DNA, 482 bp, Homo sapiens
  misc_feature (1)...(482): n = a,t,c or g
aggtgcccgnnnattctcccnnttaaagngttagnctgnnggcgtccgaacaaccgactgntgaggagagaggagaaaatagcaaaagctctttatctcagccttaatttatattttgcaaattcactttattatatgtgtgtgtgttcatacatatacttttatttatttatttatttttattttttaataaagacaaggtcttattatgttgcccagactggtctcaaactcttgagctcaggcagtcctctcgccttgacctcccacagtgctaggattacaggcatgagcaaccgtgctcagcccatacatgcagtttataaacagcaaatacacacacaaatatatacatattaaaggtacatggccagttagataggactatgcagtttaaaaaggttaatgacttcttcagtaaacagatcattttcttcttagtactttgaaaattagctctaaggattagcattagacccatt

SEQ ID NO: 100051 - DNA, 461 bp, Homo sapiens
  misc_feature (1)...(461): n = a,t,c or g
atggactcgttagcctcggacagngcggnggaantcgtccctgggaaccactaatctgctttctgtctctctagatttgcctgttctggacatttcatataaatgagattatacaatgtgtggtcttttgtgtctggctgtcttcactcaacataatattttcaaggttcatccatgttggagcatgaatcaatacttcattttatgatcaaataatgctgtgttacatggatagtccacattttgtctctctcttcgtatttcatgtcgatagaaaaattttttttctactttttaacttatgaatggtgctgcagtaaacatttgtgtacaagtttttgtgtggacatgtgttttctcttctcttggatacgcacctaggtttagaactgccaggtcatacagcaacttcatgtttaaactttcaaggagctgccagacttgtttttaaagcagctgcg

SEQ ID NO: 100052 - DNA, 459 bp, Homo sapiens
  misc_feature (1)...(459): n = a,t,c or g
natcgagattcgtagtccgtgcggnggaattcgccgttaattgcattttttaaaagattttatttatttggtctgagcacggtggctcgcgtctgtggtcccagcactttgggaggccgagaagggcggattgcttgcactcgggagttcgggactagcctgggcagcgtggcgaaatcctgtctctactaaaaataaaaaattaaccagccaaacatcttatgtgctcactcataagtgggagctaagctatgaggacacaaagcataagaatgatacagtggacttttgtggactcgagggaaagagtgggagcgattgagggataaaagactgcacactgggtacagtatatgctgctccagtgatgggtgcaccaaaatctcagaaatcaccaccaaataacttactcatgtaaccagacaccacctggttcccaaaaacctattgaaataaaaa

SEQ ID NO: 100053 - DNA, 484 bp, Homo sapiens
ccacaaactgatattactttatagggtcttgtgaaaataaagcattagcatggtgcctagcatacaataaatataattattctattatcaataatataaacatggagggcgattattagctcatttgctcctcaaaggtatgtaactcaataaagatgcattctcttctaatattaagtttccattgttaatacagaaatcgtccaggtgtggtggttcatgccagtaatctcagcacttgggaggctgaagtaggtagagagagcagttcaattttcttttctccctgcaggtgctgctgtcgggcttgaatggaaggtatctcatgggtgggcgcgtggctcatgcctgcaatcccagctactcaggaggctgaagtgggaggatcgcttgagcctgggaggcaaaggcttgcagtgagcccagattgcaccactgcactctagcctgggtgacagagtgagaccatgtctcaaaaaaaaaa

SEQ ID NO: 100054 - DNA, 510 bp, Homo sapiens
attagcatccccccaaaaaagtacttaagaataaatctaacaacatatgtacaaggtttgtatgagcaaaactacaaaactgataaaagaaaccaaggaagatcaagtaaatggagagatggtccatgctcacggataggaaaactcaatattaggatgtcagttctttccaacttgatctatagcttcaatgtgatcctggtcatagtcccagcaagttattttgtgagtatcaccaactgatcctaaagtttacatgaaaatgtagcagacccagaatagttccactgttccacctccttctgcctctcctggtgccgtttgtgtgctcattcattctgtgcagacctggtgcctcattggtgaagtagcagctgaggagactccagcactcgtgtggctgatgaaaagcccaaggaaggagtcaagactgagaataacaatcttattaatttgaaggtaatggggcaggattgttccatggtgcagtttaaaattaaaagtcatata

SEQ ID NO: 100055 - DNA, 490 bp, Homo sapiens
  misc_feature (1)...(490): n = a,t,c or g
agaggctnncaactgatnccctcgcaagcgcggaattcgtctggtancatagtgtggattgggttgggggatggggaaggagagcanaaaattattgaaatatccaggtgcataaaagtctactttgattatggagaactacacacttgttcagtcaccctcattggagacgggggatggcatacgaaaagaatgctgatttcaggctgggcacggtggctcatgcctttaatcccagcactttgggaggctgaggcaggtgaatcaggggttcaagaccagcctggccaatgtggtgaaaccctgtctctactaaaaatcaaaaaaaaaaaaaaaaaaaggggcggattcaaaaataaaatccgggtttaaatttttgatttcaccccaacctgttttttttttgttacttaggggacccttttctaaaacccagggatcctgaaccccgcttcatatgggggcagggttcaaatgagcaaaaaaaaag

SEQ ID NO: 100056 - DNA, 458 bp, Homo sapiens
  misc_feature (1)...(458): n = a,t,c or g
ntttggaactgagacactaggccaggcgggaattaagggagaccctggtgagaagagccactggggggaggggttgcaccagctacgcgaggctttgaagattttagctgagagggttttaatcttggaaacaatgattgggctctatggctcctagcttacagagcttcctgcagcagcaggctcagctggagctcctggccagacgggtcaccctcctggaagccatcatctggccagaaccagagctggggtctggggcgggccctgccggcacaggcacccccagcctccttcggggcaagaggggcggacatgcaaccaactaccggatcgtggcccccaggagccgggacgagagaggctgaggngtgtggcnnnnnnntnnncnnnncnnnccnngntnnccctcctccctnnactcnncccnctgcctccncgncccgcccgtctttttt

SEQ ID NO: 100057 - DNA, 473 bp, Homo sapiens
  misc_feature (1)...(473): n = a,t,c or g
gagcacccanacagnnngncctgataccctngancctgnnaccctaggaagngcggggaattcgggatacaggcatattcaaccacatgtggctaattatttatttatttgtagagacagggtctcattttgttgcccaggctgatcttgaactcctagctttaagcaatccttctgtctcggccccccaaagtgttggtattacagacatgagtcaccaaacccaatccctcctgttttttattttttatttattttttttgagacggnnnnnnnnnnnnnnnnnnnnnnnnnnnnnnnnnnnnnnnnnnnnnnnnnnnnnnnnnnnnnnnnnnnnnnnnnnnnnnnnnnnnnnnnnnnnnnnnnnnnnnnnnnnnnnnnnnnnnnnnnnnnnnnnnnnnnnnnnnnnnnnnnnnnnnnnnnnnnnnnnnnnnnnnnnnnnnnnnnnnnnnnnnnnnnnnnnnnnnnnnnnn

SEQ ID NO: 100058 - DNA, 452 bp, Homo sapiens
  misc_feature (1)...(452): n = a,t,c or g
cactgagaccctgagacatgcggggactcgnntcccagctgttcttgtgacagtgaataagtctcatgagatctgatggttttataaaggggagttctgcttcacatgctctcttgcctgcctctatgtaagacgtgcttttgctcctccttcaccttccaccatcattgtgagacctcctcagccatgtggaactgtgagtccattaaacctctttttctttttcttttttttttttccttttgggaaacaaagtttctttttattgccaggccgaagggcaggggccaaatttgggttaattgaaacctttgcctccggggttaaagcaattttcttgtttcaccctcctgagaagtgggaataacaaacggaaccccccgggcccgtgaaaaggcattttggactatcctatttccctttaacaaggggttaatcagggcttacccccn

SEQ ID NO: 100059 - DNA, 475 bp, Homo sapiens
  misc_feature (1)...(475): n = a,t,c or g
natcgagaatagtagacattaggcagagtggnggaattcgcgattccattcctaactatatacccaatagaactgaacacacatgttcacaccaaaatttgcatataaatgtccacagcagcattatccacaaggtagaaatcacccacatgtccatcaatggataaacaaaatgtggtatatccatttcatggaatattattcagccatatccaaaggtagaaaccacgcaaatgtccatcaatggatacacaaaatgtgatatatccatacagtggaatattattcagcaataaaaagtaacgaagcactgacatatgctacaacatggataaccttgaaaacattatgctcagtgaaagaagtcagtcgtaaaaagacacaaattgtatgattccatctttatgaaatgtccagaactgggaaatctatggagacaaagactattggttgcctagagctggggatcatggga

SEQ ID NO: 100060 - DNA, 457 bp, Homo sapiens
  misc_feature (1)...(457): n = a,t,c or g
natcgtcgaccctagtccagtgcggtggaattcgttattatgtgtcaattaaaaattaagaaaaatgtgggagccaggcagggtggttcatacctgtaattctagcactttgggaggccaaggcaggaggatcgcttgagcccaggagttcgagagcagcctaggcaacatggtgagaccctgtctctagttttaaaaagtttttttttaagaaaaatatatgaggtattaatatttaaaagaaagtgacacatttatcattgttttaattaggctcttttgaatgttagaaaatgagagggattaattgtaaggatacacatggaaatgaactaggaatagaagaaaacttttaaattatgattaatggcatctattaaaaaatcctacagcaagcatacttataagcttgcctcctgaagttggaaatgagacaaagattccctttattaccatg

SEQ ID NO: 100061 - DNA, 414 bp, Homo sapiens
tatttacaagattgtgtgaccattactactaattccagatcatttccatcaccccaaaaataaactccacacccattagcagtcacttctcactctctcttcccctcgacttactttctgtctttatggatttgcctgttctagatatttcatatctagatatttcatataaatggaatcatacaatatgtggctttctgtgtctggtttcctgtacttagcataatgttttcaaggttcatccatggtatcagtagtttattccttttttatggctgaatagtattctattgtatggacataccacattttgtttatacattcatcagctgttggacatttgggtttctactttttggctattatgaattatgctgctgagaatattcatgcacaagtttttatgtgaatatg

SEQ ID NO: 100062 - DNA, 271 bp, Homo sapiens
ccactacaatcttgctaggaacaacatatgacgcactcttccctgaactatacacaacatattttgtcaccaagaccctacttctaacctccctgttcttatgaaattcgaacagcatacccccgattgcgctacgaccaactcatacacctcctatgaaaaaacttcctaccactcaccctagcattacttatatgacatgtgtccatacccattacaatctccagcattccccctcaaacgtaaaaaaaaaaaaagcggggggacgatt

SEQ ID NO: 100063 - DNA, 418 bp, Homo sapiens
actagttctagatcgcgagcggccgcccttttttttgttatgatgtctgtgtggaaagcggctgtgcagacattcaattgttattattatgtaaaaaaaaaaaaaaaaaaaaaaaaaaaaaaaaaaaaaaaaaaaaaaaaaaaaaaaaaaaaaaaaaaaaaaaaaaaaagggcgggggggggctttaaaaaaaaaaccggggggggagccccttttcccacattaaaaaaaaattatttttttttttttaggggggggtaaaaaaaaaacccggggggatttttaaaaaaaaaactttttttggggggggaaaaaaaaaaaaaaaaccccccccaaaattttttccttttggaaaaaaaaaaaatttttgggggggggggggggaaaaacccccctgatggggggggtttataaaaaa

SEQ ID NO: 100064 - DNA, 417 bp, Homo sapiens
aagatattgaggcctcggatacagaccattgccgtgaagtgagtcacacacagtatttgatttccaaaagcatataaaagttacgtctacatgctactttaatttattacgtatgcaatagcattgcgcttataaaaaccagtgtgcatatttcaattggagaatactttactgttcaaaaaataataatgaccctttgagcctgctgtgagctacagatttttagctgttgcaaaggctggactcaaagagcggatggccgctgactaatcacggtagttgatgctaaaagaggcagtttctcctaatagatagcagggaagggcgctacattaattggctcttcctttcaccaaagatttctgaggagcatgtgatgctacttgatagcattttattctctgtaaaactctgaaa

SEQ ID NO: 100065 - DNA, 411 bp, Homo sapiens
cggacgcgtccgcccacgcgtacgcggacgcgtgggcggtggctcacgcctgtaatcccagctctcagggaggctaagaggcgggaggatagcttgagcccaggagttcgagacctgcctgggcaatatagcgagaccccgctctccagaaaaaggaaagcccaaacgaacccggacgccaggaaaaaggttaacggtttgttaccttatagccccccgttgccccctttgtgggcggatagattgagcccaggagttcgagacctggctgggcaatataacgagaaccccgtctccaaaaaaaggaaaagggggggggttttttaaaagaatataggggggggcggatttttccctttgtgccccctttttttcctttttttgttggggggggaatataaaaaacaagtg

SEQ ID NO: 100066 - DNA, 1105 bp, Homo sapiens
  misc_feature (1)...(1105): n = a,t,c or g
agaattcaaggataagccgctggtgagagaaagcaacttttattgaactggtgctacttcttgcagagcagggctaacctataggcagtgtgcccagagtttgtgcctgtgggctactagctagttgtatttagagccacttttaattgcatgccaattaagaggtaggttattcagaactttctgggaaaggggcagggagtttccagaaccatataaagtaacttccaggccattgccaaggtgtgttgccatgacatttgtaaactggccatggtcccagtggtagtgtctttatgctcataagcagtgagggcaactagaggtcactttcatcatcatctgctggtttcagcaggcttctccactgcaccctgttttgaccagatcctgctctgttcaatggggttgggaatggaaaataagtccttctggtctcctacctcatttccccatcagagattatatactcctccttaatcttaaggggcttgcagaagggcggaggttcatcttctgtaactgcttcctgctgatgttatgggcatagaccctgcctagcactggagaggtaaaatccctggatacctgttctaaaaggctcaaaggtaggatgtctttatcttctgggtcagaagaggggatgggttgaaagccttgtgccagcatcatctttacatggaattattgtaatctggaagacacaaactttacaaggaggttaaccaagcaaagagcaaagattagtaataaaaagatatctattaaaggtcctaggaagggtaaaaaccaagtgtctgctggtagagattcctttactgaattccatcagcagggcaaagcagtaagagggaaaccattataattaggagtaagagaaaaactttcatgctcatccacagcatcatgttattattgttatctgtgcatttgcaaaacaatagctttaagtcttccgggcgtttgcaaatataggtcacagcatcgtcctctgacatctgtgaggactcataacaatctttgagggccgggggccggcngcacgcctgtaatcctaatactttgggagactgaggagggcggatcacgaggtcaggagatcgag

SEQ ID NO: 100067 - DNA, 397 bp, Homo sapiens
ctgttttagtgaataagctaattaaagtctatccagaccaccatgtttttatttacagtgactatatatatccatgattttgacatagagtataattctgatgttacttatttcaatatgccttgtatatattagctgtttataagagagtcgctttttggttgaaaagtatttctaggctgagcaaggtagctcatgcctgtaatccaaacactttgggaggccaaggcaggaggatcacttgaggtcaggagttcaagagcagcctgggcaacatagtgagacctcatctctacaaaaaatatttattaaaaaaaaaaaaaaaaagcccaccatgggggggcacacctgtatttttacctactcaaaaggctgaggtgggaggattgctttgagg

SEQ ID NO: 100068 - DNA, 411 bp, Homo sapiens
aatactgggatcatgcctgctaacactgtatccattctgctgctgatagatcaagaagtactggtgactgtcaaaacttgttatttaagaaatacattttgcggtttctctgatggttctgggcattcagttcataaccttctggataggatctaccattctagatgccatcaagagccttcaattcacgggaggacggcaaaatatcaacattaattggaattaggaagaaatagatcccgatcctcatggaggacttggtgggcttcaagacttcacaggaagaaggcactgttgatgggctgaacctagcatgagaactacaagtggaggggcctagagatgagaccgaattgctgtaacctcaagatcaaacttgtatggatgagaagttccttcttatggacgagg

SEQ ID NO: 100069 - DNA, 380 bp, Homo sapiens
catagattggccacacctggcccagtcatcttaaatatggctaagtgtttaaatcggtgtttttctatctggggtgattttgacctccaggtgacattttgcaatatatggagacattttttgttatcactgcttggaggggagtggaatgtgttactactgatataacaggtaaaggccaggactgttgctggccatcctgaaatgcacagcctgtaaataatctcagtgctttgggaagctgaggtgggaggatcacttgagcccaggagtttgaggctacagtgagccatgattgcaccactgcactatagccagggtgacagagcaagaccatgtctcaaaaaagaaaaaaaaaattatggtgtgtgaaacctgcg

SEQ ID NO: 100070 - DNA, 379 bp, Homo sapiens
cccacgcgtccgcaaacctcaggattactagcaagagggaacacccgggtgcaggcacttctgcttctctgcgttatgcattttatccaccacacactgacaaaaaaaaaaaaaaaaaaaaaaaaaaaaaaaaaaaaaaaaaaaaaaaaaaaaaaaaaaaaaaaaaaaaaaaaaaaaaaaaaaaaaaaaaaaacccggaaaaaaaaaaaaaaagtaatattggggtaggcgttttataaaccacacactgtcggcaagaaaaaaacctaccaccctgaccactttaaatgctctggtgtgggggggggataataaaaatccaggcctaaaaaaaaaaaaaaaaaaaatttattgggtggaataaaaaaaacaagataga

SEQ ID NO: 100071 - DNA, 354 bp, Homo sapiens
atcattacattacagcattttatattataatagagttttgtataaagagccctagacagatcatcattgattttgccctgatcatgggtgcagggaatgactggagaaaagtttacagtgaaagtaatacttggagccaggcatgggggctcatgcctgtgatctaaacactttggcgaggccacggagggtgtactgcttgagtccaggagcttgagaccagcctgggcaacatggggaaaatctttctctaccaaaaagaagattgaaaaatttgtccccgggctttaggggggccccctggggtcccacttcctggggaggggggggggggggaatattttaaccttgggg

SEQ ID NO: 100072 - DNA, 401 bp, Homo sapiens
aaaacaatttaatctccctccaaagtccccctgttccatctctcataactcctgacaaccactgactgcttctgagttcctgtagatttggctcttcaagaatgacatataaatggaatcacatagtatgtaacgtcttgagattgacttcttttacacagcataatgcttttaagattcatccaaagtcttgtgtatttcaaaagcacatttcttttccttgctgaatagtattctattgtatgaatacacaagccacaatttgtttatctgcccttcgaggacattttaattatttctagtttttggcaattatgaatagtggacatttgtatagaggttggtttgtaaacataatttttcaactcttatggtagatatccagaagatggaatgctgtg

SEQ ID NO: 100073 - DNA, 712 bp, Homo sapiens
cggacgcgtgggctccagacctcatgattcgcctgcctcggcctcccaaaatgctgggattgcagatatgagccatcatgcccagtcgcaaccctaatttttcattcagtcataataccaacagttatctcatgtacctctgagtgccttcttcccaaaagccagcagtaccatacctgctgtcagcaagtgtgtaatataccatagtgataaatatgaccaaaagccataaatgactgtgagatgtatgagaatgacacgtcacattagtaagaagagaaaaattttggccatgtttatgatttgaaatatgttttcctctatcacatttagaaatatagttacaaaatgcccttagttttatcctgattcatcatggtcactgaggagcatcgtctcatatgcctggtatgtgacatgtgtctcttcaacagtaaaagacttggcattggctgggcatggtggctcacgcatgtaatcacagcactttgggaggccgaggtcaggagttagagaccattctgaccaatatgatcaaaccccgtctctactaaaaatacaaaaattagcggggtgtggtggcatgctcctgtaatcctagctattcaggagcgtgacgcaggagacttgcttgaatataggaggcagacgttgcagtgagccgaggtcacaccattcactccagcctgggcaacaagagcgaatccgtttc

SEQ ID NO: 100074 - DNA, 406 bp, Homo sapiens
  misc_feature (1)...(406): n = a,t,c or g
aaacaaaaaaataaacaaaaacataacaaattaaaaaccactaggaaattgacattggcataatgccattaactcaggtaagagaccttatttaaatttaaccgatttttacatgcattctttttttggaagggggggtagaantttctttttttctttttttttccccttttctgttgggctaatgaaaggaaccatgtttttaaggttcatgcaaataacagcatgtttcaaagcttcattcctttttatgtctgaattaatattcattatacatatatactatatttggcttatccattcatcagtggataaacactggggttggttccacctttaactagggtgaataatgctgctatgaacattggtggacaagtttctgtttgagtctctgttttcaaga

SEQ ID NO: 100075 - DNA, 397 bp, Homo sapiens
aaaaagttaagcaggacagctttataaagagttttatcttgttgcattttgggccaggagcagtggcacacgcctgtaatcccagagttttgggaggccaaggcaggaggatcacttaaacctgttcaaggcttcagtgagtcgtaatgagccactgcactccatcctgggtgacacagcaagaccctgttgcttaaaaagaagttactttttgaatattcttgatactgtgacatacctcatcaaatatttaaaaggagatcctggtagtaaaatggtaacatcatgagtcacatgtagttaagtggacttgttgcaagtaatttgctactaataataaagtatccaagttttaaaaatattaacattttattaattaaagaagggtctgtgtatc

SEQ ID NO: 100076 - DNA, 406 bp, Homo sapiens
  misc_feature (1)...(406): n = a,t,c or g
atactgtggtagagtgatcttatcattaagctagggggcaattaggagagaggggttctaatctcattattgcctctaattagctatgggaccttctgagccatttaattatcttttgtgaaatgagagcatttgcctaagttgcctagagtctttctaagtcttaaaatattccattactctgccattgcacatatattttttaagtgggataaggatgaacagtaggtacatacaggtgttccattgattctttctatttcccctaccaatagacgtatttctggaggcctggcatgatggctcacgcctgtagtcccagcaccttgggaggctgaggtaagcagatcacttgagagcaagagttttgagaccagactggccaacggggggaaaccatgtctcn

SEQ ID NO: 100077 - DNA, 387 bp, Homo sapiens
tacagcattgtttgtctactcatccactgaataatgttgctaccaacatgggcatacagatatctgttcatgtccctgctttttattcttttggatatatacctaggagtgaaaatctgggtcatatgataacttgatatttaacctttggagaaaccatcaaaccatttcctgcagtggctgtgccacttcacattcctccatcagtacctgaggagtccagtatttctacatccttgctaacatttacttcccttttttaaagggatggccatccttcccctccagtcttattggcctctatcatgtcacatgcccactcctaaattaattatttgcaaagggaaggatattaccaaaattgccttaaaccaatcaggaccaggg

SEQ ID NO: 100078 - DNA, 415 bp, Homo sapiens
caagtagctgggactgcaggtgcattccaccatgcctggctaattttttaatttgttgtagagacaggttctaactatgttgctcaggttggtcttgaactcctagactcaagccgtcctcctgccttggcctcccaaaggcatgcctggccttctttttgttttttatgggggcatagttctcagctatgtgaatatatcataattaacccaacagatgtcttattgatgggcatttgggttgtttccaatcttttgctatttcaaataatagtaagattaggaagataacaggcacatggttattcagaatagtatagtaaaactacttggagtagttttaatgtaccttattcctgtcagtaatgttgaagatcttttcatatatttaagaactatttgcatttcttttttg

SEQ ID NO: 100079 - DNA, 413 bp, Homo sapiens
tcatttctttatgtattttggatattaaccccttattggatgtatggtttgcaaaaaaaaaaaaaaaaaaaaaaggggggggggggggaaccccttttttttttttatggggattaaaacctttaaaccccaaaccccggcccccaaaaaaaaaaagaatttttttccttttgcgggcccttaaccaaaccagaaacccttttttttcgccaacctaccccgggaccaaaaaccccccccccgctggttttccttcttagggggggcctgaccggggaaacccctggcccttggggaacctttttttcccggcccctttcgggggggggggggaagggggaggaaaaccttttaaccaaaacctaagccatttggggggctaaaacccaaaaaaccgggttgatgggcccccg

SEQ ID NO: 100080 - DNA, 449 bp, Homo sapiens
ttttttttttttgggttgttttcaggttttctgtttttctttttttgcggttgagtcttaaccactttgcccaggctggtcttcacctcagaggctctagtcatcctccttccttggcttcccaaagtactgggattacaggcgtgagccactgtgcccagccatggcagttttttagattaaatatacacttactatataacccatccattccaatcctagctgtttacccaagagaaatgaaaacatgtgatctcataaaatcttgtatgagaatgtttacagtagctgttttttgtaatcacccaaacttggaaacagcccaatgttttttaactggtgaatggataaaaaaaaaaactgtgctctattcataccatggaatactgttcactatttacaaaggaactactgatataaaccacaacatgggccgggtgcagtggctg

SEQ ID NO: 100081 - DNA, 774 bp, Homo sapiens
  misc_feature (1)...(774): n = a,t,c or g
ctataaaaacaagaacatgatatgatcagaaatgaggaaaggcattcttttgcaccattgtcacttgcaaagagaggtgaagaagtacaagaatcaagaaaagacactttggcaagctaaaagtcatccgtaaaagcatgttgaaatagcagcagtggcatccagcccccagctctcagggttgcaggaaggagcaggcggagtatgtgaatgtgtgtggaggagactggccaatgagtgcttctgtcacaaggattgggaaggacctgtggaaggaagggctgggggaacagtgagaggtttgggggaaggcaggcatggggagaaggatttgtggactgggaaagattgggttccaagctcaggtgaaggacttagctttggagaggagaggcaaggcccattctgttgataacgggaagacgggaaaggtagggtgtgtgtagagaattgaagttggcacagagaggtgaactttgccgtcctggttcatgcagacaaggaagttgcctggctctaaacacagtgcttcagtgacttgtggtggattctgccgggctctaaagtattatccannnnnnnnnnnnnnnnnnnnnnnnnnnnnnnnnnnnnnnnnnnnnnnnnnnnnnnnnnnnnnnnnnnnnnnnnnnnnnnnnnnnnnnnnnnnnnnnnnnnnnnnnnnnnnnnnnnnnnnnnnnnnnnnnnntgtgctgacagatgcctgtaggctcatctacccaggaagctgttggggacggattacttgagcccatg

SEQ ID NO: 100082 - DNA, 399 bp, Homo sapiens
tgaaacagggcggggcattttctcattggggaagctcaaggggttgggggatttccctttcctagccaagggaagctgtgacagactgtaccaggaaaatcgggacactcccgcccaaatactgcacttttccaatggtcttagcaaacagcacaccaagagattttatcctgcacctggctcagcgggtcccatccccacggaaccttgctcactgctaatgcagcagtccaagatcgaactgcgagatggcaagcctggctgggggaggggcatccaccattgctgaggctggagtaggtaaacaaagtggccaggaagcttgaactgagtggagcccatcccagctcaatgaggacccctgcctctgtagactccacctctgggggcagggcatag

SEQ ID NO: 100083 - DNA, 401 bp, Homo sapiens
cggacgcgtccgcccacgcgttcgtaagaggcaaaatgttaaaaataagcaaggattgggcacagtggctcatgcctgtaatcccggtactttcggaagccaaaattggaggatcctttaaggccaagagttcaagatcagcctgggcaacatagcgagatcccctgtctctacaaaataataaaaaaatagccactgaaaaaaaaaaaaaaaaaaaaaaaaaaaaaaaaagggggggggccttttaaaaaaccactttttagggcgccgggtctgcaaaccaaattttttttttaggggcccccatatttttttttatgggggggggtttaacaaaggggggaggggaaaaacctgggggaacccattttttttcctttgaaacaacccccctttttccg

SEQ ID NO: 100084 - DNA, 395 bp, Homo sapiens
tccacttgccacctccctccaagttttcattttatgaagaacctcctctggtccaattctctctgtgctcagcctgcttgtttcaacagaataagctactagtgtcaaccagaagcagtggctcacacctgtaatcccagcactttggaggatcacttcagcccaggagttcaaggctgcaatgggttatgatggcatcgctgcactccatcctgggtgacagagcaagaccccatctctaaaactataaaaaataaaaaaaaaaaaaccttaaaaaaaaaaaaaaaaaaaaaaaaaaaaaaaaaaaaaaaaaaaaaaaaaaaaaaaaaaaaggggggggcccctttaaaaaaaaaaaaaatattaccccggggggggggccccatttttttttt

SEQ ID NO: 100085 - DNA, 402 bp, Homo sapiens
  misc_feature (1)...(402): n = a,t,c or g
ttgcccaggctagagtacagtggcacgatcacagcctcaaactcctgggctccagcaatcctccctcctcagctaattaaaacaattttttttgttgttgttgaggcagggttctcactgtgttgcccaggctggtcttgaactcccggcctcaaatagtcctcccgcctccacctccaaaaagtgctgagattactggtgtaaaccaccatgtctggcctaaaaaaattatttcaaatgaaaaaactacgcactgctcttgtagtgccctgcttgctaaacagcagatttcatcataagcaaaatcattttgtaccctaaatattaggacttatttactgatgtaacaaatgggaccaaggagaagctggtcttccgtcttaagctcagaaaacagtatcn

SEQ ID NO: 100086 - DNA, 403 bp, Homo sapiens
aaacaaagctagccaccatcaatttatttctttgctaatcatttctatagcctgtgaatgtcatcctcccaagcagctggaacttgaggcattctccaccatgcccagccaggttttttgttttgttttgtttgttgttttttggtaaaaatggggtctagctatgttgctcaggctggtctcaaactcctggccttaagtgatcctcccacctcagcctcctgagtagctgggattacaggtgcaagccaccatgctcagctcttgaatttcattacgtaagggtgacactatgaatattcattttgcatccacatacccactttcctatccattcacccattattcattcatccatccatcattcaccaaacatctattcagcatatattttgggccatga

SEQ ID NO: 100087 - DNA, 393 bp, Homo sapiens
aaaaaatgaagaggtttcaagttattggtaataacaaggtatatgacatgatcatgaggccaggtgtggtggctcacacttgtaatcccagctctttgggaggccaagaaaggaggactacttggggccaggagtttcagaccagacttggcaacacagcaagaccccatctttacaaaatatcttttttaatgcataaaaaagataggaccatgaagtgccttaaatgggctagagagtaagatcattaaagaagacatttagaaattaagaggtcacagtattagagggaccatagtgatatatattgaaattatcaagaattaaaagagacttattgttagaagaatgacaatgagccaggagctaaaccagtcaagaggagagaaggtg

SEQ ID NO: 100088 - DNA, 450 bp, Homo sapiens
  misc_feature (1)...(450): n = a,t,c or g
atcggatgctttacgcctgccgnaccggaccnnnnnttccctcgacccacgcgtccgaagagttcaagtccagccaaggcaacacagcaaaacaccatttcttttaaaaaaaagaaaaaaagtaagcaaaagaaaggaaacacagtaataatcatcagggtgaaaaatcaaagaaaaagaaaacaaaaaaattagaaattaaaacaataaaactaagaacagtaaaagatcaataaaatcagtaaacctctagccaaactgattagaaaaaaagagtgaagacgtgaattgccaatatcaggaatgagagaagtagtatcactacataatctacagatattaaacggttaatatggaaatattactaacaactttatacctatactttgacaactttgattaacagaaaaaaaataaaagacacatactatcaatgctttttcaagaaaa

SEQ ID NO: 100089 - DNA, 707 bp, Homo sapiens
atggaatccctctacaggtcaagaaatagcgcagtgtcctggatgcccattatattgttttctcctttctgggtaacaggccctaacttctgtaatttaaaagctcctacttttgccacaaggtggtgcttctgccattagacgcagttaggaggatgcaactgcaaatctaaaattacgaagttagtgtagttgcaataaacttagaacatatgcattaatactaaacctatgcagtaataccataattagccttctaatcatgtaatttgctttacttaggtatttcatttggttcagcctgttatggaatttaccagcttgataaatttgcctataaagttttataaagaaaaggaatattttgttttcataaagaggaaaatccattcttagaaaaaaactgagtaaaaaagtatctcaatgggctgggtgcggtggctcatgcctttaatcccagcactttgggaggccgaggagggggttcacctgaggtcaggagtttgagacacacctggccggcatggtgaagcctcgtctctactaaaaatacaaaagattagctgggcatggtggtgtgtgcctgtggtcttagctgctcaggaggctgaggcaggagaatcgcttgaacccaggaggcagaggttgcagtgagccgagattgtgccattgcactgcaagcctgggcaacaagagtgggactcaat

SEQ ID NO: 100090 - DNA, 403 bp, Homo sapiens
ttatttcacctgggtgcaggcgggctcagtccaataaaggagttagcaaagggagacaggagtggggcagttttaaaggatttgggtaggtagcggaaaattgcagttaaagggggttgttctcttgcgggcaggggcgggggtcacaaggtgcagggtagggagatcaggagactcattgtcctggggaggaacataacaaggtcgattgattagttggggtggggcaagaacaaatcacaatgggggaatgtcatcttttgtggatcttcagctgcttcaggccatccagatgtatacgtgcaggtcacagtggcttatcttgggctcagaggcctgacagttcttagcacagtcgtataatgtcaataaagcattttttaaaactcaatacattcaaaat

SEQ ID NO: 100091 - DNA, 377 bp, Homo sapiens
ggataaattccaaatcgataaaagatttatatgcaaaaaatgaaatatgtattatgggaattcacaagagaattgttttataatcccaggtctttctgctatgacacaaaactcataagccattgaaagcaagattgggaaattcagcttcatttaaaaagtttttcatggaatcacttgaacccaggaggcagagtttgcagtgagcggggatagcaccaccgcactccagcctgggcaacagagagagactttgtcttaaaaaaaaaaaaaaaattttttttttgatggcaaaacccactatttccaaagtcaaaaggcaagcaacaaattgggggcagatacatcaaaaactaattttcctaatatggaaggag

SEQ ID NO: 100092 - DNA, 401 bp, Homo sapiens
  misc_feature (1)...(401): n = a,t,c or g
gctgtgtgcagcacttgagggccagctggagttccaggtgggcgtgggcttggcgggccccacactcagagcagccggccggccctgctgccccgggcaatgagggactcagcatccgggccagcggctgcggagggtgtactgggtaccccagcagtgctagcccaccggctctgtgctcgatttctcaccaggccttagctgccttcccgcagggcagggctcgctacctgcagcccgccatgcctgagcctcccaccccctccatgggctcctgtgcggcccgagcctccccgacgagtaccaccccctgctccatggcgcccagtcccatcaaccacccaagggctgaggagtgcgagcgcacggcacaggactggcaggcagctccacctgcagcn

SEQ ID NO: 100093 - DNA, 404 bp, Homo sapiens
tatttcctgaatttttgttctttattatttccttgtttctgcttgctttgtgtttaagttcctcctctttttctagtgggtcttttctttctttctttttttttttttttttggaaaccaggcctgggggggtggcctttcaggggggggggggggggggggaaaatagctcccggcaccctaaaactttggggctaagggggttttccggccctaaccctctggggtggggggaactacgggggccggccccctggccgggttaatttaaaaattgggggaaaaaaggggggctttgtttgtggcccaggctgcctagtttctaaaataaaaaccttaggaaatggagtgagggcttccttcttttctagggaaccggggaggggtaaacccttttggccaag

SEQ ID NO: 100094 - DNA, 568 bp, Homo sapiens
ttttttttttttgtgatagggtcttgctctgtcacccaggctggagtgcaatggtgcgggtgcgatctcggctcactgcaacctctgcttcctgggctcaagcgattctcatgcctgtctctcaagtagctgggactacagacacttgccaccactcctggctaatttttgtatatttttgaagagacagggtttcaccatgttgcccaggccggtctcaaacccctgagctcaagcgatgcgcctccctcagcctcccaaagtgctgggattacaggcctgagctaccacacctggccaacatgattttctaataggccaaaggtgagaagagtaaaagtcaaggatggctagccaaaatctttggcccaagagacacaaaaattgtttcattaactgaaaaaggcaacagtacacaagagactggtttgaggcatgaacatcaggagcacagttttgcacttttaagttgacatattggatattcaacagagttgtcaggcaggtaaactgaattggtatgacattcgaaagaaaagtataggctgttgattttaagtgtcaaaat

SEQ ID NO: 100095 - DNA, 387 bp, Homo sapiens
  misc_feature (1)...(387): n = a,t,c or g
ctcggctcactgcaacctccacctcccgggttcacgccattctcccgcctcggcctcccaaggtgctgggattgcagacatgagccaccgcactcgccaatcaattgtatttctaagaactaacaacaaaccatattgaattgaaaatatgatgattacaatatcatgtacaacagcatataaatatgaaatacttagacatagttttaacaaaatatgtgcaagatctttatatgaaaaactataaaacattgctgagaaattgtaaaatgaaataaagatatatcatatttttggattgggaaaaaaaaaaaaaaaaaaaaaaaaaaaaaacaaaattacggngnnnncgggggggggggaccggggctcccacccccctcccca

SEQ ID NO: 100096 - DNA, 412 bp, Homo sapiens
  misc_feature (1)...(412): n = a,t,c or g
cccacgcgtccgggaaaatcagagaacatttgatttgacccaaatttgaccccaaggcatataagaatcatactctgggcggtcaacaaagagagaatgctaacagcatcaagaaaaaagaagcaaataatataaaggagctccaatttgtctggcgacagacttctcaatgaagaagcctcatgggaaccatgatgcaaaaaaagcatgcaggaaaccatacaggccacggagggatggaacgatattttcaaagtgctgaaagaaaaaaaaaacctgccattcaaaaatactgtgtccagcaaaattgtccttcaaatatgaaggagaggtaaaggctttcccacataaaccaaagtggagagaatttaccgtcactaaacccatcttacaaaaatgctaaagggagttn

SEQ ID NO: 100097 - DNA, 404 bp, Homo sapiens
  misc_feature (1)...(404): n = a,t,c or g
cccacgcgtccgacgctgcccacccgcgagggctgaaaaccccgccgcggggaggaccgtccatccccttcccccggcccctctcaataaacgtggttaagagcanaaaaaaaaaaaaaaaaaaagggggggggccctttaaaaaaaaaaaattttaactcccgggggggggaaaaaaaaattttttttaaaggggcaaaaaaaaaaaattccgggggcggtttttaaaaaaggggggaagggaaaaacccgggggaaaccaaaataaaagggtttggaaaaaaacccctttttcccgggggggaaaaaaaaaaaaagacggggnnnnnnannaannnatntnatnnnttnatntntttatnnntttttaaaaaaaataaaaataantatttttttttaannat

SEQ ID NO: 100098 - DNA, 387 bp, Homo sapiens
  misc_feature (1)...(387): n = a,t,c or g
ctctgctaatcatgcacttctagggtttctatcagttggccacctttctatcccctcaaacctgaatcagtcattaaaaccacgcttgggccaggtgcagtggctcacgcttataatcccagcactttgggatgccaaagtgctgagtggatcacttgatcccaggagctcgagaccagcctgggcaatgtagtgagacttcatctctatttttataaagaagctaaaatatatatatttttaaaaaccaggctggggcttggtgcagtggctctgcactttgggaggccagggcaggaggatcgcttgagctcaaaagttccactgcactccagcctgggttacagagggaaaccttgtctctaaaaaaaagaaaaaaagaaagan

SEQ ID NO: 100099 - DNA, 419 bp, Homo sapiens
  misc_feature (1)...(419): n = a,t,c or g
tttcgtcaaaaatgttctcaagggttctcatgtctctctaacctctatttctaggcatgactctcagaaacagatatcaaaggataacaggatgtgagngatttctttttttttttttttttttttttttttaaaaaaatttttttttttcccccccggttggaggggggggggggaattttaattaccccaaaccccccccttttgggttaaaaaaattttttttccccccccccccaaagtggggggttttaaaaattccccccccccccctttttttttttttttttttaaggaaaaagggttttccccggtttgccccggtttttttaaaactaacccaaaaaaattcccccccccccccccccccggggggtgggtttggggggttggccccccccccctggttgggacccccn

SEQ ID NO: 100100 - DNA, 389 bp, Homo sapiens
tttcgttagaggagcaaagggagagaagaggccgcggtaagagtggtggtgcgagacccgcggaggtgccggccaaggacgggcgcatggagcagcgggcggcgcgaccggccgggtgctggccattcaggcccgaaagcggaggccgaaaagagagaaacatccgaaaaaggtctcttgttctgttgcccaggctggagtgcagtggcgtgacctcgtcctactgcaacctttgcctcccgggctcagagtctcactgtgtcacccaagctggagtgcggtggcgtggtctcagctcactgaaacttctgccttccagtttcaaagatggggtcttgccgtgttgcgcaggctggtcttgaactcctgggctctaacgctcctcctgg

SEQ ID NO: 100101 - DNA, 1280 bp, Homo sapiens
atgggagaaggtcaaaatagcaacactgacaggattttggaagtagttgattttggaagtagtagaaccctcatgggtgacttcgagaggttcaagacttcagtggagaaagtaattgctgatgtggtggaaatagcaagagaactagaattagaagtggagccggaaaatgtgactgaattgctgcagtctcattataaaactccagggacgctggccttctcgcggctttcccccgatgtctctctttattcccagctgcctgaaactcggtcccacgaatggcaggcagcgtccaaaattcaaccccgtaaagccagcaccagccaataaagcgcacggatggaggccacgtgacagcagtgggccggccctccggctgagccctgatctctatggtttccgcggctcgctagaaggagtgtggtccactggaggactccctacattcttcctccattatctcactgcctccgggggctgctgggataccggaggactcgggtcccggctcgactcagtcctccagccgcccggggaatacctctagttcttcccggccgccgccgcctccgccccgccgcttcctcctccgcctgccggcctccttcgccccgccccgtcctcgcagcgcgtccggcccgcccgcaggccagcttctctcgggagcctccacccaggcgcatggctccatgaagcaagaggaggaggcagagcgcgagagatcccgtccgccccagccgcgtctgggccaggagaaaagcaaaaccatattcctgctgctgtcagttttgatgcactgagaaaacttcagagacctaagctttttccagagaagagaagctttactggtgttccagccctaaggctcatataacattaacagacaagacacttttcagaaagacaggcaacgtgttggaccttccggagcttctcagaagacagagggttttcttttgaggctgttgtacagtggcctgattatagctcactgtagcctcgaaattttgggccaaaatgatcctcctgcctcagcctccgaaagtagctgagactacaggtattgtttgggttttaatacagacaaatcaactcaatcaaagaaaccaactcaaagaaagatgggtctacatacaacaaaactgaacaaaatctgcaagaagagtgattcatacatgggctattgaggcaacatgagatggacattaatcgactaagtaaaaaacagatttcttgaagaattaataaagaacttttgttttggaagttctctattg

SEQ ID NO: 100102 - DNA, 659 bp, Homo sapiens
ttttttttttttccgagatggagtctctctctgtcacccaggtgggagtgtggtggcacaatctcgggtcactgcaacctccacctcctgagttcaagcaattctcctgcctcagcctcccaagtagctgggactacaggcatgcaccaccacacttggccaatgtttctgtatttttaatagggacggggttttgccatgttagctaggctgggtctcaaactcacacctggggtttacaggcatgagccactgcacccagccccttcttgccctttcttttctccatggctgatgctgctgtggccagccagggcccttgagatccttccagtttggctgttatgcaaagcaggtgatttgtcttaatcagataaaagatagaggctatgggggcctcaagatttttggagagcagaggtggtctctggcaattccatctggttttgagaaacttagcagctcacagagcacagagatcctgccttcttcctactatcaggctgacctaatggggttgggctgctcggcaactgcttgggtcaccttgccccaaggaaaccagccctgggtgccacccagccacttagggtctacagggtgggactccagacctaaagcgtaagtatggatgttgtggccctgtgtcttcctagtgg

SEQ ID NO: 100103 - DNA, 526 bp, Homo sapiens
tttcgtctgggaagaaaaccgaggtgaggcggtgtcatgtgacctgtctggtcccgtggagagccgggcagcgtgggggcggaggctggccctcctgatctgcacccaggcggcttctacaccaccctgcagcaggcctggccaccggcctcagcgcttctgggagaaggtcagccaggtggaagatggagagggcttctggactgagccctggaggggggctaggggccaccagcaggcagatgagccctgggacccagctggccaacccacctgaccacggtgacaaggactgcttgggaaggataagcccaggttcgggaaagcaaattcaggctgcaggacagctgcccgggccccccacaagcctggcaccagcccagggaagactgaggagcctcactccatggggactgcaaacacctgaacacagcgaacctgaaggtatagggcatcttcaggctgctactgaggcggtcctgccgcactcaacccagaacctcatcactaaaaggaacctcatggt

SEQ ID NO: 100104 - DNA, 745 bp, Homo sapiens
ccatatctgagtgtttactcctgagtttttgagattgctattaagatcgtgctctactgtgatgatttgggtttgtttgataatcagaaaaaagcatattcttttgggtgttcagccacactgctttggtgtcacaactgcacattggtttcacagctgcaggacaaattcgagcatcttaaaatgattcaacaggaggagataaggaagctcgaggaagagaaaaaacaactggaaggagaaatcatagatttttataaaatgaaagctgcctctgaagcactgcagactcagctgagcactgatacaaagaaagacaaacatcgtaagaagcaatagtttctcttactattctgagagccttatcattctacatcccatcttcctgtgagattgtctttgtagcatttaactctaattgcagttctctttttaaaaattggcttgcttattgtatattttccccaactaaagcgtgaactcctagcggggtgtggtggctcatgcctgtaatcccagcactttgggaggctgaggcgggtggaccacctgaggtcaggagttcaaaaccagcctgaccaaaatgatgaaaccctgcctctactaaaaatacaaaaattagctgggtttggtggccggtacctgtaatcccagccacttgggaggctgaggcaggagaatcacttgaaccccggaggtggaggttgcagtgagccaagatctcaccattgtactccagcctggg

SEQ ID NO: 100105 - DNA, 443 bp, Homo sapiens
tttcgtgggaagtccgggagaggacccttcggctccccgtcaggccttgcggggatgaccccgggcaggggcgtgcgcagcaccgcagcctctggggtccccttatacttggccttcagggtcttggcattcctgcggtccagcttcacgccgaactgcttctcgacggcctccagggccgtagcgtccagcatctggcggaagccctcgtgccgcctcggcctcccagagtgctgggattataggattacaggcatgagccaccacaccaggtccaaaaccttttttttttttttttttttggggggggtttcttttggccccccggggggaaggcaggggggcaattttggtttatttgaacccccccctcccggggttaagaaatttttcctggcttacccccccaggggggggggaaaaacgggccccccccccccggc

SEQ ID NO: 100106 - DNA, 576 bp, Homo sapiens
aagccactcagaaggatttatttgggagaatattttgaactgtccatttggctatgagcgaatcatcctgcttgcttttataagcatttatcctgaaaagaaatttaaagcagacatcccataaatggagtctgggacagaaacctacacattggggcttggtggcatgcatgtttagtcccagctacacagcagggaggctgaggctgaaggaatacttgagcccaggaattcaagactagcctgcacaacataagcctcctctgtcacctgggctggagtgcgatggtgtcatcttgggtcgctgcagcttctgcctcttgggttcaagtgattctcatgcctcagcttcccaagtggctgggattacggcatgcgccaccaggcccagcaaagttttgtatttatagtggagatggggtttcactgtgttagccaggttgttctcaaactcctcacctcaggtgatcacctgcctctgcctcccaaagtgctgggattaaaggaatgagccactgggtcgggcaaacacagagataaattgaaagcatatttaaatgtttcctgttaaaaaaa

SEQ ID NO: 100107 - DNA, 392 bp, Homo sapiens
tttcgtagggaggggtgcctgccagctgatgatggcatagggaggggcatggagagcctgggggctgacaggggaggccacgcttagctggaggggtcatcccaggctggactggagcaggggatagtgcttgcgtagacacataagcacatttagttgctcttataaatctgcacacgggctgggcttggggctcatgcctgtaatcccagggcttcgggaggccacagtgggatgatctcttgagctcaggagttcgagaccagcctgcggaacatagcacgagtccacttctaaaaataaaaatcagccgggcgcggaggctcacgcctgtaatcccagcactttgtgaggctaaagctggcatatcatgaaggcaggagatctagacc

SEQ ID NO: 100108 - DNA, 436 bp, Homo sapiens
gaaaaatggtattctaaaacattctgttgcattattatttgtacccctaggcaggtgtgattcatgtgggacagagtggcaaggaaaggctctattgaaggggcgagccttgagctgcccctgggtggaagtgtgggtggccatgggagctgcatttccatggtggtgggagctctgggccactcctcaatcccatgtctgacacacacacacacacacacacacacacacacacacacaaacaaacacacacacaccctcttctgatagtaagaagagcagtattttggacaaagaggaggctgaaggctgcatgacgccttgagacatcaactcaggtatgtgtggaggtggcggaaagtattattacctggaacaatcttcactctttaggcctaaatcaacctccacctccaccggcacgtttgtgcacagt

SEQ ID NO: 100109 - DNA, 399 bp, Homo sapiens
ctcaatctcctgagctcaagtgacccacccacctctgcctcccaaagtgctgggattacaggtgtgagccaccatacccggcctccagagtttggctattatgaatatgtggttatgaataatgttgctgtgaacattcacatacaagtctatgttttcattctcttgggtaagtacctaggagtggaatttctgggctatgtaatgggtgtatgtttaactttaagaacactgccaaacacttttccaaaggggccataccgtttcacatttctactggcagtgtttgagagtgtagtttttctacatcttcactaactccttgcgatgacagtttaaaaaaaaaacccattctaatgggtatattgggtatttcattgtagctttgatttgtatttt

SEQ ID NO: 100110 - DNA, 407 bp, Homo sapiens
  misc_feature (1)...(407): n = a,t,c or g
cggacgcgtgggtttgaagggctcaggttcttcctgggcttttttgggacagtcttgctctgttgcccaggctggagtgcagtagaggcaatcatggcttattgcagcctcagcctcctgcctctgggctcaagtgatccttctgcctcagcctcctgcgtggttgggactataggtgcatacccccatgcctggctaatttttaatagagatggggtcttgggctcaagttatcctcccacctcagtctcccaaagcgctaggattacagacatgagccactgtacctggctgagaaggttttttttttttcccccttccaaacccccatgtggtccaaacaaggccaaaggatctcaggggaattccctttccgaggagcctccactgttattgcatggcccccn

SEQ ID NO: 100111 - DNA, 474 bp, Homo sapiens
  misc_feature (1)...(474): n = a,t,c or g
cctcgattttcagttacgctctgcacgngccggaccggaactgactttccgggccgacccacccgctggctaagactacttgagctctggagtttcttacctgatccaccatgaccggctccatcgtggccgaaaaggaacagatgcggtctgcacctctcagccagactgatgctgaacatggatgatttgttcatttccaactgaggtactgggttcatctcactgcggcttgccagacagtggccgccgcccatggagcaggacgggtcatcacctcacccagtaagtgcaaggggtcggggaattccctttcctatcaaagggaagccatgactgatggcacctggaaaattgggacactcccaccctaatactgcgcttttccaatggtcttagcaaatagcacaccaagagattattatcctgcgcctggcttggagggtcccacgcccacggaaccttactcactgg

SEQ ID NO: 100112 - DNA, 327 bp, Homo sapiens
cagcctcttcagtagctaggactaaggcacatcccaccacacccaggcaattttagaattttttgtagatggctcttactatgttgttcaggctggtctcttactcctggcctcaagtgatcctcctgcctcagcctcccagtgttgggactacaagcaccagccactgcccccaaccctgcattatgttcttaaaggcagacctgaatcctgtgcggtgtcaattcaggtgtgcactggcccctgagccttacatacaggacccgttccttagggatgacgttgcgttcccttgcttaggagcctcagcaccatggcacctggctg

SEQ ID NO: 100113 - DNA, 418 bp, Homo sapiens
atcatcctgaaaccatcccctgccaccagtctgtggaaagattgtcttccatgaaaccagtccctggtgtcaagaaggttgaagaccgctgctttacaagatctgcatggtgaaaccccatctctagggaaaatacaaaaattagccaggcgtggtggtgtgcatctgtaatctcagctactcaggagagtaggagaggcatatattgctacttataggaggctggagaatagtttgaacctgggaggcggagcttgcagtgagcctgcagtgagccatcatgccactgcactctagcctgggccacagagtgagactttgacaaaaaaaaaaaaaggggggggccgtttaaaaggatcaaattttacgcccgcgggcatggaaggaaatattttttttatggggccccaaaaataaa

SEQ ID NO: 100114 - DNA, 428 bp, Homo sapiens
  misc_feature (1)...(428): n = a,t,c or g
caagcatttcttttctcctaaacacacatatttgtatgtgtgtttaaaatacctttgctctanaaagacagaaagtanaatagtggttactatggggggcttacgggacaggggaatgaggagttactgcttgatagataccgaatttcagtctggaaacatgaaaatattattcaaacacaaaatggatggtggtgatggttacccaacaatgggaatgtgcttgatgccaatgaactgtacacttaaaaatagttaagctggggctgggtgcggtggctcacacctgtaatcccagcactttgggaggctgaggcgggcggatcacctgaggtggggagatcaagaccagcttgaccaaagtgtttctgctagaaatgcaaaaaatatccaggcggggtggcacatgcctgtagtcctagctattt

SEQ ID NO: 100115 - DNA, 418 bp, Homo sapiens
  misc_feature (1)...(418): n = a,t,c or g
agacaatctctcttcccacacccagccccaggcaagaactaatctgctttttgtcttatagacttgccttttcaagacttctcatgtgaaaggaaccatacaatatgtgatcttttgcatctggcttctatcacttaggatgatgttttcgaagatcatccttaatgcactaggatcatggatgcatggatcagtagttctttcctttttattactgaatgggattctactgtatagatattccacattttatccattccctagtagatggatttttggatcgtttctactttctggctattatgaataataccactgtgaatattcgagtgcaaatctttgtgtgggcacattttttttttcctcttggatacatacctaggaatggaattgccaagtcatatggtaaatataggcn

SEQ ID NO: 100116 - DNA, 389 bp, Homo sapiens
aaagtaatctattagttgatcataattgtgacagttctcttgctattggacatccgtattatttttagttttctattgttagttaactattgttaagtactggttaggtgccttttaaggtaagacaaatgcttagaaagattaagtagccctggtagagtggctcatgcctgtaatcccagcactttggcaggccaagacgagaggatcccttgaagcctggagtttgagaccagcctggtcaacaaattgagaccctgtctcaattttaaaaatttaaaaattagtctggcttgagaccaggagttggagattacagtgagctatgatctctgcattccagcctgggtgactgagtgagaaccaatctctaaaaaaaaaaaaaaaag

SEQ ID NO: 100117 - DNA, 542 bp, Homo sapiens
  misc_feature (1)...(542): n = a,t,c or g
cgttgtatcaaacggtccacacaacacctcatacgctaccagatatatacatctacttctcttctcaccnccnncaggggaattttgagcttgtacacgtccgccngcccgaacggnccggaatggccgggccgacccacgcgttcgaagaggcaggaataagcgtgttgggtcattgtctagctgtggggatggcaacaggggcggagtgagaggagtcttggaatcctgcacattccccactgaccccttggtgattctgaactgccttcctgtagacacttctcagctgcgcacagttggtggaacccagcgaaaataagccatattccagggagaacaaaaaagggggagcatatggtagttctattgctagttttttgagaaacctccagaccgttctccataggggtagcactaatttacattctcaccgacactgtataaggtcccttctctctgcctcctcatcagcattaggtatttttttgcctttttgataatagccattccaactggcgtgagaagatatctcattgtgg

SEQ ID NO: 100118 - DNA, 393 bp, Homo sapiens
  misc_feature (1)...(393): n = a,t,c or g
atagggctgggagagtctcagatggtgatgcatccctgagtcttggccaaacgcagaaagagatcaaggccacggttgtctgcagggaagttctgcattgcaaagggacggccaggcatctaccaagctcagtcatagttgggggctgtccagggagagtaggttttggctggaatgctacagcaggtcctgcagtttctgcagctgcaggctgcctgctgactgcacttctctgacagattctaaacagtgagctgccaagggcttctgggataccttcatggggagttagttacttacgtcaaaatgtantgcaagggctgggcatggtggctcacgcctggaatcccagcactctgggaggccgaggcgggcagatcacttgaggtcagg

SEQ ID NO: 100119 - DNA, 383 bp, Homo sapiens
gcatcaccagcaataaagcctttcttcctggcagtacttgttgtctcagtgattggctttctgtgtggtgagcaatcagacctaagctgaatccctggcattcaccaacacataaatgtgcagttctgtttctggactctctcttctgcttcattgatctgtttttctaactttatgccaaaattgcactagtttgattactgttcctttataataagctttgaaataatgtcatattaggcctccaactttgttcttctttttgaaaactgttttggctattttaggtccttgcatttccataaaagtattagaatcagcttatcaatttctccaaaaaaaaaaaaaaagggggggccgttttaaaggacccaacctccccg

SEQ ID NO: 100120 - DNA, 404 bp, Homo sapiens
  misc_feature (1)...(404): n = a,t,c or g
gcgcccacgcgtccgcgtctcaaaaaaacattatcaaaacttaaaaccacaaacctgcaactaccatatgacccagcattttcattcttgagtgtttatcccagagaaatgaaaacttaacgttcttgcaaaaatttgtgtatgaatgttcatggcatctttgttcatgatagtaacaacacagaagtgcccagatgtcctttaatgggtgaatggctaaacaaatggcggtgcattcataacataataccacacaggaatgaaaaacacagctgatgcacaaaacaacctggatgaattcccagagaattatgctgaatgaaaaaagccaatctctgacgtatagntacatactatattatactatttacataatattctttttttttctttttttttttagg

SEQ ID NO: 100121 - DNA, 1243 bp, Homo sapiens
ttttttttttcttcagagatagggtcttcctctatcacccaggctggagtgcagtggtgtgatcctagctcactgcagccttgtccccttggcttaagagacactcccacctcagcctcccaggcagctagggccacaggatgcatcaccacacctaggtaatttttttgtttgtttgtttgtttttatagagacagtgtcttgctatgttgcccaggcaggtcctgcgctcctggcctcaagtaatcttcctgccttggcctcccaaagcagtgctgggattacaggtatgaactacctcacctggccctaataagtcttaatattaaactttccttgtttaaactactatgcagtttctgctcccagactgaactgatgatatactccctttactagtagcatttctgcagtaggcccagtggcaacgtgcacaagtaaaagagcaagaattagcatttttccagttctgtccagagaggttaaacagtttaagccatgatagggacagaactgtttaacctctctggatttgctaagtgatatatcatagaatgtgccgataaaaatctaggtgaagaagtggttaatcctcaaaagtcccctagtgatgtcactatgaatagcacaggtaataaaaccacaaaaatgtgagcattctaaggaaaatgatgaagtactacattttctgtatagaaattctgtatttctacaatttctgtataagaattctgtctgcctaacccgagaaagggagaagccaccaggagcacttctcaccttattttctgttgatatctttgatatcctttctggtctcagctcctatccaccctgacctccaaacggcctcctccaattgtcccttcaacctggggttggtaatgacttcctgccattgcatcacctgtggaagtaactttaccgcattccccccgccgtaaataagagtggcttttttttccccctgctaagctctgactaaccagttacaatagaatgggtgcctatacacatgctaaagattcactgtgtctactcttgaaagccatcatgtacttctaggattcaaagtttaaacctgaggaaaactaaaataatatacctttgtttggcctaaaagagccagttaaacccctgaaatattttgatttatagaggacttgcttgaaaatggatccagcgccttaatatctattttttttaaggctgaacttttggctgaatcattttccctaaattg

SEQ ID NO: 100122 - DNA, 361 bp, Homo sapiens
tccgaggtacttggttcggaacccaactccaacgctaggcagctgtgtcacagtggacaagtagttgagtctctgggcctctgttttatatatatacatatacacacatacacacacggatatatatagaaagatatatgcattttttttgtgtgtgtatatatatatatctttatctaaaaacatatttattacaaggaacaggctcatgcaattatggacgctgagaagttccaagatctgccatctgcaagttggagaccaggaaagctggtggagtagttccagtctgagtctgaaggcctgagatccaggagcaccaagggtagaagttccattccaaaggcaggagaagactgat

SEQ ID NO: 100123 - DNA, 366 bp, Homo sapiens
gagcccttgagcctaggaattcgagatcatcctggcaacacagtgagaccccgttctctacaaaaaaaagaaacaaaaatcaataaataaaatgagaccaattaaacgtatttcataggaaacttaaaaggtatgacacatatacatttacagtagcactattggccaggcacgggggctcatgcctctaatcctgatgatttgggaggcagaggcaggaggattgcttgaggccaggagtttgagaccagccagtctaacatagggagacttatctacaaaaaaaattatttttaattagtctggagtgggggggtgtacctttagtcctagctactcccaaggctggacaagagtaccagttgg

SEQ ID NO: 100124 - DNA, 388 bp, Homo sapiens
agggttcaagcgaattgactccaattttgaaagttctgtgggtaaagtgccaacaaacaaatattttgtgaaaggaagagtctatcaatgcaccaaatttattgttgtcttattttaagaaactgccacagctgccccaatgttcagcagccaccaccctggatcagttagcagccatacacattgaagcaagaccctccaccaacaagattacagcctgctgaagattcagatggttattagcatttttttttttagcaagaaagtatttttaatttatggcatgtatatttttgggcatatgctagtgtacttaatagactatagtgtagtataaacatagcttttatacatactgagaaaccaaaaaatttgtgtgatttgcttt

SEQ ID NO: 100125 - DNA, 486 bp, Homo sapiens
  misc_feature (1)...(486): n = a,t,c or g
cgggctgtctcanaaanaanaggnnaganaactgaaaaccatncgannactgagaccctcgcangnacnacngnnncggaantnnngnntnnaccacgcgtccgattttgcttttgggtttttatacaaaataattgaaatcaacataaaagtgatagttgccctcccatgtttattgcaacattattcaacttaaatgtccatcaacagataaatggttaaagaaaatgtggtataaacatacaacggactattattcagccttaaaaaaaggaaaccatgccatatgtaacaacagatgaaccttgaaggcattatgttaagtgaagtaagccagtcacatgaaggacaactactacattccacttatgtgaggtatctaaaatagactaactctaaatcagtgagtagaatggtgattgccagagaatggggggagggaaaatagggagttgctattccacaggtatgaagttttaattatgc

SEQ ID NO: 100126 - DNA, 473 bp, Homo sapiens
  misc_feature (1)...(473): n = a,t,c or g
cgccgcgggcganncngaattganncccattgagnacactagtccgngcggnggaattcctcgcctctgtagtcccagcactttggaaggccaaggtgggcagatctcttgagccctggagtttgagaccagcctgggcaaaatggtgaaaccccttcgagaaaaattagctgggaatggtggtgggcacctgtagtcccagctgcttgggaggctgagacaggcttgagcctgggaggtggaggctacagtgagccatgacccactgcactccagctcaggtgacagagcgagaccctgtcttaaaaaaaaataattaaaaaaaaaaaaaagaaggagtctggggtcctgatgtctttgcaaagcaagactgccacgacagcacaaactttatgtgagaggggaataagntcctatctcctttatgttattattggggatctcttatatgagcctgctagtaaacaggaaga

SEQ ID NO: 100127 - DNA, 437 bp, Homo sapiens
gtcctcctgtgcaagttcccttatctgtgcctgcaggctgtttttttgtttgaaaatattcaaccgaggacctaccctaactgcctgcctgcttttttttctttctcctctctcataaccagttatctactttctgtctctatagctttgcctactttggatatttcttgtaaatgaaagcatataatgtgtggcctattgtgactgccctctttcacttaacataattatttctccgtgttctaattgtgcttcattcctttttattgccaaataatattccattgttttggatatgccacattttgtttatccattcatcagttgatgaacatttagtttgtttccactttctggctagtgtgaataaagttgctattaacattcatatacaagttttagtgtggacctaggttttcatttcttttgggtatatt

SEQ ID NO: 100128 - DNA, 464 bp, Homo sapiens
  misc_feature (1)...(464): n = a,t,c or g
tgggtgannanaaanaaattcgtagaccctagagcagcgtcgnggaattctagcaaccacgctgctgaagtgttgtttaattaggtaagaaggctggcacaaaacttcaagtgggctgaaactannngnnccgatatattaaggatagcatccatagcagtgatgaatctaagtgataaaagggattaataatgcataaacaccaacttttaatacacattaaacaattatttgtcatcattctatgtctattaaaaaaacattagaggctaggcacggtggcttatgcctgtgatctcagcactttgggagaacgaggtgggcagatcgcttgagcccaagagtttgagatccgcctgggcagcacagtgacaacactgcctctacaaaaaaaaaaaaaaaaaaaaaaaaagggggggggggggggggaggggccctataaccccctttttttgggaagctgg

SEQ ID NO: 100129 - DNA, 419 bp, Homo sapiens
  misc_feature (1)...(419): n = a,t,c or g
gaaagagtagagttaatttaaagagaagagggttgggtatggtggctcacacctgtaatcccaacactctgggaggctgagatgggaggatcacgtgaggccaggagtttgagaccagcctgggcaacatagtgagatcccatctctaccannnaaaaaaaggaaaaaaaaaagggaaggaagccccctccttggaggggggaaaaattttttgcccccaggatttgggggtggcaaggaaaaataaaaccccccttcccttccgcccggggaaacaaagggggcccttatttaaaaaaaaaaaaagggggggcccttttaagggaaaaagttttatctcccgcgggtgggcacctatattttttttttaggggcccccaaaaaaaaattcgggggcccggtttaaaaaaagggagagg

SEQ ID NO: 100130 - DNA, 415 bp, Homo sapiens
agcattataaaaacagcaagagaaaagtgtttagtcacatattagggaacctctatcagactaactggggatttttaaaaatacatatagcaaaaatattacaggtcaggagacaatagaatgatatattcaaagtgattaaaaaaaaaactgtcaacccagaatacaatacccagcaaagttgtccttcataaatgaaagaaaaataaaatctttcccaaacaagcagaaactgagggaattcatcactgctagaccagacctacaagaaatgatcaagggcattctatacctggaaacaaaagaatgatatctaccatcatgaaaacacatgaaagtataaaactcactggtaaaagcaaccccccaataaggaagaaaaagaaccccaattgtatctcttccgaaaaacacc

SEQ ID NO: 100131 - DNA, 407 bp, Homo sapiens
acgataaaaagcaacctttttggtgtacacttctgtgaaattgactaattcatatagttgcgtaatcatcacttccacaagcaggatatagcacagatccatcaccccaaaaagtttctctgtatgccttctggtccttcccccatgtcgagcacctggcaaacactgaactgttttctgttcttataattatgccttttccggaatgttatgtcagtgaaatcgtatagtacgtggccttctgaatctagcttttttcacttagcctaatgcatttgagattcatctatgttgttgtatgtagctgtagcttgttcctttttattgctgaatagtattctgttatacatatatactacagtttatccactcattagttgaaggacatgtgggttgtttacaatttt

SEQ ID NO: 100132 - DNA, 404 bp, Homo sapiens
acttgagcccaggagatcaaggttacagtgagctatgattgtaccactgcaggccagcctgggcaacagatcaagaaagaccctttctctaaaaaaaagaaaaaaaaaaaaaggggaaaaagaaaccctacctgggggttccacctaaaaagaaaaggttcggaaaaaacaaaataacctattggtttaaaaaacccacataaaacccgggcgcaggggctcaccccggaaaccccaacatttgggggggcgggggccggcaaatcacgaggtcaggaaataaaaaccatcctggttaacacgggaaaaccccatttttacaaaaaaaaaaaaaaaggggggcccttttaaagggaacaaatttaacggcccggggaaggcaaagtaaaactttttaaaaaggg

SEQ ID NO: 100133 - DNA, 403 bp, Homo sapiens
  misc_feature (1)...(403): n = a,t,c or g
aataaagcagggattaaatacatatataactgcccaatatatggagaatttgaaatggagagtgagataaccacaaaaaagttttgtgaaaaaaaatgaggtttgaggtatgagatacaaagaataatttgttgagagttatatgttaagtgcatcactgaggtacagactaggcagtatcaagtgaatataatctgagctatattttggcctgttttttccttaaagtaacagggtcttgctctgtcacccaggctggagtgcagtggcattcacaggtgcaatcatggcacaccacagcctcgactctctgggttccagtgatcctcctgtcccaccctcgccagtagctggggctataggcttgcactactgngcccagcttaatttgggctttatgaaa

SEQ ID NO: 100134 - DNA, 410 bp, Homo sapiens
  misc_feature (1)...(410): n = a,t,c or g
aggaaggtcacaagcctcccaagtacctcaagatgcctgagcatcctcccccatttctcagatgggccaaggcctgtgaagcccttgcagtagtagctcaggtgtagcatctgctcagcttccctccccactcatttgcacacagccagagctgcgggacttctgccctcttgcctccagcactgctgtgaatcagaactagtcaagagaactgggtgcttgtgttaaatgggaacactctggaataaaatatgggcttttttaaagagatggggtctcactatgttgcccaggctggtcttgaactcctggcctcaagcaatcctcccaggtcagcctcccaaattgctgggattacaggcgtgagccagcacacccagcccctgctagctntntaatatgaacttcca

SEQ ID NO: 100135 - DNA, 419 bp, Homo sapiens
atttcaactttcaagtcttatttaagaaatatattttccaaggctatagctgccgtagacagtaattcaactgaaggatctgggcagggttaattaaaaaccttctggaaaggatataccattatagatgccattaagaacatttatgatttatgggaggagggcaaaacatcaacattaccaggagtttggaaagttggatgactttgagggggttccagacttcagtagaggaagtaactgcacatgtggtacaaatagcaaaagaactagaattagaaatggatcccgaagatgtgactaaatggctacagtcacatgatacaaattgaacaaatgaagaattgcttcttagggatgaccaaagaaagtgatgacttgagatggaatctacttctattcaagattgttgaagtgat

SEQ ID NO: 100136 - DNA, 417 bp, Homo sapiens
acgcgtccgaaaatcaacaaaaccaaaaatttgttatttgagaggatcaacaaaattaagaaaccttaagtcaaactaaccaaaaataaaaataaaaataaaacacctcatattactaaaatcaggaatgaaagtgaggcttttaccatagagaaattgaaaagtatcttaagggaataacatgaacaattgtgtgtacaatttattgtatgctaataggaaacctagacaaatggacaagttcctagaaagatacaaacaattgaaattgactcaagaagaaacagaaaccttaacagacttatataacaagtaaagagattaaattcgtcatttaaaacttttccacaaaataaagctaaggcccaaatggcttcaatagtgaatttggccgggtgctgtggttcacgcctgtac

SEQ ID NO: 100137 - DNA, 409 bp, Homo sapiens
gagaatcgcttgaacccgggaggcggaggtggcactgagccgaaatcatgtcactgcactccagcccgggcaacagggtgagaccctgtctcaaaaaaaagaatagcccagaagctcttactactaaaaatttaatctttacattgccaaaattaaaaatgaatacacatatgaaaaattaagtttcatgtaggactaaatttgggtatgtgcagaaaaactgtaaagaaaactagggaaatggttgcttcataaaatatctttaaagaaataaaattctagactcacacttgtaaccccagagttttgggaagctgaggtgggaaaatcacttaaggccacatgtttcagactaacctgggcaacatagtgagagaccttgtttatacaaaaaaataaaaaatgagcg

SEQ ID NO: 100138 - DNA, 407 bp, Homo sapiens
attgataggggtttcactatgttgcctcagctggtctctaactccttggctcaagcgatcctcccatctcagcctcccaaagtgctgggattgcaggtgtgagccaccgtgcccagcctgtttccatttcttaagtgagtgcaatacctgtattaaaaaccaattgcatgtgacactattctttcccaacacttgaggcttgacaagtgaggggtaagcaatttttcttttggtaggctgcctaaatagataagtaagtatctgccttgccaaatactcgacccagcagatgcattgcaaggtctagattccgggaagaaggcagcaagcttgattgtgattgcaggtccaggttacaatgtgttctgtattctggctctactgacaataaagctgttaatgttacc

SEQ ID NO: 100139 - DNA, 602 bp, Homo sapiens
  misc_feature (1)...(602): n = a,t,c or g
gaagtagaatattttagaaagtaattaaaccttttttcagcataataacccagagatgtacttctgaaggacttaggatctcttcttgaaaggcaagcaacaagggagatagtacctgtaagtcagtaggaaattaaatatttcaaacatcagctatttcaaatttaaagctacagacttttaaataattcggaaccttgagaggaacgtggtcatgcaacctgagtccggtggcatgcaggcgcaacttctacaagttttcctggccaggcatgcaggctcaggcctgtaatcccagcactctgggaggctgaggcgggcggatcgcctgacgtcgggaattagaaaccagcctggccaacatggggaaaccccgtctctactgaaaatgcaaagccattggccgggcatggtggcgcacgctggtattttcagctatttgggaggctgaggcaggagaactgcttgaaccccgggacntggaaggtccntacttgagcccgagatttacatcacttggnatttccaagccctgggggacaaaagcaaggangcctttccccaaaacaaaaccaaaccaaacaaaatgtggctatacnaat

SEQ ID NO: 100140 - DNA, 485 bp, Homo sapiens
  misc_feature (1)...(485): n = a,t,c or g
aggcccnagaagnnantttganncccttttgtagaccatagtccatgcggtggaattcgatgaatgttactattatgcctgctaacacgacatctattccgcagcccacggatcaagaagtaatttcagttttcaactcttttattattactatcgttattgtaaagctacagctgccatagatagtaatttgtctggtggatctcggcaaagtaaattgaaaaccttctggaaggggttaaccattatatatgccattaagaacatttgtgactcatgggaagaggtcaaaatatcaacatgaacaatttaaaaaaaagtgattccaaccttcatgggtgactttggaggggtcaagaattcaataaaaggaaatcactgcagatgtggcagaaatagcaagataactataattagaagtggagcctagggtcggttggctcacacctgtaatcccagcacttcggaaggccgaggtgggcggn

SEQ ID NO: 100141 - DNA, 407 bp, Homo sapiens
gttgtaataggtttgtttgcactgttttctatttaatgaatgtcatatttcttgccttttttgataaactttattctaattttttgcctttacaaataataattctatgaataaccttgtgtgtgtatcctgatatacatatgcaagagtagaaacggggttttaccatgttgatcaggctggtctcgaactactgacctcaggtgatccacccatttcagcctcccaaagtgttgggattataggcatgagccactgtgccccgcagcattcctttttcttagcagccttgccagtatgttaagtattattattattatttttgtccttttagtaatagccattcttactggtgtgaaattgcatctcattgtgggtttgatttgcatttctctgatgattagtga

SEQ ID NO: 100142 - DNA, 478 bp, Homo sapiens
  misc_feature (1)...(478): n = a,t,c or g
gagagtnngnnnntttcgaatccctttttcgagnatcactagtccatgtggtggaattcattttactttccctattttgtttactatcaagcctgagctcattaaatatatccagtggcctggatcaggatcatgtgaaaaacaggaccttggcttgcttacaacgtttgcatttgttttggttggtacagattcatttggataaattcccagcttattctcaaagaagattctagcgcagtaccgggctcccagtggcttttcattcatagtaatgagcattagccgagcgtggtgacgtgcgcctgtagtcctagctactcaggaggctgaagcaggaggattgcttgagcccaggaggtcaaggctgcagtgagctgagcggtgtctgtgcaccattgctgcattctagaattcccagcccagaactatgctgttgtcatgcctaggaaagcatccatgagaaaatccttttctg

SEQ ID NO: 100143 - DNA, 382 bp, Homo sapiens
  misc_feature (1)...(382): n = a,t,c or g
ttattgcaacctctgtcttccaggcccaagcgatcttcccacctcagcttcctaagtagctgggaccacatgcatgtgccactacacctggctaatttttttttgtatatttggtagagacggggttttaccatgttgcccaggctgctaagctttttatatacagtatatagaaagagttggttttcttaaacaatatttatttctcataataactctatgaaagcaggtatagacttcttgctttctagggttggtatcttgcttgttgaggacctacccttttgtgttgccgaatttttcattggttgagttctgtcttttgtttcagaaagccatggagntttgaaattattggtatatcattatttgctacataatt

SEQ ID NO: 100144 - DNA, 408 bp, Homo sapiens
cggacgcgtgggctgacaacatcaaatgcaggtgaggatatggagcaatatgaactctcattcattgctggtgggaatgcaaagtggtaagctacatggtggtttcttataatactaaatatgctcttaccatataatccagtaatcatggtccacaagaacctgcatacagatatttatgtcaactttattcataaacaccaaaacttggaaacaaccaagatgtcatttggtaggtgaatggataaactgtggtacatgcaggtaatagaatattattcagtgctaaaaagaaatgagctatcaagccatgaaaaacatagaggaaactgaaatgcacataactatgtgaaaaaagtcaatatgaaaaggctacatactgtgtggttccaactgtatgacattctg

SEQ ID NO: 100145 - DNA, 403 bp, Homo sapiens
cggacgcgtggactgacaacatccaatgccggtgaagatatggagcaatatgaactctcattcattgctggcggcaatgcatagtggtaagctacatggtggtttcttataatactaaacatgctcttaccatataatccaataatcatggaccacaagaacctgcctacagatatttatgtcaactttattcatagacaccaaaacttggcaaccaccaaaatgtcatttggtaggtgaatggataaactgtggtccatgcccgcaaaagaatatcattcatggctagcaagaactgagctttcgtgccgtgaaacacgtagaggagactgagctgcacatgactatgggagaagagtcaatatgaaaaggctacatactgtgtggttccaactgtatgaca

SEQ ID NO: 100146 - DNA, 395 bp, Homo sapiens
ccgacccacacctgtaatcccacagaacttttggaggccaaggcggggggatcgcttgagcccaggagtttgagaccagctctggcaacattgtaatacccagtctctacaaaaaataatttaaaaaaaaattagccagggatcccttgagcctgggaagttgaggctgctgtgagctgtgattgcaccactgccctccagcctgggagacagagcaagaacctgtctcaaaaaatatatatatgtgtgtgtgtatatatgtaaatatacacacatgtatgtatatatatgtgtgtgtatatatatatatattatgaaaggaaatgagtattgtaattttaggagttcacagcctggggagaaaggaaggactctggaaggcgttctgctttttc

SEQ ID NO: 100147 - DNA, 391 bp, Homo sapiens
cccacgcgtccgcggacgcgtggggttttgttaatgtgatgaatttgcttacctaaataattaattttccatggcttaggaaagtgcatacaagataaaacaggtaaataaggtaaacaaagaaagtgaaaatagaaataataacatgaatgtaagagaagttattttcaggtcatttgctagagatagaccttttgtttaggcctagctctccagcatatattaaaaggagataagggccgggtgtggcagtgcacccttacagtcctagctactgagaaggctgagttgagagaatcactgaagcctgggagtttgaggctgcagtgagctatgagcatgccactgaactccagcctgggcaacagaacaagaccctggctcttaaaaa

SEQ ID NO: 100148 - DNA, 402 bp, Homo sapiens
  misc_feature (1)...(402): n = a,t,c or g
aagggacagccgccctcctccgagcctcctgtttcagctgatgcaccttcaagtacaaggtcctgttcttgggctctgttaaagtttccctcaagaaaaaaaccttacatttgccaatgcacttgatgtaaagttgttgaggatgttgactctcctttaaacatttattgaagctaggaataaacttaactggacctgtgaaaaaaaaaaaaaaaaaaaaaaaaaaaaaaaaaaaaaaaaagggggggccccttttaaaaaaaaaaatttttaggcccgggggggggaaaaaattttttttttttttgggcccccaaaattaaattcggggggggggttttaaaaacgggggggggggaaaaacccgggggccccccaaaataaaaggctctgggggnnnnn

SEQ ID NO: 100149 - DNA, 394 bp, Homo sapiens
aatggatattcacatagtttgaaagccagaaagtaatatgaaccagcagttgtgctccttgatatttacccaaaagaactgaaaacttaggcccacagaaaaacctgcacacggatacttatagcatctccattcaaaactgtcaaaatgtggcaaccaccagacgtccttgagcagatgaagggataaataaactgcgtgcctccagacagtggaatagtgctcagcacgaaagagaagtgagctatcgaccatgaagagatgtggaggaaacttaagtgtgtagcactgagtgaaagaggccagtctgaacaggctgcgtgctatgtgattccaactctatgacattctggaaaaggcaaaactatggagacaggaaaaggatgagtggctg

SEQ ID NO: 100150 - DNA, 790 bp, Homo sapiens
  misc_feature (1)...(790): n = a,t,c or g
ctctttgggtccacactgcctttatgagctgtaacactcactgcgaaggtctgcagcttcactcctgaagccagcgagaccacaaacccaccgggaggaaggaacaactccagacgaacaactccagacgtgccgccttaagagctgtaacactcaccgcagaggtctgcagcttcgctcctgagccagcgagaccacacccccacgggaaacagcagtgaaaaaaaaaaaaaaaaaaaaaaaaaaaaaaaaaaagggggggggccctttaaaaaaaaaaaatttttccccccgggggggggaaaaattttttttttttttgggggccccaaaattaatttcggggggggggttttaaaaaggggggggggggaaaacccggggggtcccccaatttaatggcgtgggggaggnggnnnnncgnggttnggtcttttttttttttggcaccgggggggtttttttttttcccccggggttggaaacaaaagggggacaatcctgggttaaaggtggagccgtggcgcttctggggncaagggggattttttcgggccttaagacttttggggggggggtggaaatttgaaaggtgacaccccccaccacggcccagggtaaaatttgttgggtggggggaggggggttccgttttttggagaagaaggggggttttgtaccactttgttggcgcctaggggagtggtataaaaactgtggggggagtggggaagttgttcacgcgcccgcgtttggagaggtcgacaagaggggggtggaggaaataaag

SEQ ID NO: 100151 - DNA, 1020 bp, Homo sapiens
tttttttttaatttcatttttatttatttatttattttttgagatggagtctcgctctgtcgcccaggctgaatggagtgcagtggagcgatctcggctcactgcaagctccgcgtcccaggctcatgccattctcctgcctcagcctcccgagtagccgggaccacaggcgcccgccaccacgcctggctaattttttgtatttttagtagagatggggttttactatgttggccaggatggtctcgatctcctgacctcaggtgatccacccgcctcagcctcccaaaagtactgggattacaggcatctgccacggcactcggcttatccctagaaatcctatgatagcatgatgtataggcacctaaaggcatggcacttgagaaatgtgaataagattgtaagttacaaataggcaaggtacagtcaggatgttaacagtctcagcccctaaatgttcaccttgttatttacaggcatgtttattttaaggcacatacagggcacatacatgaaatagtgatacttcattctcagtaatatttttcatccttctcactggaaagatctttgatgatttttaatcaacataggagtttcaatgatatctagaagtttaaaagggctcgttcaaacaaattatgaccatacaccctgaagagtatgtgtctgtctcttgtggtgtaaatttttattttattacacccaattatgttcccacaaaacctttataattgggaaattaaggagccttccttggaaatggagcttgcagtcagctgagatggaccactgcactctagcctgggcaaaagagcaaggccctgcctcaaaaaaaacaaaacttttttcttcataaactacagtttatataggcaaaactttcagtactaagcaattttagtctctgcaggctcttgtcttgaattaatacaacttttgttaattctcttatgaagttaaatcttcctgcttgtatgcaacttatatgttgaaatttttttgtacaaaagaaaa

SEQ ID NO: 100152 - DNA, 419 bp, Homo sapiens
  misc_feature (1)...(419): n = a,t,c or g
ttttcttcattctcccacaagccctctttctatctctacgctatcttgcttctcattgactctttgtcctcactccctctaatagtggactccatggcagtgagtgtattcttgaaaagctatgtgtaagttgaatttttgcaagtagaagtccttacattgcaggaggagctcactgtcaatacaaactctgttaaacctgtttgacaaagtaaaaaaaaaactcttcaaaaagctgataattggctgggtgtggtggctcacgcctgtaatcccagcactttgggaggctgaggtgggccgatcatgaggtcaggagattgagaccatggtgaaaccccgtctctactaaaaatacaaaaaattagccaggcacggtggtgggcgcctgtagcccagctactcgggaggctgaggcn

SEQ ID NO: 100153 - DNA, 354 bp, Homo sapiens
  misc_feature (1)...(354): n = a,t,c or g
attcgtagttagagaaatgcaaattaaaactgtattgagatacttttcacttaaattggtaaaaattaaaaagtaagacagcacattcttttggaagggctgtgagaaacaggcaatcttatacataaggcaaactggggatatttagcaatatctaaagaaactgtatgtacattttctatttgtgccagtaattccacctctagagatttaccttaaaaataagaaaatacttagcacaaagtgactctttgcagtattcattgtaactgagaaatgttgaaaaaaaaaaagatgtggttgaacatcaaagaaaaattgaataccccttncccccacccataaaattatatg

SEQ ID NO: 100154 - DNA, 512 bp, Homo sapiens
  misc_feature (1)...(512): n = a,t,c or g
aaaagaaattgtggtttcagaccatgaaattcaaatcattataactaggctcacacacatttttattaatcaaaataggagccattacaagcaatacatttttgccaatagaaataagtttgtttattcctgtggcataaaaatccatgcttcagaatttgacgaactcttagaaagcattttctgcattctgctgggtgtgagaatgttttccctgcaaaacgttgtcaagatggttgaagaagtagttggttggtgagagatcaggtgaatatgacaaatgaggcaaaacttcgcagcccaactcattcaacttttgaagcattggttttgcagtgtacaagcacgtgttgttgtgaagaagaattgggcccttcctgttgatcaatgctggctgcaggcgttgagntctcggtgcgtctcatcgacttgctgggcacacttctcagatgtgatgattctgccagggattcagacagctgtatgggcaaaccggcacataccaacggacg

SEQ ID NO: 100155 - DNA, 370 bp, Homo sapiens
atggagacatctgcacctgccatgctcgttccagcactattcacagtaccgaagattggaatcaacctgtgtctatcagcaaatgaacagataaaatgtggtatatataccccgtggaatactatttggccattaaaaaaacaaaattctgttattctcagcaacatgtatgatcttagaagacattatgttaagtaagccaggcacagaaagataaatactccatgtactgtacttatgtggaaggtaaaaaagatctcatagaagtagagagtggctcatgcctctaatctcggtgctttaggagtctaaggtgggaggatcacttgaggcctggagtttgagaccagcctgagcaacatctctcaaa

SEQ ID NO: 100156 - DNA, 513 bp, Homo sapiens
  misc_feature (1)...(513): n = a,t,c or g
agtggagagatcatagctcactgcactcttgaccttttgggctaaagtggttctcccacctcagccccctgagtaactgggactacagggatgtgccagcatgcccagctaattttgaaaaagttttgtagaagtgaggtctcattatgttgcctcggctgtctcttaagttcctttccagaatggtgaatcctttcaagccgccttcctgcctcgtccttccaaagtgttgggattacccatatgaatcactgttcctgacctgaacatcaaagatcactgatcacagatccctgtaacagacataataatgacaaagtttgaaatagtgaagaattaccaaaatgtaacacagacacaaagtgagctcctgtttttggaaaattggcaccaataggcttgctttctccataccgggttgccacaaatcttcaacttgtgaaaaacataatacctgctgagtgcaataaagcaaaacacaatanaaggtaaaatgaggtgcttatagccagg

SEQ ID NO: 100157 - DNA, 391 bp, Homo sapiens
aatagacttgcccgatgcagtgttgtaaaaaaccttcgatttgtaaaaaaaaaaaaaaactgcaaaggccaataaaaggagggtggcctgtatttcaattagcctttcaatttgaaaaaaaacatctaggggcctaggaaatttgggttctttttttttttttttaaccccggatttttttttttttccccccgcttaaaggggggggccccaccctggtttaatggaagtttttccccccaaggtaaaagaatttttcttccctcccccccccagggggggggaataacggccccggccccccgggcggggttattttttattttttaaaaaaaaagggggtggcccggggggttccaaacccccgcccctagggggacccccccccccg

SEQ ID NO: 100158 - DNA, 412 bp, Homo sapiens
cacaaagcacattattagtggaattaaactggtgattttatttgttaatttttaaatatttttgtagagatgaggtctcactatgttgcctggctggtcttgaactcctggcctcaagagattctatggccttgccctcccaaagtgttgggattataggcatgccacactgcacctggtcaagctagtgattaataataataatataagtgaacgtaataaattcccatattccccaaaacaatgatatgtttttaaattaaacaactcagcattcaaagaagaaattaatggaaattagaaaatatgaattgaatggtaactaaagttaaaaagtgcagctaaggcaataggcttaaatgcaaatattaggaaaaacacttgaaattaatagtccaattaccaatattat

SEQ ID NO: 100159 - DNA, 384 bp, Homo sapiens
ttcctgcaacatgtgtgaaataagtttcagaccatgtctgaccagatcattggaaaaattgatgatatgaatactctcattgatcttgagaaaaacgtcaaagatctcccttataacacagactgaggtggaagaactggaaggtgaaaacaagatacctatcctgcctggctgattttttttttttttttttggaaaaggaaggggtttaattttttcccccgggcgggctttagggacccttttacctcaccctttaaaaggggggggcgggatttttttgttttttacacccccagccgggttggttggattggaaattttttattaggaaatacctggttttttttagtttttgggggaccataaaggaaaaaatttttt

SEQ ID NO: 100160 - DNA, 390 bp, Homo sapiens
ctgaatttgtgaggtctctaacgagaggtgtcaagagctggtgcgtgatggtaggactggcagtgaagaaagtaactaaataatatgttaccattttggtgaaacacaaaagttgaatttgaaccttgtctcagaaactagcatctaactagatacctaacctgcaggacaggtcccaggtctctctggatagttgtagcacctttccttatagaattctattaccaggccgagcctggtggctcacgcctgtaatcccagcactttgggaggctgaggtggggagttcgagaccagcctgactaacatggagaaaccgcgtctctactaaaagtacaaaattagccgggcatggtggcacatgcctgtaatcccagctacttgggaggc

SEQ ID NO: 100161 - DNA, 424 bp, Homo sapiens
cagaacctgcacacaaatgtctgtagccactttgttcctaattgccaaaaactggaagcaaccaagatgtccttcaataggtgaatggataaacaaattgtagtatatccttacaatggaatattatttagtgattaaaaagaaatgatttttcaagtcacaaaaagacacgggggaaccctaaatgcatattactaagtaaaagaagccagtctgaaaaagcctaaatgctgtgtgattccagctaattgacatatgcaaaggcaaaactctagagactgtaaaaagatcagtggttgccatgggtcgagtgtgggggtaagagaagaataggttaaacaccagggatttgtagggcaataaaactgggctgggcgcggtggctcacacctgtaatcccagcactttgggaggccaaagtggg

SEQ ID NO: 100162 - DNA, 411 bp, Homo sapiens
  misc_feature (1)...(411): n = a,t,c or g
ctattctgaacatgttaatttaatccttaaacagtagccttaatatgagatagatggtttttattattatcattttacatccaggctacactatgtagnggaagagctgggattcaaaaccaggcagaacccccttgcttttttttttttggaaaaaaagtttggttgaacccccgggtgggagaccgggggggggatttaatttaatggaacccctggcttccagggttagggaatttttctggcttaagtttcttgaggggtgggaatggaaggcgggcgaacccaggccgggttaattttggatttttgggaaaaaagggggttcccccttgtgggcaaggtgggtttggaattctggacttggggaccccctggcctggcccccccaaagggtgggaatggagggcg

SEQ ID NO: 100163 - DNA, 404 bp, Homo sapiens
tcgcggacgcgtgggactcaccaaagtttgctcaaccattcacccattgaaggacatacaagtcgttgacagtgggactatcatcaataaagctgctaaaaatattcatgtaaaggttgttgagtgaacctaagtttttctgtgtgataaatgcataggaaaacaattgctggaagaaatttctgaagtgtctaccacattgactgtactattttacattcctactagcaatgtcagagggatatagtttgtctgcatcgtacacagaatttaggggactgtctatttgtaaactttagccatttgaataggggcgctataacatctcatttgtgatttaatatgccttttcctgatgacaatgctatcgagcatcttacgcgttttcttttctcttttatttc

SEQ ID NO: 100164 - DNA, 369 bp, Homo sapiens
attccgttccaacatggctgaataggaacagctccgggctgcagctcccagcgtgattgacgcagaagacggcgatttctgcatttccaactgaggtgcctggttcatcctactgggactggttggacagtgagtgcagcccatggagggtgagccgaagcaggggggggcatcgcctcactcaggaagtgcgaggggttgggggatttccctttcctagccaagggaagccgtgacagactgcacctggaaaatcaggacactcccgcccaaatagtgcgcttttccaacggtcttagctaacgacacaccaggagattatatcccgggcctggctcggagggtctcatgcccacggagccttgctca

SEQ ID NO: 100165 - DNA, 372 bp, Homo sapiens
attgatttgattgacgtactgagaccgagtctcactgtcacttaggctgtagtgcagtggtgcaatcttggctcactgtagccttgacctcctgggctcaggtgacccttccgcctcagcttccagggtggctgggactataggccagcaccaccacagatggctaatttttgtaatttttgtagagatatggtttcgtcatatattagtctattttcacactgctataaagaactacctgagactgggtaatttataaagaaaagaggtttacttgactcacagctccacaggtttaacggaagcatgattaggagacctcaggaaacttacagtcatggaggaagacgaaggggaagcaaggaccttctt

SEQ ID NO: 100166 - DNA, 419 bp, Homo sapiens
  misc_feature (1)...(419): n = a,t,c or g
cccacgcgtccgcccacgcgtccgcccacgcgttcgatcgatcaagaccctctcttgcgcgccccctgagagttgtgagcccttaaaaaagacaggaattgctcactcgaggagcttggctcttgagacaagagtcttgccgatgcccccggccgaataaaccccttccttctttaactcagtgtctgaggagttttgtctgcggctcgtcctgctacattaatggaaatacaatgttggccaggctggtcctaaacgcctgacctcaagtgatccacccgccttggcctccccaaagtgctgggattacaggngnnaaccacccttcccagtcttgtttttccttttacctagcttaaatgtcttttttaagtggggtcttgctctgtcacccaagttggagtgctattggtcttaan

SEQ ID NO: 100167 - DNA, 403 bp, Homo sapiens
gagaaggctgggtgcagtggctcatacctataaccctaacactttgggagaccaaggcaggaggaccatttgacactaggaatttgagaccagcctgggcaatgtagcgagaacttgtctctacaaaaaaattttaaaatattagctgggcttagtggcatctctgtgtctgtttcccagttttcaaatggagataataatagtacttacacctcacaagcttgttgtaaggactccaggagctactctatgtaaggcatttacaacagtgccacatgttgtaaatattcaatcaaagaagatactctgttcattgaatataagatgtcattgatggccaggcatagtggctcatgcctgtaatcccagcactttgggaagccaaggcaggaggatcacttga

SEQ ID NO: 100168 - DNA, 419 bp, Homo sapiens
agcattgggattacaggcacgagccaccattcccggtttaaatgcatttcttcatatggcttccagggtgccacagtctcctggcttcccccaacctcacaggctgtttcttttctatctccatcactgagtccctcctatccttatttatttatttagagaccagggtttaagacttgcaatgttcgtatttttgggagagacggggattcactgtgttgcccatgctggtctcgagctcctgggcttaagcgatcctgctgcctcagactcccgagtagctgggattacagcaggctcacgccaccacacctggctaattattgtattttgggtggagagggggaatcatcttgagtggacaggctagagccacaactcttgacaatttttgggcatgtcgacctgactgtcaaaac

SEQ ID NO: 100169 - DNA, 411 bp, Homo sapiens
  misc_feature (1)...(411): n = a,t,c or g
tgtgtctgtaggcaacagcttaggctttgccatcacacagcatctcactggtaaatcattaataattacaggccttatcataacattatgaaaattaaatgaattaaaacttataaaatgcttagtgtggtatctggcacatggtaaacactcaataactaccagtcatcttttagagtgggggaggataaaaacagtctgccagcctggcaacatagggaaaccctgtctctacaaaaaaaatataaaaattagccaggtctgggggtgtacacttgtatgtaatcccacctacttgggagggaggctgaggcaggaggattgcttgagcccaggaggtgctcantcagcagaaggatcgcttgagctaaggtcacgccactgcactctagcctgggcgacagagcctat

SEQ ID NO: 100170 - DNA, 399 bp, Homo sapiens
atgggaaagtcttcctgttctgaggttatgattaaattctgctaagacttttataacttagctttttttttgttcacatttcaattcttttttttttttttaaaaacggggtctcgttgtttcccccgggctaaagttcagggccccaatggtagttacccgaagcctcaacctcgggggtaaaaaccacccccccaattaggggggacggggggggggcccccccaggcaaagttaatttttattttttaagggggacggggcctccccaggtggccggggggggcctcaacccccgggccaaaggggaccctttggcctgggtttttgaaggggcgggggtaacgggggggacccagggcccccaccctatttggggacttttaattcggccccccc

SEQ ID NO: 100171 - DNA, 391 bp, Homo sapiens
tggtatttgtgtatttaaacatagaaaaggtacagtacaagcatggtataaaagataaaaaaaatggtatgcgtgtatagggcacctatcatgattggaacttccaagactggaagttgtgtgggtgagtggcatgagtgaaagtgaaggcctttctgtatattgctctagactttaaaaacattgtacacttaggttttactaaatttatttaaaaattgcttctggccagatgctgtggctcacgtgtgtaatcccagcacttcgggaggccaagacaggcagatcactttgagcccaggagttttaagaccagcctggggaacatggcaaaacctcatctgtagtcccagctactctggaggttgagttgggaggatcacttgagccc

SEQ ID NO: 100172 - DNA, 390 bp, Homo sapiens
tccctggagaaggggtcacgtggggaggaaacagcctgggttttgttgatgcttttctaagaatggagtactccctgtcaagagatttgtcctaattatattttccagcggccacttatgccaagtattgatgaataatacatacaataagcatctttgtgaattttaatgaagcagaccttaactatcaacgacaatgaatgaacatctatcgcttccaattttaaagcaaagaactggcgtgggacagcagatcacgcctgtttttccagcactttgggaggccaccgttatatgatcgcttgagcccaggagtttgagatcatcctgggcaacataccaagacctcttgggttaacaaaaaaacgccggggggggcggccgtttggg

SEQ ID NO: 100173 - DNA, 398 bp, Homo sapiens
agaaaagtaaaaataagaaaacaaaaaagatgcataaaaaagaatatatgtatgatatatataacattattttaacagctttaatttttttttaatgggctcaagcaatcatcccactaaaaatcctggctaattttttttttttttaactttctataaaaacaagttctcactatattgcccaggttggtcttgaactcctgggctcaagggatcctcctgccttggcctcccaaggggctgggattataggcatgacccactgccccgggcctatatttttaataatatatattataaaagggtaatgaaaaggatacaattgaatcagtataccccccaaagtttttttttagaggtctgaaattcaaggtaggacaaaaagctttggagagtcc

SEQ ID NO: 100174 - DNA, 413 bp, Homo sapiens
caggcacatgccaccgtgcttgtctagtttttgtattttttatagaggcggggttttgctgtgttgcccaggctgttctcaaaatcctgggttcaagtgattctcatgccttggcctcccaaggtattgggattacaggcatgagccagggcgcccagcctgcttcatgtattgaagctgggttcatgtacatttagattatgccttcttgatgaattgatttttttgttatgaaatggtcttctttatttctggtaatattatttgtcctgaagtactctttgtctgatactaatatagccacacaagcattctttgattagggtttatatgccataccttttttccccattctttttactttcttaattgtgggggtcatattcttagagaggagcgtattattgggtctc

SEQ ID NO: 100175 - DNA, 405 bp, Homo sapiens
cccacgcgtccgaataatttctgtttaatcctaaacgggtcctgttaagaatgccttcgttgtcttgtcatgcttcaaggcccaggagaggcctgggcagaactcttgggaggcttttgtgagattccagcctttgtataagggcgctggctctctcagcttttaatattgaacttcaccactcggtcagtgctgaaacagatgtcatggaggcctgcgttagtgagacctggcctgccacactttgggaggtcgaggtgggaggatcacttaaggccttaaggagtttaaaaccagcctgcaaaacatggcgagaccctatctctacaaatagtaaaaaaattgccaggcatggtgcacacttctagtcccggctactcaggaggctgaggcagaaaaattgct

SEQ ID NO: 100176 - DNA, 514 bp, Homo sapiens
  misc_feature (1)...(514): n = a,t,c or g
ggtctccccccagggctgcacgggtcccncncccctggggncctgnnnacttacgcangnncnccngnnnnggaannnnngggncgacccacgcgtncgcaatcaatagaagcaacatcaagttggcatatattttagaattatctaagagggattgtaaagcggccataataaaacatttcaatgagcaatacaaacattactgaaacaaattttttaaaagagaaaatgttgacgaagaaatagaaagtttcagcaatcaaaataaagaaaaatagaaggtatttaaaaacacaaataaaaactttaaaatggaagaatataataaagaagactttaaaaataaattcaatggatggcctcaacaatagaatacaaaggacagaagaaagactcatcagggaacttaagagtgaagcaatagaaattaccaaatctgaagatcagagacaaaataaaaaaacgacaagaaaggcgcgtgcgnnnnntnnnnnnnnnnnnnncncnctttccg

SEQ ID NO: 100177 - DNA, 414 bp, Homo sapiens
tctcctttcacctgcccagtcacaacttcagtggtctctctgtgctgcatcaacagttattttctttactgagtcatttccatcaatatggaaatgctgttatttctcccatccgaaaaaaaaaaaatcctcttaggctgggggggggggctcacacctataatcccaccactttgggaggctgaggcaggcaaatcgcttgagcccaggagtttgaggccggcctgggcaacatggtgaaactccctctttacaaaaaaaaaaaaaaaaaaagggggggcccttttaaaagaaccaattttaagggccgggggtggggaaggtataattttttttaaggggccccaaaaatcaattcccgggccggggtttaaaaaggcgggaagggaaaaacccgggccttcccccatttaa

SEQ ID NO: 100178 - DNA, 427 bp, Homo sapiens
tctcactatgttgccagggctggtctccaactcctggacttaagcgatcctcacgcctgtaatcccagcactttgggaggccgaggtgggcggatcacttgaggtcaggagttcagggccagcctggacaacatggtgaaatcccgtttctaccgggagaattgcttgagcccaggagatggaggttgcagtgagtcgagattgtgccactgcactctagcctgggtgacagaatgagaccctagaaagaaagaaagagagaaagagagaggagggaggagaggagagaggaggagaggagagaatataaaagaggagggaaggcaggaaggaaggattgaaggaaggaagaaagaaaggacagaaggaaggaaggaagagaaggaaggaaagaaggttgggagggagggaaggaacagaaaataat

SEQ ID NO: 100179 - DNA, 411 bp, Homo sapiens
tagaggctgtcctatacattatagattgcttaacaacatccttggcccctacccattagataagttgttagaacacagtgtggtattatgatggccagtatgacctatagatatgtctaatagagtctataaaactagaagatacagtggctcatttctgtaatctcagcattttgggaggccaaggtaggaggatcgcttgagcccagaagttcaaggccagcctgagcaacatggcgagactccatctctacattcaatcaatcaatcaatcaatcaatcaatcagcaagcaagcaagctggatgtggtggtgtgcctgtagtcccactactcgagaggctgaggtgggaggatcgctggggcccaggaggtggaggctgcagtgagtggtgatcgtgccaatgcactt

SEQ ID NO: 100180 - DNA, 411 bp, Homo sapiens
cccacgcgtccgcaaaaagtaaccttatggaggaacctgacaaactacctcagccaggcgatgaagggtaacatcagcataaacatgatgaagcaggttgatagtatgtatccttgatgtgtgatgagaatggtactttacctctgtggccttcctccaaaaaactgttacgcatggtctgggcacggtggctcatgcctgtaatcatagcactttgggaggccaagggaggatgattgcttaagtctggcagttcgggaccaccctgggcaacatggcaagagcctgcctctaccaaaaaaaaaaaaaaaaaaaattgtatttttttgcgccggggggggggggctggtggccccccttattgggaaacctcccccggaggtttttttggccccaggaggttggggctgc

SEQ ID NO: 100181 - DNA, 558 bp, Homo sapiens
gggtatacatggattcaactttactagataatgccaaattgttttccgaagtggttgtacatcacttttttttttttttttttttgagtaccatatttctccagctggcttgtaagctatgtgaggcagagaacgatcttacatttttttggcctaaaagcggtagaaatttaataaatagatatgaattgattgattcattaatagtataaaaagaaaatttgggggtggtttttccatctttagaacaaagagatgaggctgggcgcggtggctcatccctgtaatcccagcactttgggaggccgaggcaggtggattacttgaggtcaggagtttgagaccagcctggccaacatggtgaaaccctgtctttattaaaaacacaaaaattagttgggtgggtgggcacatgcctgtaatccagctactccaggaaggctggagggcaggagaatcacttgaaccccaagaaggcagaagttgcagttgagccaagactgtgtcattgcactccagcctgggcaacagagcgagactctgtctttaaaaaaaaaa

SEQ ID NO: 100182 - DNA, 412 bp, Homo sapiens
gaagccaaggcaggtggatcacgagatcaagagatcgagaccatcctggccaacatggtgaaacccattctctactaaaattacaaaaaaaaaaaaaaaaaaaatttccccgggcgggggggaaggggcctgtacccccactttttggggaggctggggcagaaaaatcatttaaacctggggggggggggttgcagggagaataacccaattgcacaccacccggggggaaaaaaactccttttaaaaaaaaaaaaaaaggggggggcctttaaaaaaaacaaatttttatggcggggggggggaaaaaaaaaattttttttaagggcccccaaaaagaaaatacggggccggtttttaaaaaacggggggggggaaaaacccggggggaaccaaaataaatgggtttggg

SEQ ID NO: 100183 - DNA, 274 bp, Homo sapiens
aattatgcatgggtaaggatccattcagagtgaaggcagacatggattttaatgtaacagagtacagaaagttcattgatagggttttagattttacattggagctaacctttaggaaactaccatctaggctgggtgtggtggctcatgcccgggatctcagcaccttgggaggccgaggtgggaggattgctggaggccaggatttcaaaaccagcctgggcagcaagcaaggctccatctctgcaagaaaaaaagaaaaaaaaaaaaaagg

SEQ ID NO: 100184 - DNA, 389 bp, Homo sapiens
gcgatgacaacgagtaggccaggctgtacttctactcactatcgggagagatgtgccagcctcagcctccgaaagggctgggggtacaggcctgagccaccggaactggcctcatttctcttagggtcatatatctagcagcggaattgctggggcccatgatgactctgtggatatctgtttgaggtactctttcctttcccacaggggctgtaccatttcactgtcccacttagcagcgtataagcagggcagagagttcagtttgtccacattctcaccagcacatgttaatttccagcgctttcattccgagaagtggcatgtggttgtggttttaatttgcacttccctgatgactgatgatgttgagcatcttttcaggtgtg

SEQ ID NO: 100185 - DNA, 468 bp, Homo sapiens
  misc_feature (1)...(468): n = a,t,c or g
gtgggtnaaancctgaaaccgttagaagccgtacgccagcaggtaccgggccggaacccccgcgtcggctcctttattgcatccctggattataccatccctctcatccagggtagctggctgacatccactctctcaagaggacatgcatggacagaagacctggctcaagaaacagcgctctatgaaaagggcggatagttatgtaacaattttgcaaaaacttgagaaattaaaataagggagactatgaatgcaaaaacattagagagcttgcgcccagaagtttcagaccagactaggcaacgtgttgagaccccgtcactaaaaaagaatttagtcaggtgtgatgggccacgcctggaatcccagctactcggggaggtgaggtgagaggatctcttgaggctacagagagtcatagtcttgtgccactgcactgcagcctaagtgacagagcaagattan

SEQ ID NO: 100186 - DNA, 388 bp, Homo sapiens
agtgtcatggttcaccgcagccttgtcctcctggtctcaagtgatcctctcaccttaacctacccactcctaagtagctagaactacaggggcatgccaccacgctcagctaattttttatttttgtagagatggggtcgttgtgttgcccaagctggtcttgaactcccagactcaagcagtcttcctgcctcggcctcatgcccgcgccaaccagttctttatttttaatattatgttggatttgatgtgctatcctattcatttagtataagcacatttttctttatgtcttcagcataattatatgctttttcagaattttaacatcaggactgcttccagggtagctttattgccctttgtcttaagtatggattatagtttt

SEQ ID NO: 100187 - DNA, 418 bp, Homo sapiens
aatgacacccagcacagaaagaaagatctacactgcaacaggctagaatgtcccagagggattcagatagacaaattaattttggctggctccatatttaatatttattgaaactatgtaaataatagtcaatgaactatgtcatataatgtgttttttttttttttttttttttaaacagaatttacttggcacccaggctggagggcaggggggaaaaaataatggttaattgaagcctaaacctcccaggctaaagggatccccctggctaaccctcccgggaggctggaactacgggggcttccccccaccccaagctagtttttttttttttttttgggaaaaaaggggccttatttttgcccccccgccggggggaaattttttaatttaaaggggccccccttttttgccg

SEQ ID NO: 100188 - DNA, 1236 bp, Homo sapiens
gccgcgatgctggcaacacggcggctgctcggctggtcgcttcccgcgcgggtatctgtgcgtttcagcggcgacacggtgaggcccagcctggctggggccacgggtgttcggggccgggtgtcgcggccgcgcccgtgcacgagcagtccctggggtctgtagtggcctctggagagcccttctccccaggccaggcgggaaggcccccgctccggcctggttgaagtaggggaacgggtcccaacgcggggccgactcccttgaccctctgacttgctggcttcccttgttttacagtcctcggcctggcggaagttttgcaggttgtgaagacccctagtctttcattctctccttgtcacagccttgtagggcgtgaaggggtcattgccccatttagggatgcgcacctcctgatttcccgtccactgctctgcgccctgaagtggctgaaaagtgctcttaaaaggatgggaatcccgtcgccctcagctggtgcgctctccactgggtcgtggggctcctcatttcatcctaagtgagcccctccatcacctgtgtgttaaggaggcatttctttcccatcagtaaacacatttcgcctcttcggccgaggtaggaatataaaaggcccctggcctacccaagttttggtccagcaggggagccaggccgggaaagggccaagccgccacactcggcttgtggggcggtgtggtgccgtgatgcagctgtgggtttggccaccgacagacctgggctcaaattggacctgctgcttttgactgtgagaccttccataagctccttttgctccaagcctcagttttctcctctgtgaaacagagaaaatcgttcctatcagagttcttatgaggatgaaatgggattttggatgtaaaatgcttccatccagtacctgctaaacaaaatgcttactaatggcccgggcgcggctcgtcacgcctgtaatccccagcactttgggaggctgaggcgggcggatcgcttgaggtccaggagttcgagaccagccctggccaatatggtgaaaccctgtctctactaaaagtgcaaaaattacccgggcgtggtggtgagtgcctgtaatcccagctatccagaggctgaggcacaagaattatttgaacctgggaggtggagtttgcagtgagctgagattacgccactgcactccagcctaggcaaaagagcaagagtctgtctcaaaaa

SEQ ID NO: 100189 - DNA, 398 bp, Homo sapiens
agacatagtgtagcccataacacatgctgtgggcagagttaagagggtgaagaaggagccgggtacagtggttcacacctgtaatcctagcactttggggggctgaggtgggcatatcgcttgagcccctgagttcgagaccagcctgggcaacatggtgaaaccccatctcacaaaaaaaaaaaaaaaaagggaagaaaaaaaaaaaaaaaaaatttttcttgggcgggggggccctgcccgggggccttacttcctgggggggctggggcataaaaaaatttttttaaccccgaagggggggggttggggaaacccggatggccccctttttcctccacccgggcaaaaaaagggaaactttgcctaaaaataaataaataaaaggggctggaggg

SEQ ID NO: 100190 - DNA, 474 bp, Homo sapiens
  misc_feature (1)...(474): n = a,t,c or g
ggagttnccccctnnnnnaaccgttagtcccgtangcctngcagnancnnaannnccgggncgacccacgcgtgcgggggggcagagcttgtttgagcctagattgcaccactgcactccagcctgggcgacagagcgggactccgtctcaaaaaaaaaaaaaaaagggggggggggggggttcccccctttggccctcctccttttggaaaaaggggcccccccccgatttttgggggggggcgggccccccccaaccccccccggggggggggcaaatttgggcccccctttaaagtccatttttcccccccctggggggattgggggggggaacccaaacctcccccccccttttttggcccccttggaccccgggggggggccccgggttttttatttggttttttggaagggttttttagttccccccggccggggggggggggcctttcttttttcctttagggaagg

SEQ ID NO: 100191 - DNA, 397 bp, Homo sapiens
ctaaagtttttttttacaggcgtgagccaccgcgcccgggctatttgggcatgaattctaaactgggatatgaaagaattcagcaatggcaaagttcctcatggaggtgtgccatgctcagaagtgcagtgtgccctcccactggcccctcttcagtgggccctgagtagctgctcgtgtttgatctccctgtaagaaaggcagtagctgaaaagcacctaagctgccaacactgtggaaacccccgcaatgctccctttcttcacagtgacatacttgttgtaatacccatagtagcctctgaaacgctccagcagtgccggtcggggtaagatcccgcgtcggtacccagcttggcagctcctctggtttgacatctgtgtgttttctcccattc

SEQ ID NO: 100192 - DNA, 380 bp, Homo sapiens
cctgaactgaacactagctgacagacgttttgatttctttgaccatcacggaatcgtggccaagcgcggtggctcacatctgtaatcccaacactttgggaggtcaagatgggcggattgcttgggtccaggtgtttgagatcggcctgggcaacatgacagagccctgtttctagtggaaatacaaaaattaaccgggctcaagccatgaccatgcaccattgcactccagcctgggcgacagagcaggaccctgtctcaaaaaaaaaaaaaaaaaataaaaaagaaaggggaagttttcccgggggggggggggggactttttttttttaaaaaaaaggggggaagttttataaaggggggctcttttttgggaaggg

SEQ ID NO: 100193 - DNA, 415 bp, Homo sapiens
cttaccctagttaaacagcagataaagccaactttatgtattaaatttaaagactcagtctgagtctttagagtctttaaagacttgcccagccttctgaactccaagcattattcactcagaaaattttctcgtaactttttttagcttatggaacttagcttttttactttaaaaaaaaaaaaaagtcggctggttggggggactcaggcctgtaatccctgaactttgggggggccaaggggggaggatcatttgagcccaggagtttgggaccaccctaggcaacatatggagactttgtctctacccaaaaaaaaaattttaaattttttccctcctttaacataaaaaaggggacctaaaatttttgaactcacaaaacacagttttgaacagccttagaaacctcttg

SEQ ID NO: 100194 - DNA, 631 bp, Homo sapiens
ttaccttcagcctggctctaggaatagcctgtgagccagccctggactgccctggacttgttctcagaggtatcaggaaaggctttctgttttgatctggagctgtaagggtcacataatcatgggactgccggtggccatcttttcctactacctagagaaagccagcaaagaatgaaggcaacaaaggaaacagccaagagaatcaaagatctagtaacactgtttagatgtctcaattatgtgagacagattcctgttgttattttgattaagcctgtttgtgttggttttctgacttacaattgaaagagttctgtccaaaaagccaaaaggtggccaggcttggtggctcacgcctgtaatcccagcactttgggaggcccaggcgggcggatcacctgaggtcaggagttcgagaccatcctggccaacatggtgaaacccctgtctctactaaaaatgcaaaaactagccgggcatggtggcgcacacctgtaatcctagctactcgggaggctgaggcaggagaattgcttgaacccaggaggcggaggtagtggtgagcaaagaatcgtgccgctgcactccagcctgggtgatagagcaagaccctatctcaaaaaaaaaa

SEQ ID NO: 100195 - DNA, 397 bp, Homo sapiens
ctgttctccacaagttgacgcagagatgcagtgcagtcccactcagagctcccacggcttttctagaaattggcacacaaactccaaagcgtgtgtggaaatgcagatgacctgggagacccaaaacaacctccttgacaaagagcaggatttcaagacttaccagaaagctacagtaaccaaggcagtgtggtgtcagcatgaggatacaatagagcagtgggatggaatagaaagtacagaaaaaaaattccatacccaaagggcagggggccgggaccacagccacagcgattcagtgaggaaaaagagaaaggaaagtctttttttttttttgaaacggggtttaattttgttccccaacctggagggcacaagggggggaatctcaactccg

SEQ ID NO: 100196 - DNA, 405 bp, Homo sapiens
gcagccagtgttcaccttataagagaaggtagttacaaacatggggaggggaaatgttagcaacacttcagtggtgttggattggaattggagctttcagtgagaactcatggcatatactatctagatagctacaaaaagagatcgacctatgtggatataaatattgagatgtatgtggatgcacgtgtgtgtgtgtgtgtgtgtgtgtgtgtgtgcacataaatctatttcctagctgtgtattcttagagggcctaaaaccaaggaattgcagtgcagcgagaccacctggcttcccgatcttggtttttaaatactattctctactaaaaggaattagggctctttgaaaaaaaaaaatgactgtttctgtctctgggggagagaaagtaaaagatgaac

SEQ ID NO: 100197 - DNA, 439 bp, Homo sapiens
  misc_feature (1)...(439): n = a,t,c or g
gccatttagagccattatcaagtttgtattggggccaaacagtgttgcaggagaaaataagatgcttaggttttagatcaggtgagagttgaagaggtttcaagtttttaagaacacaggctaagggggaagtaggaggaatggagggtggatggttgccctttgttnnnaaaaaaagaaaaaaaaaaaaacaaaaaaataaaaaaaaaaaataataaggggggggggctttaaaaaaaaaaacatttttaccccggggggggggaaaaaaaaattttttttttgggggccccaaaaaaaaaaggggggggccccctttaaaaaaggggggggggtaaaaagcccgggggggcccaaattaaacgggtttggggccgcccctttttttggggggggaaaataataaaaaagagcggggaaaaaaaagggggggcacaag

SEQ ID NO: 100198 - DNA, 3242 bp, Homo sapiens
ggctgctctagccactttctagctctgtagtttaggctggagtgctgtggcatgatcttggctcactgcaggttctgcctcccgcgttcaagcgattctcctgcctcagcctcccgaggagctgggactacagacacctgccaccacacctggccaattttttgtatttttagtagagacggggtttcaccatgttgggccaggatggtctccatctcctgacctcgtgatctgcccgcctcggcctcccaaagtgctgggattacaggcgtgagccaccgtgcccagccctgccacatcttttttgttagttgcagtagcaatacaaccttatctagaaaagctggccaaaaaagaaaataccatgataatagggtacctaatttattgctttatttaagaaaaatgtaatatttcattcgaataagtacttttgggctgggatgatatttcatttagctacttggcatgccacccatcttagggaattatatgagggtttatactttaaataacataaaaagcaaaacatgctgaatgtaataatttgagagaagtgtaaataataaaaatctgtcatctaccacctggactagtaatatattgtttgttttcttaactatacactcacccctgcactcatctccattttatcgtggaagtcaggtatattccaagagttggctttatggtactgagtaacttgccattagctgccatgctgggagctggactaaaatttttcctcttgtgtggaatccaatattaagagttcgggtctccccggccctctcccagtttcatcttgtcacccttgagctgatctcatttcatgtgtcttgtatggccctgctgggtggcactggtaagtgtatgaacatagacttgataccaacctctgtctctactactgaattgatcacatgatttttctttctcagttttatttttaaagactcctgatccatcttaccatatgactgcttttgaaatagttccatgatgtagattagtaaatatcgatagttcttaagttttattataacctagtaagtttacaaagtctcctggcttaaggtcgggagtagatatcagatctggcaaaagcagcttagatgtgataggctgattgcactagattgaacttggtgctgtttctcttaggttttaacaggacacatcaggactgagcaaccaagtaagtccaagttattacaattcatgttgtttttttctcctaaaacagtaaatatttcggcctttgtggaccataggtctgtctcaactactgaattctgccattgtagtgagaaagcacccacagacgatttgtaaacaaatgggcatagtattttttttaaaaaaaaaaaaacctaaaacattaaaaaaattttaaacttgttggccgtacaaacaggcagtggggtggggtttggcctgtaggttgtagttctctgccctgctcatgtctatttcccaaaacattttttaaaccatacaggcgtttaaaaacaaaatctacaatctgtacaacctcattttaagtgactaagctttttcagtgtatgccaatacatgcataaaataggtagttctgtctagtagtgttctgcctttttcaatcactattgaaaggactccctgtggcagcacatagctctttggtaaccacaaagtatccagtaaatagattgccatgacttaatcacatttgaatattaaattggtaccagtttcataaatcctacaacacacatatttgaccatagcttggttgtgcaacttgtccatttgttgactagactcccaggagtggaactgttgggtgaaagggtatgtatgcagctgtgataaaatactactcagtagctctccgacaggctgtatcagtttccactcagatccttacgcaaatgtcatttctaatgactgtaatattacaccatatggatatattgcaaattaaccattacaaatcctttgctgctgagcattttattttaatggcttttcactctagtgccttgtcttggtatatgtctttgtccacattcccgtagatacgttgaattcctagtatatttacttcgtcaataggcatgtttcttaaggttgataaataatgatggccaaatgaaagtacttcactaacatgaatttgaggaaaagttgagaaaagcaggaaaatttacttccattgtctgatactgattagcatcaggagagtgggagtctacatattgggagatgtttgtcaaatgttacaaaaatgcattaagagtaataccgggttatcagaatttgctgaaatcatatcaaggtggaagaattagagaatagttccctggctagaagacgttgaacctttgagtgtttaggtctttgctataatgtcttgcttgctaagataggccttaatggccctctcatcgtactgctagaatttagccagtggcaccagtcaggaaggtattaaagtagcaccagcgatagattacttttcatcctgacttttgtcctagagctccataaaatgtgcatttggtgggggaaatcacgtctacaaataaaattgtattgcttttgaagatggtataagtctatagataaaaaagctgtaaaaccttgaaaaatactgaaggatgtaaaaacaccaagataggccaggtgcggtggttcacgcccataatcccagcacttagggaggccgaggcaggcggatcacgaggtcaggagtttgagaccagcctggccaatatggtgaaaccccgtctctactaaaaatacaaaaaaattagccgggcgtggtggcaggcgcctgtgatcccagctcctcgggaggatgaggcaggagaatcgcttgaacctggcaggcggaggttacagtaagctgagattgcaccactgcactccagcctgggcgacagtgtgagatgctgtctcaaaaaaacaaacaaaaaagccaaaactacaccaagataaatcacttatctctaccccactagaatataagctctttgagattagaaaattgttttgtgctcttatcacaaatactaggcataaagaagatgcttattattgaacagcaaatgcttaaaaagacctgcaggccagacgaggtggctcatgccaatcatcctagcactttgagaaggctgaggctggaggactgcttaagcctaggagtttgagaccagcctgggcaacacagcaagaccccatctctaccaaaaaaaaaa

SEQ ID NO: 100199 - DNA, 395 bp, Homo sapiens
cccacgcgtccgggaggagcctggaaggccacttttctctcatctttgtaagcaagcctggataattcaacttgagataaacatgggctgctttaaagctttacagcacttgcatttttagttcttctgaaacagagccagatgtctctcaaagtcagatcacagacaccactgcatgcatcatggaacctggactgttctggtcagatcaataatctggacattataattttttcattttttttggagagacgggggtctcactttgttgaccaggctggtctggaactcctgggctcaagtgatcagcctgcctgggcctcccaaagtgctgggattacaggcttcagccactgcacctaattctttcattttaattagagagggtatctctg

SEQ ID NO: 100200 - DNA, 420 bp, Homo sapiens
gggaggctgagacaggagaatcacttgaacccgggaggcagaggttgcagtgagccgagactgcaccactgcagtccagcctgggcaatagagcgggactcggtctcaaaaaaaaaaaaaatggattaaaacggtgttttcacctcaggaaaaaaaccttaaagggggaaaaaagaatagttgtttaaccaattatggttccccgggtaaggaaccaaaggggcctttaggggtttaaaattttaacggggggttaaagaaaaaaaaaaatatttgggcccaaaaatttattttttagggagttttacatattccccccacagaaaaacccttgtttattgaattatcccagaattggaggggttaaacccccagttagggatgggggttttacccgcccttgtggctacaaataaaaaa

SEQ ID NO: 100201 - DNA, 388 bp, Homo sapiens
gccaatgagtgcaagggagaaacgtgatgccccacaaggggaacagggagtgagagggtctcacttatacatgccacttaggcagagacctgaaggcagcgagggatggtccccgtgggtatttgggggacgagcagtccagcccaagaagaccctgaagctggagacacttggggtgccaggaatagcagcgaggacagggtgtgcttccttgaaccactgggatttttgagctgaggagtaacacagtccatgatttaaaacgattgctcaggaggatcacttgaggccaggagttcgaggctgcagtgagctatgactgtgccactgcactccagcctgggtgacagagcaagactcgtcttaaaataaatacatgaataaataa

SEQ ID NO: 100202 - DNA, 384 bp, Homo sapiens
aggtgctttaaagttaaggatctcaagatgagaccattctggaatatccaggtggatcctaaatccaatgacaagtgtccctgtaagagactgaagaggagaggacacgcttctctgcctccgtgggagaagaggagaaggcccggcaaagacggaggcagaggttggaactctgcagtcacaagccagggaacatggaagccaccaggagctggaagagtcaaggaagtgtcctcccctgaagcctctagagggagcgaagccctgtagacattggctcatttttgacagaggcttgctatgttgcccaggctggtcctgaactcctggcctcaagacatctccccaccttggcctcccaaagcgctgggattacaggagcct

SEQ ID NO: 100203 - DNA, 384 bp, Homo sapiens
  misc_feature (1)...(384): n = a,t,c or g
ccataatcatgttccacaatcaccatctaacatcattatattctgtgatagatctcttaaacttattcctcttatgaaatggaaattttatatcttttgactgacatcctccttaatgatccacctacccctcaccattctactctctgcctcaatgagtttgatttttttagatttcacatataagtgagttcatgtggtatttgtctttctgggtctggcttatttcatttaacaaaatgtcatccaggttcatccatgttattgcaaatgacaggattcccttgttctgttttcaaggctgactagtattccattatgtagagctacttctagtaccaactgtttagcttaggtttcttcaaagcgctgagcctgagacan

SEQ ID NO: 100204 - DNA, 398 bp, Homo sapiens
  misc_feature (1)...(398): n = a,t,c or g
atgaatcctagggctcatctttctttcctcctacggagaaaagaaagacgaatcctatggctcaaagcactggggcacatcatgtcaccgtatgaggcctgactggcattgcattagcaaactcatcactatacatcgtactacacgacacgtactacggtgtatctcactttcactatgtcctatcaataggagctggatttgccatcataggaggctttattcactgatttcccctattctcaggctacaccaaaaaaaaaaaaaaaaacataagggggggtggaacaaagaactttcttttatgccctgcccttgttcaaagggaaaaagtaaatcctttttttgctttaacaaacttgtggggctaaacttaaaaaaaaatttgggtacaaaan

SEQ ID NO: 100205 - DNA, 387 bp, Homo sapiens
attacaggcatgagccaccacactcagccatttttgcacaactttataaactttaaaaataattgatttatgcacttaaaacaggtaaagtttatgtgtataaattataccttaataaagctattaaaagtcaaagattataacagggcctctctctctctgacctagtgacctagggtaaagagaaaaagaagctagccaggcacaggggctcacacctgtaatcccagcactttgggaagccaagatgggctgattgcttgagtccaggagtttgagaccaacttgggcaacatagcaaaaccctgtctccaccaaaaaaaaaaaaaaggggcgcccgtttaagagaatcaagtttaacgtccgggtgctggcgaggaaatattt

SEQ ID NO: 100206 - DNA, 1178 bp, Homo sapiens
aagcttggcacgaggtttcagagggattctaggcatgttcaagaaaatatagtatactgttctgtgttttgttcttttcatgtaacaccatagatagcttggagaaaatgccattatcaatatgaattacttagaaacataaccccgctctcttccctgagctcatatggtacaaatcaagcacttatgtgttgaaagtgctgcatgttaaaactctggggtagcagttccctcatagtttccttgtatcctctccctcccgctggcaccattcccaggcagccaagcaggccggacttttccctggcaaccctctcgcctcaattctggcagccctgtgcgctagagtgaaccaagtgtgggctggggagtcaggtttaatttctagttttttaccatctatgtagcatgttgggcaagtcagtggtctctgggcctcagtttttatatccgtaaatggtaaaaatgttagaagtctacttcacacattttggtgagaatgtcatgaggtgtacaaaatagcagataggatattctataaatttaggtgcgctagagtgaaccaagtgtgggctggggagtcaggtttaatttctagttttttaccatctatgtagcatgttgggcaagtcagtggtctctgggcctcagtttttatatccgtaaatggtaaaaatgttagaagtctacttcacacattttggtgagaatgtcatgaggtgtacaaaatagcagataggatattctataaatttaggtgctatttctcaaatcaccttcacatctgagattttcttaactgttgtaacagtggtgacttccatttcatcactgttcatttcacagcctctcctgctctcataaaaccacagaaattgttctaagaatactgataacttatgaatatttttataggcagcagaaaaggttgatacttttaataaaatctgaccataccagctgggcgtggtggctcacacctgtaatcctagcagtttgggaggccagggcgaaggatcatgagattaggagttcaagaccagcctggccatgtactaaaagtacaaaaattagctggaaatcgctcgaacccagaaggtggagattgcagtgagccgagatcgcgccactgcactccagcctgggtgacaaggcaagactccgtctcaaaaaaaaaa

SEQ ID NO: 100207 - DNA, 419 bp, Homo sapiens
cccacgcgtccgtaaaaatggaattaccatacgatgcagcaatcccacttccaagtatatatcccaaagaactgaaagcaaggttttgagatctttgcatacccatgttataacagcactattcacaatagccaagaggtggagacaacttaactgtccatcggtggttatcaggagctgggggagggaaggggtgaaggagagttgtttaatgggtatggagtttcattctgcaagatgaaaaagttctggagatacgtttcacaacactgaaaattgctactgaactgtacacttaaaaattgttagtggtaagttttaatagctttgatgtgttttaaattatgtgggttttttttaccacaataaaaatattaaaagattgtcataactaggttgggattgcatagcatagttca

SEQ ID NO: 100208 - DNA, 390 bp, Homo sapiens
accctcgcgctctctaagtgaataataatgcctgtgcgagccgcctcacacgtgcaaaactaacactttgggaggctgatgtggacggatcacctgaggtcaggaattcaacactagctctgaccatcatggtgaaaccccatctctactaaaaaatataaaaaattagcccagctactcaggacgctgacgcaggacaatcccttgaacctgggaggcacaggttgcagtgagccgagatcccaccactgcactccagcctgggcatgacagaacaagacttcatctcacacttacgagggaacaactgaacttccgtgctacccagcatttttactcctgatacatagccagaataactagaaaacaggcgttcaaacaaaaattgtc

SEQ ID NO: 100209 - DNA, 371 bp, Homo sapiens
aattatagctcactgtaatttgaactcctggactaaagtgatcctcttgcctcagcctccaaaatagctgggactgtatttgggactacaggcgtttgccactatacccagttaattgtttttgttgttgatttgtttgttttgtttgctttttgtagagccaggatcttgtattgcccagtattgccttgaactcctggcctcaagcaattctcccatgtcagcctcccaaagcactggaattataggcatgagtcatggcgcctgtctcattttaacttaatttttgtatagggtattaggtaaggatccagcttcatttttcacctgaggatatccagttttaccaatgccatttgatgaaaattctg

SEQ ID NO: 100210 - DNA, 382 bp, Homo sapiens
  misc_feature (1)...(382): n = a,t,c or g
ccgngatcctccctcttcagcctcccagagtgcctgtaatcccaggactttgggaggccaaggtgagaggattgcttgagccctagtgagagcttgtctctacagaaaatttaaaaattagctgagaatggcggcacacacccatagtcccaactacccgggagcctgaagcagaaggatcacttgaacccaggagattggtcttaggctgaggtggaagaatcacttgaacccaggagattggtcttaggctgaggtggaagaatcgcttgaacccaggaggtcgaggctgccttgagctgagatcgtgccactgcactccagcttgggcaacagtgagatcctgtctcaaaaaaaaaacgtgcttaccgtatcgttcaat

SEQ ID NO: 100211 - DNA, 408 bp, Homo sapiens
agaccatgggcggtcatacatagacagtgctcacttttcatacagggtggcggctgggcagaggctgcagtctccgcactttgggaggccaaggcaggcggctgggaggtggaggttgtagcgagccaagatcacgccactgcactccagcaaaaaccagacaggtgtggtggcgcccgcctgcagtcccaggcactaagcaggctgaggcaggagaatcaggcagggaggttgcagtgagccgagatggcggcagtacagtccagcctcggcttggcatcagagggaccgtggagagagagggagagggagattgtggagggagagggagagggagagcgacaatccttagatgtagctcatccccttggaaagacgtcgaggagacatgtcaatttgaatgaactt

SEQ ID NO: 100212 - DNA, 328 bp, Homo sapiens
cccacgcgtccgcccacgcgttcggtctggttggggggacaggcttccagggaaccctttcaccctcatggggctacagagatagtacctcttgggtggggaaaaggagcaagaacaggttgccaggagaaagcagtggaggctgggcacggtggcttatgcctgtaatcccagcactttgggaggcagatcacttgagttcaagagtttgggaccagcctgggcaacgtggcaagatcccgtgtctacaaaaaaaaaaaaaaaattcccaggttttcttggttggggggcacatccttggggttccatctactaggggggctagggg

SEQ ID NO: 100213 - DNA, 408 bp, Homo sapiens
  misc_feature (1)...(408): n = a,t,c or g
attgcgccactgcactccagcctgggcgacagcgagactccatctcaaaaagatgaaaaaaaaattattggggcgaggcaggaaaatcctttgaccctgggggggggatgttgcagggacccaaaatccccccttggccctccacccggggggacaggaaagaaattttgtttaaaaaaaaaaaaaaaaggggggggccttttaaaggaaccaattttaccgcccgggggggggaaaaaaaaaatttttttttgggggccccaaaaaaaaaatacgggggcgggttttaaaaaggggggggggggaaaaaccggggggtcccccaaattaatggttttggaaaaaaccccctttttcgcggggggggaaaaaaaaaaagggcccggtttttnggtgtgggctatgacg

SEQ ID NO: 100214 - DNA, 526 bp, Homo sapiens
  misc_feature (1)...(526): n = a,t,c or g
agacgtatccccnagcnnnccccnccacctgaagcngttanttangagtctncggnccgngcnccccgggnnganccacgcgtnncggaagggtaataactatcactttctaaaaaggcaaatatatccaagttctggctgggcacgcgtggctcatgccgtgtgatcccagtactttgggagcctgaggcaggtggatcacttgagttcaggggtttgagaccagcctgggcaaaatagtgagaccctgtctctatttctgttaaaaatttaaaaatttataaaaatcagtcaccaagttctacaccttgcactaaaggtggtcatggatttgactttgactttaccttttttttttttttttttttggaaaggagccttttttttttttccccggggggagggcaaggggggtttttttgtttttttgaaccccctccttccaaggtaaaagaatttttctgccccccccctcccaggggggtggatttacggagtgccccccccccccccgtttatttttttt

SEQ ID NO: 100215 - DNA, 410 bp, Homo sapiens
  misc_feature (1)...(410): n = a,t,c or g
cctgcctacatgaagataacctgtccatcttcactggtggattgagtatgtactcttttggatagttcctgcccgcaagaggagaaagttgctaagccagataaattctttcagattttattaatcagttatgtctaccacctcctggaaggtaaataaaataagagaggccaggaatgccaggtgcagtggcttattcctataatcccagcactttggaaggctaaggcaggaggattgcttgagcccaagagtttgagaccatcctggaccacatagtgagaccccccatttctaccaaaannnaaaaaaaaaaaaaaaaaaaaaaaaanannnnnnnnnnnnnnnnnnnnnnannnnnnnnnnnnnnnnnnnnnnnnnannnnnnnnnnnnattttttttttttttt

SEQ ID NO: 100216 - DNA, 517 bp, Homo sapiens
  misc_feature (1)...(517): n = a,t,c or g
cgtttccnnnaaggcgtagggtgcnnnnnnaactgaanantgatttgctngcagnnncncnnnnnnnnaannnnngggncgacccacgcgnnnnnnnnaaacagatatgcatcattactattatcccagaaaggtcccttctgccctttcacaatcatttcccactcctgctcccctagagataactggttctaggttttttaacccgtagattagttttgcctattctagaatttaatataaacaagaaacatctttttggctatgtgggctgtttccagttttggggtattatgaatagtgctgctatgaacattcttgtacaagtctttgttatgaaaatgtatattgtgtattaatttttcttggacaagtatgttagagtggaattgctggattataggggaggtatatgtttggttttctaagaaactgccagaccaactgagctttgatcatgtcatacttctgccaacagggtatgagagttccaggtgcttcacgtcatttggtagtg

SEQ ID NO: 100217 - DNA, 392 bp, Homo sapiens
ccaaagctgatcagcatcccaactactctaccatggagaagttttgactgttttcatcttttcataaatggaatggtatagtatgcactcttgtgtctggcttctttcatttcacatctgtggcattgagtatagcaatggtttattccttctcattactagatgatattctgttgtacgaatactttacagtttctttatccattctagtattgatgtacacatgggtttgcaaaattatagagctattgaaaataatattgctgtgaacattgcttatacacagctgttggagaactaatgtatatatttttctaggacatacatcctatgattcagcagtttattctattctagatgcacaggtattctttttttttttttttccccca

SEQ ID NO: 100218 - DNA, 395 bp, Homo sapiens
cccacgcgtccgggggagttttggaggatggtggcactgttctatatcttgattgtggtggtggttgcatgactatatgcagatgtcaaagctcccagatctggatactaagaagagtgaattttactgtatgtaaattatacttttaatttaaaagcagaaaaaaaaaaaaaaaataaaaaaaaaaaaaaaaaaaaaaaaaaaaaaaggggggggggccttttaaaaaaaaaaaatttttccgccggggggggggaaatattttttttttttttggggccccaaaaataaattacgggggcctttttttaaaaggggggggggggaaaaacccgggggttcccaaattttaagggcttggaaaaaccccctttttttcggggggggaaaaaaac

SEQ ID NO: 100219 - DNA, 437 bp, Homo sapiens
aaaatttcctttacattaaaacttacatctatatctaaaagcttataatgttcatgctgcattttaactcttcagtgagttagtggaagaatgactgcacttgagagctacttattggctagttcagctctgaaataaatgttcttcaaattgtaaaatcaagaaaatgacagctcggctggacgtgctggctcatcgctgtaatcctagcacttttggaggctgaggagggaggatttgttgagcccacaagtttgaaactagccagggccacataataagaccctgtctctacaaaaaaaaaaaaaaggggcggccttttaagagaacccaattttcccccgcgcgctggcaaggaaatggttttttttggggcaccttaaaaaattcccgggccgggttttaaagggggggtttggaaaacccgggcgtcacct

SEQ ID NO: 100220 - DNA, 418 bp, Homo sapiens
  misc_feature (1)...(418): n = a,t,c or g
ttcctttatatttccatgtaaatttttaaatcagtttatcagtttctataaaaatgtttgccatgattttgattgtaattgtgttgagtctaaagatcagttgggaggccggatgcagtggctcacacctgtaatcacaacactttgggaagccaaggtgggtggatcgcttgagcccaggagntcaagaccaatctggacaacatggcaaaaccctgtctctacaaaaaacacacacctctagtccaggctacttgggaggctgacatggggggactgcaaccttgtcctcaggggctcaagcgagtctcccttcttcgtctttgagaaagtgggacttcatgtacacgccaccattcctaactacctttttgtaatataagaaaagatggaggttcttcttgttgttcatgctttc

SEQ ID NO: 100221 - DNA, 417 bp, Homo sapiens
cccacgcgtccgcggacgcgtgggtggccttttgtccttggtttctgaagtagcttcagagctttaacggtgaaagacggtctttcgctataatggttgggcactttaggcctcagaaaacagaatctctcttgctgatcttctcctgccctcctttcatgtactcctctgtctccccaaggcagggctctaattttcccctgccctcatccataaagaaattctttgacctacctgatctgattagaagtcataagactcacatttcggaaggagtcctgtttccattccctggaggaaggagccacgcacagagaggccaagaagaatctgaacagataggtcttgttgggtttcctcgctcagtctaatagtactagatcatgccttttttgtccaatcacagttctacatggt

SEQ ID NO: 100222 - DNA, 889 bp, Homo sapiens
  misc_feature (1)...(889): n = a,t,c or g
ggcacgagaggaaggaaatcagtgatgcaaatgacccatgcaaagactctccaagaaacactgtactcagggccagaagcgcaggctgcagcgtctgttacagacgaattctgaaagaagatgccaggtagggcacctcagggcctggagggcctcacaggaagggctcaggcctgtctgcctttaccaagtacatgttcactctcttaggtgtttgtaggggagtggccaagacagccacgtggctcaggtgtggaatgaagctagaccaggtggaagccgaagggtcggcctctccaggccaggagagaaggatgatctaagggccaggtgcaggcccagaatgtctggaaagcatttctggtgcggggattgcccagtttggtgacgtggactctgggaagcaaggggacaggggacagcagtcagagctgagctgctgcccacagagcaggctccactgcccagaggctaagcggtatcaccaagcggcggacaactggcaggtcaggaagaagtgccactccagcctggacaacagagtgagaccccatctcttaagaaaaaggaagaagcagcaccagaantgcgccccctagtcttaactgtctgggaggctgaggcaggaggttgcttgaggtcaggaggtgaaggctgcagtgagctgtaatggcaccactgcactccagcctggacagcagcacgagaccttgtctgttttttcaaaaaaaaggaacactaaactttgatgtattgatactttaataaatttcctgtatctttttggaaatttttattgatgaaacataagtggcaaagcactatgaactgcctggggtggcttatcttaggtattttacatgtaaataaaatgctggttgcatcttaa

SEQ ID NO: 100223 - DNA, 761 bp, Homo sapiens
ttttttttttttgagacagagttttgctcttgttgtccaggctggagtgcaatggcacgatctcagctcactgcaacctccgcctcccaggttcaagtaattctcctgcctcagcctcccgagtggctgggattagcggcatgcaccaccacgcccagctatttttgtatttttagtagagatggggtttcaccatgttggccactatggtctcagatctcttgacctggtgatctgcccacctcggcctgccaaagtgctgggattacaggcttgagctaccgcgcccggccgtgaacgctattttctaagcagccagcagtgaatctaaaactctggaagaagtcttctgtttgaaaggcttatttaagccacacgtacacacactgtcttagagtactgtgagcccaccccacattggtcatcttccctatcacacaaatgatgttattttggactagcttaattttgaaatgggtaacaaagtttcctattccatactgttcatttctaatactcttacgaaaactattctaaaggaggcaggagccaaggccaaaagtgaacgtacaggtttgaaatggctgtgataaggaccagctggtattaactgataactttacctttgggtttttgttattttgtttttctagcccctacctgggtttaaattatggataactcgaaagacaggctcaggtgaaggccgagtaatgattttttttgaagtttcaatggtgtgaaataaatttctgttctta

SEQ ID NO: 100224 - DNA, 406 bp, Homo sapiens
caaagtgctaggattacaggcatgagccatggcacccagttgagcacttttttatttcctggcaaaataagaatttctagatttatcttgtactttttcttttttttttttttggaaaggggttttggttgttccccccggggggggggggggggggcttttttaagttacgggaaactttggcccccggggtaaccccttttttttggcttaaccttttaaaggggggggaataccgggcgggccccccccccccggcctggttttattcctttaaaaaaaaaagggttttttttgggaataggaatcccggccccccaaaaaattttttttttttttggttttggggggaggggctccctttttttttttacccaagggcggaggggtttaccggggccttccc

SEQ ID NO: 100225 - DNA, 416 bp, Homo sapiens
tccattaggccgcgtgtgaccatgtaagaaattgccacagcccctccagccttcagcaacccactctgatcagtcagcagccattgacattgaggaaagaccttctaccaggaaaaagattatgacttgctgaaggctcagatgatagttaccaatttttagtagcaaaatattttaaaattaagggactctcttttggaagaaacaagctggcaaatatttgaggttcagaatacatcttttcttaaatacccaagggaaacaacttcactgccatgaacaccaaagaactgtagattgtgccaaagatcttcctgaggtcccagcctctgaatggcggcagccctttgcgaactaccagcttgctctcttgccacaatgtcacacggaggtttccaggatcctcactagaggtg

SEQ ID NO: 100226 - DNA, 864 bp, Homo sapiens
tttttttttttaacaggagaaaaagcaaacaaatttatttgatcataattgtatgtgagccctcagaatgaagaccccaagatacaggggaattgtccatttttatgtttaggttcaacagattatggactgtgtagaaatatgattggacaagaagggtatgatctaatagtaatagactgagaggggaaacccaggcaaggcctgtctagattcttcttggcctctctgtgcaggattccttccttctgggcacggggtgggaccctctctggaatgggtatcttacgacagtcaaacacggtaggtcagatcatttctttccaaccagtttttacacagaaaggggaatggggagtgagaggactatttttaggttttatggctggctttgggtaaaaccggttctggtttctgatgacctgccttggggaagagggattctagtttctatgggtagccttgggggagaatgaaaagccagaaacaagagggcaggagaaggtcagagagaaacttttgcttctggggctgcttctgaggccttccttttaaagttatcagagatgatcaggggcatcctggctccaggtaaggtctcctgacgtgtgagtgctggtcttccacactggatgccgagccttttaaagggtggttttcaaccttggctgcatattggaatcactccaggagctttaagaaatattgttggcctggtgctgtggctcatgtctgtaatccctgagctttggaaggctgaggcaggatgactgcttgagcccagaagttaaggcggcagtgagccatgatcgcattactgcactccagcctaggtgacaagcaagactctatctaaaaaaaaaa

SEQ ID NO: 100227 - DNA, 398 bp, Homo sapiens
  misc_feature (1)...(398): n = a,t,c or g
taagaactcagttcaggcattattaattggttgtgaaataacaaagttttaaataaatggttccaggtaaaattaattatccttattaaaaatttgcaattcataacacattaaaataaattccagatagattaaagaccccaatatgagaaaaaatttataaagattttggaaggaaatataggagaatcacatattttaaagaggatgataataagcacaaaagtttaaagaaaattattgataaccttgaccttattaaaatgtaaggctctgtaatacaggagacattgaagaaagttaatannaaaaaaaaaaaaaaaaaaaaaaaaaaaaaaaaaaaaaaaaaaaatattaaataaaaaaaaaaaaaaaatattgggggggggggccccttt

SEQ ID NO: 100228 - DNA, 406 bp, Homo sapiens
  misc_feature (1)...(406): n = a,t,c or g
aactgggattacaggcatgcactaccatgctcagctaatttttttattttagtagagacggggttttgccaattgcccaggctggtcttgaactcctgccctcaagtgagccaccatgcctggntttctttttatctttttctttcttttttttttggaggaagggggtttcgttgggccaccaaggttggagtacagggagggctcactgcagccttaacttcccaagctaaagggatccacctgcctcaccctcccaaagggctgaaattaaaggggggagccactgcccccagctagaagttcatttttttttatttccaagtttttcattgaaacatgatataattggcatatccattctcctgtggagggacatataggttctttacagcttttacctttt

SEQ ID NO: 100229 - DNA, 420 bp, Homo sapiens
taagcctagatagtaccactgcactccagcctgggggacagatagcaaaactctgtctcagaaaaaaaaaaaaaaccaccagggtttgttttttaattaaaaaatacttttttactaaaaaaggctaaggatcatcggatcgaacccttctgcaaatcataaggtttttgctgggggaaggccttgccttgatgttaaggccggccgaccgatgagggtagtatttgctgaaggctaaaggggctggggcaattttttaaaataatactattaatccaagggagttttctgcattgatcgattcttttatcacaaaggatttttttgtaccatgcaaggctgtttcatagtattttacccatagaaaaacttttttcaaaattggcatttcagcccagccgcaggggcacatgcctttaa

SEQ ID NO: 100230 - DNA, 407 bp, Homo sapiens
cccacgcgtccggcctgggcaatgtagtatgacagacaaggttgatgccacaagtcacataagaggggccaggaaatagccactggatctaccagcaagaaggctgatagtcgggaggatcatttgagtccaggagtttgagaccagcctgggcaatgtagtaggactccatctctacaaaaaaaaaaaatttttgtatataaacatacccggccttgggggcccatgcctggggcctcagtggctcggaaggctgaggaagaaaaataatttgaccccgggggggggaggctgcagggacctttgattttgccattggactccagccgggcccaaaaaaaccccgtttaaaaaaaaaaaaaaaagggggggggggggggggcttattctggtatccccaccttttg

SEQ ID NO: 100231 - DNA, 477 bp, Homo sapiens
  misc_feature (1)...(477): n = a,t,c or g
agtnggtgnnaactgatngccctcgctgatggacctcggnaccggcccggaantcccgggtngaaaaaccgtccgatggctcttggctgtaatcctagcactttgggaggccgaggtgggtagattgcctgagctcagaagtttgagaccagcctgggcaacacggtgaaaccccgcctctactaaaataccaaaaaaaaaaaaaaaaaatttccccgggcggggcccatgctaaggaagaaaaattgcttaaatttgggaggggggggttacagggagctaaaatatcgccactgccctccagccggggggaaaaaaaaaaactttgtttccaaaaaaaaaaaaaaggaaaaaaaaccctttaaaattccccccccccccaaaggccccgggttaaaataaaaaagggagtccaaaaaaaaatttcccgtttatacttccacggggcaaaatccctttgtttaaaaccccaaaaat

SEQ ID NO: 100232 - DNA, 425 bp, Homo sapiens
  misc_feature (1)...(425): n = a,t,c or g
actagttctagatcgcgagcggccgcccctgtttacttgattttaaaaaaaaaaaaaataaaatataaaagagaaggaatttaagtaaaaatatatatatgaaaattttatagtaaaaggttaggaaataaaagggttgggggcgggggggcggcttttatttgttcgcgggggggccccccttttttttggggggggaatttttttttttttttttttggggggggttttttttaaacccggttgtttttttgggggggccttttttttttgggggggggttttttgggccccccccccccccctttttttttttttttgggggggatttttttttttgggggggggggggggcccccccccccggctggggggcggcgccaaaaaaatnnncnggggcccaaaacaccagcatcttcttctgt

SEQ ID NO: 100233 - DNA, 412 bp, Homo sapiens
  misc_feature (1)...(412): n = a,t,c or g
cccacgcgtccgcccacgcgtccgcccacgcgtccgctcacgcgtccgagcctgggcaatgtagcgagaccccatctctacaaaaaaaaaaaaaaaaaaaaaaaaaaaaggggggggggtttttaaaaaaatttttgggggggcaaaattttacgggggggaggaaaaataaattttttttttttaaggggggttttaaaaaaccccttgggggtttttgggaaaaaaacttttttttggggggggaaattttgggaaaaaaccccccaaaaaaattaaaggtttaagggaaaaaaaaaatttttaagggggaaagggggaaaaaaaatgtgtaatggttggggttaaaaaattttnngggncnnnnggncgagccaaatccttagtggggggaatttatcagaatcctccc

SEQ ID NO: 100234 - DNA, 461 bp, Homo sapiens
  misc_feature (1)...(461): n = a,t,c or g
ggtggaatcacgtaactntatgaacacgcnnacgccaagcttggcacgaggggggcagcaaagcaagaaaaagaaataaaagttacaaggatttaatggaaagaaatagaactgtcacaattcacagaatatactcagaaaaatttaaagttacagataaattattataattagtatacatgtttagcaagattactggatacaaggtcaatctgaaaaatatcaattgtatttttcacaaacacacaaaccaacaacaaaaaatcttaaagatgccatttataatagcataaaaaagatcaaatgactatgaataaatctaacaaaagatacacaagatctctatgcagaaatctaccaaacattgaaggcagaattatagagggcctaaataaaacacatgtcatgggccgggcgtagtggctcacacctataatctcagcactttggtaggccaaggc

SEQ ID NO: 100235 - DNA, 448 bp, Homo sapiens
  misc_feature (1)...(448): n = a,t,c or g
nttgagaactttgtgacacttttacgccaagcttggcacgagggcctcattgagctgcagtgggctccacccagtttgagcttcccagccgctttatttacctactcaagcctcagcaatggcagatgcccctttcccagccaggctgccgcctaacagtttgatctcatactgctgcactagcaatgagcaaggctctgtgggtgtgggacccgctgagccaggcgcgggatataatctggtgtgacatttgctcagaccattggaaaagcacagtatttaagtggcagtgtctcgattttcccattacagtctgtcacggcttcccttggctaggaaagggaaatccccagaccccttgcgcctcctgggtgaggcaatgccccaccctgcttcggctcgccctccatgggctgcacccactgtccaaccagtcccagggagatga

SEQ ID NO: 100236 - DNA, 461 bp, Homo sapiens
  misc_feature (1)...(461): n = a,t,c or g
ggtgagcggcgcgnngnaattgaaaatggggccttcgcacctcatacgcctgcttggcacgagctcgtcattattgctcaagcttgcccaggacattgagacctgtcaccgtccccacagagcatttactgaatgtgtgggtatccccacttttcaaagaccttcctcgggtatctcggttttacctcctgagagtgtgtggggtcccgcaaagaaggcatcatacccatcttagatcaagaggcctcaagagggagagtggccagttcaaggacacacggcttctggaacagggagtgatggtcttccagcgaatgtcctgcgttctcttcaagaacccaacccctccatctctactaaaaatacaaaaacaagccgtgcgtggtggcacggacctgtaatcccaggccactcaggaggctgaggcaggagagtcatttgaacccgggaggcggaggctg

SEQ ID NO: 100237 - DNA, 448 bp, Homo sapiens
  misc_feature (1)...(448): n = a,t,c or g
aggccagggnnnngncctgggagcatgaggntctaggacnnccgctnggacgaggggttatgctggtacacaatatcctgatgaaggatatttagattgttttcagtatttgatgattatgaataagctgctgtaaacatttgtgtacaggtttgctggatcatatggtaaatataaatttaactttataataaatttccaaactgttttccagagtggctatcctgttatgtgttatcaccagcaatgtatgagagttctcattgttctgcattctcaccagcacttgatgctgctagattttttctagtttttatttgtttgcttttagccattttaatagaggtgtagggatatttcattgtaattttaatttacattttccttttggctaatgatattgaccatctgttcatatggntaattgctatccatatgtcatctttgn

SEQ ID NO: 100238 - DNA, 1493 bp, Homo sapiens
ttttttttggtcagcaatgtctttttaatacagatgtggtacagaatgtttaattacagcagggcagtgattccagttaaataaaattaaaaacctttattttcccaaatataaaattactaaattaaagtcttaaaagaaaatataacatggtgacagctttaaagtacaccaccattcaccacaggatttatgatttaccaattacatactccaccattttggcaaaaggatgaaattcttaaaactgtttataaacctaatatagtaaagactgtatacatctccatattgcacatttttatgtacaagaataaaacattaaagtgtattgcatatactggaacagcacaaatttatcacaattaaacttaatgcataagcccatgtgagtattaaaaatgtagaaatgtaatacatatatgtacagaatgccaggactgtattaacaatgatatgtacataacaatatactgtactactttgtacttttcagcatagttgcggttattaatataggcctttggttctaaactgcttgactagttttaagctcacataattccttaagctttcatattttcttaaatgcaaggaaatgaatataaaagccctaaatctcctggttcactggtacaaaaattacaatggtcagttcccttaggtcatcaaaaactagtcacaaaaatagttcttgtattcaacctgaatgtgccacaggaaaaaaaaatattttcaagattttccagctcagcctcgaggcaaaaggtcccccaggcatcaatgtcagtgcagccctccctgccatgtagatcccagaaccttttttttctgtaggccatctattctaacactactctgcaaggaagaataaaatctaagtccagctcaagagtgtctaccacacctttgttaagacacaatgaaaactttgaatattgccagtgagatttaaaaaaatatgtgcaccttcttacaactcctatagaaagtctgttaagaaataacgttgttctttatttcctttctctccccttccccttggtcctccctgtgctcggtctccccagtgattggctttggaaagcatcctgagtttgcaaatgacaaagcaagtccccacacacgggccatgagatgtaatcacacgaccgaagacgagctggtcatcccgtgaaccattgtgcttgttggagtcccactgatggcgttgaagatgtgaagggaattcggtaagacgctcgtcttctcctccagggggcagatctgctcatgcatgatttcagaaagctccttcgccatttccctgtagttggctttcatttcttcctgatactcgagctggtcttctttaatcagacgttcgtttaccgctaaggcttgaccgcaagcttccacaaattgcctgaaaacttccttaagcagcttcactttattgtcaggatatcgctttgtgtttgtatcatctaagaaagctcgcgcatatgctagtg

SEQ ID NO: 100239 - DNA, 496 bp, Homo sapiens
  misc_feature (1)...(496): n = a,t,c or g
tgggttgccnnnaattggaaaccatcgatgaccctcggacagngcggnggaattcccggcctcccaaagtgctgggattgcaggtgtgagccaccatgcccggttagaggaatttttcagcttagatagtggaagagttatgagggggacggaggttttgaaatacttagggggatatacaataaccatctaatcaattttctttttcttttcttttttttgagcctgggcttggctcactgcaacctctgcttcctgggttcaagcctcagcctcctgagtaggtgggattacaggtgcccggccccccatctaatcagtctttagacaacaaagtaaaatgagtgtggcaccattctggcaattcaggaatttatcttggcttaagtgatctgaaatatttcaggtccaagtattttattttctgaaatgagttaaccaaacattgtcttaatgattaacttaatttttcacatatggacacaggtgagccaat

SEQ ID NO: 100240 - DNA, 467 bp, Homo sapiens
  misc_feature (1)...(467): n = a,t,c or g
nttgatagcagaccactaggccagagcggaggaattcaggggatcctactcacctcagtctctagagtagctgggactacgggcatgtgtgtcatcatgcctggctaattttttaaaaatttttagtggaggtcttgctttgttgcccaggctggtctgaaactcttgggctcaagcagtcctcccgccttggcccctcaaagtgttgggattacaggtgtgacaccaatcgcccactccagccccaccttttttttttttttccccaaaaaaaaaaggggccctctttgggttccccagcttaaagggcaggacttgtccaaaaagggaacctaaccacattactttttaaaccccttgggtggggggaaccctctgccctaaccctctgaagaccggggaataaagggaatcccccccttttttggcccggacccgggaaatttgccttttcccagggggaaatn

SEQ ID NO: 100241 - DNA, 2596 bp, Homo sapiens
cgccaacttctgtgtgtgtttgttttcagagactcccgtcctgttcatattgctttgcaattccaggagcggcattgcccccgaatgtccagattatccctgtttttgtgaccaaagaggaagccattagtctccccttccttacatctctcttgtttgccaggtctctagcatctccagcaggactccaggatggttcagcccagcaccatccaaagggtgggagcacatctgccctgaaagaaaacgccactggccatgtggaatccatggcctggaccaccccagatcccacatcccctgacgaagcttgtccagatggcaggaaggagaacggatgcttgtctggccatgatttggagagcatcaggcccgcaggactgcacaactctgccaggggggaggttcttggcctcagctcctccctggggaaggaactagtctttctccaagaagaactcgacttgtctgaaatccacattccagaggctcaggaagtggaaatggcctcaggtcattttgccttcctacatgtgcctgttccagatggcagggctccttactgcaaggcatctctcagcgcctccagcagcctggaacccacgcctcctgaggacacagccatcagcagcttgcgccctccctctgctcctgagatgctgacccagcatggagcccaagagcaggtcgaagaccatcctggccatagcagccaagcccccattcccagagcagaccctctccccagaaggacccgcaggcccttgttattgcctcgcttagatccaggacagagaggaaacaagcttcccacgggggaacaaggcctggatgaggatgttgatggggtctgtgaaagccacgcagcccctggtctggaatgcagttcaggctcagcaaactgtcagggtgctggcccctctgcagatggaatcagctccaggctgacaccagcagagtcctgcatggggctcgtgaggatgaatctctacactcactgcgtcaaagggctgatgctgtccctgctggctgaggagccgctgctgggagacagcgcagccatagaggaagtgtaccacagcagcctggcttcactgaatgggctggaagtccacctgaaagagacgctgcccagggatgaggcagcctccacgagcagcacctacaacttcacatattacgaccgcattcagagcttgctgatggcaaacctgccgcaggtggccaccccgcatgatcgccgcttcctccaggccgtcagcctgatgcatagcgaatttgcccagctgcccgcgctttatgaaatgactgtcagaaatgcctccacggctgtgtacgcctgttgcaaccccatccaggagacatatttccagcagctggcacctgcagcacggagctccggcttcccaaaccctcaggatggcgccttcagcctctccggcaaagcaaagcagaagctgctgaagcacggggtgaacttgctctgaactgcacccaggaggtgactgggaaggagaaaaccagcaaaggaagctctgccttttataattgaaaaggcccctctattttatttttcttgaaaacattcccttttttaggaaccaaatgatatttgagtttttgttattccttttgcagattgggatgtgttttgggggcaggggttagttcttcaggtcggcagacccagagcacttgataaagaactgtatttaatcggtagtgttggggccgggacgggcttggctccctctctgccatactgagcctgaggtatttcatatctcctgctgttccatcccagcttgaattggtgccacaagcttccaagttggcattttttctagaacctgatcgtccactagcccagagtgtgtgtgttcaacccccacaccaggtggtggtaggcggtgtgactgcacagcgaggtgccggatctgtgagcaggccgactccactcccacgccgcaggtaggtttctccagtgcgctcttgctgggaggtccggatcgttcctgcagggaagcggcagcacacggagaccacttggttgaattctgttggaactctactcaaatctaggggcgtcttctttggacccacaatgggggcaagccttaataatatggaagggagtttgggctttagagatccctttataaaagctctgggggctgagccctgagaattcagtgacaacaggaccaacctgcgctgcctttgactacaagtgggccgtgcagctggttcctctcgagcgagtgtccctaaataggagtttacaagatgtctgggggtaaaagcactgtgcttttcagtggtggctgcgtgaaagggagcgacactcagctgtgtgttcctgggcttgtgtggtacttagaacctcagttctattacgttatagtcagacatttttttgacagtatgagacagactgcaggatgaaaatatttgtcaaaatcttaactgaatgtttacttggaagtacttgagattccatttgtagagttgtattgttaataatttcatgtcagtgaactgatatcctgatgtttatgatatggtgtccttttcttgaaacaagcttccaagggct

SEQ ID NO: 100242 - DNA, 514 bp, Homo sapiens
tttttttttgatatagggtctcactctctcacccaggctgcagtgcagtgacatgatcatggtcacggctcgctgcatcctcgacttcctgggttcaagtgatcctcccacctcagcttcccagagagctaggactacagtaggcacacgccaccacgccccgctaattttaagtagagacagagtttctgcatgttccccaggctggcctcatgcgatgcaatctgctccctgccaccctacctccaaaagtgctaggattacaagtgtgagccaccatgtccagcctgaagtttctattaaatggtgaaataacataagtaatctcataaaatgcttcctcttgttttataaatataagtgtatatttataaatacaaaatttgtatttactgtttaaattgacaaaaactgtatatatatatggtatacaacatggatgttctggaaacatgtatacattgtggaatggctaaatcacactaattcatgtgcattacctgacatattcatt

SEQ ID NO: 100243 - DNA, 490 bp, Homo sapiens
  misc_feature (1)...(490): n = a,t,c or g
cgcgcgatccctggtagagngccgtaggccagngccngggaccannncacatgccacctctcctggctaatgcttgtgcttttttgtgttgacgggatttttccatgttgcccgggctggtctcgaactggtgggctcgggtgatctgcctgccttggcctcccagggtgctgagaatacaggcacgagcgaccacgcctggctgaaagacataagctttaaaggcacaatttctagagctttagtaacagctattctagaaactacaaaacgatggaaaatgcagtggacaccaaaccagacatggacagtacaaagtcaaaacaaaagaataagccaatctcaggaatgaacaaaaatgcaaaaattgaacacgtgtggattaagatatcacagccaagtaggcttaatcctagaaatttttaaatgtttcactatgagaaaatgtactaatattgctaatcatatgtaaaaattagaaaaatctcag

SEQ ID NO: 100244 - DNA, 951 bp, Homo sapiens
gatgcaccgagctctgcacgagggcaaaactccgtctcacaataagaagaaaagaccagaatggacagtgtttgcagagagttgctcacgagtttccctctaatcctaaatgtcttcatgtctatcagtctgagcagacggtgagtagggcgggcacattctccaggcccttcttcctagctctgtggttgacctctcagcaagtgctatccaggctgggccaaccagacccacaattaactgagcctcagtgaaagcgtccagtgcatcttgacctgagacagcaaggaattgcatttggggttattccaacgatgatggcagggaactggtggtatttagtgctgaggggcagtgatacagaaagatttgccctgtgggacagggtcctgcgcgagtcccatccccaaaagccagcagctcctgccatgaggaagacggggtttctgagcaggcttatgcctgcaggttcctgtggagccaccggctgtgacgggacacctctgggtctcagcattgccctggggaggctgggacatttagggacatggtagggttttaacatttgtttcccaaatgtcaaatcccgggcacaggggcaagaccctgtcccgaattcccaccccagtgaatggtgtcgctgccaaagccaacacaagatgacaaaagtggctgggtacggtggctcacgcctataatcccagcactttgggagaccgagacaggtggatcacctgaggtcaggagttcgagaccaggctggccaacatggtgaaaccccatctctactaaaaatacaaaaattagctgggtgtggtggcgcgcacctgtagtcccagctactcaggaggctgaggtagaagaatagctggaacccaggaggcagagattgcagtcagccgagattgcaccactgcactccagcctgggagacagagcaagactgactca

SEQ ID NO: 100245 - DNA, 412 bp, Homo sapiens
tttcgtgcctccggtcctctggatggagcaggcatcattttacgctcggagtaatgaaggacggggtttgaccgtgttggccaggatggtctctatcttctgagctcgtgatccgcccgcctcagcctcccaaagtgctgggattacaggacgtatctatctctccctggaccgcacaaatatttgtcacgcgtggtggtgcacgcctgttataccatctaccacgagaagtgcgtcctatgaatgatttaatcccgggatggggagccctttttttgccaaaaaggaacgactgttttgacgacgcaccactccgagcgcaattggggtttgaagttctaacccgactgctagagtacttcttatcttttgtatggaccgcacccaaacttttccggcgctcggagatcct

SEQ ID NO: 100246 - DNA, 409 bp, Homo sapiens
atttttttatatttttagaggcaaggtctcactcggtcatccaggttggaatgcagtggtgtgatcacagttcactgtaaactcaaactcctgggctcaaggaatcttcctgcctcatccttccatcgtgcagggattacaggggtgagccaccacacctatctcttcttataagggcactaatcccattcacaagggccccaccctcatgacttaatcacctccaagaggccctgttcttaataccatcaccttgggcatttgggcttcaacatatacatttagcctggacacagacattcagtccacagcagggtctttacctcaaaccgtacctgggtcttctctcttcaaacctgggttttccccactgccacctgttgtgccccatctcgggtgtggcttcctg

SEQ ID NO: 100247 - DNA, 466 bp, Homo sapiens
  misc_feature (1)...(466): n = a,t,c or g
tgcgannattgannccttgtatgacccttantccntnnnngggaattcctgagacagaattgcttgaacctgggaggtggcggctgcagtgggccgagatcacaccactgtactccagcctgggcgaaacagagactctgtctcaaaaaaaaaaaaaaaggtcttgggggggggccatggggcctctcccttataacccaacaaaatggaattttttggggagcccgggccagaaggtttccctgaccccggggtttaaaaacccccctcaccaccttaaattccaaaaatcccaaaatttcctgggtttggggggggcccccctgggcccccatttcctaggggggttgaggggggggaatcatttgcccctggggggcaagggttgcagggacctggaattccttccttgccctccagctgggggaacaaaccaaaaccttgtttaaaaaaaaaaaaaaaaaaa

SEQ ID NO: 100248 - DNA, 301 bp, Homo sapiens
  misc_feature (1)...(301): n = a,t,c or g
aaaaaatttaaaaattaactggacatagtggctcatgcctgtagtctcagctacatgggaggatcccttaagcctgggagattgaggctgcagtaagctgtaattgcaccactgcactccagcttaggtgacagagcaagaccctacctctcagtctctcaatatctctatttctctctctctctctctctctctctctctctcacacacacacacacacacacacacacacacacacacaaaatagagcttctaggttgtgtggcagaaataatacattttttttaacacattggnccnn

SEQ ID NO: 100249 - DNA, 740 bp, Homo sapiens
  misc_feature (1)...(740): n = a,t,c or g
ctctgtcacccaggccctaatgtggtgacacaatctcggctcactgcaacctccacctcctgggttcaagcagttctcctgcttcagtctcccaagttgctggaattacgggtgcatgccaccacgcctggctaatttttgtattttcagtagaaatggggtttcaccatgctggccaggattgtctccatctcttgaccttgtgatccacccacctcagcctcccaaagtgctgggattacaggcatgagccaccacacccagcgagacggggtttcattatgttggccaggctggtctccaactcctgacctaaagtgatctgcccgccttggcctcccaaagtgctgggattacagacatgagccaccacggcttggcccgggatagtatatttttatagcacttcccctactgattgctgccttctctgtggctacaagggacccacagaattacagggaagttacagggaagcaggtttcatctcaatattgggagagatttcaaacaatcacacctgcctgagaagggagttgggcttgttcattagggattttttatttncccagttccgttcaggaattttttgttagaaggggtttcatgtgcttggtaccaataggacagggaagatttttaatccagcttttacttatcttatgtttttttatgggaaactgtgttgtatgtaatacatacattttccaaaaagaaaaattaaatgattatagagatta

SEQ ID NO: 100250 - DNA, 2143 bp, Homo sapiens
agccggaggccccggtcccgtttttagattctaatcaagaaaatgatttgctatgggaagagaagtttcctgaaagaacaactgttactgaattacctcagacttcacatgtatcattctccgagcctgatattccgtcctcaaaaagtactgagttacctgtggactggagtattaaaacgcgactccttttcacctcttctcaaccctttacctgggcagatcatttgaaagcacaggaagaagctcaaggtcttgtccagcattgtagggcaacaaaagttactttgcctaaaagtatacaggatcccaaactctcctctgagctccgttgtaccttccagcagagccttatctattggctccaccctgctttgtcttggctaccactgttccctcgtattggagctgatagaaaaatggctggaaagacaagtccttggtcaaatgatgcaaccctgcagcatgttttaatgagtgactggtctgtgagctttacttctctatataatttgctgaagacaaaactttgcccctatttctacgtttgtacctatcagtttactgtcctgttccgagcagcaggattagctggaagtgacttaatcacagctctcatatctccaacaactcgaggtttaagagaagctatgagaaatgaaggtattgaattttctctgcctttaataaaagaaagtggccataagaaggagacagcatctggaacaagcttgggatatggggagtatgtgattaaaataactttatatcatccactgacttatggactcatgaaatagatttgcacaggaacagcttgtgaaatagggactctaactgtagcaatttcctagggagcaagccatcagtgatgaggatgaagaggaaagtttttcctggctggaagagatgggtgtgcaagataaaattaaaaagccagacatactttctatcaagctgcgtaaagagaaacatgaagtacaaatggatcacagacctgaatctgttgtgttggtaaaaggaatcaacacctttacattgctcaattttttgattaactctaagagtttagttgctacctcaggtccacaggcaggacttcctccaaccctcttgtcccctgttgctttccgaggtgccacaatgcaaatgcttaaggcacggagtgtgaatgtgaagacacaagctctttctggatacagagaccaatttagtttggagattacaggtcctatcatgcctcattctctgcattcactgaccatgctgctcaaatcttcacagagtggatctttctctgcagtactgtatccacacgagccaactgctgtatttaacatctgcctgcaaatggacaaagtacttgatatggaggttgttcataaggagcttactaactgtggtttgcaccctaacactctggagcaacttagtcaaataccgttacttgggaaatcatctttacggaatgtggtgctgagagactacatttataattggagatcctgaacaccaaagtaagcctaaaaggaatctttgaggaaaaaagccttctagcaaggaaattcaagattcttgaagttgaaggaatatactgaaatgtttataaacataacttttactacagtagcatctaaggttttaaatgtgttttactattttcagattagatttttagatataaagatgaaaaactcagataactcaaatgagatatctatatccctacaacctaattgtatattgagcagaaactgaattaatatgcttccttgcaaatgggaaatcacatagcagttaccccatggcattgtgactaatggcatcagggcaaaaatatgttactttacgatttacctgttagcaggttcttgtttcataaaggtggaaaataaatacagacaacatctactgagctagttgattggtgatgcttctacccttaatatctttcctactgatttataattcctttattttcacatatactaaaactttttaaatgcatgttaattcagataaaaaggcattttgtattccacatagaatagtgttaagaattgtgaagtacactgagctgtcacggcaaagtagtatttaatgtgcttataggggtgtgtgtgtgtgtgtgtgtgtgtgtgtg

SEQ ID NO: 100251 - DNA, 457 bp, Homo sapiens
  misc_feature (1)...(457): n = a,t,c or g
nattgaaacccctgatgcgtacgccagagccaccggaccggaattccggggtcgagccacgcgtacgcagcactttgggaggccaaggcttgaggattgcatccaggagttcaagaccacccttgaccacatggcgagaccctgggtccacagaaaaatttaaaattacccgagtgcggcagtgtgtgactactcaggaagctgaggttgtggggattgcttgagcccgggaggttgaggctgcagtgagttgtgatcgtgccgctgcactccagtctgggcaacaaagcgagaccctgtctgaaaaaaaaggaaaatcataattcactatatgtaattgatacttgcattttttaaaaagcactaccttctcattacattgcccagaaagatgagaatttattttggtcttctattttgggaggggtcttttttttggtcatgaccatatttattt

SEQ ID NO: 100252 - DNA, 412 bp, Homo sapiens
cacgagaatcacttgaacctgggaggcagaggttgcagtgagctcaaatagtgccactgcactccagcctgggtgacagagcgagactctgtctcccaaaaaaaaaagaaaatcaaatctttttggttttgaagggggattttaacccccgctttttgtacttttaaacgccaaaaaaaggatttttttccttttgtaaaccccataaaagggtttttaaacctttggggcttgttttatggggggggatttcaaataggaggagaaaaaaaacctccggggggaaacggaattttaaggcttagctttttaacttggcctttttaactcaaaacaaataatttttgcttaaaaaaatgtaacaacctggataaggggtttaacccaaccttgaacccaacctttccttggg

SEQ ID NO: 100253 - DNA, 423 bp, Homo sapiens
gggtgcgtgcctgtggtcccagctgctcgggaggctgaggcgggataaatcgcttgaacccgggagacgggttgcggtgggccgggatcgtgccattgcactccagcgtaggcaacaagagcgaaactctgtctcaaaaaaaaaagggggccccctcaaaaaaatcccttcaaggggtggccctgtttttaagccaattgggaaagcttccaccctttttgcaaagaaaaaaacggccccaaagggggggggggaggggtcaattggcccccggctataatcccccggccggaaaaacccttgtgggcccagggccccacctttccttttgttcaaaaaaggcctggaaggaactgaggccttggaaaaaacccagggggttttggttccttataaactccacctgagttggccccccacccg

SEQ ID NO: 100254 - DNA, 650 bp, Homo sapiens
tttttttttttctgacatagggtctcgctctgttgcccaggctggagtacagatctccatttactgccgccttgacttgctaggttcaagcgatcctcccatctcagcctccctagtagctgggactacaggcacacaccaacacccccggcttttttgtttgtttgtttgttttttgtagagacagggtctccttcgtgttgcccaggctggtctcaaacttctgggctcaagcaatcctcctgtgtggggatcgcaaagtgatgggattacaggcatgagccgccacacccagcagaattttaatttaaaagctcagcttaaacacctcatgatgcttacacatttggtacatttttaacaatcgttgattgttcaactccatccgtctcagagttaaagacacaggataaggaaaacatctccttatccaagtgatttggggtggtattcccagctgtctgaggctgtacattgaccaattattttggccatgactcagagttcccctatcctgctatcctgagatcatgagaggccatcacagagtccacttttatcatctctatgccaataagggctctaaatagggtggtgtgacagcccatgtgccctacgttccctcgtgccaagcttggcgtaagtaaggt

SEQ ID NO: 100255 - DNA, 492 bp, Homo sapiens
  misc_feature (1)...(492): n = a,t,c or g
aattgaaaccctgagaacagttgcaaanngacacgccaagcttggcacgaggcatttaaaggttttagtgtctccagacacagtggntcatgcctttgagattggggcaggaggatcacttgaggccaggagttcaagatcagcctgggcaatatagtgaaaccccatctcttaaagaaaaagttagccaggtgtgatgatgtgcacctatagtcccagctacttgggaggctgcagctgtggctgtggctgaagctggcggatcgcttgaggcccagagtctaagactgcagtgagctctcattgggccactgcagtcgagcctgggcgacacaaagagaccaccctgtctgatagataactaacaaaatagttttagttgggcaaaattaaagagttgggcaaccatcactgaaatcagtttcagacattttcaccactccaaaaaagaaaccccacatcgactagcagttactcatttgcttctccctt

SEQ ID NO: 100256 - DNA, 482 bp, Homo sapiens
  misc_feature (1)...(482): n = a,t,c or g
agagtntcccccgccccgcccccatagatanccnatagataagccctcgcgcaagctcgcacgaggcaagaaccagcagttgcgagtggccatttctgatgaaaatactgggtgctaaaacttagtctagttctgatgtgtttaaaatccattttttaaaaaaaaaatcctgtttgtgaatcggggtaaaaatatagtctttccttctaagtgagaggcaagaggtcaggtgaatatggcagatgaggcaaaactctgcagcccaatttgttcaacttttgaagccttaggttgtgcagcatgtggtcaggcgtggtcatggagaaaaattgggccctttctgtcgaccaatgctggctgcaggtgttgcaggtttcagtggatgtcatcgatttcctgagcatacttctcagttgtcatgggttcgccaggattcagaaagctgtagtggatcaaaccggcagcagagaccaccgtgatcn

SEQ ID NO: 100257 - DNA, 495 bp, Homo sapiens
cccccccatgaaacctttagatgaccactccagcttggcacgagttgggaaaagggggagaaagatagcccctagcctaataacttatcatttgtaaaatgacttataaaaatattacctcaatgggaggagacatccggacttgtatatttcagtggaagtacaaaaccacttcagagaccagggtatctcctctggaaggatctaagagaaggtaagacagattaggacatcgaaaaggaggatggagccaggtgccatggcttgagcctataatccgaggctgaggtgggaggatcacttgagcccaggagtttgaggttgcagtgagctgtgatcacaccactgcactccagcctgggtgacagagtgagactctgtctcaattaatttttttttttaaaggaggaggatctccatgggtaagtggtttctacccgcatgggtagagttctgcctttggtccttctcagggggcactttcacaaaagcagg

SEQ ID NO: 100258 - DNA, 398 bp, Homo sapiens
agatggggttttactaaccctgtctttgttagccaggctggtcttggaactcctggcctcaagtgatcaacctgccttggcctcccaaagtgctgggataacaggcgtgagccaccacgcccagccagaggtgggtttcttatcaccttcacttcacagatgaggaagctgtggcatagagtggttaagtcacttgcccaaggccacacagcttgtaaattggatagctgggatttgaacccaggtacttttgctctgaagtctatactatttttttttttttttttgaaaaaatcttgctctgccacccaggagggagggcaggggtttgattttggttccttgaaacctccgcctcctggtttcacacaaatttttggtttaacccttttaagagc

SEQ ID NO: 100259 - DNA, 438 bp, Homo sapiens
  misc_feature (1)...(438): n = a,t,c or g
ctgtagccttgacctcctgggctcaagtgatcctcccaagtagctgggactggaggcgtgcatcgctatgcttggctaattttttattttttgtggagatggggtatcctcgtgttgcccgggctggtctcaaattcctgggctctgatccctctgcctcccaaagtgctggggttacaggtgtgagcaggccaggcagatttcttattagaactgttttatgaccaaactttttgtttctggcatgtgttaggagtatgtcactccccactggtgtgcagcaggtaaccccttctctcaccagccttcaaacaatgaaagccagtccgtctcaatcttttgaaaggactagactatcacatattcacacatgaaagagcaaattgttaattaaaattataaattctattaactgtattcaatacatacaaaaaggcn

SEQ ID NO: 100260 - DNA, 406 bp, Homo sapiens
atttgataaagggaagatttttgtgaaactgttaaggaaagacagtagccatcaccttgtgtattagagccagagttactctttgaaagactgtattctgtataatatctacaattaaaatttttaaactttttttgaggccaggcgaggtggcctgattacaggcacgagcctgtaatcccagcactttgggaggctgaggcaggcagatcacatgagcccaggagttcgagacttgcctggccaacatagactctgtttctacaaggaatacaataattatctgggtggggtggctggcgctctgactgaagctgaagtgagaggattgcttgatgagccctggaggtcaaggctgcaatgagctaaaatcaagccactgcgttccagcctgggcataagagcg

SEQ ID NO: 100261 - DNA, 456 bp, Homo sapiens
  misc_feature (1)...(456): n = a,t,c or g
ngggggggccgtatgnatcancnnnntgaggnaaggaacagccacgcgttctgtgacagactgacacatttatttatatatatattgagagagagcagatgtaattcacttagctggggggggcacgggctgaccttcataggtgcgcagactcacgccacagatataggggacagtctcatcttttcaggcagacagcagacaggatcacacacacactgcctgctcacaaaagccatgcactcagccacacacaatcatacacagccacacacacacagtcacactttctcactccatcctgtacttgtgtgatcaattaacactggtgcacacacagcctcacacaaccacacactcacagccacaaacccccagagtcatgcacatgccgacgcaccttgtggcacatgcacacacaaccacacttgtgtgcaaagtggcagacacaacccn

SEQ ID NO: 100262 - DNA, 464 bp, Homo sapiens
  misc_feature (1)...(464): n = a,t,c or g
ggattgctnnaggttnnaaacctagggggcattgatgnctncgganancaannnngggncgaccacgcgtccgataccccttagcattcactcctccaatctcgccatatctcccaaccctaggcagccactaatgtactttctggctctctctgtttgcttattttggacatttcatataaatggaataatatcaaatattctttcattgagtgtaatgttttcaagtttccttcatgttgtagcatgtatcagtacctcatttctttttatggctgaatcatattccattggatagatataccaatattttgtttatccatttttcaattcgtggactaaataatgacaccttgtaacttctaatgacttcattttatttttcatctttctccactgagtaattccttcaccaaacatttatttagaagctagaaaatgttaagtgctgtgttagccaccag

SEQ ID NO: 100263 - DNA, 419 bp, Homo sapiens
  misc_feature (1)...(419): n = a,t,c or g
aaactctattcctattacgctgcaagttcccatttcccctcttctccaggccctggttaggacagctctacattctgtctctatgaattctactattctaggtaccttatataagtggaattgtaaatatttgtctttttgtgacttatttcatttagcgtaatatcctcattgtagcatatgaaagggcttccttccttttttgaaactgaacaatattccaccatatgcgtataacacattttgttcatccattcgtctatctatggacacttgggttgctttcacttttaactatcatgaataatattactatgagcatgggtgtacaaacatcttttatgtggagctcttttgttcttctgtttttaacaggtcatatcagaatatcccatgagccatcatcatgtctcctctcn

SEQ ID NO: 100264 - DNA, 610 bp, Homo sapiens
gtctgcagcctgggcaacagagcaagaccccattgcaaagaaaaaagaaacctgctgtctcatgacaagatcttgccatgaacaaaaaaaaagaaaagaagcccactttaaacataaaaacacaaaagggatggagaaagatagtaatccaaagaaagcggaaatatcttactactttagacacaaaacataacagatcttgaggtgtatgggcctaacaacagcatcaaaatatgtgaggttggccaggcacagtggctaacacctgtaatcccagcactttgggaggccaaggcgggcagatcacttgaggtcaggagttcaagaccagcctggccaacacagtgaaacccccatctctactacaaatacaaaaattacccgagcgtggtggcatgcacctctaatcccagctactagggaggctgaggcacaagaatcacttgaacctgggaggcggaggttgtggtgagctgacattgggccaccgcactccagtctgggtgagagagggagacactgtctccaaaaaaaccaaaagctgaaagaaaatcacaaggaacaattctgaaaacaactcatatgtctacaaagtacttacagtgaacaa

SEQ ID NO: 100265 - DNA, 423 bp, Homo sapiens
attttggaaggacattacccctcttcctctttaattcatccaagtcatgcattttctaccttaatttgaccaaaaaaaaccacttagatttgatttctaaaactatcgacctgagactgggcgtgaggtttcatatttgcaatcctagcactctaggaggccaaggcaggaggattgcttgagcttaggagttcaaaaccagcttggacaccatagcgagtacccctatctgctaaatggaattttaaaattaataggacacgcgcagtgtctcatgcctgtaatcctggcactttggaaggccgaggcaggaagattacttgagctcaggagttcaagaccagccagtacaacatagtcagaccctcatctctaaaaaaaaatatgttatatttgaaacatttaactccccacctatgagag

SEQ ID NO: 100266 - DNA, 406 bp, Homo sapiens
aaaatgtatcgattataatagcagaaattttacctggctgcccaccccaatttgagttttcctctaagagttagccactattatcccttcagagtggatattcaggcttttctttcctggcatggacatacatatgtaaatgtacatatataaaaataattagtgacaccatgcatggtagctcacgcctgtaatcccagcactttgggacgctggggtgagagaattgcttgaggccatcagtttgaggctgcagtgatctgtgattgtgcctctacactccagcctgggtgacagggtgagaccctgtctcttaaaaaaaaattcgtatttggggttagtagtagcacctacctcataggttattatgggatcagtacaggaggccagacaaagtgcgtatgct

SEQ ID NO: 100267 - DNA, 1231 bp, Homo sapiens
ggagccctggctgtcccctctccctcagtccttcctgactgtctccagctgggaggtggtctctgtgtgccactcctctgtgtctctattacagttgtgtctctctcatcctgtctctttttcccttgtttctctgttcctgttaatgtgtttctccccatggtcctatttctctcactctgacctctctctcttagtcccctttagctgtcttctatccccagctcctaactgggactctgtgtctatgcagggggccagcacccctgggttatctggggctaagggaagggacttcatttccaggggccacagccaagcccagagtcccccagcggctcgcatgtcagcccagaccccagggtccttggcctaggagaggagcagtggaggggcccaggctctgagctccacaggtctgagcagggagcaactcaggcccccacccaagcctgcgtcagcggaacttgagtgaggggcgttgtgcaatttgtggcaaggctggcccagctggatgcctgggtcccagtatttttagccccaaaggagaagtgaaaaggccccagccggggtgaatcatcagtcctggggaagaacccaggcgcctgagccccagctccgggaagcaggcactggggagggggcttcaaggagggagtgccccctcagactccctgcttccctggaagcttcaggaagctcagcctcagccttcaggcctgagcaagtgcagggcggagctaccagcccaggctcagatgttggggtgtgaaagcctcaagtgactcagcctggttggagaactgccccacccagtatcttctgtgccatggttcccacattcgcactccatggcctcctgtcctggaccccacgtctgcaaggaaaccctaggaccatggatacctctgtgattcacgctgagcccaagtccccacactggaaaactgggaaatggccagctgtgtgtcccaggaaattcctccccttattcttccttgaagtgcccgagcatgtagggcaagaaggaaggctgaagcgctgtccctaggaggaatttctccttcaggggagcctcagttttgcccatttatctaattgaatcagttttttacccaatcccccgattttgaaggataatctcccttatctaaagccactttttgagggttttatcccctttaaaaaatcttttctgtggaaaggttaaagggttgttaaaatacggggg

SEQ ID NO: 100268 - DNA, 404 bp, Homo sapiens
  misc_feature (1)...(404): n = a,t,c or g
agaggctgggactataggcgcccgctaccacgcctggctaatgttttgtatttttagtagagatggggtttcaccgtgttggccaggatggtctctatctcctgaccttgtgatcctcccagagtgctgggattacaggtgtgagccaccgcgcccggctccagcccccaattttttaatgttactgatttctaacttcattcctttgtggncagagaacatagtttgtatttctgttcttttaaaatttttgaggtttgttttattatctggtatgtggtctggtctttcctggtggatgtaccatgtgtgcttgagaatatatattctcctgttgttgggtggagtgttctatagggagtataaattctatagtggtccatagacacctcttagtgtggtgg

SEQ ID NO: 100269 - DNA, 269 bp, Homo sapiens
  misc_feature (1)...(269): n = a,t,c or g
aaaaaagtgaacaccttgagcgagaacccataatagaacaacttagcanaatgttctttatgctaagtacgggtggcatcttcgtggacattagcacagatgtcagaagaaaccggaacctccagaagacagatgatattgaggttcttggggaattaaagagaaatattaccctctgcctcatttgccattggagacagtgcaatctggtgtatgcactaataataataataacatgtcttttcatattttaaaaaaaaacacaaaat

SEQ ID NO: 100270 - DNA, 426 bp, Homo sapiens
  misc_feature (1)...(426): n = a,t,c or g
cccacgcgtccggatccccacctccaaatatctcatcaacaaccgactaatcaccacccaacagagaaaaaaaaaaaaaaaaaaaaaaaaaagggggggggggtttaaaagaaaaaatttttttccccccgggggggggaaaaattttttttttttttggcccccaaaaaatattttggggggggggttttttaaaagggggggggggaaaaaaaggggggggaaccaaaattttttctgtgggaaaaacannnnnagggnngnnnnnnnnnatgtggnngagccttttgatattttgtggccttcaccatccttccttggggtgcgagatctttattcttttgaattcattttgcgcccttttttgatggaataattttatatagggatttggttggctcgccatttaagtcgcttttggggatg

SEQ ID NO: 100271 - DNA, 423 bp, Homo sapiens
  misc_feature (1)...(423): n = a,t,c or g
cggacgcgtgggttgaaaaagaattttaatgattctaaaaagaacctcttattagaatcattaaaattctttttcaagagatgctatcaaaaaatataaagttgtcataagaggttctttttcttttttccatttccttgacaaatagtactcatttaaaaactagagggctaggcttagtggctcacgcctgtaatctcagcactttgggaggctgaggcgggcagatcgcttgaggtcaggagttcaagaccagcccgggcaacgtggtgaaacccggtctgtactatnnaaaaaaaaaggaataggaaaaggaaaaaggattccccggggggggaagggcttgcctganaccccaattatcttggaaactggggggggaagccccctttgaccctggaaggcccaggttgcaagaaacaa

SEQ ID NO: 100272 - DNA, 1315 bp, Homo sapiens
taacttaatcttgtggtgcccattctggtgctgggtccagtccctaactgaaggcaggcccacatagcagtccctgattctcaccacttgaggagttagtgggtcccaggctgattgggtgacagaagggggcggcagagagcagtggcccttggactctcctagggagggagcaagaacttctaggtaggctgatgccaaggatctctaaacttgggatcagactggaggagccaaaagttggggtatgaactgtaggaaaggtcgccaacccaagtcgctcctctgtggcaggcagcttctaggaatctccccctcttaccatttacagcctgcatcctacacctctgcttaaaatgttttagatatactcccagcagagaagattcttcagacagctggcaaagtcctcgctccgaggaagggagtaacaggcaggattatttagttctcttcatataggcgactcacagtatgggtttttgggggttgggattgggggagacagccattgatagtaacaggaggcctgacactgatgaggggctttgacgtggaagggcacccttccagggagggacgccctgtcagtacggaacagagcccgtgtggggaggggcgctcggctcgaatggcgacagcggcggcagagtcaggaggtcagtacggtgggcttcggtttaaatctttaatgcactggctggctgggcagcggcggtggggctgcggcgggggaagccacgacccgagcgctggggagtaggacccaggccgctggacagacagctcatcaggcctcgcagaggctccgagcttctgctccccggggtgcgccgagctccgctccctccgccacatgcgaagccaggggaaaaagtagaaacagccccagtagatctcctcctccgcctccagcgccacctcgtatctcctcattcccgacatgtcctgggctccgaacgtctcctggggagcggcatgattgaatcagggattccctagccccaggtccccttctccgtcattctcaggacgaggctgcccagttctcaggtaatctgaggctgatgcccccgagaagcctcagttgccaccacgggacacgggtgggcttggagatttgggaggcactggaagttaaggggtgaggaggccggtcatctcctgggcctggggcatttagggggccagggcgagaggtttggcggtcatggggctgggagatttggggccctgggtgaggattttcaggggctggggtcacctggagggggggctgagaggggtcagcgcagcctaaactcccgccctccct

SEQ ID NO: 100273 - DNA, 426 bp, Homo sapiens
  misc_feature (1)...(426): n = a,t,c or g
cagctggtttttcgtattttttgtggggatggcgtctcaccctgttgcccaggctggtctcagactcctgggctcaagcgatccgcccaccttggcctcccagggtgctgggattacaagcgtgagccaccaagcctggcccagccatcctgttgagggacaactgggttgtttctagtttgggggtatcataaataaaactgctgtgaaggattttttacatgctgcttggtacacatgttcactcatctactcaggcgtggaatcatagagtaggcatatgtttagcttgtctagacactgccaaacagttttccaaagtggctctattgacttacatcctcaccagcagtgtgtgggagcttcaacagcttccacggcttggttagcactgggnggtgtcagttttttaatnatgcccattcg

SEQ ID NO: 100274 - DNA, 446 bp, Homo sapiens
  misc_feature (1)...(446): n = a,t,c or g
atcatggctcactgcagcctcaacctcccaggctcaagcgatcctcccgcctcagcctaccaagtagtggggaccacaggtgcatgccagctaattttttttttttaaaagatgatgtctccttgttgcccaggctgatctcaaactcctggactcaagcaatcctcctatctttgcctaccaaggggctggaattataggcttaagccactgctcctggcgctgatctcaaactcctggactcaagcaatcctcctatctctgcctaccaaagggctaaaattataggcttaagccactgctcctggcgtcatacttcttaaattaaaaaaaaagggcttattctaagggtaagcgcgaggacaaaaactgggcatctttgaagaaggggcgctagtaaggattatggtgggaagaaataaaaatctgaagggatcttgcttaan

SEQ ID NO: 100275 - DNA, 443 bp, Homo sapiens
  misc_feature (1)...(443): n = a,t,c or g
gacgaccnnnaacaccccccgggtcgacccacgcgtccggtgcaccaccatgcctggctaatataaaatttaattattttgtagagactgcccaggctgttctggaactcctggcctcaagtgatcctcttgccttggccctctaaggtgttgggattacaggtgtgggccactgtgcccagcccttttctcatttttgatagggatatagacagagaaatatagatagcgtgatgataaatcatagctgatatccagcagactgtagaggatcaaaaaggattggtggaggggatgtggtgaagtgggaagcattttacatttacctgcaaaagacagtatatggcaactaccacctagctccaggcatttgctgctaaataggtttgttgcaccagcattgctggatcttcaggtatttcaagaaaagctgaaatccagat

SEQ ID NO: 100276 - DNA, 419 bp, Homo sapiens
ggagacgaagtggaagggggtacaagaagcaaccactgatgtgatttctaccaaatccagttttggtcctactaaatatactcttttgagactggcctcttttactcaccataatgcctttgtaattcatccatgctgttgtgtgtatcagcagtttgttccttttcattgctgagtagtattctattgtagagatgtaccacagtttgtttattcttctgttgatggacgtttgggttgtttctaattttgaatgattataaataaaaattctgtgagtgttcttgtacctaaaaaaaaaaaaaaaggggcggccgttttaaaggatccaattttacgtccgcgggcttgcgaggtaatagtttttttatagggccaccataaataattccccgggccgcggtttaacaacggaggat

SEQ ID NO: 100277 - DNA, 409 bp, Homo sapiens
  misc_feature (1)...(409): n = a,t,c or g
agtgagcccagatcatgccactgcactccagcttgggctaccgagtgagactccgtctcanagaaaaaaaaaaaaaaaaaaaaanggnnntccccctggggggccccccttaaaaaccctttttttttgggggggggggaaaaaattttttttttttttttggggaaaaaaagaatttcctttgggggggtttttttttggggggggggggggggggggccctttttttttctttttttttggggnnaaaaannnnaagggggggccttaataagggggcccttttttttgggccccttggggggggggccctccttttttttatacaatatttccggggggggggttaaagaccttttggttttccttttctgggggggaaaaacccgggggggtgtttccccttggg

SEQ ID NO: 100278 - DNA, 405 bp, Homo sapiens
ataaagtctaactctccaaagatttcactcttagttacatgtgttacttttgacaggctttttttttaaaaaaaaaaaacatttggatggcatttacttatggcggaaaaaaaaaaccaccaaaacccccctttaaggggcggttaattccatcgggggaaatttttttttttccttaaaaatccccaccaagggaacccttaaaaatcacctcctagtccgggggggccccccctaatcggaaaattggaaatcggaggggccccaaaacccaaaaattggcccccccccttggggccaaagggggaaaaccccccccttgccctagggggaggggggggggccaaaaaccacccccccaatccccagtttattctcctttttttggggggaaaaaacccctcc

SEQ ID NO: 100279 - DNA, 393 bp, Homo sapiens
atcacggctcactgcagcattgacctcctgggttcaagtcatcctctagcctcagcctcccaagtagctgggaccatgggcatgtgcaaccacgtccagctatttttttttttttttaattttggaaaaaaggggggtttcacctggattcccaggggggccagaaactccggggctaaagggccttgacctgctttgacctcccaaagggctgggattactggcatgagctacaacaccgggcttttttacttttaaaaataaaaaaaaaaaaaaagcttgcctgggggggttaagcctcaatcccaaaaattttggggggggggggggggcggaaccccctggggtaaaaattaaaaacccccctggccaaaaagaaaaaaaaccgttttt

SEQ ID NO: 100280 - DNA, 388 bp, Homo sapiens
cgagtgatctgtctgcctcggcctcccaagtgctgggattacaggtatgagccaccacacctggcctgactggcttttttatgccaaataatattccatcatatggattggatataccatgtatccattttagtagttgatggatatttgggttgtttttactttttggctattattaataatgtctggttaggctggtctcgaactcctgacctcaggtgatccacccacctcagcctctcagagtgctggaattacaggcgtgagccactgcacccatccatattgctatacattcttaacacgggagataactacccctaaggaggtgaaaattggtttgtgtatgtgagtaggtgtaaataatcttactggttgattgtttaaa

SEQ ID NO: 100281 - DNA, 372 bp, Homo sapiens
aattgaagcaattctattttttacagcaaacaaaaaaggaaaaaaacgaagacagtgaaaatgattggagtattaacattggtaagctgtgaaatgttaaatgtgaataatcctaccttttattcaaatttgaggtattgaatcaattacctttaaagcaaatactttaagattgtctagctaggcgagctgactcatacttgtaatcccagcactttgggagactgaggtgggagggttgcttgagcacaagagtttgagaccagcctggacaacatagtgagatctcatctctacaaaataataaaaataaaaatcttaaaaaatagcatatgtcatggcatgaacctgtagtcccagctacttgggagg

SEQ ID NO: 100282 - DNA, 369 bp, Homo sapiens
caacaacaaatcaactgggagtggtggtgtgggcttgtagtcttagtgtcttgggaggctggggtgagagtattgcttgaacccaggagttcttggttacagtgagatatgatcatgccactgcattccaacctggacaacaaaacaagaccctgtctgtaaaaaacagaacaaaaaactgttgtgcttatcagtagtaggatcgtgtctgtgaacaggcaccgcactgtagcctgcatgacttcatctctatttaaaaaaatagataggccgggcacggtggctcacgcctgtaatcccagcactttgggaggccgaggctggtggatcacgaggtcaggagatcgagaccattctggctaacatggg

SEQ ID NO: 100283 - DNA, 382 bp, Homo sapiens
ggtacttgtgattcctgagcagctggaactacagatgtgtgccaccacacctggctaattaaaaaaaaaatttttttttttatacagacaggatcttgctgtgttgcctgggctggtttccaactcctgaactcaagcagtcctcccacttcagcctcccaaagtgttgggattacaggcctgagccactgcactgggcagggtggggcctttaaaaggtaattaggtcagctgggcgagggggctcactcctgtaatctcagcactttgggaagccaaagggggggatctcaggtggatcacctgagatcaggagtttgcgaccagcccaaccaacgtggtgaaacccccgctttactaaaagtacaaaaattagcggggg

SEQ ID NO: 100284 - DNA, 400 bp, Homo sapiens
attttaaacacggaagtatagtcacgaactaccatgtacctatcaatcagatttaactactgtaacagttcatggctagcgttacttctgtttcccctttcagatgatttcgaagcaaatcttggacatcattttactcataaatatttttgtatataccttaaaacgataaggattgttttaaaaaaagcttatccaagatatgtgtaagagataggaaaaaccaagttgtttcctatcctctcacactcctctcagcactttgggggaccaaggtgggaggatcacttgatcccaggagtttgagacaaacctgggctaacacagtgagatcccgttcaaagaatcttataaaaattagctgggcatggcggcgcacacctgtagtcccaactacttg

SEQ ID NO: 100285 - DNA, 532 bp, Homo sapiens
caaaattcggcacgaggatggctgttcccatttcatacttttaaggaaaggattttggctggcagaaggcacttcccccctccagctggagggaagaagtatacagagatctagaacttgaaagtgcattgtgaacatggaacagcaaggggtttcgtgctgctgagaggtagtctgggtttagctgaagagggaacacaggtttgctcctcatttgttcagtcaagaagtattgacctggcgcggtggcccacacctgtaatcccaacactgggaggcctaagtaggcagatcacttgagtccaggagttcgagaccagcctgggcaacatggcgaaaccccgtctctacaaaaaaaatgtaaaaaattagctgggcctggtggcacttatctgtagtcccagctactcaggaggctgagatgggaaggtcttgccttgagcctggaggcggagattgcagtgagccgagatcacgccactgccctccagcctgggtgacacctgggtgacagcaagatcctatctcaaaa

SEQ ID NO: 100286 - DNA, 683 bp, Homo sapiens
caccatgcctggctaattttttttattttttgtagagacaggaactcactatgctgcctagtgcggtctcagactcctgggttcaagtgctcttcctgtctagacctcctgaagtgctgggattataggcatgagccactgcacctgccccaaataacccttcttaagacagagtctcactcttgttgcccaggctggagtgcaatggcatgatctcggctcattacaacctctgcctcccggattcatgtgattcttctgcctcagcatccagagtagctgggactacaggcgcacgtcaccacgcccggctaatttttgtatttttagtagagatgaggttttgccatgttggccaggctggtcttgaactcctgacctcaggtgatcctcccaccagggcctcccaaagtgtgagattacagatctgagccaccaccttcagcctagagctgtttttaatgttttagttgttgttttctctttggtattaaatatagtaaattgaacagtatgcactcaataagcaaagcctgaatgaatgatacagtggagatgaatattacaagctattgtaggaaaactgctttatgaggcttgaactattgcttgatgaatgtcaatataaatgaataagtggtaatgacaccaaatctcagatcttcgtatcataaaaatgcttg

SEQ ID NO: 100287 - DNA, 377 bp, Homo sapiens
ctttggtttttgtatcagggtaatgctgggattacaggcataagccatcgtgcccagccaaatagttttgttttttttaaagacagggtcctactctgttgtccaggctggagtgcagtggcaacactccagtctcactgtagccttgacctcccaggctcaggtgatcttcctacctcagcctcctgggtagctgggtaatttctgtatttttagtagggatggggtttcgccatgatgcctaggctgatctcaaactcctgggctcaagtgatccgcccaccttgacgggattgcagggatgaaccacctcgcccagcctaaatagtcttttttcttacatgaaagactgtttccttgtgctgtgtccaaactgg

SEQ ID NO: 100288 - DNA, 412 bp, Homo sapiens
caaaaaaccccgcacagtaagtggaataacaaatacaacagcagcaaaacaatagagtgaaattttgctggataccccacccctgagcctgaggtgtgctctcttgtgaaagagctgttcgggctggacgtggtgattcttgcctgtaatcccagcacttagggaggctgaggcaggattgctttagcccagttgttcaagcccatttgggcaacgtggtaaaaccccgtctctactaaaatacaaaaaaaaagaaaaaaaaaagccaggtgtggcagcatgctcctgtagtcccagctactctggaggctgagacaggagaactgcttgaactcaggaggtggaggttgcagtgagccaagattgtgccactgcactccagcctggctacagagcaagactccatctcaaa

SEQ ID NO: 100289 - DNA, 393 bp, Homo sapiens
ggtggatagaagaggagggttggtcttgctgtctcaaggtggcagaggtataagaaaaactgcatataagtgggcccatgcagttcaaacccagttgttaagggtcaagtgtattttctcatattttgtgggttgtcttttcattttcttgatgttgttttttaaagcataaaagtttttaaagttttgatgaagaccatttgatcttttattttctcttggtgcttatagatttgggggcatatctaagaatcctttgataaatctgaagctatgaagatttacccctgtgttttctcctaagaattatatattcttagctgtaacagataggtttttgatacattgttaattcacttttgcatatggtgtgaggtaagggtacaacttctg

SEQ ID NO: 100290 - DNA, 494 bp, Homo sapiens
cttactctgcagtaagctataatcatgccactgaactttagcatggactacagagtaagactgtctaaaaaaagaaaaaaaagaaaaagaagctttttgcccactgttgcagttaactggcaaacttgtgtaataaattaactaacagaactggtttagcaacaaatgagatgcacaaggtctttaaattataaccctaggtatgttggtgatttgaaaggtgacctaacagcatttaaagtaagttatattttatatttatggggctttcaaaaccacagtcaaaaataagaacccaagcctgagtaacatggcaaaaccccatctgtacagaaaacacaaaaattagccaggcgtggtggtgcacacctgtagtcccagctgctaaggaagctgatgtgagaggattgtttcagctcaggaggcagaaggtacagtgagccgagatcatgccactgcactcgagcctggacagcagagtgagaccctgcctt

SEQ ID NO: 100291 - DNA, 380 bp, Homo sapiens
aagaccaacctgggtaacatggcaaaaccctgcctctacaaaaaaaaaaaaaaattttttttttttcaaaacaaagtctcccactgtcccccaggctggagggcaggggggcaatttgggctaacggaaatttttgcctccggggctaaagcgattttccggcctaaaaaggccggaagccccaaaggggcaaagttgttctctgatgggcggaggtctttgccccctgctccccccctgagcgggacccccccccaaagaaattgactgaaggggggggttctccagggggaaataaggaagggttaacattattgggccctaatttttaacctttccccctacccatgccttgggccatgaaatttggcagggccctc

SEQ ID NO: 100292 - DNA, 380 bp, Homo sapiens
ggattttaaacaaattatacaagccaaaaaacaaacaaccccattaaaaaagtgagcaaaggacggtcaggtgcagtggctcatgcctgctggtcttgaactcctgtcctcaggtgacctgtccccctgcacctcccaaagtgctgggatcacaggtgtgagccaccgtgcctagccatttttttcctaattaatttgtgacccagaaaatcctgtttaaaatctgccatctagtgtgggatttgtaaaatgacaaatcactggacacaatcatgtgtttacactaaggcttcactcctggacaccaggtttaaaacttctcagcatcaaataacattatccagtaaagtagcattaaatgtggttacccatttggtttt

SEQ ID NO: 100293 - DNA, 414 bp, Homo sapiens
  misc_feature (1)...(414): n = a,t,c or g
cagattaatgcatttatttggtaggttttataatggctctatttcttgagtttgtatatatttgagaattatgttataaatatgttattatttcattgtctttgctatctatttgaaccaattttttagtaattgttaccgctcttttactttttttttttgtccctttgaaacggagtctcgctccgccgcccaggctggagggcanaaccccancctaantttattgcaccctccccctttgggaataaagcagttttcctgcctcaccctcccgagtagctgaggccaggagttaaaaaccaccctgcccaacatggggaaactccgtctttgttgggatatacaaaaataaactgggcggggggggggccataaggagggtgcaaacctgtaatcaaacctattcgggag

SEQ ID NO: 100294 - DNA, 416 bp, Homo sapiens
gagtctctcctttaaaaaaataaaatggttttacttgcctttaaaatgctcaatttaaaaaatagtaaaacgtagaaaagagaaataatattcataatatcaaaaaaacacctgtttactttaaagggttcctactgtattgctgcaaagctgaagtcttctacgtattagataatccttttattttttattttttattttatttttttgagactcactgtgtcgctcaggctggagtgcagtggcacaatctcaggtcactgcagccttcacatcctagattcaagtgattacaggtgtgcgccaccacacctggctaatttttgtagagacggggtttcgccatgttggccaagctggcttgagctcctggcctcaagttgatccacccgccttggtctcccaaagtgcttgaa

SEQ ID NO: 100295 - DNA, 372 bp, Homo sapiens
gttgggcaggctggtctcaaactcctgacctcaggtgatccacccgcctcggccttccaaagttctgggattacaggcgtgagccaccgtgcctggcccctctgtggttactttctctggtgaagtcaaacccctcaaagtcatccatgatgattggagtcaacttttttcaaactcctctaaatgttgacatattgacctcttctcaatgaatcactaatgttcctaatggcatctaggatggttaatcctttccaaaaggttttcagtttactttattcagatctatctgaagaattactttttgtagaagctacagccttgcaaaaagtatttctgaaataataaaacttgaaagtcagttgggcatgg

SEQ ID NO: 100296 - DNA, 380 bp, Homo sapiens
cctgggactgaggtatgaaaactgctttaacccatgaggcggagggtggaacactgagctgagatcatgccactggatgccagcctgggcaacaagagcaaaactccatctcgaaaaaataacaaaataaaaaataaataaaaactaaaaaggactcaccattctagatgccattaagaacatttgtgattcatgggaggaggtcaacatatcaacacaacaggagtttggaagaagctcaaaccctgatagatggctctgaggggttcaagatttcagtggaagaaggaaatgcaggtgtggtggaaatagcaagagagctagaaatagaagtaggcctgaatatgtgactaaactgcttcaatctcataagaagactg

SEQ ID NO: 100297 - DNA, 579 bp, Homo sapiens
  misc_feature (1)...(579): n = a,t,c or g
gcctgggttgaatctatttactttaaaaaactcagttcatgcatcttcttctctattaggtcttctgtgacttctctttgctttgccctatttccagttcgacttagataaccctcctctatattcccttaatactttattgtgctatactataactgttcatacattgacatattccccttcaatatacgtcttgttggcacagatactgactttttcacactgttaactttaaaccctatcagaggctgggcgcggtggctcacgcctgtaatcccagcactttnggaggccgaggtgggtgaatcacttgaggccaggagtttgagaccagcctagccaacatggtgatatcctctctctactaaaaatacaaaaaaattagccgagcatggtggtgcatgtctgaaatcccagctacttgggaggctgaggcaagagaatcgcttgaacccagggagacagaggttgcagtgagccangattgtgctgctgcantgccagcctngggcgatagagacttgtcttcaacatcaacaancagcancaaactattnttcagggnattgttttggttac

SEQ ID NO: 100298 - DNA, 392 bp, Homo sapiens
aatacactgggtgcaaaaaggtttgaaagtcattgtactatcaataatgttcacagcaacactataaaatagcaattacttggcagcaacctaaatgttcctaaatagcagtctaagttgtggtaaagacaacaatggaatattaacaagaccacgaaaaggagtaaggtatagctacatgcaacaatatgttaattttaagaacataattacaagttttatgaagtatatttaaagcttgaaactatacaaaactacagctggggcaggagaatcacttgaacccaggagctggagggtaaggcaggagaatcacttgaacccaggttgcagtgagccgagacagtgccactgcactccagccctggtgacaaagactctgtctcaaaaaa

SEQ ID NO: 100299 - DNA, 449 bp, Homo sapiens
  misc_feature (1)...(449): n = a,t,c or g
gtatttaaaaaagtaagccatgcaactgagataaaagtcaaagttatagattataactgtttgcacaactgttcacatttttaactttttttattttttggagactttttaagagtctcactgtgtcatccaggctggaatacacagtggcactatcatggctcaccacacccttaaactgcagggctcaagcaatcctcctgcctcagcccccccaagtagctgggaccacagatgtggaccaccacccctggctacttttttaaaaatttttttgtagagacaatgggctcactatgtttcccaagctagagacaatggcctcattatgtttcccaggctggtcttcgaactcctgggcctcaagcgattcctcctgcctcagccttcctgaagtcctagggttnacatggcatggagntaccacacccagcccnggttcacatttt

SEQ ID NO: 100300 - DNA, 387 bp, Homo sapiens
gtttgtagacaagctgcatttatatacatttaacaggattttggttttctttctttctttcttctttttttttttgaaaagggccttggtggcccaacctgcagggcagggccagaatctaatttaatggaaaggggggcctccggggttaaagcaattctccggcctaacccttccaagaaccgggaataacgggcgggcatcacggtcccgggcaaagttttggaattaaaagggaaaaggggggcccccaggtcccccagttgaacttgaaacttttaccctaaggggacccccccatttaagctccccaaagggcaaaaataacggggggggcccaaaaccggatttttttaaaaaagtaggaaaaaaagcccccaatcctag

SEQ ID NO: 100301 - DNA, 706 bp, Homo sapiens
atccaggcatggtggtacacaccagtagtcccagctacttgggaagcttaggcgggagggttacgttgaacccaggaggtcaaggcttcagtaagcagtgattgtggtactacattcctgtctgggtgacagagtgagaccctgtctcaacaacaaaaaaggatcttttccacctcagcctctctggtagctaggactacaggcacacagcactatgcccagctaataaaaaataataattttttatagaggtggggtccgctatattttccaggctagtcccaatctcatagcttcaagcagtcgtccagccttgacctctcaaaatgctgggattacaggtgtaagccaccgtgccctgcccatgataaatattttaattttgcctgataagtcataaaaagtttattcaacaccttaaatagatttctcaattttttaaaaatattaaacctttgaaatcgaaagtaatttttggatttcacccctttattgcaaggtttttgatgtctgtgggaaaaacccctgaattgcttgtgaaactctggatatgtaattttttttctttttctgaacagagtaaaatcttggatgggccatgatccaaaaatcatggttttgaaagtagaccgtactataagccataatcacaaatctgaggtaatagttgtgaaagtgtttaaaacatcctgaaaacaatgttgaa

SEQ ID NO: 100302 - DNA, 377 bp, Homo sapiens
atctaggattctctgaagataccttatattgtttgggctttggaaatgtaaatgttttatacatttttaaaacttaaagaggaaaatatatcagttaaatatttaggttgacattgttaggaaccaaggtttttaacaaatgagaaaaaaagccgggtgcggtggttcgtgcctgtaatcccaacactttggaaggctgaggtgggaggatcacttgagctcaggagtttgagaccaacctgggcaacatagccagacctcactctactaaaaaaaaaaggaaccggaacaaaccaatttcgggggcatgggggcactggtctgtagtcccagctgcttggaaggttgaggtgggaggattgcttaaggccgaggct

SEQ ID NO: 100303 - DNA, 360 bp, Homo sapiens
taccaataagagataggatccatagttagtgtgacattatagcctgtgattatctgttttggtggttacactgccacttccctttcatgtagcaccaagccatcttctcaactcagtggggatggtgtaagagaaaagttagcagctggtaagaaattcggtttgggtctgatgacagaaatagctcaaaaaataactttgctgagaggcaatcacatgttcacatcaagaaattaatatcacagcctgggcaacacacaagagcttgtctctattaataataaaaataggccaggtgtggaggctcatgcctgtaatcccagctctttgggaggccgaggcaggaggatcacatgaggg

SEQ ID NO: 100304 - DNA, 369 bp, Homo sapiens
atttttcccatttttaaattgattgttttctttttttgtataggggatacaaatcctttatcagatatgtgttttgaaaatatttctcacactctatggattctgttttcattctcttaacagtacctttcacagagcataagggttttggtttaattttactaaagtccagtttctttttatggctaatattccatcatatggatataccacattttgtttattcatttatcacttgatggacacttgagttacttccttttggctattgtaaataatgttgttatgaacatttggtagaagttttttttttgaaacggagttttgcccttgttgcccaggctggagtgcaatctccgtgattctcct

SEQ ID NO: 100305 - DNA, 520 bp, Homo sapiens
cacacgcacacatgtatgaggagagagctagcagggggtgtgattttgaaagtcacaagagaaataaatgatttgaaaaaaatctctatgacaagaaactcctaattgggttttgaaaaagtctaaagaagtaagtaaactgaccactgtgattcttacttaaatggatacagttctttttgctttttaaaaaccaataattcttgtgaattagttatttttgagaaaaagtatcattttaagttggtataagtaacttggttaaatttgtcttatttaaatttataacttgcaggcacgtgcctgtaatcccagctacttgggaggctgaggcagaaggattgcatgagcccaggagtttgggaccaacctgggcaacatagtgagacccccgtctcaaaaaaaaataatttataacttaaacactattaattttaggaaagaaattttatagatattagcacttcaatttaattactattaaaataattcctttcttctgcaatatttctcacagggg

SEQ ID NO: 100306 - DNA, 428 bp, Homo sapiens
  misc_feature (1)...(428): n = a,t,c or g
acattttcttccttcaaggggtgctcataagtaagccatttatcatttatgtattacactacgtgttgaaatactctgaaaaaatttttttttttttttttgggggaggaactttcccccttccacccagaaaaaaaaaaaaaaagggtttttaaagggggggggggggggccccagccccctccaaaaaaaaaagggagggggttccttttcaaaaaaaatggggaaaaaaggggaaaggaaaaaggggtgaaaataaggggggggccccccccccccgggcgcttgggggtttttttttttgggggactcgccttaaaacccccaaaaaaaacgggggggggccggggccttaacacggggggggtttaaaatgggtgtaaaaaaccaaaacgggcttttttaaatgggggccccccaaaacccan

SEQ ID NO: 100307 - DNA, 413 bp, Homo sapiens
ggggtacgttcttgaccaaaacatccttatgtggcacattactatattaggttatatcatatatgtgtgtatagtttataagttgatacatacttagtttatattatatattttaaagatatatgtgtatattatatatgtatatattttatatatatacatgtgtgcatataagtgtatgtatgtatatgtacgtatgtatgtatgtatgtatgtataaagcctgaccagcaaacttgaaaacattctgtacacagaaacacctagcctggggctgggtgcaatggctcatatctgtaatctctgcactttgggaggctgaggcacgcgaatctcctgaggttgagaccaaccttgcccaacttgggccaaccctatctctaccaagaaaaaaaaaaaaaaaaaaaaagaaa

SEQ ID NO: 100308 - DNA, 406 bp, Homo sapiens
attaaccatccttaactttaaactaactgtgacttttcaacacaactttctttacattatcaggagatatgactatgtgcctgttgccattttattcattctctcattaagaaacccttttttgttatcttttcaaaattaattgggtaatcattagtcctcaaatcagaaataaaagcacaaggacataatacttcggtttacctggcagaggccagccgcagtcttcctggaggggatgttatgccggctctagttatcagacatgtgcctgagctacttaaaaaacagcattcttcagtcaggagttcgagaccagcctggccaatatggtgaaactccatctctactaaaaatacaaaaattagctgggcctggtggtgacacctgtagtcccagctactcg

SEQ ID NO: 100309 - DNA, 374 bp, Homo sapiens
gttttactatgttggccaggtgaactcctgacctcaggtgatccgcctggctcagcctctcaaagtgctgggattacaggcatgagccaccacgcccagcctgggtagacatgtttttaattctcttagttacatacctaggggtggaattgctgggtcatatgtaactctatgtttaacttcttgaggaactaccaaattgttttctgcagtagttgcgtcattttacatccccaccactaatatatacaagctttaatttctctacatctttgccacccttattattttctgtcttttttattacaatcaacccagtgggtataaaggggtatttcattgtagttttgatttgcatttctctgatgactgag

SEQ ID NO: 100310 - DNA, 390 bp, Homo sapiens
gattttttgtagcgccaccattatctaattccagaacatttccatggccccaaaaagtaacctcatgcctatgaacagtcactccccactccccctttccctcttgcccccagcaaccactcatccgctttctgtctctggatttgcctgttctggatgcttcatccaaatggagtctttggtgactggcctcttttacttagcatcaggttttcaaggtttatccatccatgttgaagaatgtagcaggacctcattcctctttatggctgagtaatcatccattgtgtgggtatatgaccacattagatttgtccatttatctgggttgttttggctactatgaataatgctgctgggaacattcatgtgcacgtttctgagattctg

SEQ ID NO: 100311 - DNA, 380 bp, Homo sapiens
  misc_feature (1)...(380): n = a,t,c or g
aggcgaggcccactcccatcatgaaaggtaggtcccttgactcgaaatctactcatttaaatgggaagtgcatctaaaaaattcctttacagcaacatctaaagtatcccttcctctccacacatacgacactgtaagctgttgacacaaactactaaccatgaagctaggcatgggggctcatgcctataatcccagcgctttgggaggcccaggcagaactatcgcttgagaccaggaattcgagagcaacctaagcaaaatggtgagaccctgtctgtacaaagaaatggatcaatcaataaaacgtggtggtgctatttgacaagctgaggcaggaggattgcttgagcccaggagtttgaggctgcagtgagctn

SEQ ID NO: 100312 - DNA, 375 bp, Homo sapiens
gcaaagatcacttgagcacagaccatgcaagaaatgttgggtttggtggtataggtatcttgaaaagtgcaataccttgtatacaaggaatcctcttcttttaagaatttactcagaagaatacattgtaactttttgttctcagggattgtttttcacttttaaaaattactgaggactccaaggagcttttgtttatgtgggttacatatacccatcaactttaccatattttaaattaaaattgagaaatttaagaaatgctgaccgggcacgatggctcacccctataatcccagcactttgggaggcctaggtgggtggatcacctgaggtcaggatggtctagatctcttgacctcgtgatctgcctgc

SEQ ID NO: 100313 - DNA, 367 bp, Homo sapiens
tttgaatttctaaattataattattttgattgccccttcagtttcttagtgtgtgtcattgctggtcaatgaagcatactaacagaccaatctgagcagtaattgtccttgcataagcaagattttttttttttttgagggaagggagggattccaaaaaacctttaaggcggggaaggggggtttttgcctgaaaccccaccacttttgggaggccagggtgggaggataactcggggccaggagttaatgaccgccctggccaacaaagaaaaacctcgtctttgcaaaccaaattaaattaaattaaattaaaaactttaaaaaatcttgcccctatagccccaccgtgctaaaaagctggggg

SEQ ID NO: 100314 - DNA, 390 bp, Homo sapiens
  misc_feature (1)...(390): n = a,t,c or g
gcgttatttttcaagatttaagaagaaaacaggtgggcacagcagctcatcatacctggaatcccagaactttgggaggtcaaggggggaggattgcttgagaccaagagtttgagactagcctaggcaacatagcgagtgtccgtctctcaaaaaaatttaaaaatatattggtctatatatcatatatatttatgtatagacacacatacatgtaagctaaacgtagtgggtgtgcagctgtactctcagttacttggaggctgaggggggagaattgcttaagcctgggacatttgggctgcagngatgataccactgcactccagcctgggcaacagagcaaaccttgctcaaaaaaaaaaaaaggggaacttttttatttgcccc

SEQ ID NO: 100315 - DNA, 343 bp, Homo sapiens
aactggaagtttaagccagagcaaccaggcaagaataaaaaataaatggcacctaaattataaagtataaaaaagtaaaacagtattcacaaaatgacatgatcctatatatacaaaatcccaaagattctgcaaaaaagttaccagagctggtaaacaaattcagcagcttcaaggtaaacaggcaaaattcagttgtgtttttataaaacagcaataagaaatcaaaaaggaaattaaaaaaaaattacatttacaatagcatcctaaagaataaaatacttaggaataaatttgaccaaagaggtaaaaaacctgggccgggcgcagtgggtcactgctg

SEQ ID NO: 100316 - DNA, 714 bp, Homo sapiens
gccatacttcccaaggtaatttatagattcaataccataccccctggcacccaccttcatcagaaagagtagaaagaatgaaccaaaccctaaaaagccatctaaccaaattagttttaaaaactcgattatcatggaccaagtgccttcctattgccttattaaaggtccgaactgtccctcagaaagaagttggcttatctccttgtgaaatgctgtataggctgccttactcacacttcactgttgacattcctacgtttgaaactaaaagtcagtttgtcaagagctatgtacttggtctctcttccactttctcttccctcaaagctaaaggctttttagtacagatgccacccttgggagttccccaggcacatcagccttcagcctgggggatgatgttctcatcagaagctgggaagaagggaaactcaaaccagcttgggaaggaccctatctcgtgcttctaaccaccaagactgcagtccaaacaacaacaaaaaaatgcagacccatcataccccagtcaaaaaagcatcgccatcttcaaagtcatgcgctattgttccgagaccaattcctaccaagctaaagataaaaaaaaaaaaagcttaaccctcttatagtgcctttttttctttcccctctctactgtcagacaattatcctttcctcacccaagtaacaaaaccaaagtggccgtcgtagagg

SEQ ID NO: 100317 - DNA, 551 bp, Homo sapiens
cagtggtgcgatccggtccactgcaacctccactttcccggggttcaagcgattcttctgcctcagcctcctgagtagctgggactacaggtgtacacaccatggcctagctaatttttgtatttttagtagagacggggtttcaccctattagccaggctggtctagaactcctgaccacatgatctgcccgccttggcctcccaaagtgctgggattacagctgtgagccatggcacctggccacacacgtctttttaaatttaaatgaggatgtggccatattacagcccaggttttctctgactttagagtaccttttgggacatagggccttcctctctaccctttctgtacacagccatcataaacctctttcaacaagcctttcctatttttatgttccttctttccatcatttacctagacctcattattgcacagctgagagtggcttgaaacaaaggcttggagaatgtgagtgaaactgattcctgtggtggagaggcagtgaaaaagcattaccttgtaggtttccaggcagcctggac

SEQ ID NO: 100318 - DNA, 690 bp, Homo sapiens
actgggtataacaatggaaaccattaaaaaggaaataggcaaataaccgaagggaaaattactgtggaatttcaaatgttgtgaaggaaggagataaaaagtggaatatacagttttattattttgaggattcaagggaaaattccccaccctacctctctacttgtccttttcttcatttttaaaaaatcacttgatttctaatttttttttaaacagggtcttgctctgttatccagattggagtgtagtgggatgattcacagctcactgcaacctcaacttatcttgcctcagcctcccaagtacctggggacagtaggtgtgtacccactggggcatggctaagatttatataaataaaatatccttccacctccgtctccctagtcattttttaatattgtgttgcgagttgtgtaaatggtggccaggatacaatttctaatcccccttactcactaaatcatctccttcctgattttcgtaaagtccacactgagcaaaccctgatgcaaaagctagtgagggccatataagaaccacataaagaacctacatttgtgatgaattttgtcatgaaggaggtgacttgtgtctggattgtgatcatgtaatcatgcctccttgtattaatcctgcaaccaatataccatgtgagcttagatagtgaggctcttactttatttg

SEQ ID NO: 100319 - DNA, 428 bp, Homo sapiens
tttcgttagaggagcacaaggacagactatgccgcgttaagagaggtgctgccagacccgcggaggtgccggccaaggacgggcgcatggagcaacgggcggcgcgaccggccgggtgctggccattcaggcccgaaagcggaggccgaaactagagaaacactggaaaaaggtctcttgttctgctgcccaggctggagtgcagtggcgtgacctcgtcctactgcaacctttgcctcccgggctcagagtctcactgtgtcacccaggctggagtgcggaggcgtggtctcagctcactgaaacttctgccttccactttcagagatggggtcttgccgtgttgcgcacgctggtcttgaactcctggtctctagcgctcctcctgctgtggcctcgcaaagtgctgggattgtatgcgttagccc

SEQ ID NO: 100320 - DNA, 423 bp, Homo sapiens
  misc_feature (1)...(423): n = a,t,c or g
aatacactcggttgagaaaatcaaaaggatttctatatggcaggaagaatccagggacacagcaaggggagaagtaaaacacctccaccttaggttcctttggccacagatcttttttgtattaaaaaatcctggccaggtgcagtagctcacgtctacaatcccagcactttgagaggccgacactagaggatcccttgagcccaggagttcaagatcagcctggacaacaaagggagatggtcatctctacaaaaattttttttttaaatcccagggagctactgtgcattttctatttttctaatagacatgggacacttgttaagaataaaaacaaggctgggcgcggtggcgcacacctgtgatcccagcactttgggccaaggcaggtggatcacctgaggtcatgagtttgagacn

SEQ ID NO: 100321 - DNA, 431 bp, Homo sapiens
aatacatgcctgactgcacattataaatcatctggaatactcttaaaactatattgatgccaaactaaattagaatttctggggatagctggggcagtggctagtgcctctaatcccagctactcaggaggctgtgatgggaggatcacttgaggaggccaggagttcaagaccagcctaggtggccgggcgcggtggcttacacccataatcccagcgccttggaattacaaaaataaatctcaaaaataaagataataaaataataataaacacttttaaaaaatgtttaaaaattcactggaagtgggcacacaactatagtctcaaatactagagaggatcccttgagcccaggagttctgcactgtagtgagctaggatcacaccactgcacttcattctgggtgacagagcaagaccctgtctct

SEQ ID NO: 100322 - DNA, 447 bp, Homo sapiens
  misc_feature (1)...(447): n = a,t,c or g
acggtaaagccacncacgttagcgggaatcctccacagcggncgctatatatgacctaccgtttctactcatagatttatatcccatggaactgagggcaagtattcgggcgcatacatgcacatgaaggtttgtagcaacactgttcacagtaaccaaaaggttgaatcaacccacatgtccatcaacagatgagtgacaaaacaaaatgtggtctctcatataatgaactactatcccgccataaaaagaaatgaaatattgatacatgaaaacattatgctatgtaaaagaagccagtcacaaaaggcacatactgaatgattccatatatgtgaaatatccagaataagtaaatctgcagagacagaagatgaattggtggttgccacacgctggggaaaggggagagaataaggagtggctgttaatgggtatagggtttct

SEQ ID NO: 100323 - DNA, 375 bp, Homo sapiens
aatacatgctcccaaaaatattcattaaaaattctttttagtcttttaatttttatttctgaaaaaagtttcatttttaaatttagctgtctgactctgtgtctgtgccttcaatactttcacaacgattttctgctcctcgataagcaacatgcttgatcctgtcacagactcactgagcacacgtggccgctataggccttgctaatgtgatctggacaatctcataagaactttaggtctcatagcatgaacccctcaaagtctgcctgggcacatgctgcatgcagatttttggtgcatctgggtttaagacagcctcattttgttggaggctgtattgtaggaaaacctacaatggtatgtcaaacgttg

SEQ ID NO: 100324 - DNA, 379 bp, Homo sapiens
aatacaatctgtgtgacataaacagtcaagagcttcctaaatatgttcttctctcaagaatttctcctaggctgggcacagtggctcatacctgtaatcctgaccgtttcagaggctcaggtggggggatcgcttgagcccaagatttcaagactagtctgggtaacatagtgagaccctatctctacaaaaaaataaaaaaatgagcctggtgtagtggcacacaccagctgaggagggagaatcgagcctaggagttcaaggctgtggtgagccgtgatcataccacaacactccagcctgaggtgactgagtgagaataagaaaaaaaaaaaggatggcctgagcccaggagtctccagcctggggaacagagaga

SEQ ID NO: 100325 - DNA, 384 bp, Homo sapiens
taaagcttcctaccaggccagctgcctgcacaggaccaagaacctctctggggaaggagtggcccggggctccctcaggctgcctctggctaacaccacttccatgtaagcctgagacctgaggctgggaaggccctgctgctggcctagtgcaggcctagctctcaaacttggaggagaagctggtcatggtggtccctgcctataatcccagtactttgggatgccaaggcaggaggattacttgagtccaggagttcgagaccaacctgggcaacatggcttgacctcatctacacacaaacacacacacaaacacacacaattatccaggcatggtggcatgcacctgcagtcccaaccactcaggaggctaaggtgggc

SEQ ID NO: 100326 - DNA, 396 bp, Homo sapiens
aatacatgccttctttaaactgaaatatcttgtcagccttcctttgtctttcttgaccttgacattgatatgggcttgttattttgtaaaatgttcctcaatttaggttccttccattattttttcctatgcaaatgtatacacacatattttttaaaattaggatcaggccaggtgtggtgtctcatgcctataatcccagcactttggtaggccaaggcgggaggatcccacgagttcaagaccagcctggacaacatagcaagaccccgtctctaccaagtacaaaacaaaataaggtaaaaaaacaacatttattataaaaagctaggataatcaaaatatatacaggataaagaaggtacccaccaatttaacaaatcaaatattacatat

SEQ ID NO: 100327 - DNA, 398 bp, Homo sapiens
aatacactgctggtgaaaatgcaaaataacgtatacacttgagaaaacagtttggcagtttcctatacagttaaatattgtattaccatatattccagcctcccactcctaggtattcatacaagagaaatgaaaactcatatttatacaaaaacttatgcaaatgtttggggtggttttattcattattgctaaaattgtctttcagttggtcaacaggtaaataaaactttagtccatccataaagtggattaccactcagaaaaaggaataaacaactgtatgaagcaacatgattgaatctgaaatgcactgtgctaagtgaatgaagctaaacccaaaaaactacataatgccattatggaaaaggccaaactatacagacaaaaaaattgag

SEQ ID NO: 100328 - DNA, 398 bp, Homo sapiens
aatacatgccacctacacaaacccgtaacacaggcattgtgcacacacccacacatgtacacaccctgtgtacacacacaatggcactcacacacacacagcaagggcttggactcctgcccctccaacatctctaatcttgccatcacccacagaatctccccctgccctccaaatccctaaccttccctttggcctttcttcctctccacacccagctggcagctctcaaggggagccagaggagggaggttgccagagaagggcgaagaacagggttggacacagagcagagaaatgggagacagagctctgtgctggggatatgaacctctaatgacagtccctgctatgacaggcctcactgtgagccagcccgtatgcctgagtggccttct

SEQ ID NO: 100329 - DNA, 385 bp, Homo sapiens
aaaagaaacaagcaacattgctttggattatacatctggcaacaaccttttcagtggaaatctgacagtccaagatagaggtgcatgacatatttaaagtgctgaaggaaaaaaaaaaatgaaccaccttttatcctaaaataacaaatccagggaaaatagccttcatacatgaaggaaaaataaaactttacaagtcaaataacagctgagggatttcatcaacagtggacttgtcctaaaagcaatgctaaagagagttctttaatctaaaagaaaaggacattaacaaacaataagaaatctgagggtacaaaactcactggtaacagcaaatacacagccaaatacagaatactgcaacactgtaattgtggtgggtaac

SEQ ID NO: 100330 - DNA, 404 bp, Homo sapiens
ggtgaaatgagacatgaaaagctgaagagttaggtatggatgaagaaactgacaggccactactgatttttacctaaaagtgattaaacattacaacattctgttttaagttcttatgtatctaggttgtagatcttaaatatttgttgaattatttttgcttcctagtgtaactctgcaatccaaaagtaaatcttaaataaaaacgtgaaaatacacatcccatgcagtaaaattgcaaacacaaattaaaggaaggaagctgggcatggtagcacatacctgtagtcccagctatccaggaggctgaggcaggaggattgcttgagcctgggaggtcaaggctgcagtggactatgactgcactccaacctaggcctgggtgacagagcaagaccctgtct

SEQ ID NO: 100331 - DNA, 391 bp, Homo sapiens
  misc_feature (1)...(391): n = a,t,c or g
ctgccatattcacctgacctctcgccaactgactcacttctccaagcatctcgacaactttttgaagggaaaacgtttccacaaccagcaggatgcagaaaatgctttctaaaagttcatcgaatcccaaagcatagatttttatgccgtaagaataaacaaacttatttctcattggcaaaaacgtgttgattgtaatggttcctattttgattaataaagatatgtttgagcctannaaaaaaaaaaaaaaaaaaaaaaaaaaananaannnnnnnnnnnnnnnnnnnngggggggggggggaaaagagaaaccccnnggggggggggggaaaaaaaaaaaaatttttttggggggaaaaaaaagggggggggggggagggcggccgca

SEQ ID NO: 100332 - DNA, 374 bp, Homo sapiens
gaactgcaaaacatcattctattcactctcaattgatcaaagtagtcacaggccagctcaatttaagaactcaactgaagaagtggtaaagcatttgcagctgtcttttaattcaccacacctgattctcttctaaattggaattggccaagcagttgcagtggctcagccttaggaggccgaagcaggaggatggcttgaagtcaggaattcaagactaccctgggcaacatagcgagatccttgtctctacaaaaaatatttttaaaaattagcctgtcatggtggtgggcaccaatagtcccagctactagggagcctgagataggaggatcccttaagggagtacaggttccaaacctccatatggtatg

SEQ ID NO: 100333 - DNA, 418 bp, Homo sapiens
  misc_feature (1)...(418): n = a,t,c or g
aattcccgggtcgaccnnnnnntccgagcaactttgaatattttaccaagatgataaaagggtaggagtctgacagtaaccttgatgtatatgaaagtgcatggtgattctttcccattttttctttcttttttattttttataactagagatggggtcttgctttgtgggccaggctggtctccaactcctgatctcaagcctgatctctggcctcggcctcccaaagtgctgggattgcaggcatgggccaccgtgcccagcctcttccctattgtataaaataaagggaactaaggggaaatttgctttaaaaggaagctggacaactgagggttattaactattgaaacaatatatcaaacatgaattgtggaatatttcatgagggtgctatttaaaaataggtatgcatttg

SEQ ID NO: 100334 - DNA, 403 bp, Homo sapiens
accattgcattccagccttggtgacagaatgagatcctgtctgaaaaagaagtacatatcttaaaggcaaaattttatggatttaccaaatgatacacccttgtaactaccacaaaaagtttatgatatagaatttttttcatcattcccaagagttctctcatgttctctttcagttgacattctacataggcaaccactgacctagtttctatcactacagagttttccctgttctatttctttaacagagacagggctattcagattttctgtttcttcttgtgtcagatttttacatgttgtatttttcaagaaatgtgtccaatttatctaagttgttgaatttattggcataatgttatgcacaatatttccttattattctattaataactatatg

SEQ ID NO: 100335 - DNA, 365 bp, Homo sapiens
gctgggattgcagacgtgagccactgcacctagtgtatttatatattggccaggctggtctcgaactcttcatctcaggtgatccatctgcctcagcttcccaaagtgctgggattacaggcgtgagccatcgcgtctggcatttagttggttttcaggaagtgttagtatcatgaggagtgattgaaggaaggaggaaaagaccacagggattcatgcgggatgagggaaagaggattgaagtgtgggaacaaacataattttggaataaggagagaaaattaagtgggaatagaaaatgaacacagccagttttaaaccagaatactatttttacattgagaatggaaaggactgaaccttgg

SEQ ID NO: 100336 - DNA, 392 bp, Homo sapiens
ctagttctagatcgcgaccatcctggctaacacggtaaaaccccgtctctactaaaagtacaaaaaaaaaaaaaaaagggggggggccttggggggggcccctttttttcccccctcctgggggggtttttttttttttttggggcccccctatatggtggcctgggggggtttttaaaaaaggcggggggggacacccgggggggccccccttttttttttgggggaaaaaaaaaatttggccccccccggtttaatatctttcgcgtcattttttctccccggcgttttgagctttttttttggttttgggggtgcccctcgggttttttttttctcccggatttttttgggtaaaggggatataccccccccccttttttttttggggc

SEQ ID NO: 100337 - DNA, 376 bp, Homo sapiens
cggacgcgtgggataaaacatttatttttatctaactagatatgatcaggacattggaaaccctaattgttaatttatttgtaatacttactgaaatgaaaccatttaaaaaactgcacaacgtcttaagtcttcctaacccaagattttgtttaaaaacccacgcgtccgcggacgcgagggcaaaaattctgtcccattctggaggttgtctatttactctgttcatagatacttttgctgcgcacaacctctttggcttaattagatcccacttggcaatctttgatgtggctgaccttgatttttggggtgtttatctatgaaactctgcctgctcctgcgttctgattggaataactatattgtcctccag

SEQ ID NO: 100338 - DNA, 538 bp, Homo sapiens
aaagaaatagagcctgtattgtaacaagatgaacctaagctggttcttcaaatgcgcgtaaagccgcactccatgaacacgctgctgctgggaatttcagttggtgtagccatctaatgggcgtctgaggaaatgagttggactttgaaatgcatagatgtatgtatgtatttatatactttggcccagcaagtcattctgtgggactttatcacacgaaaaggcatgtaaagataatgtattcaccacctgggcacagtggctcatgcctgtaatcccagcactttgggaggccgaggcgggcggatcacgaggtcaggagatagagaccatcctggctaacacggtgaaaccccatctctgctaaaaatacaaaacattagctgggcaaggtggcagacacctgcagttctagctacttgggagggtgaggcaggagaatggcatgaatctgtgaggcggagcttgcagtgagccgagatggcgccactgcactccagcctgggcaacagagcaagactctgtctcaaaaaaaaaa

SEQ ID NO: 100339 - DNA, 402 bp, Homo sapiens
  misc_feature (1)...(402): n = a,t,c or g
tggtttcttgagagggagtctactcgtagtgaaaatagtgtgaacattgttgaaatgacaacataggatttagaatattacgtcagtaaagcagtagcagggtttgagaagattgactccaatatcaaaagaagttttactgtgggtaagatgctatcaacatcattgcacgttacagagaaatctttcatgaaaggaagagtcaatcaatgtgtcaaacttcattgctgtcttattttaagaagttgccacagccaccccaaccttcagcatctgccactctgattgtcaatattaaggcaaaaatctcagcaaaaagaatcaaactcactgaatgctcagatgactgttagcatttttttaaagcaataaagnattttatttcatttatttatttttggg

SEQ ID NO: 100340 - DNA, 405 bp, Homo sapiens
  misc_feature (1)...(405): n = a,t,c or g
tgctgctgacaagactacctacttaccacagctcatgttctctgcttgctcccattccaagccatttcacaaatcctcacctctctccaaatagctttctcaatcttctttccaaaaatatgtcactagcttctccaagaacttactgactcctctcctttccctgacagtttctgaaaaccctccnnannaaaaaaaaaaaaaaaaaaaaaaaaaaaaaaaaaaaaangggggggggccccttaaaaaaaaaaaaatttttacccccggggggggggaaattttttttttttttgggggccccaaaaaaatattcgggggggggggtttaaaaaacggggggggggaaaaaccccgggggccccccaaaataaggcgggggggagaannnnnnnnnnnnnnncg

SEQ ID NO: 100341 - DNA, 434 bp, Homo sapiens
  misc_feature (1)...(434): n = a,t,c or g
tgccggacccgtccggnnnnncccgccgacccacgcgtccgngaacagngactttaatttctttaaacaatattgaattacttgccctgtgctttacttgactagcagaaatacaaaaacaaaaaagtattacttggactgctgctgcttctggccatgatggaacaacagggaccagacttacttacaccttttttttttttttttataaaaaaaaattttttttttcaaccaaagcggggggcaagggggggattttgtataaatgaaaccccccccctggggggaaagggaaatccccccccccccccccccgggaggggggaaaaaagggccccccccaaaactctgtgtttttttttttttttttaaaaaaagacgggtttcccacgtgtgggaagggagatattaaaccaccggcctgttttccctcc

SEQ ID NO: 100342 - DNA, 394 bp, Homo sapiens
  misc_feature (1)...(394): n = a,t,c or g
atttaaaacttggaatacaacctactaaccttatttttatttgtactactggaagttcctctagcatttttgaagtagcttggaaaaaaattgagattcagttgtggttctacttacatttttactagagtaagttggagagacaaatcagtgagtagtcaagtcttcatataatcaaagcttttaaaatatgataacaaaaacttcaggtgttagatttagcttcacggaaaacctttttttgggaggctgaggcaggagaatcgcttgaacccaggaggtggaggttgcagtgagccgagattatgccactgtactccagcgtgggtgacagagtgagactctgtctcanattnnnanacnnangnnnacnnnnnngatttnnntnnnncna

SEQ ID NO: 100343 - DNA, 477 bp, Homo sapiens
tgcatttgtcgtaccgcttttgagttaacgggtcgagccacgcgttcggagaaagaagaaagaaagaaagaaagaatgtatgattgaaagaaagaaagaaagaaagagaaagagggaattttattaaagaaagatgggcaggaggaggaggagggaaggaaggaagaaaggaaggaaggaaggagacaaacccaagatgagtttgggggccaaaatagattatctacagtaaaacaaggtagttaaccaaaaaagagaaaataagggattcagacaaacaggggccccaacccaggaaagagacaaagagacttcccagaataagaatgaagagaaggcccggcatgacagctgacagccacaggcctagagaacccagtctagactgcagcaggagggcagaaagctctggaagagaggtttggtctccaggaggaaatagaattagtagattacataatattgtccaaattatga

SEQ ID NO: 100344 - DNA, 419 bp, Homo sapiens
  misc_feature (1)...(419): n = a,t,c or g
tattactccgtacgggcaagaacngctccggaattcctgggtggaggcacgcgtccgccttcttgttctttttgcaggagngccaaagctctggagcaatttgggggcgatgcattgaggatgcttgtgtctactgtgtgcttgggtctaaagttccagcatgcctttgaaagcaagcctatctggcagtttttagtggaacaatatttttgcacgagtgggcattctacatctaaaaaggcacaaaatagttttgacatgtgcctgtcatcccaactactcaagaggcggaggcaggaggatcacttgagcccaggagttcaggacgagcttacgcggcatagtgagaccccatctctaaaaaaataaatcaggccaggcgcggtggctcccctctgtaatcccaacactttgggagg

SEQ ID NO: 100345 - DNA, 400 bp, Homo sapiens
  misc_feature (1)...(400): n = a,t,c or g
ttgggctcaagcaatcctcttgcttctgcttcttgagtaacgaggactgcaagcatgtgccaccgcaaccggctgttttttttgtttgtttgtttgttttgttttgttttgtttttttggtagagatatgggggtcttgctgtgttgcccaggctggtcttgaaatcctggccttaagtgatcccccagccttggcctccccaaatgttacgtttacaggcatgagccaccatgccaggtgtgaatgaaaggtttgaagagaaacctaagggtgatatcaggattccaggcatgtgaaggacacagagaatattttccagttatttagggacaannnnnnnnnnnnnttnntaaaaaaaaaaannnnnggggggggccttttctaaagacctccccctcc

SEQ ID NO: 100346 - DNA, 417 bp, Homo sapiens
caaatacacattggatgaccacagtaacagcaaacagggcacaaactggattcttatttcacatagacatttagattactaaagagactatgtgtaaacagtcatcattatagtactcaagacactaaaacagcttctagcaaaatatattacagcttgcagaggccaaatagaaaacatctccctgtctctcccacatttccctcacagaaagacaaaaaacctgcctggtgcagtagctcacacctgtaatcccagcagtttgggagactgtgggaagatggcttgagtccaggagttctagacaggcctgagaaacctagtgagacatccttctcttaaacaaaacaaaacaaaacaaatgtagccatgcgtggtggcatatacctgtggtcccaactactcaggaggctgaaa

SEQ ID NO: 100347 - DNA, 404 bp, Homo sapiens
ccatattttagcaaaggaatgtgttttatttttgagttagaatagaaattaaaaaataagactgaagctaggcacagtagtagtgcgtgcttgtaatcccaggtagctgggaccacagatatttaccaccacgtttggctaatttttaaacattttggagagacagggtctccctcttgcccaagggggtctcaaacttgtgggctccaacaattctcctgccttggcctccgcaagtgctgggattgcaggtgtgagctactgagcagtctttttttttggggggcttgctgcgggtaacaaatgaagaagtgggcacccacggactcttcaaaaaaaaaaaaattcgcgcccatttgaaaggagttcttgttggtgccttcatttaaaaagcattctttaat

SEQ ID NO: 100348 - DNA, 392 bp, Homo sapiens
  misc_feature (1)...(392): n = a,t,c or g
tggacttaccagcttccagaatcatgatccaataaatttgtgttcattataaattacccagtctcaggtattttgttatagcagcacagaatggaccaagacaatctctttgttaaggtggtatctgccagaacgctgaactgtaaagttactgtttgtccttttctaattaataaatatcttgcagccgggtatggtggttcctgcctgtaatcccagcatgttgggaggctgaggcgggtgaaccacttgagctcaggagttcgggaccagcctgggcagcatggtgagaccccatgactactatnannnanaaaaaaaaatataaaattaaaaaaaaaaaaaaaaaaagggggggcctttttaaaaaaacccaccttcccccccccccg

SEQ ID NO: 100349 - DNA, 393 bp, Homo sapiens
  misc_feature (1)...(393): n = a,t,c or g
gaggccatgggggagggttgagcagggttacaggagacaggcaagaggcgctgtgagaagcgtgggctgagtgacctgctccttggtgagtgagaagtcctagaactgagcaccatggcatgcacctgtagttccagcaacttgggatgctgaggtaggaggatcacttgagcccaggaggttgaaactagcctgggcaacatagcaagacctcatctcaaaaaaaaaaaaaaaaaggggggcccttttaaaggaaccaagtttaactcccggggggggggaagttaatattttttttatggggccccaaaaataaattccggggccgggtttttaacacgggggggggggaaaaacccgggggttccccaaattaatccccttttggaaann

SEQ ID NO: 100350 - DNA, 397 bp, Homo sapiens
  misc_feature (1)...(397): n = a,t,c or g
ccttaccatagcataaaaaaattttatatttttaggactttaacaaagnatttgccagatacctaaagactaccaaacatcactgagataaattaaagacaacctaaataaatggatacaccatgttcatggattggaggactcaatattgttgagatgtctgttctttccaaattgatgtatagattcagagcaatacaaatgaaaaccacatcaggttttccttttttttttttttggaaaaaaggtatttttttttaaaaaggggcccctttcctttttgggggggggggaaattttttaaaaaaaaaaagggggttaaccccaaacccctttgggggggggggggggggtttcaaaaaaaaaaaaatttttttttttttttgttttttaaaag

SEQ ID NO: 100351 - DNA, 420 bp, Homo sapiens
ttttttgagacagagtttcgctctttcgcttaggctggagtgtagtggcatgatctcggctcactgcaacctcagccttccggtttcaagcgattctcctgcctcagccgcccttttttttttttttttttttttgaaaaaaaaaatttttttttttcccccggggtgaagggaggaaaaaaatttttgtttaatggaaccccccctttggggggaaaaagaaatcccccgcccccccccccccaggaatggggaaaaaaggggcgccccccccacccccaataatttttgggtttttaaaaaagagggggtctccaatttttgacccgggggggcttaattttttttcccagaaaagccccccccccgcccccccaaaaggagggaaatatggcggtaccctggggtgcccaacaaatt

SEQ ID NO: 100352 - DNA, 1040 bp, Homo sapiens
atggccacgtgtacacccaaacacataaacacccagatctgtgtctccttcctcctatctctgaaactcagtgaatttgagcaaatgtccatattcaaaaagggggaaaatgaactggctttgggaacagggaacataaggccctatgactcttgccctggcaacaggccccgcccttcgcgacaagccccgccccgcgccatccgtctggcccttcctggcgtccgcctactagcggcggggtcccggcccgtgccgagtgcccagccagccccaaccctcttcccccgggattctgcggccagagccccagccgagggaggaaagaagaataactcaggggagaaagcacttccaccctggcgatcttctgataagcacccaacagatatcattcgttttaattacctagacaaccgtgaccccatggagactgtccagcaaggaagaagaaaaagaaaccaaatgaccccagacttcagccgacagtcacatgataagaaaaataaattgcaggacagaactaggctaagaaaagcacaatcaatggatggtagtttgccctcatcggcctcctaagtgatgcaagatgattgtgaaaatgaagaaataggtgagccaccccatctggccatactccttccattttaaaaagtacaagtaaatacatgtgcacaatatatagaggcagagatcttaataccttcttcttgaaaggaatggcagcacccagtacataccgtctcatccacccttctttcttaatgtaacagtatatcctggagatccttccacagttgaatatagaaacatcctgctttccatttgcagctcatagtactgcattgtgtggagatgcaggagttgatgcaaccagttctctattgatagacatttggcttatttccagttaagtggagacaatcttttaaatcacaggaacaacaaactcaaacagacaaatagctatgcaaaccacctgagttttaaaaagatactttgtaattttcccactgctttccaatttacagaagaagaaa

SEQ ID NO: 100353 - DNA, 486 bp, Homo sapiens
  misc_feature (1)...(486): n = a,t,c or g
gttttgttgttgtgtttttttttttttgtgttgtgagacagagtcttggtcggtcatccaggctggagttcgagactctatctcaaaacaaaaacacagaaaaaacaaaacaacatttttgtttgtagagttggggggtctcactacattgcccagactagtctctaactcctggcctcaaatggtcctctcacctcagcctctcaatgcactaggattacaagtgtgagccaccacactccaaaatttttcaattaacacatttataaatattctcagagaatgccaatttaactattagagggaaatctagtttgccttatttccaagttctcagtgggttgttttggaagaaaggaacagaaactactcaaactagtttaatcaataaaaatagaaggtagagttattggaatgtagggatatctcataactcaagagcattaatccttaagagttcaaggnnnnnnnnnncggacgcgtggg

SEQ ID NO: 100354 - DNA, 579 bp, Homo sapiens
tgttgccataatagctgtaagaaataatacagagcgatcccttgttccctctgcccaacttttcctaacagtgagtctttgcagaacaccacagtctcacacaaggacatggactttgatgccatccggaggccttacttagcctccgcccatctcgcttagcatccccaggaagatccctgtgtggccctttcacacctatgtctctaacgccatcttatccctaatccctggcaaccatagcccatcttccgtttctagaattttgtcatctcagaaatatcatatccagctgggcatggtggctcacacttgtaatcccagcactttgggagactgaggtgggcagatcacttgaggtcgggagttcgagaccagcctggccaacatggtgaaattccgtctgtactaaatatacaaaaattagtcgggcgtggtggcgcacgcctgtaatcccagctgctcgggaggctgaggcacgagaatcgcttgaacccgggaggcggaggttgcagtgagccgagatcgtgccactgtactccaggctgggccacagagtgagtgagactctgtctccaa

SEQ ID NO: 100355 - DNA, 393 bp, Homo sapiens
agaagaacacacggagtttctgggaggtttgagtgatcacagagcacttggaggctctgcattctgccttccacaccttgtcctatgcatctcttccatctggctggtcctgaacttctatcctttatgataaaccggcattagtaagttaggctgggtgcagtggcacatgcctgtactcccagctacttgggaggctgaggctggaggatcgcttgagcccaggagttcaaggctgcagcgagcaccactgcactccagacagagacactctgtctcaaaaaaaaaaaaaaaaaaaaagggggggtttccttggggggtgtttcatccaactttcggaccggggggggggctagtgttacctccccttcaatatttaaaaatgagggcgcg

SEQ ID NO: 100356 - DNA, 387 bp, Homo sapiens
cggacgcgtgggcggacgcgtgggcaagccactaacatctcttccctgttacagtggcctcagaactacagtccctatgcccctttaattcctttctccttctggcagccagaaagagcatttacaaattcaacttaggtccactttttctttcttttttttttttaaaagggagcctcgttttggccgggtggggggccagtgccccaatttgggttaatggaagcccccccctccagggtaaaggcaattttccggcctaactttaacaagaactgggaacggtgggcaaccccccccccccccactaatttttggatttttaagaaaaaggggaattccccctggtggaaaaggggggccaaaatttttggaccttgggacccg

SEQ ID NO: 100357 - DNA, 397 bp, Homo sapiens
atttgcctggatggtttgaaatatttcatagtttttatttgaaattttcattgaggtcattgtacatttacatgcagttggaagaaataagacagcaacctcccatgtaccctttacccaatttcccccaatggtaacattttgcaaaactatagtacagtatcacaaccaggatattgacattgatacaatttacccatcttactcagttttcttgtacttacttctgagtgtgtgagtgcatgcctgtgtgtgtgtgtgtgtgtgtgtgtgtatttctgtgcagttttatcgtgtgtgggtttatgtatccactactatagttaatacactgaacagttccattatcacaaggatccttgtgttgccagtttataaccacacccacctccctaat

SEQ ID NO: 100358 - DNA, 390 bp, Homo sapiens
agtcctggaaagtgtgcagtaaaaggccaataccttctccctcccttttcttctgaaaacatcccagggttctgctgagggcagatggcacctgatgagtctccctagcaactctctgacacatgcaactgagctgagctgggagtgtgaaggaggcagagccccgttcaaatgcaccaccacacaaggctacttttttatttttatttttttgtacagactcagtctcactatgttgcccaggctggtcttgaacacttggcctcaagcaatcctcccaccttgccctcccaaagtgctgggattgccagcgagagccaattcatccagcctctcagtgtttaaattaaccagtttctgttgctgaagctaagaaccctgacagaagca

SEQ ID NO: 100359 - DNA, 490 bp, Homo sapiens
ggaggaattcgctctcaaatgcacacacacatacattcactcagcaaataggtgcagactccccaaaacaaacccagtctctgagccccctccaccaccctcccctctcccgacctcactcccaagggccttgcctcagtggaacactgtgatttggacagggaatgcatcctgacttctgcacaccggtatatcacctttcctgcatccttaattaaacaaatcctgagcatttacaattcaaccagtatgcattcagcacctactgtgagccaggcccagttctaggagctgggagagaagggcggtgacaaaagagaccaaaaatctctcacagagatgataatgtgtcccacatcgccgggcacagtggctcatgcctgtaatccaagcactttgggaggccgaggcgggtggatcacttgaggtcaagagttcgatgccactgcactccagcctagacaacagagcaagactctgtctcaaaaaa

SEQ ID NO: 100360 - DNA, 416 bp, Homo sapiens
ctcagtggaacactgtgatttggacagggaatgcatcctgacttctgcacaccggtatatcacctttcctgcatccttaattaaacaaatcctgagcatttacaattcaaccagtatgcattcagcacctactgtgagccaggcccagttctaggagctgggagagaagggcggtgacaaaagagaccaaaaatctctcacagagatgataatgtgtcccacatcgccgggcacagtggctcatgcctgtaatccaagcactttgggaggccgaggcgggtggatcacttgaggtcaagagttcgatgccactgcactccagcctagacaacagagcaagactctgtctcaaaaaaaaaaaaaaaaaagggggggcccgtttaaaggaaacaagtttaagtcccgggggctgggag

SEQ ID NO: 100361 - DNA, 431 bp, Homo sapiens
  misc_feature (1)...(431): n = a,t,c or g
ggaaagagtgggcaaacaggaatagaagttctcactccaggctgcaggtttcaggctgtttttggcttgaaggtggggtttcaccagggacccacccctgtctatctgggcatttgactgcttcctgttgctttcataaggaactacccaagatggtaatttataaagaaaagaggtttaagtggctcacagttccacaggctataaggaagcatggctggggaggcctcaggaaacttacagtcatgacagaaggggaggcaggcatgtcccacatggtggagcaggaggaagagctcacctacagcaaattatttaagaccgagcatttgtctctgttctgttccctctctggacgcaccctcctgcctccaccctgacttgccgtctcctgagcactgaagatatttttggcttgtccgatgtgactn

SEQ ID NO: 100362 - DNA, 464 bp, Homo sapiens
  misc_feature (1)...(464): n = a,t,c or g
agatctctgtgaccggnccggaantcccggggcgacccacgcgtgcggagaaaaacaagttccacttgaaggacattccataaaatacttgagcagtacgccttaaaactgtgaaggtcatcacaaacgaggcaagtgagaaactgtcacagccaagaggacatgatagcttaatgtaatatggtatcttggaggggatcctggaacagaaatataatactaggtaaaaatgaatccaatcttaataaagtatggactttaattaataactaaattaagaattacttgggccaggcacggtggctcatgcctgtaatcccagcactttgggaggctgaggcaggtggagcacttgaggtcgggagttctagaccaggctggccaacatggtactaaaaatacaaaaattagctgggcgtggtggcgggtgcctgtaatcccagctactcgggaggctggggcag

SEQ ID NO: 100363 - DNA, 410 bp, Homo sapiens
  misc_feature (1)...(410): n = a,t,c or g
aacaaacaaacaaaaaaagaatcatagaaaagaatatatgaaatgcaagtgctaaaaaaactcattatggccatacgaagataacgaattcatgcccataatctccgcactttgggaggccagctgaggcaggaggttcacttgaggccaggagtctgagaacatcctgggcaatatagcgagattctgtctctactatctatctatctatctgtctatctatctgtctgtctgtctgtctgtctatctgtctgtctgtctgtctgtctgtctgtctgncnggccagccagccagccagccagccagccaggcatggtagcatgtgcctgtagtcctagttacttggaaggctgaggcaggaggattgcttgagcctaaaggtttgaggctgcagtttgctatgatcacg

SEQ ID NO: 100364 - DNA, 407 bp, Homo sapiens
cgcctggtccctgctccgcgcagcgcggggaacagctcttggccagccgggcctcattaacatagccccgcccccacaccataggccgatcgggtgggcggggcctgggacggggcggggcttgtattagcataatccttacgccaggtgagaacccggtgctctggagctctggcgggttggccccatctcccttcccgtctttccttggagtcctgatagagccgcccctactttgctccaaagggatattaagaaaggtcaggccggacgccaggggctcttgcctgtaatcctagcactttaggaggccaaggcgggaggatggcttgaggtcaggagttcgagaccagcctgagcaatatggcaagacccccatctctaccaaaaaaatgcaaaaattagcc

SEQ ID NO: 100365 - DNA, 426 bp, Homo sapiens
tttttttttttttctctctccatctttgggctcccttagctttttttttttttggagcgatctcggctcactacaacctccccattcccgggttcaagtgattctcctgcctcagcctcccaagtagctgggactataggtgcctgccaccatgtccagctgttttgtatttttagtagagatgggatttcaccatgttggccaggctggtctcgaactcctaacctcaagtgatccacctgcctcagcctcccaaagcgctggaattacaaatctgagccactgcagctggcccatggtgtagtttggtagtgtttaagggagcagaaagacccatgtcagtatacctaaacaggtataccttgttttattgtgcttcactttacggagttttttttagatactactttttttttagttgaagag

SEQ ID NO: 100366 - DNA, 442 bp, Homo sapiens
  misc_feature (1)...(442): n = a,t,c or g
gtaccggcccggaatnnnnnngtcgacgatttcgttagggatttcctggagcatgtcacaaccacattgccatcatagagggacgaggacagaggtctagaacgtcgctgtgtgtctgcgtgttctactccccaactagggaatgcatccacaacctgaggctgccccggagtttctgatccttctctccacattctttttttttttttaaagaaaattttgttttgccccccaggcggaagggggggggcacaatctgggttaattggaatttggccccccggggttaaagcaattttcttgtttaaccccccaaagaatttggaataacgggggcgcccccccccccccactatattttttttttttgaagaaaagggggggttcacccttgtggccggggtgggcttaaacttcttgacctaggggaccccccggtctc

SEQ ID NO: 100367 - DNA, 423 bp, Homo sapiens
tttcgtcaaagagggtgctcttgccctgatttccctgtgatgagattgacccaaactgctggtgaggatagcctagcatagaggcctccacctttcttttttccttttttatttctttttttttttttaaaacgggcggcccttttgtggcccagggaacagggaaggggctggatttgggttaattgcaccctctccctccggggtcaaggcatatccaaggccctcccttcctgagaggcgggaacaaagggggggcgcccccaccccaccttatttttggttttttaaaaaaaaacaagtttctcccaggttgaccaggggggtattgacctctgggcccgagggaatccaccccccgggaacttaaaatggtttgaattacaaaaagagaccctgtgccccggtcacattttttaaacg

SEQ ID NO: 100368 - DNA, 458 bp, Homo sapiens
  misc_feature (1)...(458): n = a,t,c or g
gcggtaccggtccggnnnnccgggtcgacgatttcgtagcatttttaatcctattttgtagattcaggaattgaggatcagagagggcaagtgccttgcctatgaacacacagccaggaatgggaagagtcaggatttgcatgcaggtctctcatgcctttgttgttgttgttgttgttgttgttgacaactgttggccatgatccactaggaaattcttcacaaaaccagaataaatgggttccaagcgtccagtgaccaggcatgggccggacagcagttcagaaaggagtcattcttcttactggaagggttgagggccattaagtatccaagatttactggtcaggtcttacttggtcccaccctgtgcccatacatgaagccagccggccaggatcccaaaggccaggacatgggaggatctgtttttcaataatgggaagcccccggatgtg

SEQ ID NO: 100369 - DNA, 908 bp, Homo sapiens
  misc_feature (1)...(908): n = a,t,c or g
gccctgtacggcacgagcggcacgagcctgcgcctcgcgggccacaggttcccacgctccgctgtcgggttttggggtcgccctgtaggttaaaaccccgaacctgctcattcctctcgcggcgtggccctaagacgttctcagtcccgtcgctccgagagggtctagagatctgcgtccatttcggattaaaatcgttctgaagtgggtactggccccgacctttttgctttagcccacacaatatgacctcggggaggatgcgaggaagatgaactgnnnnnnnnnnnnnnnnnnnnnnnnnngactgacttacctgagaaagaaactcagaggaagaggaaagaaagaagaggagggaatggctctttctcagggactgtttacattcaaggatgtggccatagaattctctcaagaggagtgggagtgcctggaccctgcccagagggccttgtacagggacgtgatgttggagaactacaggaacctgctttctctcgatgaggataacatccctccagaagatgctttctactctatccgggaacttagggagaccttagtcttcctgattccatattcttctaagatttgcctctgaaagttgcttttgaaatacacattccggatgggcgtggtgcctcacgcctataatcccagcactttgggaggccgaggtgggcagatcacctgaggtcgggagttcgagaccagcctgactaacatggaaaaaccccgtctctactaaaaatacaaaaattagccgggtgtgttggcgcatgcctgtaataccaagctgctcgggaggctgaggcaggaagagttgcttgaacccgagaggcaagaggttgtggtgagccgagatcactccagcctgggcaacaagagcgaaactccatcttcga

SEQ ID NO: 100370 - DNA, 483 bp, Homo sapiens
cgtttcgtgaaccactgctctcctcaaagctgtcagacatgctgacatttaagccttcagaggttactgctgtctttttgtctgtctgtgccctgcccccagaggtggagcctacagaggcaggcaggcctcctagagctgtggtgggctccacccagttcgagcttcccggctgctttgtttacctaatcaagcctgggcgatggcgggcgcccctcccccaacctcgctgccgccttgcagtttgatctcagactgctgtgctagcaatcagcgagactccgtgggcgtaggaccctccgagccacatgcaggatataatctcccggtgtgccgttttttaagcccgttggaaaagcgcagtattagggtgggagtgacccgattttccaggtgccgtctgtcgcccctttctttgactcggaaagggaactccctgaccccttgcgcttcccgagtgagcagtgcctcgccctgttcagg

SEQ ID NO: 100371 - DNA, 1285 bp, Homo sapiens
caggacggtctccggaggccgggatgcgcggaggctccaccagcaggaagaaacgccaggaggaagaaacctgagacagatcgccggggacgcagcgcgggatcccagcctcaggcttgcgcggacggtgtgcgggtgagtctccccaaaagtggcgcccttgtgatgtcgaggacaggtctgcctgtgtgcccgtgggctgctctctctccggtggctcgtagtcgcggagatcagaacccggcaacttcaggagctgcctgggggtgggtgttacctgctgtatgtgtctctctctctctctcccttctcgctctttccttcgccctctctttctctctctgtccgtctgtgtgttcgtgtgccttgggacacgtgtgccctgtgcgccggagggtgggtttcttgcacgtcggcctttcttctggtcagcctctccccgcgtctctgcctgggtgttgtggccggttggcaatcgttttcccggcggttccggcttgggggtctgtgaaggcctgggcaacgtgggcatctgcgtcggagccgcaggggttttcattccctccccatccggagcagcctctttgctaggctggatccagacgagcgctccccaaccaaggacaacggcctcccaggcgctcatcgtctacccgcaggagggtgcccgcagagcttcaagaaggtggttgtcacgcctgtcgccctctgccctcatcgagaaatgtagccacagctcgacgcagggacggagaaggaagccggcaaggggatggggcaagcatgtctgtctctcaaaggctggccttcctggccgagtcacccgtttgacactcctccccggatgccggtggtggtggcatggcccccccgtatcctgcctgggctctggcctctgctctgacctccctcttgctgtgtctgccccgtctctgagaagcctggcggcttcttagtgtggctcagtgtcttccacaaagaagacttccccgtccatcagggagaaacctcgtggcggtccgcgtcatgattgtttccctctccacacctctttctggatgattgggcagctgtggtgatcctggagctctgggcttccatacctgtgtgggacagggaagctctcttggtctccatggcccaagtgatggctgcgcgctcggtccaggaagagggggaggcaagcccaccgttccccacattggccttccaggaaaggcagtgttgcatcccacctgcacttcctctctgattcttgagggccaaccgcttcctcccgctcctg

SEQ ID NO: 100372 - DNA, 464 bp, Homo sapiens
  misc_feature (1)...(464): n = a,t,c or g
cttacgtcagacgnaccnnnnnatacttcccggatcgaccatttcgtgccccataggccgcgcgctgccagtaacagcttaggttagttttgcactcatattttgtactcataatctgtactcagattaagaggcagtttatacagaaatttctagagaatgggtattaccttttgggctgtgagatcattgctgtggaaaggggtggtaactcctgggtgttgccaaggcaatggtaaactgatggggcactctgtggggcatgtaatataaaatgctgcttctctccaggccctgttttatctagtcttcaatttgggccagtgtctaagccccacctcctaacccaatgatattgttacagagcccaccttagaaaaattcaccaagagccgggtgcggtggctcacgcctgtaatcccagcactttgtgaagccgaggcggtcacaatacaaggtcaaac

SEQ ID NO: 100373 - DNA, 272 bp, Homo sapiens
  misc_feature (1)...(272): n = a,t,c or g
ttttttttttttggatagattctacctttgtcacccagggcgggagtgcagtggcatgatctcggctcactacaacctccgcatcctgggttcaagcagttctcctgtctcagcctcccgagtaggctgagattacagggcatgtgccaccagggatgggctaattttttgtaattttaggttgggagacangggtttcactcttttaggggntgggtttggggacttccccgaccntaagggggattncccggggcccttttttttnccca

SEQ ID NO: 100374 - DNA, 424 bp, Homo sapiens
  misc_feature (1)...(424): n = a,t,c or g
tttcgttgtgtgtatgtcagtattattgtagatgtgcatgtgtctgagtgcctaaacaagtctcagggtaggtgacgatgggcatatggccactgggttcgtgctcatatatctttgtgggtgacagtgtctttgtgggtggctaagaggatccattttactgtgaacaactgtgtgtccatgtgtgcagttgtgttcttgggcgggggtggtctgtatgtgtgtgtatatcaagattactgagnnnnnnnnnnnnnnnnnnnnnnnnnnnnnnnnnnnnnnnnnnnnnnnnnnnnnnnnnnnnnnnnnnnnnnnnnnnnnnnnnnnnnnnnnnnnnnnnnnnnnnnnnnnnnnnnnnnnnnnnnnnnnnnnnnnnnnnnnnnnnnnnnnnnnnnnnnnnnnnnnnntcggcgctctgggaagc

SEQ ID NO: 100375 - DNA, 406 bp, Homo sapiens
tttcgtgagagatgaaatcatagtgcagtcaactagtctgaaaaagaaacaggcacctacaaggagagataggagacaagtactggctcacttgtggaagaccctgggaggaagatggggccactatacaacagataagaattcagctgagattttttttttttttttttttgggggggggccttgggttttgtgccccgggtgggggggcaaaaaaaaaatttaatttggtggcaccttttgcctccaggggggggggaattttccggcctccccctccaagggggggggaataaaacagccccccccccccccgggggggtttttggatttttgggaaaagagggtttttccccggggggccaaaaggggcttcaacccctggccttataggggaccggccccc

SEQ ID NO: 100376 - DNA, 419 bp, Homo sapiens
  misc_feature (1)...(419): n = a,t,c or g
cgtgaacgaactgcagaacttattctgtgcttaagtcatcgcgcctcgngaccaaacgcgggatgaggatgatgaagtgatcgtcagaattatcgggcacttctttgctagccagcatcttcaccaggagtagattccatctcaagaaaccactttctttgctcatccttaggaagcggctccgcccatctgttcaagtttgatcatgagattgtacaattcggtcacagcttcagcctccacttctagttctcttgctgtttccagcacatgtgcagttccttcctccactgaagccttgaaccctcagtaccatccgtgagggttggaatcaacttcttccaagctcctgtgaacgctgatattttcacttccttccatgaatcacaaatgttcttcatgacaccgagaatggtgag

SEQ ID NO: 100377 - DNA, 409 bp, Homo sapiens
tctttttctttttgacataagttctcactattgtacaggctgaagcgcggaggtgcaatcatagctcactgcagcctcaacatcctaggctgaagtgatcctcccacctcagcctccccagtagctgggactatagacgcatgccaccacaccccgctaattttttttttttttttgggaaaaaaagtttaattttgcaccccgggcgggggggcccctccctcccaaccccttaaataaaaaaaagatccggggtgggggggcctaaaaagggggaaaccccccccggaacacgggtcctttggtttattaacggaaaacaggggggaagcattcccccccggcacaaaccgggggctttcaaaatttgaatcgggggggaaattggccccttggcacccattaaaag

SEQ ID NO: 100378 - DNA, 281 bp, Homo sapiens
ggtgccccgtcccaggaccgtggcaggagggggtcccgtcctgcgtggggcttgaaggcaggtgggcaagacggtgcatagcccgaatctatttaatgatttatttgataataccatttaaaaatatctcttaggccgggtgcaatggctcacgcctgtaatcccagcacttggagaggccaaggtgggaggataacctgggctcaaaagggcgagaccattctggccaacatggagacacccggtctatactaaaaatactaaaattgtctgggtgtggg

SEQ ID NO: 100379 - DNA, 406 bp, Homo sapiens
ctgactcattataaataatcagtaaacattagctatttttaaaactaattaattaagttagttttttagagacaggatcttgttctgtcacccacgctggagtgcagtgatacagatcatggctcactgaagcttcaaaatcctggactcaagtgatcctcccgccttggcctcccaaagtgctgggattgcaggcatgagccactgtgcctggacaacactacctattaatgtaggcagaacacattaccaataactttgataggatgttttagggtatcattgccttacgcaaagtacacaggtaagttttggggagctgaaggatgacaacagggttcttgacatcaaaaaaaattacatttttaattggggagggagggtatctaggttaaaaatgacattg

SEQ ID NO: 100380 - DNA, 366 bp, Homo sapiens
tgagccaagatcctaccactgcactatagcctgggcaacaaagtgagactctgttttaataaataaacaaacaaacatacatacttcctagaactcaataaaagggaaaaaccccaattaactgtctttttttttttttagagggagctcaggggcctgattttggctaatggaaacttccgcctccggggttaaagcaattctcctgcctaaccctccaaggtagcgggaataacgggccccccccaccaggctgggctaattttggtttttttagaaaagacggggtttaactatgtgggccaaggggccccccacctccgcctccgaaagagttggcattacaggcatgacccttcccggttc

SEQ ID NO: 100381 - DNA, 778 bp, Homo sapiens
  misc_feature (1)...(778): n = a,t,c or g
tgtactaaagtgtctgtagttttatttatggaagccaaaaatgagaaatagattaatgatgtataaacagatgaatgaatatacagtgatatttcatagcatgtcatctcagcaatataaaaaggagtgaactactcaagtatcatcactgacaaatctcaaaataaatataccgcacgataccatccagggataaagattaaacacttcacgacatcaaatcacgtataaaaatgtagaaaatgtaaaataatctattataaagcaaagttatcaatggtcatctggaaggcagaggtaaagacgttaccagactccaggtaaatatgaaggtgatggatcatattacaggcttattaatgtcaaaacttatcacactttacagtttaaatatgtgcagttttggccaggcacgggggctcatgcctgtaatcccagcactttgggaggccgaggcaggcggatcacatggccnggagatcgagaccatcctggctaacacggtgaaaccccgtctctactaaaaatagaaaaattagccgggcgtggctgtgggcgcctatagtcccagctactcaggaggctgaggcaggagaatggcatgaacccaggaggcggagcttgcagtgagctgagattgtgccactgcactccagcctgggcgacagagccagactctgtctcaaataaataaataaatataaataaaaataaatatgtgcagtttttttgaaagtcatttattttggccaggcacggtgctaatgcctgtaatccc

SEQ ID NO: 100382 - DNA, 469 bp, Homo sapiens
  misc_feature (1)...(469): n = a,t,c or g
ggctccggtccgtaatgcccgggtcgccccacgcgtccggattcagatgtgcacttgaagagaaagagaattacagtataagttcagagtttttaacttttaaaatacattactagcactgtgtctcatgcctgtaatcccagcactttgggaggctgcggcgggaggattgcttgagcccagaaatttgagaccgacctgggcaacatgatgagaccgtctctacaaaaaaattgtttgaattggctggatgtggtggtacatgtctgatactgaggtggggggatcgcttgggcctgggaggtcgagactgcaatgagctatgactgcacaactgcagtccagcctgagtgacagggcaagaccctgtnttacacacacacacacacacacacacacacacacacaaaatagagtcttttaagtatggaaggaagagtatttcccctgatattctccatccagggat

SEQ ID NO: 100383 - DNA, 395 bp, Homo sapiens
cacaaaatagcctgcattctatgtcatatttttgaggtacaggcccgtaaacttggccctttgggcggccattgacagaggacgacctggacccacgaggtggagacccaacctgggcaacatgaagagaacctatctctacaaaaaaaattttaaattagctgaatgagggggagcgcacctgtagcccctaccctttgggaggctgaggcaggaggatcatttgaggccaggagctcactgcactccagcctggacaacagatggagaccatttcttggacctagagagagagagagagaactacagagatggcgggagaaagagagaactgcaaaaactttagaaaaactgtcaggcttcttacgtggtgtaaaacaaaataggccaggctg

SEQ ID NO: 100384 - DNA, 411 bp, Homo sapiens
cccacgcgtccggtggttcctcttgaaagggggccctatatcttcctgatggggaatggcttaactgaagcctggggaatggctggtgttcgtgaaatggctgcattcagatgagaaaccgcacatacacatcctcacaaagtctcagagtcagctttccagggggctgggttttattccggtgcaaaggagtgagaatattgtacacacgaatgatccatggtggctcctgcctgtaatcccagcacttttgggaggccaaggcgggagcatcacttgagcccaggaatttgagactagcctgggcaacatagcaagatctcgtctctacaggaaaaaaaaaaaaagggggggcccgttttagagaacccagttttccgaccggggggtggcgaggattaactttttttg

SEQ ID NO: 100385 - DNA, 442 bp, Homo sapiens
  misc_feature (1)...(442): n = a,t,c or g
gattgccctcttcgccgcacgacgtccggattccnnnnnaaggcgcgcgtccggctgggcattgtggcaggcacctgttttccttgcttctcaggaggctgaggcgggaggattgcttgaaaataggagatggagaccagcctggacaacatagatagatcctgactcaaaaagaaataaaagcaggctaaagtgctgaacagacacttcaccaaagaagatatgcagatggcaaataagcacatgacacatgaaaagatcaaatgtcattagggcactgcaaattcaaacaagatgcatgtacacacctattacagtggttaaaatctgaaacactgacattatctaatgttggcaaggacatgaagtaaaaattgctggtaagaatgcaaaaatgtacagccactttgcaagaaagattggcagtttctgacaaagttag

SEQ ID NO: 100386 - DNA, 826 bp, Homo sapiens
tttttttgggagtatagattatgtttattttctctataatttccagggttttccaaaattttacaacaaacatctataattttatgaacactccccatcttatttttaaaaagaaaaaagttggggggcagagaaatgcccagctcagtactgagatccatcaagtgaggccagccggtatctgtcacaccaggcagaggccccgtgctggaagccctggaggttaccagctccaagcctggtatccaaggcctcctgggcagccttagcctcctccttccctttcctcccaccagaccctgctcctgggatgtccttctcccattaccaccacaaaatcggactaatttttcagggcccaacaccaattctgctaattttttttttggctcaatcttggctcatcacaacctccgcctcacagcgttcacacggattctcccacctcggccttctgaatagccgggattacaggcacctgccaccacgcctggctaatttttgtatttttagtagagaccgggtttcgtcatgttggccaggctggtctaaaactcctgacctcaggtgatctgcccgccttggcctcccaaactactgggattacaggcgtgacagcctcgcccagcctggatgaaggtgttttcaaagccctacctccccctgttgggacgaccctctgtctccctccttggaccactggcggccctttccttggacctgctttataatctttatcatgtcctgccttgtcctggagttgtttgcgcccaggtctgtttctcccactggactgaggcctctttgcaagcagaacctgcttatc

SEQ ID NO: 100387 - DNA, 443 bp, Homo sapiens
gcgcgcccggcccgaaattcccggaccgacccacccgtccggccttggccacggcctccttcaaggaaggaattcctccctccggccctggggccaggggggggggcccgtttctttccccatcaagccccaaaagaagggggttgggtttccggtggtggaatttttttttttttttttttttcccccaaaggggaaacaagggaccgggggggggaaaaacccggccctgggggggggggcccccacctggctttctttggttccaaaagggatagggcccctaaaaaaaaaaattttttttaaaaaaaaaaaaggggaacggccccgggggaatattttttttttttgcccccacactcccttttctttttggcgggggggggggaaacccctggtgggaggaaaggaaaccccccccccccggcgggaaacaaaggggg

SEQ ID NO: 100388 - DNA, 480 bp, Homo sapiens
  misc_feature (1)...(480): n = a,t,c or g
aaatacattgggaatttttttggagatttgcaacaaggggaaagaaacttgcagacaaactgcgtaccacagaaatatttttaaaaattaagaaaaaggtatgccagcctgatcaacatagtgagacccccatctctaaaaaaaatttttttttaattagtcaggcatggaaaccaagaagcagggagctaaggtgggaagattgcttcagcccataagttcgaggctatagtgagccctcattatgccactgtactccagcctgagcaacagagactgtaggaaaggaaaggaataaggaaaaaggaagggaaggggaaaggaaagaggaaagggaaggaaaaaggaaaggcgaaaagaaaaaggaaaggaaaggaagaaaaaaaataaaagaaaatgtggcttttatatggatgcaggattgctttaagaaaggcatagcgctgggcgcagtggctcaattnttctatttttttgaan

SEQ ID NO: 100389 - DNA, 432 bp, Homo sapiens
aatacaatcggcggtggtggcgctggcactgtaaacagggggtcaaccttctcagttttcagtttcttgattcgcctgtggctctcctcctcctcctcttccttctttaccaacatagagtttcccatgagccctgaatccggggcacttttgctaacttcccctgcagcggcgacgctgccactcccagtgcccccgcagaggagggggttcgcgcccccttcattgttcttggccccacagccatagaggtgccccccggaagggggcctggctggcaactgcatttctggggcccctgaagcaggacggggctgggccttccctggatttccccgcatacctaatcccgcttggcgccccggctgtcctggctttaactggccttcccctcttgttttttccacaagaagcctgccccccggggggggg

SEQ ID NO: 100390 - DNA, 394 bp, Homo sapiens
atacatgctgtcattagtaattattgaaatgttaatgaaaccacaatgagatacagctatataccctctagaatagctctaattaaaaagacagaaaataccaagtgttggatgaactatgaaaagaggcgattcctcatgcgtggctgctcaccattcacaatgcaacagctactttggaaaattgtttgtttgtttcttaaatagctaaacatatacccgccatataacagagtacttcatgcacctaagcacccaccccggaggaatgaaaacacgtccacgcaaaggcatgtcagggaatgctcacgtggcttcattcataacaggcaagagctgatgactccacaatcgtccatcaacagagagtgggagaaacaacaggaactctatc

SEQ ID NO: 100391 - DNA, 421 bp, Homo sapiens
ttcgccattctgctgcttgataacccctatcaggttcaaatcactctgagcctcagtttcttcatttatagaatcaagatgatgatgcctacttcacagggttgctaggggcttaactgacacaacgcatgtaaagaacaaggctgggtgaggctgagatgggtggattgcttgatcccaggagtttgagaccagtctgggcaacatggagaaaacctgtctctatacaaaatataaaaattagctgctcatgttggcatgcagatgtctgtagtcccagctacctgggagaattgattgagccctgcaggttggggctgcagctccagcctgcagaacagagaccctgccaataaaaaaaaaaaaaaactcgccactggcggcggttgcaaacctcctggttaatagggcacccccctct

SEQ ID NO: 100392 - DNA, 396 bp, Homo sapiens
aatacacgtgtgtctaataaaccttctacgtgcaaggccagtgtaaatccctccaccctttcaaacactagagctgaacatccaggaacattttgcaatgcaaagtgctttgagaaagagatggattctgtagtgccagtggcataactgatcaaggaagctgggaagagattaacgctgatgggagccagtcaggcaatggtggtttgtttctctccttgggtgttcctccatcagctgcatgatcagttcatagagggctctgcagatctttgcagagccctctcctgtaagatgaagagaatcaaatatgtcatggcaggatatggcactgtcagggtgcatgaagcccccgtctgtatgcaggacctacacatgggcaagcttcatcaagga

SEQ ID NO: 100393 - DNA, 373 bp, Homo sapiens
aatacattctgggtgtaggaggttactgatatgaaatgtgctctcctaacttttagtttacaattcactcttttagaaaacacaattcttattctaaaatgtacttccaaattcaaagcttattgcctgtaaattcttaagcaatctgatttattccgaaacaaatttatcaggctgggcatggtggcttatgcctgtaatcccagcaccttgggatgccaaggcagaagaatgaggatggcttcaggccaggagtttcagaccagcctgggcaacacagtgagacccatctctacaaaaaataaaaaaaattgctggacaatgctggagtctgatgtgggagatttgcttgagcccaagggttcaaggctgg

SEQ ID NO: 100394 - DNA, 380 bp, Homo sapiens
aatacaggggtgatagttgcacaacaatgtgaatgtactgaactgatgctttaaaatgcggtagattggttaaaataagcaaaatggccagttttccagcctggacaacatggaaactccatctcaacaaaaaaatagaaaaattagccaagcatggtagcacatgcctgtagccccagctaccctggaggccggggaggttaaggctgcactgagctatgatcaccacactgcactccactctgggtgacacagtgagaccctgtctcaaaaaaaaaaaaaggcaatttttacttttttttggtaccaaaattttgaaaaaaaggaataactaggaaagaaaagaaattttgaggtcccttttttttaaaccgccgttt

SEQ ID NO: 100395 - DNA, 464 bp, Homo sapiens
aatacatgtaaggcatggctcaagcgatcctttgctttatttaataaacccctcccctgtagataaagtccatccctatctttatgtgtgaacgtgtgcatgtggggatatataaacacacatagcggtgggggcagactaacacaatacacaagggaatgccaacagtgagccaggctcagtggtggtgcttgtagtcccagctactcaggaggccgaggtgggaggactgcttgaggacagcagtttgaagctgcagtgagtcgtgatgacacccacgaatagacactgtacactgtaccccagcctcagcaacagagtaagacgatgtctctctataaaaaaaaaaaaaaaaaaaaaatctgcttggccaggggggctcagccttttatttcaagcttttggggaggccagggcggtaagaatcaacttgaaataggaggttcaaatctgtgtggaccatc

SEQ ID NO: 100396 - DNA, 401 bp, Homo sapiens
aatacacgtgtgctggtttttttcggagacagagtctctgtcatctaggctggggtgcagtggcacgatcacagctcactgtagccttgacccttgacctcctgggctcaagtgatcctccaaccttggcctcccaaagtgctgggattacaggtgtgagccaccacacctggcctgtgtgaattttaacactgtcaaggatgtctgcttttcctgtatcctatcttaatggaaaccctagtcaaagtaagcttctataacatatctcataaatgctttaaaaacattcaatcctcacagtaaccctggatatcagtaggcaataacacaatctctgctataggtgaaactcaaaaggtaaggccacttttacagtcaggaaatcagctaccgatttcctg

SEQ ID NO: 100397 - DNA, 506 bp, Homo sapiens
ggcacgagctaaaaattaccactaactttatatctattccatagtattgtaatgtaaaaatgcctaagattagaatttttcctcaagattgaggatacaggaagatgcatcttgtttactctggattcctcctctaccatatccgcatgtcatccccaaggataccttttcatagtgaaaacaatttgaggcaagggaggtcatgaagtattctgagcaggagagtaagaaaaataacttctgaaatacgtgtactggtcagaatttgcttaaagagagaaatctggccatggtggctcacacctgtagtcccagcactttgggaggctgaggctggcgaatcaccagagttcaagagttcaagaccagcctgggcaacatggcgagaccccatctctactaaaaatacaaaaattagccgtgcatggtggtgcacgcctgtagtccctgctacgtggtggggggctgaggcaggagaattgcttgaggcctgggaggtggaggtt

SEQ ID NO: 100398 - DNA, 675 bp, Homo sapiens
ggtggcaaagttctatatatggtaattaggttctaatttctgagtcatttttcaagtttgctatatgctaacttttttttcctgctttctctgttactgatagaactgtgttaactcttccaccatgattgtagtttgtgtctctttatggtgatgtcagctgtttgctttatgtattctgagacttgtttttaggtgcctgctaatttagaattgttgtgttaaacagttctaacttttaattcctatttattaaacctttatcattgtcttactctgtagtaacatgctatgtcttactctgtgttgtgtaaaattgcagccaactcactggcaagtcccagggcttcaatttttgtcctcctggctccacaaggccatcagaaatgctgctcagcttctcacccactcaggaatcctttctttttgatggagctgtcgttttttgcattttctggagacagagacttgctctgtcgcccaggaggagcgcagtggctcaatcttggctcactgtgatctccgactcccgagttcaagcgagtctgctacctcaggctcctgagtagctgggattacagacacccgccgccatgcctggctaatttttgtatttttaggacagacagcgtttccccatgatggccaggctggtctcgtgggcaactactgacc

SEQ ID NO: 100399 - DNA, 377 bp, Homo sapiens
aatacatggttggtcccgaactcttgttctcaagtgatctgcccactgtgacctcccagagtactgagattacaggcgtgagccacagtgcccagccaactgtcttctattttctgtgtaagtccaggagacgtgcaataggtgagaaaactggaattaacatcaaaatgagccgagtatggtggcacttacctgtaatcccagctactagggaggctgaggcgggaagactgcttaagcccaggaatctgaggctgcagtgaccacctatgatcgtgccactgcacttcagcctgggtgacaaagtgaaagtgtctctaagtaaataaataaatcttgggaataaagttcttgaaatacctgttagacaccctctg

SEQ ID NO: 100400 - DNA, 469 bp, Homo sapiens
  misc_feature (1)...(469): n = a,t,c or g
aatacatggtgcttataccagaattgttctcctggaaatttatgactgagacattgagtcagttacctgtagggtaacctgtagaatcacagatttctcaaatttgacctgtcttattttaataccatgttgcccagcaatgtaaccttccctgaagtatcagtttttgtaaaatctcccaatcaatttcttatcagattatattaaatacctatcatctagagtactccagaagccaaataaatattaaaaacaaaaacaaaaacaaaaaactgagatagggccaggcatagtggctgacagtaatcccagcattttgggaggctgaggtcgaagaataacttgaggccaggagttcacaaccagcctgggctatatacagcaagatgctgtctctctaccaattctaccaatatttttataaaaactaggtgggggnggggcacctggacttccagctactcaagag

SEQ ID NO: 100401 - DNA, 462 bp, Homo sapiens
aatacagacaggtgagagattatatcttattgcgggtttaatttgcatttctctaatgattacaagaagaaagaaagaaagagagagagagaaagaaagaaaagaaagaaagaaaacataggggaaacatataagacattggtgtgggtagcgatattttggatttgatcccgaaagcatggacaacaaaattaaatatagacaaatggtatcacatcaaactaaaaagcttcttagttcatgacgtgtagctaaaacaaacaaactaaaaagcttctgcacagcagaggaaataatcaccagagtaaagagacagcctatggaatgggagaaaacatttgcaagccagacatctgacaagggtttaatatccaatacatataaggaactcaaacaactcaatagcaccgaaacaaacaaacaaaaaaacaattttgacctgctttctgctgacaaaggctt

SEQ ID NO: 100402 - DNA, 491 bp, Homo sapiens
  misc_feature (1)...(491): n = a,t,c or g
aatacaagtggngattaaataagtaaatacatctacagtattcaacagagactggtacgtggtaagcattcaataaaatgttaaaactaataataaaaataataaaataataaccataatataagatttctgattccattctaatgtataaaaagtaattattaaagtctcaaaattctacatcacagaaaatggttacaataattttggcctgaaaaagcttaaaagtgagcactatcaatcaccaacagaggcagtaaaaatatcaaaaaagcaccatccatagtttcaaaacatgttaacttgttggtgaatgttctgatatactttgtacctggaggtatccacaagagttgactgggaggctgaggcaggtggatcacgaggtcaggagatcaagaccatcctggccaacatggngaaacctgtctctactaaaaatacaaaaattatctggccgtgatggtgtgcaccctgtatcccaactactn

SEQ ID NO: 100403 - DNA, 546 bp, Homo sapiens
  misc_feature (1)...(546): n = a,t,c or g
gtgctcgaagcgtgcatactctagagcggncgaatacactcttccgcatccttatctaataactggccctcctccagtacccaagccagaaacctacagtcactcatgatatttcctctcccctaacacacagtgtatccaacacagcaccaagaactctgaatactgcttccagtacatgcctctccagaagagtcactgcccgtcctgttccaatctaccaggatccttccctagaaccactgcagttaccacctaactcactgactcttccaacccctcttagacattctccgtgctgggtatgagtgagaaccatcctccaagttgagcaagacaagggttgttttggttttacaaactgcaaatgtgttgaggtcatcaccacagccatactcttaccccccaccgaacaatgactgcccagggctcttatgtgagagaaagggattctcaatgtggcctgtgcagccaggtcatcttggcctctgtggccttttttagcctcaccttcacattctttcctgcatcttcatagctgtgggg

SEQ ID NO: 100404 - DNA, 522 bp, Homo sapiens
aatacaggggctgggtatcaagaaagcgcctgcattccaccagggccctatagaagccaattcaatccccaacaagagggcagggaacaggagtaggggcgttttctggagctgaaagtaaaaaggggaagcctagggctgggtatggtggttcatgcctataatctcagcactttgggaggctgaggtgggaggatcccttcaggggttcaaggctagcctgggcaacatagcgaaatcctgtctctataaaaataaaaaaggggcagcctagagacggccttaaaggctgaggctaaggttggaggtcagagagggcttcctacaccagaattcacagacagcaggccactggagggtgcccccagttcagggcccacgattatcctaccccacatttgctcaccaggccctggcctacccccaaagcctagctcttctgcccagattaacacgcccctgagtcccaccacaaaactgagaagtccctgcctccatgcccacccctgctggtttggaacg

SEQ ID NO: 100405 - DNA, 490 bp, Homo sapiens
aatacatgtgctgcttcattatgtgctctctaatgagctgaaaagaatgagaacaaactattttgatttctaagatttttttattgtctactcagttttcactcatttggtaaatataaaagatgtaaaagatgtactttataaatctttaaaatatttcttcgcaatctacagaatgggagaaaatatttacaaactatacatcctaggggggattaatatccagaatatatccatggaatactatacagccacaaaaaggattaaattctgttatttgcagcaacatggatggactggaagacattatactcagtgaaataagccatgaacagaaaagttaaacgctgcatgttctcactcatatgtggaagctaaaaacagtttacctcatagaagtgaaaagtagaaagtaaaacagaaaatactcaaggctggaaacagtagggggaaggtaaagatatgaagagatggctgcacgcggtggctc

SEQ ID NO: 100406 - DNA, 1570 bp, Homo sapiens
atgcgggtcacggcgccccgaaccgtcctcctgctgctctcgggagccctggccctgaccgagacctgggccggctcccactccatgaggtatttctacaccgccatgtcccggcccggccgcggggagccccgcttcatcgcagtgggctacgtggacgacacccagttcgtgaggttcgacagcgacgccgcgagtccgaggatggcgccccgggcgccatggatagagcaggaggggccggagtattgggaccgggagacacggaacatgaagcgcctccgcgcagacttaccgagagaacctgcggatcgcgctccgctactacaaccagagcgaggccgggtctcacaccctccagaggatgtacggctgcgacgtggggccggacgggcgcctcctccgcgggtaccaccaggacgcctacgacggcaaggattacatcgccctgaacgaggacctgagctcctggaccgcggcggacacggcggctcagatcacccagcgcaagtgggaggcggcccgtgaggcggagcagctgagagcctacctggagggcctgtgcgtggagtggctccgcagatacctggagaacgggaaggagacgctgcagcgcgcggagccccccaaagacacatgtgacccaccaccccatctctgaccatgaggccaccctgaggtgctgggccctgggcttctaccctgcggagatcacactgaccgtggcagcgggatggcgaggaccaaactcaggacactgagcttgtggagaccagaccagcaggagatagaaccttccagaagtgggcagctgtggtggtgccttctggagaagagcagagatacacatgccatgtacagcatgaggggctgccgaagcccctcacccctgaaagatgggaagccatcttacccagtccaacatcccccatcgtggggcattgtgcctgggctggggctgtcctagccagttggtggtcatcgggagctgtggtcgctactgttgatgtgtaggaaggaagaagctcaggtggaaaaggagggaagctactctcaaggctggcgtcccagccgaccagtgccccagggcttctggatgtgtctctcaacagctttgaaaaagccttgagacagctgttcttgtgagggactgagatgcaggatttcttcactcctccccctttgtgacttccaaaggagcctctggcatctctttctgcaaaaggcacctgaaatgtgtctgcgttcctgttagcataatgtgaggaggtggagagacagcccaccccccgtgtccacttgtgaccctggttcccatgctgacctgtggttccttccccagtcatctttcttgttccagaaaagggtggggctggatgtctccatctctgtctcaacctttatgtgcactgagctgcaacttcttacttccctactgaaaataagaatctgaatatacatttgttttctcaaatatttgctatgagaggttgatggattaattaaataagtcaattcctggaaccgtgagagagcaaataaagacctgagaaccttccagaatcaaaaa

SEQ ID NO: 100407 - DNA, 450 bp, Homo sapiens
  misc_feature (1)...(450): n = a,t,c or g
aaaaaangattactgccangnatgnnngganactctacagcgggcgcaatacatgtgtgcatgtgcatgtgtgttcacgtgtccacgtgcgtgtgtgcaaaaatgtgtgtgcgtgtgaaattctagatttgggatatagagacgggagcagctcaactttcctgttgtgttctggttgctcagactgaaataatatacctccaagagagaaactcatccctttcagagagagaatgtgtgtgtgcaaaaatgtgtgtgcatgtgcatgtgtgttcacgtgtcaacgtgcgtgtgtgtgtgtgtgtgtgtgtaagtatagaagaggcataattggccaggcatggtggctcatgtctgtaattccagcactttgggaggctgaggcaggcatatctcttgaggtcccgtgcgcaagactcagcctggccaacatggtgaaacgccacctac

SEQ ID NO: 100408 - DNA, 1059 bp, Homo sapiens
ttttttttttttttttgggaaagccactggaaataacagctttaatccctaacacgatttagacccgtttaccccgtgggtctgggccgaccgtccctgactcggaagatcccctgaactgcgccgccgccttccttcggtcgaacatcccagcagctacttgatgagcgccctccagtgggccttaggtccctatggccggcgcggggttacagcagtgggacagacaggccggttccctgtcctcgagggagcccatgatccgcggggagacaggcatttaaccgaccgactcacacggatcaacttaaattacaactgtgggtgaacccggcacaagaggggacgcgcggcgggtcttgcggggaattgacggaggcccgaccttcgtcttggcgaacccagggaagggcaaagggttggacccagggcaaagggaaacagagggacttggggacctgggaggttgggcgggaggcggtttggttcaattggaggaaagggaatagccctgtgtgtgatgaagcattgaagaggaggtcttggcgagcacccatcctagggcttgaagaacttaggcagtggcttccagcgtggggcggtgggggggacaagttgagccaggggcaagaagaatgggatttggccccttagagtacggggttttccaaatgtaacctcggcccctacagatctctgaagactatgtcagggggtttgtgagattttataacaaaattaagatgttagtacaatatcgtgtttcgccgccgggcgcggtggctcacgcctgtaatcccagcactttgggaggccgaggcgggcagatcacgaggtcaggagatcgagaccatcctggctaacatggtgaaaccccgtctctactaaaaatagaaaaaattagccgggcgtggtagcgggcgcctgtagtcccagctactcgggaggctgaggcaggagaatggcgtgaacccgcgaggcggagcttgcagtgagccgagatcgcgccactgcactccagcctgggcgacagagcaagactccatcttaaaaaaaaaa

SEQ ID NO: 100409 - DNA, 608 bp, Homo sapiens
gagagagctagcaccatgagttcaataccctggggtgagtcttggggaacataatcatatctctgatggtcaccatcaggacatgagaccaacagggcaggtctaacacttctggggcctgaacacaactgatgtcaaaatgaaccaactggacaggtgtcctctgtgtagggcaggcacagtccatcaagattctcctagaactgtccagaaccacccccctcccttcactctggttccacacttaatgaaaaaccttctgatgactaatacagggtgctggcaccataatgaagtgttttgaatagcagaaatgggctaggcatagtggcttcacgtctgtaatcctagcattttcgggaggctgaggcaggcggatcgcttgagccccaggagttcaaaacccagtgggctgggcaacatggtgagacactgtctctataaaaaatacaaaaattagccgggcatggtggcgcacgcctgtggttccagctactcaggaggcttacgtggggaggatcactcgagctcgggaggcagaggttgcagtgagccaagatgacaccacttcactacagcctaggcaacagggtgagaccttctctcaa

SEQ ID NO: 100410 - DNA, 4068 bp, Homo sapiens
aaaaaaaaaaaaggaaaggaaaaggaaaaggacaccaagttaaaaaatgggcaaaagatgatagacacttcacaggagacaaaatcaaaatggttaataaaaacataaaaatatgctcaatctccttggtaattagctaaatgcaaattaaggccataactatacaccccaccagactggcaaaagtgaaatgtctgccaaggatgggaaggcaagggaattctgttttactgctggtgggcacgtaaactggaacaatatttagaaagatcttcataccctagaacccaggagtcagactcctgagtacaaaccctagaaaaatttgtgcaccatttgcaaaaaacacacgtgcatcagagacatggacaaaactgttgctagcagcattgtgtgtagttaccccaaactagaaacaaaccaactgtccatctacagcaggcatgtccaatcttttggcttccatggaccataccggaagaactgtctcgggtcacgcataaaatacactaccactaactatagctgatgagctaaaaaaaaaaatcgcaaacaaaaatctttataatgttttaagaaagtttacaaatttgtgttgggccacattcaaaggcatcctgggctgcatgcattggacaagcttgactgacagtgaaatgaatctgtgaactacgatacagccaaacaatggaagtttttagcaatgaacatgcacaaactatactacgcacagcaacatgaataaatctcacagacataataacgagccaaagaagccagctgccagaatttgcatctgtatgattcaaggggataaagcacagaaacaggaaaatactgcaatgcttgcataattgggtgctgaagactttttagaaaaacaagaacacaagactcacataagccagggcagagaggccggaagtgacactgtgaggggagggcacttgggtgctggcaaaactatttcctgatggtggttgcagatcgtttacttcctaacagtgtgttaggttgtgcatttatgttttattcacttttctgtatgttgttttattctgcaggaaatgaatgaaaaagggattctgcctcagctctgagcccctcagagtggggccagggaagaagcagacggcaacgccagggcagctgtctggcagcctggaaggcctgcgaagcttcctaggggtccgaaggagggtagacaggtaggggtctgctctgtacccatcaaatctccctccagtgagaatggctggaagatggcttaaaagggttcaccactcacacacacttctgaggtggtgggggttgtctgtcaagcatcttcacagggtcactgcccctcttccccaaggacaggcaacctcctggcactgccccctcagcaggcagtctaggtggagggaacagggcgtgcaggcagagataaggcagggggtgtgtgcgaggtgcccagcgaggggcttgatgctgctgggtcacagaaacagaggttgtggcccttcccccattcccctcgtctagagacaagcacggccctcccatgttcctggtgtgaccctggtgtcctaggccatccctccagcgcctggatcaccctcaaaagcttcttccctgctgagcttcaatctgcctttctatgaaatggccccaataagccctgcctgcctcagggaactaagccgcaggtcccaggtccccctctcccccaatgcccaccctcgcccatcctgaggtgcaggaagcacctccctggggctgcgctgagccccaaccagcaggggagctccgcacaacgtggcccagaaggatcagtgggaaccgaggtttcttctggttctaaaaacatcttttcaaggctgggcgccgtggctcgcgcctgtaatcccagcacttgggaggccaaggtgggcggatcagttgaggtcaggagttcaagaccagcctggccaacatggtgaaaccccggttccactaaaaatacaaaaatttggcaggcagctgtaatcccagctacatgggagggtgaggcaggagaatcgattgaaccctggagatttgcattgagccgagatcacgccaatccactctagcctgggcgacagagtgagactgtgtcccaaaaaaaaaagaaaaaatcttttcacaatacaaatctttattaactgaaggcacggggctcaccacaatccttcggatggaaccacaggaagagaagaagcatgtttcaccctgggctgggggtgcttcccaaagccactggggcccttttcccaagccccagaactgagcccacctgaactcatcttgaaggtaggtatgtcagtgagtcctcccaaagcctcagtttccctatctataaaatgaggaagcaggactgcccctagggcaaggcctaggcctcctgccagcccaccctcacagacccagagggcaacgcagggtgaggcggggcagtttcactccccagtgctgtggcccccttggttgagtgaaagcacctccagagccctaaccctagccctgggagccaggcaagagacccccacaacgaccatcagaggtcgtgaggggtggcagggagcctggcagggagccaggcaggggccagggtctaggctcagagcagtgaaggatagatagggtcacatgccagttagtggcagaggtgggacttgaacccaggcctctgtgagacttggttctctcacctgtaaaatgggtctactagcagctgcttctccaagcaaatgatgtcaagcacccagctcggcacctcacagatgtggtcagtaaatggtaatcccaaccctacccttatatgtggactagaacacttatggcaagtctcgggaggtcatgggaactcctcatggctccttcttcatgctggaggaccacggcctgccccatcccaccccaacacactcttgaaactgcagccctcggcctagagcagctcacacagacgtggaacaactgtgctaagcaggtgcaaaagtctgggaggcgaaggctggaccagggccccagctgggcttcgggtaaccacaggcctcaactgtccagttggccagagggacctatcacctggctctgggccccaggatgctttagccacttgagccggctccaggtgaccgtgtaagtgagataaagcaaaggtgtcctggactgcaccactcactagctcagcaccccaggcaccaggctggaaaccacatctcgcacccaattctccatttaaaaattttacaggaaggggccccggcacagtgcctcatgcctgtaatccccagcactttgggaggcccaaggtgggcagatcacctgaggtcaggagttcgagaccagcctggccaacatgataaaatcccgtctctactaaaaatacaaaaaattagccaggcgtggtggcgggcgcctggaatcccagctactcgggaggctgaggcaggaaaatcgcttgaactagagaggcggaggtggcagtgagcggagatcacggcattgcactccagcctgggcgacagggtgagactacatctcaaaaacaaaaaactaaaataataaaattttacaggaagagaaactatggccacagtggggagtggcatgactccctaagcaagttcaggtcagacagggcaaagaattctgactgcagggaggaggaatggctggttttccagagatagatcagaacaacagaagctccctgtgctccagcctcggctgtggtgcactgacctctcaccccaggcaggctgaagaggaaacccctgcagaggtggccttggacacctggttcctggaagcagctggctgccgtcatctgcagggcctgcagttccaccgcaccctatggccccctggggtcacagcctcccacatccgctaaccagcctcatcacttgtttccgccagcaaaccacaggtccccagaacacacccaggggaagggggctgcaggaccttctcccccagtcagtcactgtcagtgggcccaagtgctgacctcagtttaggtttccctgacataaggtgctaagaaaaatcacaagg

SEQ ID NO: 100411 - DNA, 561 bp, Homo sapiens
  misc_feature (1)...(561): n = a,t,c or g
gctcgatcctctgagcaggcgcaatacaatggtgtagggataatataaatgaaatttaataattctaactgaataatggagaataaagttatgattattgacaggataataatggatcatgtggaagtatctagttgaggcattcactgcagagaggtgtagactccgtcaatctttaacttaaaaggtaaatgctgaatagctttacagtgatattttagtgtagatgtggatcaggttttgaaatattttaagaggattagttctaggacaataggtataaaactggttagattcacaaatttctgagcactgtccatagtaaagacctggtcgcccagtggttaaggtagtttgatttaagcatctggggattgcatctgttttgaggcctaataaggggatagttcatgagtgcaggatgtcttcagatgagattaatatatggatgggtactctgttgggaaaatnggtcggtatcaacttcaaagagnncgagttctcctggcataaacgctggggctgggggtatataacaattgaagcttaagccgggcgcaa

SEQ ID NO: 100412 - DNA, 399 bp, Homo sapiens
atacaggcggtgagtatgcaggactgttttttgatttgctctgatttttagcaagccttacacattttcttttgtatgcagtatttaataaaataattttggataatttggcttttagcattaatcaacaactttttttacatcctcaatatgccccaagacaaattattgattcagcagattttagctgaatcttttatttctgaacgattggagagaacggctgtatccatttctggagaatagttcaggacttagattgaggatgtctttctttcatgaaattaagcactgcaatatcatctggttcaagagcccacttaacatggtctagtctatggaccttggtagtacgtacccacctttgctccaagacttggctggtgggggctcggcctt

SEQ ID NO: 100413 - DNA, 393 bp, Homo sapiens
aatacagtgcccacatagacacactgtatttatgtgtgtgtatatatacatgaatggataaagaaaatatgatttaaatagacaacagaatattactccagcataaaaaagaatgaaatcctatcatttcaaaaggatatgttgatatattatatatacacacatatatgatatatacacacacatatatacacacatatatacacacatatatacatatgcacacatacatacatatgaatgacagagtcctgataagcctcatactaaaaaagaagaaattataaaatgataatattataactattacagttgggagttagggaatataaagtttaaatgaccaacctcagctcatactaaaaaaaataaaataaaatgttgaagtaaaat

SEQ ID NO: 100414 - DNA, 396 bp, Homo sapiens
aatacactgatctttattggttcttttcttctaattttaggtttggtttgctctcacgtttctagttctttaagatgtagtgttatacagtgtatttgaagttttatacttttttacttttatacttttttttttttttttggggaaagggtttctggtttggccccccgggggggaccccgggggggggatttgggttcatggaaggcttggcccccggggttaacccatttttcgggcttagccctccggggaagggggacccccgggggcgggccccccccccggggagggtggcccctttttttaaaaccgaccagggtttccggggttaccccgggagggccccatttcccggcccccaggaaccgccggcctgtgccccccagggggaag

SEQ ID NO: 100415 - DNA, 412 bp, Homo sapiens
aatacaaagtgggggttggagggcggacattagagtttcagtgtttgctcctcttccagcatcaggcgagagacagaacagtcagagcctcctgggcaaagcatttgacgtccacatcctgggcctgggtcagcttctctaggatgggcttgacttcactctgccaggtgctgttgtccaagatgggccctatcttctgtagagacttggccacattgaagcggacattggcaaccgggtccccaaccatgcgcagaaccgtgggaagcatgtgcttggtggcgatgaccgcccttaactcttaaacagcaacattctcctaaaacaggatctcatggcggacaggaaccaggcttccctgctactgacaaacccttgaatatacatgccgcgcctccttctacccccctcc

SEQ ID NO: 100416 - DNA, 520 bp, Homo sapiens
  misc_feature (1)...(520): n = a,t,c or g
tctcatcctctagagcggccgcaatacaatgtctgtgtggctttggtattggaataatactacctcataaattagttacggtattatctcttctattttcttagagggtgtatgagcaattagtattttttctttcttaaaactcttacacaattcacgactgatgccatctggtctggagttttcattttgggaatattttaaattaagaatttttaaatagatacagggatattcaagttttctatttcttcctgagtcagttttgctagtttgtctcttttaaggaatttgtccatttcatcttgttgaatttattggcataaagttgtccataatgttcctttattatccttttatgtacgatctgtagtaacatctactttttcattcctgatatttaaaacttgtatcttttttccttcataaattaactaaaggtttatcaattttatttatcctttctaagaacctgcctgtgatttaactaatttcctctactaaacaggtttttgttttn

SEQ ID NO: 100417 - DNA, 412 bp, Homo sapiens
ttgctcccagtgaagtcattcttcatgttatcttgcttggcgagcacttccttctggaaacgcaggaacatcctgtacctgtctgcgctggtggctccggccaggtaggagctgacatagtggtgccggtccctggtgcctctggacccggcctcctggtagcacagcaccttcaagtcgggcagccggagttcttccctcctgcgccatccaggagggccccgtccaggagggcctcctttcttttcttccttcccctctctgacagcctccactggaaggaaatcctcctctgaagtgtgggaaagagaggcctgggggttcaggtacctgaacagcggggtgtcctgggcctcactggggaccacgggccggggggtggggaatggggcccgggccccttttccctccg

SEQ ID NO: 100418 - DNA, 478 bp, Homo sapiens
aatacattgtgaggtgtagtgatgaaagcaggaaacgcgagtcattcgataagggcagcacaagctgaggagtacaggccgcctccagggccaggaaacggattcttccgcagagcctggaaaggcactgaccctgctcccaccttgactcagtgggactgactttagaattctggccttcagaaatgtaaaggaatacctctatgctgttttaagccactaagtgtgtggtaatttattgcggcagcaacggtgaactagtattgtagtgaagcctcaatacccacctgaaggggccaggcgcagtggctcacgcctgcaatcccagcaccttgggaagccgaggcgggcagaccacttcaagtcaggaactccagaccagcccgggcaacatggcgaaacccccgctccacaaaaattacacaggtgcggtggcgcatgcctgcaatcttcattactcaggaagctgaaacatggg

SEQ ID NO: 100419 - DNA, 512 bp, Homo sapiens
  misc_feature (1)...(512): n = a,t,c or g
atacaatgcggggatagcgcgttggaccatgtagtcctgcaaggggacgacgcccccggccaggcgacggcccagacgtgtgggcgcagacgctgaggggtggccgcgtgggtctgcggctctgaggcctggctttcattctccatcagtccctgtacgagcggntaagtcagaggatgctggacatctcggaggaccggcgcgcgctgaaggacgtcatccgagaaggagctggagacctagtggcgcctgatgcttcggtgctaggtacgccctagggcgagttgtccgcaggatccatgtcatcgcactcttgctctccacanagaaggacagcagaagctggaagaaagtcctctgtgcacctgggctctggccgtgctctcttccacccatcgttcttatctcgcactcagggtagaaaagtttccagtcccgaaattcccccacagcagaggcccggccccaattaacaggccatccaatggggtgtccagccctcacagtcggcg

SEQ ID NO: 100420 - DNA, 377 bp, Homo sapiens
agcgcactacagtgctggtgtttcatttgaggcttattaacccctgaatcatctgacaggggaggtcctgatactaatgcgtgcacattaatgttataaacgcctgatggggaatgtctgttcgcttatatcaaatggaatataacacttcttagttttctcatccactctgtaaccctgaattggtatagtctcaatccccattccagaactaatgctgggagcaactgcaaaaagattgggtgtaagtgggggaaatgccacgcttggattccttgagccgtccactctgaccattgctgcacactttgaggctcgttgatggcactatcttgttggggcttgcactactggcctggagacagataccattcgaa

SEQ ID NO: 100421 - DNA, 375 bp, Homo sapiens
actacacttgtgcaggcagggaacacacttgacagagaactactttggtggaactggacgggtggtgtttcttcactggattatggtgaccgcttcctggatggaggcggccacgtaacctaaagttttggcggttaagccactcacgttgattcgaccacttggcatgaggtagatgtgcttttcattgaccagacactcaacctgcttggggctcaacccagagaactctgaacatgccaatttgatcattgatgaggttccaggtcccaggggttctgagggcttatagtcgtgccctgagctcacatctcatggtcagaacccggtcagtcattgatttcacattacctgtacatttctcgacgagctgag

SEQ ID NO: 100422 - DNA, 420 bp, Homo sapiens
  misc_feature (1)...(420): n = a,t,c or g
aatacatgctgggagaaggtcaagacctatataaatactgatttataccattttcatggatcggaacacaatattgctagaacgtcagttcttcccggccgggtgcagtggctcatgcctgtattacacgcaggtggattgcctgaagtcatgagatcgagaccagcctggtcaacatggtaaaaccccatctctactaaaaataaaaaattagccgagacgggatttcactctgttagccaggatggtctctgtcttctgatctggcgatccacccacctcgaactaccaaagtgctgagattacaggtgagagccacttcgcctggtccgcataacgattttcaacagaagtaccaaggtacttcaatcatgaaaggatattccttttaacacgagttgctggaataggccaactacn

SEQ ID NO: 100423 - DNA, 542 bp, Homo sapiens
  misc_feature (1)...(542): n = a,t,c or g
caatcactgtccagccaacaccncccagtccagatccctgcattcgatccaagggaggcagactgctgggggaaattgagagtcctcgaggtgcccctggcagtgagcgggccagaaagagaagcaggaaggcgccagcatcacgaggaactgcttccctcaaaactgctgtcaggccaggcacggtggctcaggcctgtaatcccagcactttgggaggctgaggcaggcagatcacttgaggtcaggagtttgagaccagcctggccaacatggtgaaaccccgtctctactaaaaatacaaaaattagccgggcgtggtggcaggcacctgtaatcccagctacttgggaggctgaggcacaagaattgcttgaacccaggaggtggagcttgcagtgagccgagatcacaccattgcaaatccagcctggacgacagagcgagacagtctcaaaaaaacaaaacaaaacaaaaactgctcctgtgagcagtaactttcccatttcccagaggctcacgcctcagtttggttctgagcc

SEQ ID NO: 100424 - DNA, 407 bp, Homo sapiens
aatacatggcctcatgaactggggggctgtctcatttgcagggggctaacatcacttcagcagggggcaaataggatgtagccacctcggcataaacacgccacagagccaactacatatactagcggcaggggcaagggcatggtatgggacggctgtgtacaccctgccataaccgtcactgcatgactgctgcacacgtgtgcggcatcggcgaatgctgactgaccatcaggccgcgcatatctgaatgctgcatatccaccatagaggtcagcaccgtaaaagccgtactggtaaaccacacctggatatgcggggatggatgctggaggtaccgctcagactgcaccatatactgtccaccctctgcccctcaaatggactcctctgatagcgggtgccgt

SEQ ID NO: 100425 - DNA, 429 bp, Homo sapiens
  misc_feature (1)...(429): n = a,t,c or g
aatacaggaggggaatggcattatggcggcaaagtattctctgtagaacgatggaggacgaccctccatagcctgagagataaaggcaaagagtgccctctcagtgtccagaagggaaacggcaggttttcttccttccatggcaggcactccattggtcactccggatcaccttcatccttatgtagataagagtgctagcagagctcgaaaggcagagattcgcttgtgtggggtaaaagtcagcatttacagcagcagctgtgctaccgactgctccatctcacgtaccaccgactgcactgagcggggccctctgaggggaaaggctgcacggngcacggatacatctggaggccagtcattctctggaggcaggccaatcaggccaaaggatttgcccaaactgggcgggttgagagttttccc

SEQ ID NO: 100426 - DNA, 627 bp, Homo sapiens
  misc_feature (1)...(627): n = a,t,c or g
ttttcaaaggaagtggggtgtttaatagaaaaaagaaactggaagagcatccactatggcaagatgtggcacttggcaccgccctctgcccccagctccccagtctgccaggctggggggtcatagaatggccacgccgtgctgcctgtctcccctgcaacccacagctgtgccctcactgctgcgggccacaggaggctcagtaccccctttaggcggggggacagtgagggcagcaccaggagaagccaggagctgtgtccccatccaccttcaggtccccaggtcccctccgctccaggtgaggccatgacagctatggaaggcaggaagctgagccctgctgtggcacagaatccccctcaaaggaaaaacacccttcccaggggtcctctcccaaggggggctcccaccaccaccccttgaagtctcagaccccgttgaactcctgtgggagctggtctggctgcccctatccgcagtcaccatccagggtgctcagggcaagaggccctcgccctgtgccctgaccggcctcacaaagaccgtggagtgaggcggggagctgggggaccacgggggcggagggtacagctgggcggaattccgccgctnnnnaagaaagtc

SEQ ID NO: 100427 - DNA, 412 bp, Homo sapiens
aatacagatggggtttcactatgttgaccaggctggtcttgagctcctgacctcgggtgatccacctgcctcagcctcccaaagtgttgggattacaggagtgaaccaccgcgtccggctttttttttttttttttggaacagggcctcactccaatggcccaggctgaagggcagggccacaatttgggttaattgcagcctcaacctcccggggctaaggggaccctcccaagaaccggaaacttcaaaggggggccacataccccacctaatttttcatattttttggaaaaaacggggtttcaccatattgcccaggctgggactttggggctaaagcgatcctcccacctgggcctcccaaagaactggaattggaggggtcaccccccgcccccggtaaagttttt

SEQ ID NO: 100428 - DNA, 455 bp, Homo sapiens
  misc_feature (1)...(455): n = a,t,c or g
gctagcgtgccttaagttagganacactagagcggccgcaatacatggaggaggggagttgagtgcggggttttgttcatgctggcgtggggagtgagcgtgggggggggcacacggggcggaagggagtggggctgggcacacactgggaggaggggagtgagtgtcaggccgggcacatgctgtggggggagtgagtgtggggccgggcatgcactgggaagaggggagtgagtgtgaagccgggcacatgctgggagggggagtgagtgtggggccgggcacgcgctgggaagaggggagtcagtgggcttcctgtgttctcggtgcctcccatggcctgacgtgaaggagagaacctgagctgtttggatcaagagcgggcactgacctatggaccacagcctggaggtctcttcttacttccaccagcctggccgcttccagactgcttg

SEQ ID NO: 100429 - DNA, 365 bp, Homo sapiens
aatacatttctggggggatgggcctcttgagtgtggcggtggttacaagatcatataaattcacataaatttaggccgggcacggtgactcacgcctgcaatccttgctgtttgagaggtcaaaggggaaggatgacatgacgtcaggagttcgaaacctcttgccccacctggcgaggccttggatgtacaactgtgtgccaagattaggcaggcggggcatagtgcactcctgtatcccagctactggtgtggcagaggcagaaaactagcttgatcccccgatgcggaagacttggtacgtcgaatatactggacttggacgatggaccatatacggacctccctatttgtctttccaacag

SEQ ID NO: 100430 - DNA, 443 bp, Homo sapiens
aatacagttggtgggatttggaggaaattgttagcaggtaacctgattatagcatagaagttgggattagaaccaaacagaaatagtttaaccccagaaggtgtaattcaagttgtgaaagaggatgagatgccccagaaaaaaatagagaagaaaaagaatgaaggtagaacacctgtgtggttcaaaagaaaaaggacccaagagggagagaagttccacaaatgggtgaattaagagttgcaggccgggcacagtggctcatgcctgtaatcccagcactttgggaagccgagggggcggatcaggagttcgaggacagcctggctgacatggcaaagccccatctctactgaaaatacaaaaatcagccaggcgtggtggcacatgcctggtatcccagccacccaggaggccgaagcaggagaatcactggaacccgg

SEQ ID NO: 100431 - DNA, 1183 bp, Homo sapiens
taccacagcagagcccccagctcaccacagtcacggccccgagacccagagccctgttgatgggcaccaccatggccaacctccagactcgagtttccacctcccacctgcaaggcccaagactgacgtcagcgctgacgtaccagatggcccaggttgctgtggccacgccccctgtggtgtctgtcctggcagttgtggtgctgtcagccagggtcacagtgcttccatcaacgcaacgggatcagtgttgtgataaggcagctgcaaaaagcggcaggtaggcagccaccttcgcctcaccaaactcgaaacaactcacttgagtgagttgcatcaaacctttctaaatttctcattctagaagttgctgagttgttctgccatgtgttaacttttttttcttatcagtaaaatcttttatttggtttatatttcaaatgtaatttaaaaagtctataagacaggaaattcgaattcgataatatgaaagcaaaggagaaacttaagttgcacccatttagcttaagttcagggacaacattcattttataataaatccaaaaatttgattttttttcatcgccatcagttgtacttaagcatatccatcatatttccagttgcaaaaagatgggtgaaggaactcaagctgaagagggtgtctgctgaattttgttgcttcggtaagagcttttcaccatcagtttttagaaagtacgcatggctctccttctgttgatatctctcttgatttggcaaagagtacaatgaggacagcaaagagttgccatatagtcatcacaaatagatccagggatgccatatcgggtcctgtagagagtcctcattgcgacgcttgttccacacagacagcattcattcatatcagctgcaacttgacacccaaggcacgggaaacaaaatgtgccacagagacagactccgcagtcgctgaaacagtcacacatgcctgtctgccagttggagttctggggggccggaccgggaccgactccaggttgggtcacaacgaccaccggcgcctgagcttgcattttcagtgcagggccttaaaagcagtggaaattagtaaacaaggttccgagcaggaaatgtcttgtggcctgggagagaatctcaccacaaatgaaaactacgtgaaaggggagaggtaactgtg

SEQ ID NO: 100432 - DNA, 420 bp, Homo sapiens
aatacaggtggtcataacgtattaagagctgtaccatagagtcctggccattggcacaatgaaaactaacatttctttttaaagatttctcttacttttaacccatatttgaaatcacaagtgcaatgttaacttttacaatggccccaggagcctagaaaaaaggttaataacattacctattcttcattattttcttaatttcattctctgtaaaagcagctacctaacattactaaatttaaaattgcagacgaatctattctgcaaaatgagatgggtctcattttgtcacccaggctggagtgcagtggcacgatctcggctcactgcaccccaagcaatcctcctacctcagtctcctgagtagctgagactacagaggcatgccaccacacttggctaattaaaaacattttt

SEQ ID NO: 100433 - DNA, 430 bp, Homo sapiens
gttctgtccgttagctaggatcctccagagcggccgcttcgccgtcctcccctggaactcggggttggttagaggtcggcgtcaggaaggacctcatggggctttcacacgagagcacacatcctcagagccccccagcctcgttctgaaaatgaaagacggagatagcctgtgctctgagggctgcgcaccaggcgtcggggtggagattgactcctcgagctcctcggagccccagcgggtgccactgcccgccggctgagcccacgtcccgataggaagcctggggcgctcgcaggaagggtcacggatgctgcccggctccccaccagcctgcccctcaggacatctcctgaggctgccactgggaaagaacaaacttgggaatccaagatggagggcagcaggacgctcccacatcccccactgg

SEQ ID NO: 100434 - DNA, 392 bp, Homo sapiens
aatacaggctgggggtgaggaacaaagtaagaggattgacaagcaagttctggagctgacaagaagcctaaatttcactgaggtatccaaacagggaacacaccaaagaggagggcagggttagaacccgaggccttgctgccacgtgaagaggatgaactccatctggcaggcagcaggacatcatcgaggaggttaaacaaatgaaaaaaaaccataaataacgtaagaatatcagcttagaaaataatcagtggggccacgtatggtggctcacacctgcaatcccaaaactttggaaggctgaggcagaaggatgacttatgcccaggagttcaagatcagcctggtcaacatggcaagactctgtctctacaaggaaaaaaaaaatg

SEQ ID NO: 100435 - DNA, 587 bp, Homo sapiens
  misc_feature (1)...(587): n = a,t,c or g
ccgtaaacttagttgataaagcagcagctgggtttgagagaatggactctaattttgacgacaagttctacagtgggtaaaatgctatcaagcagcattgcacgctacagagaaatcttttacgaaaggaagagtccttcgatgcagcaaacgttattcttgtctcattttaggaaattgccgtagccattctgacctttagcaaccaccaccctgatctattagcagccatcaacatcaaggcaagaccctctaccagcaaaaagggctagatgattttcagcattttttggcaataaagcatattttaattaggtatgcccattggtttctcataatagatatactgctattgcacacttagtagactacagtataattatacctttatatgtactgggaaaccaaaaaaattacttatgaattggccattaaggggatnttcgtgggatggaatgggcctgaacctgaaccaccaccaaccttgtgaagggnnntcgagatgtcctggccccgtatgggaacactatggcgcactcatttttgagaggccgatgctgataatttgtgaatatgctgcgcccgcg

SEQ ID NO: 100436 - DNA, 1343 bp, Homo sapiens
ttttttttttttgagacacagtttcactcgttgcccaggctggagtgcagtggcgcaatctcggctcactgcaacttctgcctcctaggttcaagcagttctcctgcctcagcctcccaagtagttgggattacgggcatgcaccaccatgcctggataattttttcttatttttagtagagacaggatttcatcatgttggccacgctggtttcgaactcctgaccacatgtggtccacccaccttggcctcaattatgtgcattttggtatatttacttgtatttcaacatcttgtgagtttgaaaaacctgaaaggccagaatgcttccttttatttctcaccatttgggcagcacctaagtggttttgtaaaatgcagcatctggtgctgtgggtctctctcaggccttgagggacacttccttcctccccactcgcctcctctccactagactttggttcctagagggcgtggggccgggtctgaggttcttgcctgccttccctcccattggtctttggttgctcatccctctaactgcaccccttcttggtccttcctccacagacttcagataatagataagtcattagcaaaccagaccgaatctttagggtgaagagctccccaaagccatctggtgaggtcattgtggggaccagggactgattatttgtcacctggatcacaaagatgggactgtctgctcaggctggtggtgacaggatcctgacccgtggtcctctcccgctccctctgctccaccaggacacatgtataggacactgtgctgtgtgcagtggagaaatctccctgggccaggggaaagttcagacagtgcctctagattgtgttttgcctcctccaatgtagagttgacatctggaccccagagcccagcagggctttctgtcagacatgctagggtggtagaaatgggccctccaggtccccctgcagtgcactgggcagagacctccggaaagccggcagcgggagcgcttcctgggcagcttcccccagcacagtgttcccaaaccagtccatccggaaaacagtctgtacagcaaatgctgtgtgagatcttaggcttttcacttttttttgttttgttttgtttttgaaagaaagaaaaaaatacaattaccaagcctcttttgtaaatgggtttcctttctatgtataaaatcgtggtggtcccttgtttttacatgttcatgctgtgtaattttgagatgttactgagatatgttctgaacataatgtgcatttttttctgtacagatgaaatgggagaatttaataaagagtttgcaggtttttacttgttaaaaaaaaa

SEQ ID NO: 100437 - DNA, 405 bp, Homo sapiens
gagactgcatagggctcggcgtggaggcacacacctgcaggcggagctactcaagaagctgaggcacaggtatggcttgaatccagaaggtggaggttgcactgagcccatatggtgctaccgcactccaccctggacgacagattgagaccctgtctcaaaacaaaaacaggacataacataatgatacccagtcttttggtattatgttatagtagccatatcacactaatacagatggtttgtgggaagacaaggcacatatctgaaaacaggatgcactggtatggttaccatatgcacacatcctattctttgatcattctagcttttaggaaactcaattaactatatattcccacctgcccttacagaaggcaactgactaaatattagcattttgcc

SEQ ID NO: 100438 - DNA, 404 bp, Homo sapiens
  misc_feature (1)...(404): n = a,t,c or g
ggcagcaccacacctgccatggaatttgcaagtctttttaaaaaaattttattgattgattgtagagatggggtcttgctttgttgcccaggctggtcctgagctcctggcctcaagtgattttccttccttggcctcccaaatttttgggattacgtacataagccaccatgcctgaccacaatttgtggttccaagagtgtgatttttatcatcatttgggaggatgttggggcctctggcatgactgatgactgtctctgagtggagtgggctttggaagggcgatggggcttgctggacaccccattggaccgtcattttgatgtaggaggcctgtgggttgtcttgccctttaaatgtgggttggtnggaacaaaactctggtttgtcacaggcatata

SEQ ID NO: 100439 - DNA, 575 bp, Homo sapiens
ttttttttttttactatctagagtctagagctcacagtacagagttttgtgaaatacggtgcctatgagaattttcccatggtacacagaagcccacaaggtgccctgaagcacaagagccattgttggcatacacggtgctcaccctgagcttctcagacaaaacattctggatgcgaagtacctgtcgagaaaagatcgtttattagtatattatgtgagtaaacacctgtttcatgatgtccttcccaaacattctaggataaatctatttttcagaaatcagaagctaaaatctgtatatcttcaataaattgttcttcttctgatgaaagtactaatgtcatagatatctatgcaccaaagtgaactggctttctgacattagccaaattcctcagggatgacttacacaatttttttagtgcaggcatcccttacagaaggagttaagatgctcttatttagttctcaagtggatggtggtcctccctctgtgggaagaatcttgcctttgagattacagtatggggagagaaccaagacaaaataatgaagaaacacccagtatatcc

SEQ ID NO: 100440 - DNA, 430 bp, Homo sapiens
agaggtctgggcctcaggaataacaggaaaggccataatggcaatgcctatagtaattcagcccaagaatccttctagctatccttgtagaaggcagtttcctcttcagctggaggccaaagagggatttcagcttctgactgaaaaatttcaaaaacatggattattaataccctataacaccccatcttacctgttaaaaagagcaatgaaaaatacaggctagtccaggacctgagaatcataaatgaggcagtagtcccaatacacccaatgatccccaactcatatgtaattcttccccaacctccagatgctcagtggtttccagtcttagaccttaaagactctttcttttgtatctccccctcgacccatcctcccaatttctatttgcatttgagtgggagaatgaaaaggaaggagtcag

SEQ ID NO: 100441 - DNA, 411 bp, Homo sapiens
tgagtggctgggaccacagacgccacacacagctaatttttatgtattcgtttttatttttttgcagagacagggtctccctatgttgcccaagctggtcttgaactcctgggctcaagtgatcctcctgcttcagcctcccaaagtgctaggattatagccaccgcacctcgtcttgaaatagccttttaaatgttcacctcagcttgcctcacagtggtaaaaataagcatttttttgttttgtaggatcagggagcttccaaggcatttgatacctttttgatgggaagaagggctctgaggagctccaagataccccaacctccaggcccttcattagggggtagttggattctgtttggcctttccccctgggccccataggcttaaactacccccacccccacct

SEQ ID NO: 100442 - DNA, 412 bp, Homo sapiens
ggcctgtatgattctggcagcagccaccatcattttgcgtgtcgtgtccactgcggtacatcattttaatctggggcataaataaatttactaagaagcttcgaaatccctattccatcgacaataatgagctactagacttcctctctagggtaccgtctgatgttcaaaaggtgcagtatgcagaattgaaactctgcagcagccacagccccctgcggaagaagcgcagcgctctctagggcacacaccgactttggacagcagcacccaatattgagaaaggttgagtagaccaatgatatggctgttacagtggtacccaaggtgtccttctgaaatgcatgccctgtggcaccctctgaatacttcctcctccttcacgtgcacagacatacacacatgtgcacac

SEQ ID NO: 100443 - DNA, 460 bp, Homo sapiens
  misc_feature (1)...(460): n = a,t,c or g
ggagatggcggagctgtacgtgaagccgggcggcaaggagggcggctggaacgacccgccgcagttctcatacgggctgcagacccaggccggcggacccaggcgctcgctgcttaccaagagggtcgccgcaccccaggatggatcccccagagtccccgcatcagagacttctcctgggcctcccccaatggggcctccacctccttcaagtaaggctcccaggtccccacctgtggggagtggtcctgcctctggcgtggagcccacaagtttcccagtcgagtctgaggctgtgatggaggatgtgctgagacctttggaacaggcattggaagactgccgtggccacacaaggaagcaggtatgtgatgacatcagccgacgcctggcactgctgcaggaacagtgggctggaggaaagttgtcaataccctgtaaagaagagaatggctctacn

SEQ ID NO: 100444 - DNA, 417 bp, Homo sapiens
ggtgttgtgatccgcctgtctcagcctcccaaagggctgggattacaagtgtgacctaccgtgcccagtctcggctcactgcaacctccgtctcccgagttcaagcgattctcctgccttagcctcctgagtagctgggatcacaggcacccgccactgcgcccggcctgtaaagtcttttgttgactgaaaaccagaaaatgaaacctccaaaagcagaaattttgcaggtaataattaggagaatgcaggttgtggcatcagattgtgtaagtttgaattattgttccattattagttgaacattcttgggcagttcttaaactcaggcctgtaatcacaatattgtcacgaggtaattcatgtagacacggtgtctcacacggtgtcttggacattgtaagtgcttgttgttct

SEQ ID NO: 100445 - DNA, 425 bp, Homo sapiens
ggggaaccacccctatgcgaggaaactggcgagcccagaggagggcatccacagtttccagtgttactcaggtagaagttgatgaaaacgcttacagatgtggctctggcatgcagatggcaaaggacagcaagagcttaaagacacaccagacacagcccggcatccgaagagcgagggacaaagccctttctggtggcaaacggaaagagactttggtgcatagaaggctctgtgtgttaactgatgggagagactgttcgtttataaatgtgtacagttttggtttctcgtaaggggagcatcatagggttactttataccagttggaacattttcattggttttggttgttcctttttctttttttaatggcagcttaagatttacggattactggtaaattggcatccttttttttttaa

SEQ ID NO: 100446 - DNA, 430 bp, Homo sapiens
gtgatgagcagggcaaggagagcaggaagagaggatgggggaagagcctataagagggagagaggctccaaaagtttatgcatgtattaaaaacacacacacacacacacgacacacacacgagcgcgcgcacacacacacacacacacgcacacacacaccgagaagtggaatgcataggagcaacaataggaacctggctaagaatctttttaagattttttttttcctttcttcttcccccccttctcttttctttcttattattttcccctttctctctctctctctatcttctctctctctctctctctataagcacacgcccctatgtatactttccctacgaacagagcatcttcatagaatgggggctttattgggggggcacatcttagagtaggggtattagagagagaacacagtcttc

SEQ ID NO: 100447 - DNA, 1375 bp, Homo sapiens
  misc_feature (1)...(1375): n = a,t,c or g
ttttttcaatttctgtgcaaactacttttatttataaggaaagtttctctattttgtttataaacattaaaccagtgctgtgtgaaggcacttaattggggagaggtggggcagggatcctggtagagaccaatgtttcccacccagaccccaagactgctgggagagatggtgtcagcagtgactcccaggaatatccagtggtgtggtggcccatcccaggcccggctgggcaggtggctggcttgctgggggatgtgatgatggtggtaggcatgggaggcactttggacgggatctgatttggcaaaaggaagtggtttcctgtccccagtgatttccagcccttcccagacctccccaaggctaaaggcagattacttaaatttaaaggctgggggcccctccttcttcccctggactttcccaggagaacagagaacccggtgggcaagggaccacccaccagcagggtgaggggtgcagataaaggcagcaaaaaaacagagggagaggtctggagggaaggcaggaatgcttgtttctgtcagcctcagaaacctccttctatcctgctagactttactcctttgaggcttcaccctggggaacagcccgaagtagttccgcggcacgtagccctcctggccgtgcagcgcggcccaccaccagtcggtctcctccggcccgtccctccgcagcacggtgaccgactcgccctcgcggaaggacagctcgtccccgaactcggcgctgtagtcccagagagcgtacactgccccgctgttcatcagccccatactctgctcgacgtctgccaggtaggtggcgcagtcagcataaccctcgcggtaagggtcgcacttctcgaaggcggtggcgccgtcgctgagcgtggtggcgaagattgcagcgccgtgctgcaccagcgccatgcagatgactgtgtcgttgcacgacgccgcgcagtgcaagggtgtccagccgtggctgtcgggggagttgacattggcacccgcggtgatgaggaaatccacgatagagtagttggcgccgcagatggcgttgtgcaaggcagtgatgccctcctcgttgggctggctcgggtcgttcatctccttcaccgcctgctgcaccacctccagctccccggtcagcgccgcgtccaggaggagcaccagagggttgaggcgcgcgcggcgggccttgcgcggggagcccgccttccgcagcacagagcgcatctccatgctctgcggctgctctggtgggctgctctgggacggggccgggggtggaatgggagctggtggggcaggagcagggggccctgccccggacgcgtggatcgncccggattttcgcaaggcangcc

SEQ ID NO: 100448 - DNA, 372 bp, Homo sapiens
ttggaattttgatagggattacattaaatctatagattgctttaggtagtatggatgttttaacaatactaatgttcaatgaacattccaaaaatgaaatcaagagaaccatcccacttaaaatagctacaagaaaaaatacttagggataaatttgaccaagggggaagaaagacctggacactgaaaactatacaacattaatagaagaaattgaagacgacacaaataaatggaaagatatcccatgttcatggactggtgtataatttttgtattcaaagaatggaatattgtctattgtgattttttttttttttaaaacggagtctcgctttgttgcccaggctggattgcagtgacgtgatttct

SEQ ID NO: 100449 - DNA, 1479 bp, Homo sapiens
aggatgaagggcggtgagggggacgcggtcgagcaggccccgctgaaccctgagggcgagagccctgcaggctcggccacgtaccgggagttcgtgcaccgcggctacctggacctcatgggggccagtcagcactcgctgcgggcgctcagctggcgccgcctctacctcagccgggccaagctcaaagcttccagccgcacgtctgccttgctctcgggcttcgccatggtggccatggtggaggtgcagctggagagtgaccacgagtacccaccaggcctgctggtggccttcagtgcctgcaccaccgtgctggtggctgtgcacctctttgcactcatggtctccacgtgtctgctgccccacattgaagctgtgagcaacatccacaacctcaactctgtccaccagtcgccacaccagagactgcaccgctacgtggagctggcctggggcttctccactgccctgggcacctttctcttccttgctgaagttgtcctggttggttgggtcaagtttgtgcccattggggctcccttggacacaccgacccccatggtgcccacatcccgggtgcccgggactctggcaccagtggctacctcccttagtccagcttccaatctcccacggtcctctgcgtctgcagcaccgtcccaggctgagccagcctgcccaccccggcaagcctgtggtggtggtggggcccatgggccaggctggcaagcagccatggcctccacagccatcatggtacccgtggggctcgtgtttgtggcctttgccctgcatttctaccgctccttggtggcacacaagacagaccgctacaagcaggaactagaggaactgaatcgcctgcagggggagctgcaggctgtgtgagactggtgttagccaccgctcactgcaagcactgcctccctccggggtctgtaagaggccgcaggggcctacagacctcatccccccatcccctggctggagccacttccagtggccactctcaggcagagttcagattcctgcccgcagggtcctctgggctgggccttggggcagctcccacattcccagggattttccccatcagtctgtcccttgggttttgcaagctactctgcacctgggctggcctcagttgaaggatcatgcagtagatagaggggaggcagggagagcttgtgggaccttcagtgctgactttagccaccatttccattcctatacaggatgtgaaggtcagaaggcagccaattgttggtttaattttttttttttttgagacagtctgtttcccaggctggagtgtagtgatacagtcacagctcactgtagcctcgaccttccaggctcaaaagatgctcccaccacagcctcccaggtagtgagtagctggtactacaggtgtgtgctgccacacccgactaaatttttttgtagagacggggtttcgctgttcccagggtggtt

SEQ ID NO: 100450 - DNA, 392 bp, Homo sapiens
agctagcacctgagcttcaataccctggatgtgtgagtttctcttttctttttaatcatcttcagcaggaagctgtaccactaatctgactggcacacatctctgcagtgattgccttcacattaatatccggtttctaacatggttctgcccatgcagtataattaaatattttgcatttcttcaacatgcagattagtgtacatggaaggagaaaatcaaatgttagaagatgtagtttgtggccagacactatggctgatgcctgtaatcccagcactttgggaggctggcaggttgagatggaagaatcacttgagcccaggagttcaagaccagcctgggcaacatagggagaccccaatctctacaaaaaaaagaaattttattaa

SEQ ID NO: 100451 - DNA, 327 bp, Homo sapiens
aatgaaactatgtagttaaagaataaacagaatacgtgtccaatgtagctagtgtggagtataacaaaaatatcttctatcaataattccaaaatgtggatggacaagtagatttatgcagttatatggtacaaactaagaatatactaaggatgggccagtcatggtggttcatgcctgtaataccaaagactcaagaggccaaggtgggaggatagcttgaggccaggagtttgagaccagcttgggcaatatatcaagaccacaactctaccaaaaattttaaagctagctcggggtggaggcacgcacctgcagccctagctt

SEQ ID NO: 100452 - DNA, 700 bp, Homo sapiens
  misc_feature (1)...(700): n = a,t,c or g
tgtggcacagggaaaaataaaaaccgcgggcttatgggctttggagcccagccgacctcaatttaagttctatctctagtnnnnnnnnnnnnnnnnnnnnnnnnnnnnnnnnnnnnnnnnnnnnnnnnnnnnnnnnnnnnnnnnnnnnnnnnnnnnnnnnnnnnnnnnnnnnnnnnnnnnnnnnnnnnnnnnnnnnnnnnnnnnnnnnnnnnnnnnnnnnnnnnntnnnnnnnnnnnnnnttcctaaagtataggtttgacgaatttggtctctttgagcctaggggtctttatttgtcagtctgggatgtaacgtccccacctctcaaaattgttgcaaggattaaatgagagtgtagggataaaacactaggtatggtgctggaaagtacccaataaaagtagtagggaggccaggcatggtggcttatacctgcaattccagcactttgggaggccaacgcaggaggatcacttgagcccaggagtttgggaccagcctgggcaagaaggcaagactctatcactacaaaaactataaaaatgacccttgtatggtggcatgcgcctatagttccagctactcgggaggccgaggtgggaggatttcttaagcccaggagtttgaggctgcagtgagctatgattgcactgctgcacttagtctaggcaacagagtgagaccctgtctcaaaacata

SEQ ID NO: 100453 - DNA, 372 bp, Homo sapiens
  misc_feature (1)...(372): n = a,t,c or g
gggctcggcgaggcaccttccagggccaggagaggcactggggaggggacggtcacaggatgccacgcgggcacctagaagccacagctaccctctacagagcggcactgcaccatgcgcaggaatgtctcgaccttgtccatgtccttcctgaagcagtagagcagcccgtagttcttgagcagtgcgacatggttgagcgagtttgtgtcaaacttgctgtaggtctgcttgaggatctgcccagtccggcggctgccgacttccagcctccccatcagcgtttggatgccttcctctaggacctttaggaggtgatagtcatcgctgtccgaggtgtcatacaccaggtatgttggcgaacatactccn

SEQ ID NO: 100454 - DNA, 386 bp, Homo sapiens
gaagaagcgggtagagaaagaaatagttagcctcatgcaaaaagtagggcatatgagagcctgagatatggcttaagaagagtattgtttgagaagtttggctgagtgtggtggcttatgcctgtaatcccagcacttcgggaggctgaggtgggagaattgcttgagctcaggagttcaagaatagcctgggcaacatagtgagactctgtctctataattaaaaaaaaaaaaggagacggaaaagtttaaggtatgttggcaggtagtcctaaatggggtttactgccaggagcagttaggattcaaagagcaaaaatttgagggtaaaaggatgtatggcaggttgttgggggtggatatatagccccaacatccagtcactt

SEQ ID NO: 100455 - DNA, 360 bp, Homo sapiens
ggggctaaaggcatgcaccactatacttggctagttcggtatttttttgtgtggagatgaggtctcactatgttacctgggttggtcttgaactcctgcgctcaagcattcctcctgcctcagcctcccaaagtgccgggattacaggcacgagccaccgcatctggccctgttttgcttttctttctgaattctgttctattccagctcctcttgcctaggaaaaaaaaatcacacccatgaaccaatacaatatctatatgctattgacatgagctaagtggtactgtagaaagcttgtgttgtaaaagaatcgactgtaaaagtgctagatctggctagaggtgaactctgcctaca

SEQ ID NO: 100456 - DNA, 507 bp, Homo sapiens
  misc_feature (1)...(507): n = a,t,c or g
agcctattgtttccattagggttcactcttggtgctgtacaatctatgggtttgaacaaaggtacaatgacatgtatccatctttatagtcatgcagagtctacactgtcctaaaaacccttggctctgcctcttcgtcgtgtcctccccactgacccccggctaccactggtcttttcactgtctccgtaagtttttcctttttcagaacgccatatagttggaatcataaagtatatatagccttttcacattggtttctttcactggataatatgcatttgtttcctctatgtcttttcacagtttgatagctcatttctttttagcatcgagtaatactccattgtctgggtgtacaacagtttatccattcacctgctgaaggacatcttggttgattgcttccaagttttggcaattatgaataaaattgctatagatatccatgtgtagggttttttgtgtccatttnaaggcttttcaactcctttggggtttaaataa

SEQ ID NO: 100457 - DNA, 395 bp, Homo sapiens
tttgtttcctttttgtagagacagggtctcactatgttgcccagattgatctctaactccagagctcaagggatcctcctcccttggcctcctaaattgctgggattacagacgtgagccaccacacctggcttacatagctttttttaaatacaagagcaacaacaataatataaacgaaagttattcttcaaacgtaacattaacctagatttatttgaagctgaaagtgaatgcaattgggtgtgccaaaggcaatgtgggaaaaacaattaattcctttttgttagaattggacatatgtattcgcaccaaatggaaccattgttagggcatattacttttctattagtttacttttctattagaatcattcaagcaaatctcaaaagttt

SEQ ID NO: 100458 - DNA, 343 bp, Homo sapiens
actgcatagggctcggcgtggctgtttttcattttttgtagagaaggggtctagctttgttgccccagctggtctcgaacccctggctccaagctatcctcctactttggcctcccagagtgttgcagttacaggcatgagccaccatgtccagcgcaaatccacaggtttcttactggtaaaggcatatcaggcttgtttttagtttcattttcagaaaacttctggccattactgtgacttttatttgaaccagtctcatttaatgattcataaggccgggcgcagcggctcacgcctataatcccagcactttgggaggctaaggcaggcggatcacaat

SEQ ID NO: 100459 - DNA, 1524 bp, Homo sapiens
  misc_feature (1)...(1524): n = a,t,c or g
agctccaactttcatcaactttcctgcaaaagggaaacccaaacggggtgatacatatnatttacaggtgcggggtttttnagctgagcagattgcccggtggatcgccgacagaactgatgtcaatattagagtgattagacccccaaattatgctggtccccttatgttgggattgcttttggctgttattggtggacttgtgtatcttcgaagaagtaatatggaatttctctttaataaaactggatgggcttttgcagctttgtgtttttgtgcttgctatgacatctggtcaaatgtgggaccatataagagggaccaccatatggccctaaggatccccacaagggacatgtgaattatatccatggaagcagtcaagcccagtttgtagctgaaacacacattgttcttctgtttaatggtggagttaccttaggaatggtgcttttatgtgaagctgctacctctgacatggatattggaaagcgaaagataatgtgtgtggctggtattggacttgttgtattattcttcagttggatgctctctatttttagatctaaatatcatggctacccatacagctttctgatgagttaaaaaggtcccagagatatatagacactggagtactggaaattgaaaaacgaaaatcgtgtgtgtttgaaaagaagaatgcaacttgtatattttgtattacctctttttttcaagtgatttaaatagttaatcatttaaccaaagaagatgtgtagtgccttaacaagcaatcctctgtcaaaatctgaggtatttgaaaataattatcctcttaaccttctcttcccagtgaactttatggaacatttaatttagtacaattaagtatattataaaaattgtaaaactactactttgttttagttagaacaaagctcaaaactactttagttaacttggtcatctgattttatattgccttatccaaagatggggaaagtaagtcctgaccaggtgttcccacatatgcctgttacagataactacattaggaattcattcttagcttcttcatctttgtgtggatgtgtatactttacgcatctttccttttgagtagagaaattatgtgtgtcatgtggtcttctgaaaatggaacaccattcttcagagcacacgtctagccctcagcaagacagttgtttctcctcctccttgcatatttccagcctgagtgatagagtgagactctgtctcaaaaaaaagtatctctaaatacaggattataatttctgcttgagtatggtgttaactaccttgtatttagaaagatttcagattcattccatctccttagttttcttttaaggtgacccatctgtgataaaaatatagcttagtgctaaaatcagtgtaacttatacatggcctaaaatgtttctacaaattagagtttgtcacttattccatttgtacctaagagaaaaataggctcagttagaaaaggactccctggccaggcgcggtgacttacgcctg

SEQ ID NO: 100460 - DNA, 375 bp, Homo sapiens
aaaaaaatgaaacccaaagggagagtatattttcttcagagaataatttgaccttttttttttttttttttttttttttaaagggccccccttttttgggggttttaagccccttttttttttaaaatccttaaaagggggtttttggtttgggccaagggggcccccttttaaatttttttaaaaaaattttttttttttggggggagttttttaaaaaaaaaggggttttgggaaaaaaggggtttttaccgttggggtttgggccccctggggaaggggggggcccttgtgaaaagagggcggggggaaggggttttggggagccaccggggcgggaattccaaattttggaacgggaaaaccgggaaaccc

SEQ ID NO: 100461 - DNA, 254 bp, Homo sapiens
tggacaatgggcaggaggatcacttaaggtgaggagtttgagaccaacctggccaaaatggcaaaattctgtctctactaaaaatacaaaaagaactaacctgtagtcccggctactcgagaggctaaggcaggagaatcgcttgaacccaggagacagaggtgcagtgagccaagatcacgccactgcactcgcggtggctcacacctgtaatcccagcgttttgggaggtcgaggtggggtcgacgcggccg

SEQ ID NO: 100462 - DNA, 329 bp, Homo sapiens
ctaatatttattatttacctcttacacacacgcacacacacatacacacacacacacacacacacaatttctcctactgtggacctcagggttgtctttcttgctgttacatattttctctttctggacccaatacaaaatgtaacatgatcttttaacttcttctctgagcctgcattagattttctaagagctttatcgctggtatcgtaacttgcttctttgttccattcctttcttactcctaccctctctacatagtacatattaggcagggacccaaggtgtcaagggtgcctatgaacacatcaccacagagaacctgctca

SEQ ID NO: 100463 - DNA, 349 bp, Homo sapiens; identical to SEQ ID NO: 8710

SEQ ID NO: 100464 - DNA, 338 bp, Homo sapiens
actacctttccatatgaccgttggcttattgtatgccttttgaaaaatgtctatacatgacttttgcctactttcgatgggattgattgatactgttcttgctgattcgagttccttgtaaattctgggtactagtcctttgtcagatgcacagttcataaatattttctccaactgtatgggttgtctgtttactctgctgattttcttttttccttttttttggaaaaaacttcccgcttaggttcccattttggacccccaaggccaaatttttgtttacaagaaattttgcctaaaaattttgggccggtttactttcctgagaacaaaaatag

SEQ ID NO: 100465 - DNA, 371 bp, Homo sapiens
aatctttcctcgtctgctttatgcatatgcataaatgtgttaggttgggggtgttaggaaatatgtgatatgtatcacatcatctttctttcttttttttttttttggggggggggaaaaggcactttttttttgcccccggactggaattaaatggccccaatttggcctacttgaaccttcgccttccgggttaaagcaatttttcgggttaaaccctcctgaaactttggaataccgggtttttttcccccccccgggaaaattttttttttttttttttttttttttttttttttttttttaaaaacactggttttcacactttttccccgtttttaaaaaaacttcccccctctgggtgccccccc

SEQ ID NO: 100466 - DNA, 333 bp, Homo sapiens
ctcctgagtagctgggaccacaggcatgcaccaccataccacaccatttgtatattttaaaattgcttgtgtacgatgctcacgatctggctgacaggatcattcataccccaaacctcagcatcacacaatatacccatatagcaagcctgcacatataccccattaatctaaagtaaaagttaaaaatactttttcaaaataacaaaataaataaataaaattgctaaaagagtggtgcatgcctgtaatcccagctacttgggaggctgaggcacaagagtcacttgaacccaggaggtggaggttgcagtaagccaagatcatgccact

SEQ ID NO: 100467 - DNA, 394 bp, Homo sapiens
cgaattgggctacaaagttttgcctcacccaccatattcacctgacctctcgccaaccgactaccacttcttgaagcatctcaacaactttttgcttccacaaccagcagtgtgcagaaaatgctttccaagtgttcattgaatcccaaagcacagacctttatgctacaggaataaacaaacttatttctcattggcaaaaatgtgttgatagtaattgttcctatttgaattaataaagatgtgtttgagtctaaaaaaaaaaaaaaaaaaaaaaaaaaaaaaaaaaagaaaaaaaaaaaaaaagggggggcccctttaaaaaaccccccatggggcccaatattaccagggcgcgctaatccaaagtctctgctcctagggtatgctaatg

SEQ ID NO: 100468 - DNA, 199 bp, Homo sapiens
gcgcggacgcgtggggcgtcagttccagaaagaaatagaagaactgaaaaagaagcttgaagaaggagaagaatggcaccctcttcatcatcatcttcctctgacccactgatatcagagcctgatattagtgggtcagaggaagatgatgatgaagagggtgaggttggagaagatggagagaaaaaaaaaaaaaagg

SEQ ID NO: 100469 - DNA, 1035 bp, Homo sapiens
ttttttttttttgagacagagtcttgctatgttgcccaggcaggtcttgagctcctgggcttaggggatcctcccgcctcagcctcccaagtagttgggactacaggcgcccgccaccatgctcagctaattttttttttgtatttttagtagagatggggtttcaccatgttagccaggatggtttcgatctcctgacctcgtgatccgcccaccttggcctcccaaagtgctgggattacaggcgtgagcaaccacaacctggccaaaatccctattcaattaaatgtttgtcttacccaaaccccaaagttaaattgtaaatataaaacccacagcgggggtgagaaaactggagaacagtctttctctattttcctacaatcttcaaataagaggtatctgcttatataagacaggttagtggcaatacctggcttagaaagtttctagatttatttctagctctctacatactgtgataaagtcctaaagtttaaaaatacccaccaatattacaggcatgctgctttataaaatatgccctaaaattctagccaaaatacttcactttctgtaatacttaatatgtgagataaaactttttagctcaataaaaaagtatttaaaacaactcatgttttaaacacattagtctactctaaataaatgtatactattgtactttaaaatgtatcaaagtaaggtgttttctattttttaaccatcctcaatttttttaaaattaaccaatcttatttcatctctaaagggcttaatcacatgaaatgaacaaattcctctaaacattttccttaaggaaaaactgaaaggagatatagtgaaatggtatatgacagccatggtaactctaaggtatacataagcaggggaaaaaatgctcaaaatgtaacaaattctgtatataaacagtcatgccaaacacagatttgtaccaataaggatactgaattagatgttaacaacagtgttttcagaaaaagaaacagcaatgagtaaaaagcactatgctat

SEQ ID NO: 100470 - DNA, 123 bp, Homo sapiens
tggtatatacacacaatggaatactattcagccttaaaaagaaggaaatttctgtcatttgcaacaacatggatgaacctggagggagattatgttaagtaaaataagccgtcgacgcggccg

SEQ ID NO: 100471 - DNA, 125 bp, Homo sapiens
tacggcacctgtaatctcagctactcggaggctgaggcagaagaatcgcttgaaccggggaggtggaggttgtagctttcctttatggtgccactgcactctctaatctacctgtgctacactcc

SEQ ID NO: 100472 - DNA, 221 bp, Homo sapiens
cagagacagccaagccttctggatgcagcgggccaggatcgcaccacacactccagcctggcaacaagagtgagactccgtctcgaaaaaaagaactgaatgtcttgggagtttaaccatgtcagtgcagtctttcttacattagtaactgaagaaaaagtccttaagcatgccccttaaggaatttttgagattaggaaacaaaaaggtcgacgcggccg

SEQ ID NO: 100473 - DNA, 306 bp, Homo sapiens
aaaaaataaaaacatgactgggcgtggtggctcgcgcctgtaattccaacactttatgaggctcaggcaggatgactgcttgaggccaagagtttgagatcagcctgggcaacatagagactgtgtctctacaaaaaataaaaattaaaaaaattaggcaggcatggtggcaggaaatcttgttcaccttgtcaactgtttggatgtgactggtaagaaagggaagtcaagtgtaattccagctatagtccccatattacagatggggaaactgaggctcgaagagtagagaagcagcgacttgcg

SEQ ID NO: 100474 - DNA, 355 bp, Homo sapiens
cagactcctgacctcaagtgatctgcccgcctcggcctcccaaagtgctggggttacaggcatgagccaccgtgcccggcccagaaatttctcatcctcccaaacttgtctccgtgcaacacccactccccgttgtccctcccccagcccctggcacccaccattctcctgtctctgtggatttgcctcttctggacatctcatggattacaggcacatgccaccgcggctggctaaagtttttttttttggagacggagtttcgcaattatcgtccaggctggagtgcagtggtgccatttgcagcctccacttctggggttgaagcgattctcccacctcagcctcccaagta

SEQ ID NO: 100475 - DNA, 320 bp, Homo sapiens
cactctgttgcccaggctggagtgcagtggtgggatcatggctcgctgcggcctggtactcctgggctcaagcaatcctcccgcctctcaagcagtcctcctgcctcagcctcctaagtagctgggaccacaggtgtgcaacactgtattagtttgttctcacactgctataaagaactgcttgagactgaataatgtataaagaaaagaggtttaattgccttagttctgcatggctggggaggcctcaggaaacttacaagcatgacagaaggcaaaggagagacaagtaccttcttcacaaagctgcaggaaaaagg

SEQ ID NO: 100476 - DNA, 314 bp, Homo sapiens
gaggaatcaagggaagggaaactagggggaatgttcagagaaaaaaaatccctgaaagcttgatattcttctggaagccaaatgaagaaaggatttcaaaaaaagaagagatcaactgtcaaatgctgctaataggtcagttaagaaagaactataatatactttgtatgtaagaagtagtttttggcaggcaggtggctcactcctgtaatcccagaactttgggaggccaaggctggaggatcacttgagtccaggaatttgagaccagccagaggacatagcaagaccttgtctccacaaaaaaataagaa

SEQ ID NO: 100477 - DNA, 332 bp, Homo sapiens
ggcacgagccaagtaactcttatttggagagaagacgatctgcacttcgcattttggcattgacatttaattttagggtcctttatatagaagggagagtaggtaaactgattttttttttaacagggagggtttgacaatctttggcagacttggagcaaaagattgaggtgcatttcatgcctccttttgagagtcttgctctgtcgcccaggctgtagtgcagtggcgcaatcttggctgcaacctcagcctcccaagtagctgggattacaaacataagccaccacgcccagccctcatacctcttttaaaagtcgacctgttttgcg

SEQ ID NO: 100478 - DNA, 345 bp, Homo sapiens
ggcacgaggcttgacgtgaatactaagctcttaagagcaacgccttgcttgattaactaaaggaatagagggctactattatgatgctgtgatgcatggtgaatgattataaacctagacgttagacctctctagagggatactctggctcattcattacataactgcttttttgagcacttataatatggcagagacggccgggcatgggggctcacacctgtaatccgagcactttgggaggccgatgcatgcatattacaaggtcatgagttcgagaccagactggccaatatggtgaaaccccgtctctactatgaatacagacattatccgagcgtgttg

SEQ ID NO: 100479 - DNA, 350 bp, Homo sapiens
ggcacgagagtgcagtggtgccatcacagctcactgcagcctcgacctcatgggttcaagtgatacttttacttcagcttcccaagtagctgggactgtaggcgttaccatcatgcccagatacatttttaaaattttttgtagagatggagtctcactgcattgcctaagttgttcatgctctgatgattagatgggaaaacgttgcattgactaagttgtaaatgcgttggttatttttgaagaaaacggtggatttaccatttggaagacggatttttgtagaatgctaatcctgtgtgaggctattatataaaattgggggaggtcagaaatgattggggcgggcg

SEQ ID NO: 100480 - DNA, 359 bp, Homo sapiens
ggcacgaggagagctagcaccataccctgcttggtcactgacaccctgcacatggacactctcttcacagcaggcagtcctgacaactgtaggtgccccctaacactgccccacctcacggcttcaaggctgacttgttcaggaagaaaaaggagaagctctaatttaacagttttaagaaattaagagttttcaaagaatattcgcggtgggaggattgcttgagtccaggaatttgagaccagcctggacaacacagtgagacctcatctctatcaaaaaataaaaattagctagatgtggtggcatgagcctgtgttcccagctgcttaggaggctgaagcaggaggattgattga

SEQ ID NO: 100481 - DNA, 330 bp, Homo sapiens
ggcacgagagtgctgcgattacaggtgtgagccactgcacccagacttttttttttttttggaaacagggcctcgttttgtcccccaggttaaagggcaggggcatgatttaagctcaggggaatttgggcctccaaggttaaggaattggccgggcctaaccctccaaaatgccgggaataccgggaccctgcccccacaccggacaaattttggggattttagaagaggcagcttttccccgtgtggcccaggtgggtttggaactcgggacctcgggggatttccccacttaactgggaaaagggataccgggcttgaccccccacc

SEQ ID NO: 100482 - DNA, 348 bp, Homo sapiens
ggcacgagctttttttttttggaattttttttgtaaaaacgggggctttctatgctgcccaggctggccttgaactccggggctcaagggatccttccaccttggcctcccaaaaagctgggattacgggctttacccacttggccaaaaacgggatcttctgggttagaagggcacagttccctttatccccaccattcactcatatttccccatcactgcagtaaattttgctttataaaacagtggaggttattcatattgagaatcactgaaaatcaaggactcacaccactaaatgctgcaaagccagcagaaccagtcatgaatgaagctcgtactcaagca

SEQ ID NO: 100483 - DNA, 340 bp, Homo sapiens
ggcacgagagtcgacctaagtgttcatccgtgagctaatggattataacgatgaataacatgaactcgacgctgtactattcagtcctacgtaaggactaggataatgatcatttgtgactacatggatgaatctggtgactttatgttatgtgaaataagccagacacagaaaaacaaactgtatgttcttatctgtggaacctaaaaaaatcgatctccacttggcacagtggctcaagcctgtaatcccaacactttgggaggccaagaaaggaggattgcttgaatccaggagttcaagaccagcgtgagcaacatacgaagactccatctctaca

SEQ ID NO: 100484 - DNA, 378 bp, Homo sapiens
  misc_feature (1)...(378): n = a,t,c or g
ggcacgagagcatttggcaagcacatcctgggtgccaggcccaagcaggctggtctcgaactcctgacctcgggtgatccgcccacctcggcctcccaaggtgccgggatgacagctgtgagccaccgcgccccgcccagaagcagaggtgntttaacgggaagacttcaggcttcatcggacggtcgacaaggaatcagagcaggggtggcctctgagatggaccgaggggacttgaggtagaaaagacatgggttttggggggaatgcccagtagatgtctggtgatgtcgcaagaatttgaacggaggcgggaagtgtgttaagagaggtgtgatgtccttaatgagttccagggtctggtagcgtgagaaagag

SEQ ID NO: 100485 - DNA, 453 bp, Homo sapiens
  misc_feature (1)...(453): n = a,t,c or g
ggcacgaggataagaataaccaaagaattttgaagaataaggagggcacgttgatcttactatgtaacgagacacactatcatggcatcttgaccagatgagaggagagcagtagagccgattgggagcctagaaacagactcccctgtaagtcggaagttggtaggtcacagatcgttaaggagagagtggactgcagtgagtgatgctggtgaaaatggtttttcatatttggagaagtaagttgttgtatcacactgagtgtgaaactaaggctgagtgtgatggctcatgcctgtaattgcagtgctttgggagtccaaggaaggaggatcagttgagcccagaagttccagacgagcctgggcaacatagggaggtctcgtctctacaaaaaaaatccggcacaacattatgcatgggtgtgcatgcctgtagtcccagctacttggn

SEQ ID NO: 100486 - DNA, 485 bp, Homo sapiens
ggcacgagactttactgaggtatgaaggattaataattgtgtagctaaatctatatctgtctatctttctatcaatcgatcatctatctatatgataaacaacatgacgttttggagacagtgtctcactctgtcagccttgacctcccaggcttgagattttcccacctcagcctgtgggaccacaggctcatattaccatggctggctagttcaaataattttttttggtagaaacaggggtctccttgtgttgcctaggctggtctcaaattcctgggttcaagcaatcctcccaccttggcttcccatagtgctgggattaccagcatgagccatctcacctggctacattattgaatgtgtacacattgggaagtcgttaccacagttcaggctaccatatcatcacctcagcttagtatggagcctttgccgcgcctggtgaaatattctgtcccccgggctgtcttcctcgtttttgg

SEQ ID NO: 100487 - DNA, 434 bp, Homo sapiens
catgagccactgcgcccagacttcctaaactatttgaaatggagttgcacacccacagacaccttcggcaagtcccaagaaaaaggacttttctcttccagcaccacagtgctattgtcacactttaattatcttccagcctctaattattagagtttaatcttccctccatattcaaatgtcaaggtaaaagattagaaagatttttgtcatctaaggagcttggagtttatccattagggcttggggaggattgttttttatggaggcatctgagaggattagaaagaaacccagagtaaggccaggcacagtggctcacgcctgtaatcctagcactttgagaggccaaggtgggcggattgcttgcgtccaggagtgcaggaccagtctgggcaacacagcaaaactccatctctacaaaaaaaaaaaaa

SEQ ID NO: 100488 - DNA, 365 bp, Homo sapiens
ggcacgaggtaaaagcaacccacagctggaggaatttgaagttgtggtgcactgaaggcaactagagccaaacaaaacccaaacccagctcaactactgactagattgactcaactcccatactaattgcctgaaagaagaagatatgtgtctatttcagggtatagataccacttacctcagtctttattgtttttctacgcacagcatgcaacattcaataacgaattatgggctgggagttatagctcatgcctgtaatcccagcactttgggaggccgagacgggaggatggctttaggtcaggaatttgagatcggcttggatagcatagtgagactccatctttgcaataaaattaaaa

SEQ ID NO: 100489 - DNA, 351 bp, Homo sapiens
ggcacgagagtaccaacatgtgaagaaagagtgagcatagcaaaattgagaaaggttgcttgaaaaccaaacaaaaaaccaaatacctgtaatcctagcactttgggagggtgaggtgggtggattgcctgcactcaggagttcaagaccagctgggcaacatggtgaaaccttgtctctactaaaatccaaaaaaaaaaaaaaaattacccaggcatgggctgggctgggctgttttccaggctggtctaaaattcctgggcttaagggatcctcccacttcagcctcacagtgttggaattacagtcacgagccactgtacccaaccatatgtcattctttagacacag

SEQ ID NO: 100490 - DNA, 338 bp, Homo sapiens
ggcacgagcggcacgagattattcacaatagggaaaaggtggcaacaacccaagtgtccaccaatggctgaattgataaacaagatgtggatatacaatggaacattactcagtcttaaagaggaaggagattttctgcactaacttgacccagctcctctgacatgattcgcatgagcctctgattcccacactagagtggaagctccttagggagaaggcctgtgtttttcttgtctttgttgccttttcccctaacctcagcttaacacgatgattgcacaaagtgctcgttaaggcttttaaatgagagagtagaggccgggcaccgtggctca

SEQ ID NO: 100491 - DNA, 327 bp, Homo sapiens
ggcacgagtttaaatctgcatatagttgcttccactttgcatttgtaagtttgtgttggcaactcttctaaatgaataccaattggacagtgttcccttaaaattttttttttttttgagataaagttttgctcttgttgcccaagctggagtgcaatggtgggatctcggttcactgcaacctccacctcccgggttcaagggattctcctgcctaagcctcccagcactttaggagactgaaccaggtaaatggcttgagcctaggcatttgaaaccagcctgggcaacatagcgaggccccatctttacaaaaaaatacaaaaa

SEQ ID NO: 100492 - DNA, 339 bp, Homo sapiens
ggcacgaggcaggaccgaattctggagctgtcttttcattccctctgaaggataaaaaagcagtctttggagccagtcctgaagtggctccatttctggcttttaagtgggtcgacaagagtagaatctttgaagttaaaaagagaagtgaggttttcttgttattttgatttctaaataattaatttggaaaccgcttttttgaagaatatagtccaggcacagtggctcacacttgtaatcccagcactttgggaggccgaggcaggaggattgcttgaggccaagtggtcgagaccaacctgggcaagatagaccctttctctacagaaaaaaatt

SEQ ID NO: 100493 - DNA, 334 bp, Homo sapiens
ggcacgagcggcacgagcagaattttgccatgggggccaggctgtattcggactcctgagctcaagcagtccgcccacctcagcctcccaaagtgctgggattgctggaattacaggcatgagccaccagtatactcttttgctatgctaatcattaaacttttctttgaactgcatttaagtgtaatattgtggtttcttttgcttgcaaatcctcaaacccaaactgaaagtaaaactttcagcaaaacactaggctggtcttgaactcctggcctcaagctgtccttccttggtctctgaaagcactggcatcacaggcatgaggcaccgt

SEQ ID NO: 100494 - DNA, 530 bp, Homo sapiens
gtttttgggggccatggcaagtgcaggcttgtcagaggaattggagaagcagggattagttaggaaaacctctccacttcttgtgtttcatggccagggtagtgttttgttaactttcagaaacccgcccttaccttacctacctaccatgttatgctcatttcacctactgtcccctgctgtatagggagtgccttgagggcagagatcatgttagttttgttccctcttctgtacagagggtggagcccagtacctggcacagctgaaggaggaatgtgctggtgctggtctctgtatttccaggtactccttgttgacctctagccaagacaaggaacctccttatgagatgtcatcttctgagctctcttgatggagggaataccacggtgatgattgaatatgaaaagtcttggcacagtggctcacacctgtaatcccaacactttgggtggccgaggtgggaggattgcttgaagccaggcattgagaccatccttggccaccaaacgagaccccatctctac

SEQ ID NO: 100495 - DNA, 342 bp, Homo sapiens
ggcacgagagagacggggtttcaccatgttggccatgatggtctcgatctccgtctcccggcttcaagcgattctcctgctcagcctccggagtagctaggactacagctgcgcagcaccatgcccggctaatttttgtatttttagtagagacagggagtcctgacctcgtgatccacccacctcggcctcccaaaatgttgggattacaggcatgagccaccgcacccggcctgtttttgtttttcgtggatatacagtagtccccccttatccttgcgggatacattccaagatctccagtggatacctgaaaccctgtatagtagtgaatataattgg

SEQ ID NO: 100496 - DNA, 349 bp, Homo sapiens
ggcacgagctggaagaagatgcttccaaccctcatggatgactttagggggtaagactttggtggaggaactaattccagacgtggtagaaattgcaagagaagtagaattagaaaatggaacatgaagatgtgactgaattgctgcaacctcatgataaaacttggacagatgaggagttgcttcttacggatgagcaaagagtggtttttcttgaggtggggtctgttcctgttgaagatgctgtgaacatagttgaaatgaagacaaaggatttagaatattacataagcctgttaataaagtattagcagggttggcaaggattgacaacaattttgaaagaaat

SEQ ID NO: 100497 - DNA, 330 bp, Homo sapiens
ggcacgagctggagaataaagcttagagtctaaaattaaatacagactcaacctccactacgaaagctttctggaggaactcttgcttacatgagccatatatacattatatacttcatgttgctcttcaagcaatccttgttcaactacaggaggctgaagcctggtctgtctgctgtcaagttttgccctcatgctcttctttcttaaaatcagtttgggcctgatgtggtggctcatgcctgtaatcccagcactttgggaggccggggcaggcagatcacttgaggtcaggagtttttgaaaccagcctggccaacatggcgaaac

SEQ ID NO: 100498 - DNA, 420 bp, Homo sapiens
  misc_feature (1)...(420): n = a,t,c or g
gttagagcgccggaattcccgggtcgacgtttcgtagagatcctgcctcctaaaaaaaaaatttttttaaatccattctgacaatcttgccttttaattggagagttgagtcaattccatttcaagtaattactgaggctgggcgcnggnnncacgcctgtggtcccagcactttgggaggccaaggtgggcacatcacttgaggccaggagtttgagaccagtctgaccaacatggtgaaaccccgtctctaataaaaatacaaaaagtagccgggtgtggtggtgcacacttgtagtcccaggtacttgggaagctgaggcaggggaattgcttgagcctagaaagcggaggttgcaagtgagccgagatcacaccacntgtactccatcctgaacancnggngtgagacncntgttt

SEQ ID NO: 100499 - DNA, 340 bp, Homo sapiens
ggcacgaggcaagtataggcaactcttgataagctttactgtgaaggcatgctgaggcaggcggattacaaggtcaggagatcgagaccaccctggccggcatggtgaaacctcctctctactaaaaatgcaaaaattaggctgggcacggtggctcacgcctgtagtcccagcactttgggaggccgaggcgcggaggtctcgatctcctgaccttgtgatccacccgccttggcctcccaaagtgaaacttttctttaaaatagagatgggatcttgctgtattgcccaggctggtctcagactccttgccttaagcagtcctcccacctcagcctcc

SEQ ID NO: 100500 - DNA, 367 bp, Homo sapiens
ggcacgagcgagatatctgttcttatcacagagtaaaggttactgagccaggaacccaggtcctctgactttgtacaaagggctctccagctgcttttcagagtgattgtctagaagggttaagtcttcgtagacatagatcattctgcaggaaatgtactcagaccttgtagaagacatacttgatgcctttaagaagtagtttaaggccgggtatggtggctcacgcctgtaatcctagcactttgggaggccaaggtgggtggatcacgaggtcaggggatcgagaccatcccctgtcttggtgaacaggctaacacggtgtcaggctaacacggtgaaaccctgtctctactaaaaatacaaa

SEQ ID NO: 100501 - DNA, 394 bp, Homo sapiens
caagagtatctacaaaaatttagtatatatttacagaagaaaagcatgcatatcattaaacaaataaaatactttttatcacaaaaaaaaaaaaaaaaaaaaaaaaaaaaaaaaaaaaaaaaaaaaaaaaaaaaaaaaaaaaaaaaggggggggggggaaaaggaaaacccgggggggggaaaaaaaaagggggggggggggaaaaaaattgttttcccaaagggggggggaaaaaaaaaggggggggggggtttggggggggggacttttttgggggggggggaaaaaggggggagggggcccaaaaaaagaagaagccccgggggggaaaaaaaaattttgggggggaaaagggggaaaagaggggggaaagggggggggggggggagatta

SEQ ID NO: 100502 - DNA, 379 bp, Homo sapiens
ggcacgaggacataagaaccaatgattgtgcataagttctaaattagagacacatatagtttctctctttcagcaccagctcttgcccctatgctgggtaccaagggagttctcctagctgtggcttctctaggttctaggggtgcaagcctctgtgtgtttgtttgtgtgtgtctgtgtgtgcgtatccacactaggggtgcaagcctctgggtgtgtgtgtgtgtgtgcgtgcgtgtgtgtgtgtgtgtccgtgtgtgtgtgtgtgtgtgtccacactggccagcctctctacttaccaaggatctacagtgcttaccttttacagtgtgacagtacagtgtgagcccccgggaagcactgcctgacctatcctaag

SEQ ID NO: 100503 - DNA, 328 bp, Homo sapiens
gggtattcatgatttaatggaataatgtgtgattaaaatccaattgcttggcgggactcctttctgagcaagtgagaaaacagaaatacagatttgggccgcatgcggcatcacgtgcctatagtcacagctactcaggaggctgaggctggaggatggcttgagcccaggtgttcaagtccagcctgggcaatatagtggaccccatctcaaaacaaaatacaaggaacaaaccccacagattaggagtctattggccttggccctgaaaagctatatttcatagagttttgctttttcttttaagtagtaaaaggtagtcatgacg

SEQ ID NO: 100504 - DNA, 760 bp, Homo sapiens
tgtttctaatttgacgtgaaagatacttaaaaatttatatttgtatatttaaatcctggcctcatcctgtgacatagatttactgaataggaacaaaggcccaattttaaacaaaaacctaggcccgggtgtggtggctcacacctgtaatcccaacactttgggagcccaaggcaggcaaatcacctgaggttgggagtttgagaccagcctgaccaacatggagaaaccccatctctactaaaaatagaaaattagccaggtgtggtggtagatacgtgtaatcccagctactcgtgaggctgaggcgggagaattgcttgaatccgggaggcggaggttgcagtgagctgagattgcaccactgcactccagcctgggcgacagagtgagactccgtctcagaaaaataaaaaacaactttggacatagaggagttgggggcagaggggggaggatgagagaattttccatgtaactccttttccttaagaaaaagaagcaaaaatccctcatgcagtgccatctgactttatggtgtttcacattatatagttactttttttaataaacgcataagattaactcttcctgcaacccaaggtggatacttggatgtttgatttttatttatttatttattttttggggcagtctctctctgttgcccaggctggagtgatgcgtgatttctgctcactgcagtctctcccacccgggttcaagcgattcttcctgcctcagcctcccaagtagctag

SEQ ID NO: 100505 - DNA, 374 bp, Homo sapiens
ttggcatacacctgtagtcctagctactcacgaggctgaggcaggaggatcacttgagcccaggagggcaaagctgcagttagctatgatcgttgccactgcactccagcctgggtgacagagagacccagtttcttaaaaaaaatgaaacgaaaatgctgaaaggctcggattgcaagcccctggggggcgtccagcgccaactttttggggcaccttttttcacagttttggcaaagggaataaaaaaaccctggtccaaaggtttttaaagaacacggggctctatgaactaaattcccgttcaaatgactttaacaagtgccaatagggtttggggacctaaaaatgtttacaggtttttataccgcgct

SEQ ID NO: 100506 - DNA, 1055 bp, Homo sapiens
ggcacgaggcaatcccctcgcctcagtctcctgagtagtagctgcgaccacaggcgtgtgtcaccacacccggctgattttattttttttatttttattttttttgtagagacggggttttactatgttgcccaggcaggtcttgatctgggctcaagtgatgctcctgtctcagcctcccaaactactgggattacaggttgtaggtgtgagccatggtgcccggccgccacactgtcttggctacagttgggtttataataaaccctgaatcgaggtgatgtgcattttccaactcttctttttaaagattcttgtggctgtttatgtccttggtgtttccatatatgttttacaatcagtgtctcaatttctaccaaaaaaacatgccttctggaatttcaatagcaattcccttgaacgcatttttgaataccttttctgaatgtcttgaatacatgttgggaagaatcggtgtcttaacagtctccagtgtccacgcgttgactgccgtgtgtgactccagtcggcgtctcaacagtctccagtgtccacgcgttgactgccgtgtgtgactccagtcggcgtctcagcagtctccggtgtccacgcgttgactgccgtgtgtgactccagtcggcgtctcagcagtctccggtgtccacgcgttgactgccgtgtgtgactccagtcggcgtctcagcagtctccggtgtccacgcgttgactgccgtgtgtgactccagtcggcgtctcagcagtctccggtgtccacgcgttgactgccgtgtgtgactccagtcggcgtctcagcagtctccggtgtccacgcgttgactgccgtgtgtgactccagtcggcgtctcaacagtctccggtgtccacgcgttgactgccgtgtgtgactccagtcggcgtctcaacagtctccggtgtccacggcgttgactgccgtgtgtgactccagtcggcgtcttaacagtctccggtgtccatgcgttgactgccatgtatgactccaggtattgagttcatcttcaacttctcccaacaat

SEQ ID NO: 100507 - DNA, 368 bp, Homo sapiens
ggcacgaggctgggtgtcgtgaagtacgcctatagtcccagctacttggaggctgaggcaggaggatgggttgatcctaggaggtcaaggctgcagtgagctatgatcatgtcactgctgcactccctggaaaggagaggacagggaaagaagttgggtaacaaccatacagggcttccattttcccagcaaaagtgagagatggtggccaggtacagaggcttatgcctgtaatcccaacacttcgggggccaaggcaggaggatcacttgaggccaggagtttgaggtctgcctgggaaatatagtgagccctgtctttactttttaaaaaatgaagaattatccgggcaatgtggtgcacatctg

SEQ ID NO: 100508 - DNA, 380 bp, Homo sapiens
ggcacgaggtgaacattgttgaaacgacagcaaaggatttagaatattccataaacttagttgataaaacagggtttgagaagattgactccagtttcaaaagacgttctactgtgagtaaaatgccatctgacagcataacatgttacagagaaatcttttgtgaaaggaagagtcaatcaatgctgcaaacttcattgttgtcttattttaagaaattgccacagccaccccaaccttcagcgccaccaccgtcatcagtcagcagccatcaacattgaggcaaggccccccaccagcaaaaagattacgatgtgctaaaggcttaaatgattttcagcatttttggctataaagtatttttaaattaaggtatgtac

SEQ ID NO: 100509 - DNA, 366 bp, Homo sapiens
ggcacgagatcttatttaaaaactattgttagaaaatgctaatgatcatttgagctttcagtaagttgtaatctttttggtggtagagggtctcgccttgatgttgatggctgctgactgaatcagggtgatggttgctgaaggttgaggtggctgtggctattaaaataaggcaacaatgaagtttgccacattgactcttcctttcaccaaagattcctctgtagcatgtgacactgtttgatagcatattccccaccacagatcttctttcagaactggggtggaaccctggcactgcagtaatggttctaaaccctttgttgtcatttcaacaatgtgcacagcatcttcaccagaagttga

SEQ ID NO: 100510 - DNA, 368 bp, Homo sapiens
ctcaactacttatgggactccaccttgaacctgcaaccttagacttgctccagctcaagaccagccatacaagggggctcacacagccaccacattaccgccataccacacctcattgcacacgagaaaacaccctcatgttcatacacctatcccccattctcctcctatccctcaaccccgacatcattaccgggtttttcctcttaaaaaaaaaaaacaaaccgaaaaatcataaaaatagggggccctcctataaaagaacccctgaggggcccctacttttactggtcgtcgcccagaaaactcttcccccaaaaggaggcttatataaaatagcccccttgagacttttcggggaagactcc

SEQ ID NO: 100511 - DNA, 379 bp, Homo sapiens
gtttctctgtgttacccaggctggtcccaaaactcctggcctcaagtgatctgcctgccttggcatcccaaagtgttaggattacaggtgtgagccaccatgctcagcctgtagaacttttaacccaagtctcatttcttttttgaaagggaagagtgcacaagattaactgcttctttggatgaatcattgttaataaaaagctgggcatttagaattttgccttataagcccttctccaaccataagattattttgtaccaaaaactttggtgttctctaccaaagcagttaaaaacttttagcctgctacttcttgtatttgtctactgacagccccttggtactatttaggttgggggaggggacctaaaataat

SEQ ID NO: 100512 - DNA, 377 bp, Homo sapiens
cccacgcgtccgctctgctctgtgtttgaaaatgttaaaataaaatttaggggaaaatggactgttgtcagtctaataattattcctatttaaaaagtaacctgtactttcttcatggttttattgaacatcttttctttgctttttgtattaaacttgaactgagaaaaaaaaaaaaaaaaaaaaaaaaaaaaaaaaaaaaaaaaaaaaaaaaaaaaaaaaaaaaaaaaaaaaaaaaataaaaaaaaacaaataaaaaacaaaaatataaatataatctaaactgcttaaaaaaatctcactaatatgagcgcattttccacacctttcctaacattctgtgggaagcccccctgtattgcgagtcaatatatatc

SEQ ID NO: 100513 - DNA, 373 bp, Homo sapiens
gcgcccacgcgtccgcccacgcgtccgaattgctctagccaggacctcttatagtacattgaatagaagtggtgagagtgggccaggcgtggtgggtcggacctataatcctagcactttgggagaccaaggtgggaggatcacttgagcccaggagtttgagaccagcctgggcaatgtagcaagaccctatctctactaaaaataccaaaccaaaccaaaccaaaccaaacaaaaacaaaaatagccaggagtggtggagcatgcctgtagtcccagctactcgggaggctgaagcaggaggatggcttgagcctgggaggttgaggctgtagtgagccatgatcatgccattgtactccagccttggtgg

SEQ ID NO: 100514 - DNA, 1376 bp, Homo sapiens
ggcacgaggaagaggaataggtaatttttcagtgttcagacattccagcaatatgtgtggagtactcattctcactacagtttatgaggccatagctagtatgtatgactacccatccaagtttccctgcttacagttactattccaactgattggggggcttttcctaatagagtgatttaagccttcatttttagacatctaagcccttggtgatcatcagcataaaatgtgacaaattaaacaaaagcaagacagcacatcagagaacaactctgaggtggaatgattgggaaccaatgaatagttgttcagtaaatggtttatattttacagatgatgaaactgaaacacaaaaaatttagattaactcttaggtgacaaagccaggattgaagctcatgcggtctggctccagaacaactcttcttcatagttacgttatactgcccctgcattgttggtattgaaaataactgataccgtggttccagaagatttttctaacagtgtttgcaagctataaaatagtgctttcacttagaaaaggctagacgtggtggttcatgcctgtaatcccagcactttgagaggccgaggcaccatgctgggagataaggatccaacataagacaaacagtgctgatgcttttggaaagctcatattcaagctggggagacaaacaacatacaagagggctctgagagatttcatttctgtcctgctgatgaagtctacgttcattcagggcctgctgtggaagaccagccccaaaggagaagttttgctctgttgcccaggctggagtgcagtggtgcaatctcagcttactgcagcctctgcctcccaggttcaagcaattctcctgcctcaagcctcccaagtagctgggacccacaggcatgtgccagcatgcctggctaagttttgtatttttagtagagacgaggtttgccatgttggccaggctcgtctcgaactcctgacctcaggtgatccgcctgcctcagcctcccaaagtgctgggattacaggcatgaaccaccacgtctagccttttctaagtgaaagcactattttatagcttgcaaacactgttagaaaaatcttctggaaccacggtatcagttatctgttcagctgtgagatgcagtagttagagagctgacttttaccagagatgaaaggaaatttttcaataccaacaatgcaggggcagtataacgtaactatgaagaagagttgttctggagccagaccgcatgagcttcaatcctggctttgtcacctaagagttaatctaaattttttgtgtttcagtttcatcatctgtaaaatataaaccattcactgaacaactattcattggttccca

SEQ ID NO: 100515 - DNA, 342 bp, Homo sapiens
cggacgcgtgggagacaactggctttggcatgatttatgattccctggattatgcaaagaaaaatgaacccaaacataggcgttgcaagacatggcctgtatgagaagaaaaagacctcaagaaagcaacgaaaggaacgcaagaacagaatgaagaaagtcagggggactgcaaaggccaatgttggtgctggcaaaaagaagtgagctggagattggatcacagccgaaggagtaaaggtgctgcaatgatgttagctgtggccactgtggatttttcgcaagaacattaataaactaaaaacttcaaaaaaaaaaaaaggggcggccgttttaaagaac

SEQ ID NO: 100516 - DNA, 360 bp, Homo sapiens
cccacgcgtccgcggacgcgtggggtagcatccgtactatacttcacaacaatcctaatcctaataccaacgtatctccctaattgaaaacaaaatactcaaatgggcctaaaaaaaaaaaaaaaaaaaaaaaaaaaaaaaaaaaaaaagggggggccctttaaaaaaaacccctggggggccaaaatttaacgggggagggaaaaaaaaaatttttccccaaaaaggggggaaaaaaaaaaccaacggggaaattttggaaaaaaacctttttttggggggggaaaaaaatgggaaaaaacccccaaaaaaaataaaagctttaagggaaaaaaaaaatttttaaggggaaaaggggga

SEQ ID NO: 100517 - DNA, 1812 bp, Homo sapiens
ttttttttttttaaatcatgacacttggaggtttagcaccagcatccaaaatgaacaaaaacggaaaaaaaagcatttactatatatttcagatttctttggttggggttctccccatgtggtattaatatttcttgtttcaatatatatattaccaaaacagtaaaaaccaggaaaaaaaatagaaacctagcggttgctgaaactggagaggctactctcttgtcttccgtgcaggaattcccaggttctcagcttgctggaaaaatttgttgacattttctttttgtagttgtttcttaaagaataacagtaaacattccaatgtccaaatcttggttagtcttccactttattgcttggatgtttctttggtgttggttaaggttgtggcctgctttttgctttatttctgaatggtcattaattctttaggtcacctgccgatggtgaaggtgcctgaggagcctggtgttactcagcactgctctgctgggtgggtggagcagggttctcagttggtgcttcacctgccttggcctctttgccatcttgtgaaggagcgttaggaggacgcgggcgacgccggtaattgtagggacgccggtatccacggcgaacagacggctggtttggaccactggtggcttgctgattttctttatcttcagcctctccaactgctggggcaggtcgtgggcgaggaggtcccctgctacggtaccttgggcggtaagttggatttcgatgaaccggtccctgaagttgtgctccctctgggactccatccttcatctctccaatctcaccagcctgtattctgttgggatggggtaagacccgtgagcgacggtcaaaggtctgtcccacgtggtaaggcgggaaccgccgctgccggtactgagggcgatactgggggcggcgcagctgattccgggccccagagaactgcctatcagtggcaggggggtcaaatccttcactgctgccgctcccttcctcctcctcctccccagcgtaattccggggagggccacggcgccttccatagtagccacgtctgtaacggcgccgatctgcagcgtaacgactcccttccacaggaactccatccgggccagtcacattggcagcttctgcacccttctctccttcaaccacatcaaactctacagtttctccatctcctacactgcgcagatatttccgtgggttattcttcttgatggcagtctgatgtacaaatacatcttctttggtgtcatttcgatttataaatccatatccatttctgacgttgaaccatttgacagtgccaaggactttggtggcgagaacttttttctccgcgtctatcgctgccggcggcggtggctaaagaggcggcggccgcggtgcccgtggctgcaggggccgcgtccccaccggggtttcctgcgacgtgggcggcgggcgccggggccgcggcctggggcgcaccgctgcccaccgggctcttgggcgcggggtcctggggagccgcggcggccgcctccgtcggagcctgcgggagggtggtggtggtggtggtggtggccctcgcccgcgctcactcatgcctcctcctcctctgctctcgctcaggcgcctcggtggcggttggtcggcggttagcgcggctggtggtcgcggcggccggggctcgctctcggggaggccggggcggatctcgcggcgcaggcggcggcggccgaggctggggtcgcgctggcggaggcggctcgagcttcgtgctggcgcgctcgctccttgggctcctcgctcgatcttact

SEQ ID NO: 100518 - DNA, 322 bp, Homo sapiens
tgaaaaaataaataaaatcactgaggcatagactgatgctaaatgttaaccgagaacagttagaaaccctttcaaggaaagagtttctggttggggtcggcaaagatgtcgggaagcaggtgtgcttgccctggactttgagcaggtgatggcacttctgagatggtgatgctgagatggaggaagaggaggaggatgtcacgggttctctagttttagcactttgggaggccgaggcgggcggatcacaaggtcagaagatcaagaccatcctgaccaacatgatgaaaccctgtctctactaaaaatacaaaaattagcc

SEQ ID NO: 100519 - DNA, 365 bp, Homo sapiens
ggcacgaggcaagtttgacacaaactcgcacaaccatgacgcactgctcaagaactacgggctgctctactgcttcaggaaggacatggacaaggtcgagacattcctgcgcatggtgcagtgccgctctgtggagggcagctgtggcttctaggtgcccgagtagcatcctgtgacccctccccagtgcctctcctggccctgaaggtgccactccagtgcccaccagccttgtcctaataaaattaagttgtatcatttaaaaaaaaaaaaaaaaaaagatttttaattaaccggccgaaagctaattccctttagggggggttaatttaacctgggcactggccggcttttaacaacgtcga

SEQ ID NO: 100520 - DNA, 421 bp, Homo sapiens
cggacgcgtggggttttgctctgttgcccaggctggattgcagtggcatgatctcagctcactgaaacctctgcctcccgagttcaagtgattgccctgcctcagcctccagaatagttgggattacaagcttggcttttcattttcttaacaatgtcttttgaggaacacgagcttagtactgacgactaataacatcttaagtatgccattttggcattggccggtcaatgaggtacaatatatttttgaggaatccgttcttccataatggatcatgcgatacatgataaaatatgctgcctatgtaggattcctgcgttctcaagacggggacagggctattcttgagaactttagttcttccatgaagggactcggcgtcctatgatggcatattcgtccatctgtacttcggttt

SEQ ID NO: 100521 - DNA, 753 bp, Homo sapiens
acggagcttcggtcttactccccaagcaatggtgcgatttcgtctcagtgcaacctctgcttcctgggttcaggctattctcctcctcaacttcccaagtagctgggattacaggcgcccaaccacacccagctaatttttgtatttttagtagagacagagtttcaccatgttggccaaggctggtctcgaactcctgacctcaggtgatccacccgcctcagcctcgcaaagtgttgggattgcaggtgtgagccactgcgcctggccacatgtgtatatcttaaaggaaataatgctaggtaatttagtcaggtgcttgatgagcatttgtcatcatcatacggagtcaatttgtctttttctataaaagttctttttgtaaatgattagttgcttaactgctttaatttcttctaggtaccttacctgtcatcaggatctttttaccacaaataagaaaccttaaagcataaaacttggttcagtcttcacatttcttaaatggaaggagaaagggaataatagggagatatctttatctcaaagccaactgttgttgacttttccagtggcaggggtatgatgctaggacttccagatttcctgattccccatcctagtgccccttttgccaaactaggcaggctttcacagcttttggagcctaatttaagtttttcttgttaagaacagaaaactccattcatagattttaatttgtcattatttgcttatttactgaaaaaaaaa

SEQ ID NO: 100522 - DNA, 441 bp, Homo sapiens
cgaagagcgaacaccccaaacaatcccgaagcgccaccaaataaaaaaaaaaaaaaaaaaaaaaaaaaaaaaaaaaaggaaaaaatcccccgggggggcccccccccttttttaaaaccccccccccttttaaaaacggggggggttccccccccggaaaaaaaaaggggggggaaaaaaaaagggggggaaaaattttttttcccccccccgggggaaaaaaaccccccccccaaaaaaaaaaggggggggggggggggaaaaaaatttttttttttctttttggccccggggggggggggaatttttttaaaaaaaaaaaggggccccccccttttcccccccgaaaaaaaaaaaaaatttttccaaccggggggggcccaaaaaaaaaaaaaaaaaaaaaagcccccccaaaaaaaccccgtggtttttattttccaa

SEQ ID NO: 100523 - DNA, 519 bp, Homo sapiens
  misc_feature (1)...(519): n = a,t,c or g
ccttctttatgcataaccattttcaaaagaatatatgataaatttatagtatctttgatttgggggtggatgaaaatcagggagagtgcattggataggaaggagccttttctctgtgtacattttattttattttttttcttgttttaagcaatacatttttattatctataaaaaatcaacaaatttggaataaaaagactgtttggcacctnnnnnnnnnnnnnnnnnnnnnnnnnnnnnnnnnnnnnnnnnnnnnnnnnnnnnnnnnnnnnnnnnnnnnnnnnnntttngaaaaaaaacaacaaagaactgaacaacaaaaataaaaaaannnaaaagggggggcctttttaaaaattccttgggggggcccaatttttccgggggggggaaattatatttctttctcttatggggggggttattaaaacccccggggggttttttggaaaaaaccttttttttgggggggggaatttttgggnnnnnnnnnnnnaaaaatttttaggctttggg

SEQ ID NO: 100524 - DNA, 394 bp, Homo sapiens
cgtgtagctacccttgccacagttgtgacggatgtatggatgttcttgaacatttcagaaggagtggtagaaaaaaacacacattcagccaaccacttatatgaattgaatgtatcagaagtgtactgaagggactggagatggttttcctcagatgagggggccccaaaattgatagtgcacatctgcacgctttctgcgaggcctcagaacttttcccagggcccctccctcaaattgtctccatgggaaacttgacccagtggcaagttgcactttggtgatcttggtggtctacacacccgttctgtggagagtcgatttacataagctgtgtatacacacacacacacacacacacacacacacacacacacacacacctctaccacag

SEQ ID NO: 100525 - DNA, 487 bp, Homo sapiens
  misc_feature (1)...(487): n = a,t,c or g
ggctgccatttgaccctgcgtagagggcggtaagaccggtcgacccacgcgtncgcccacgcgtgcgcccacgcgtncggcaccaccacacctggctgattttcttattttttgtagtgatagggtctcattatgttgcccaggctggtcttgaactcccagcctcaaatgatccttccactttggcatcccaaagtggtgggattacaggcatgagccacagngctgtcttcattcatttatgtactcattcactcactcactcattcatttgagaagtagttatcaagttccttctgtgtgccagttaccctgttaaatgctggcgtacaaaaaaagaccaggtcctttccttgtacttacagtctagttggggaattcagccattaatcaaataacaatagaaacaaatctgcgatgaattgtttgagggacacttattgcagatgctgtccttgcccaacacagtatatttcaggtgactttc

SEQ ID NO: 100526 - DNA, 391 bp, Homo sapiens
tactccaacctgcgtgacagggcgagatcctgtctcagtctcccaagtagctgggactacacttgtagctgggactacaagtgcgcttcattacgtctggctaattttttaatttctgtagagaaagaggtcttgctatgttgctcaggctggtctcaaactcctgggctcaagtgatcctcctgcctcagccttccaaagtgctgagattgtgcctggctgtctctgtcttctttggggaaaagcaaggccaatgtagctgaagcagagaggagagaaaggtgagggctgactgcatggagcctctgtggggcattgtgatggctttgaagtcaccttgcttgaggaggctgcctcagggcctttgcatatcctgatccttctgcctggc

SEQ ID NO: 100527 - DNA, 408 bp, Homo sapiens
  misc_feature (1)...(408): n = a,t,c or g
tttagatcgagcggccgctcgcgatctagaaccggaaaccaggcatggcagtgaaaccggggtcatgaaagaagaaggtgatttcctcgcttcctgcccctccggaccccttctctgaactggccgctcttctctactgacccacaaggcaacgccatcacatcccacgttggacacacgtgtctatttctgtaatgctcactgaacgttttaaacaacgtgtaaatgtaaactaaaaaattaaggttccgttacttggctgggcgcggtggctcatgcctgtaaccccagcactttgggaggctgaggcgggccagaagttcgagaccagcctggccaacgtggtgaaaccctgtcactactaaaaatacaaaagttaaccagacggagcggcaggtgcctgtagtn

SEQ ID NO: 100528 - DNA, 423 bp, Homo sapiens
  misc_feature (1)...(423): n = a,t,c or g
cggacccctgggctgaaaatatgccactgcactccagcatgggcaacagaacgagagtctgtctaaaaaaaaagaaagcagtattggaaaaccatataactcaagctggtaacattttctacctcatgaaaaaagggaatgaatggagttggtgaaaagaatattctcttaatatacctccacgtgttatttttaaaaaataagcatgcattacttgcacaatcaaaatacaaaatataannntnnngaanaaaaaaaaaaaaaaaaaaaaaaaaaaaaaaaaaaaaaaaaaaaaaaaaannnggggggggggccttttaaaaataccttgggggggcccaattttacggggggtgggaaaaattattttttttctttttagggggggcataaaaaaccccccttggggttttttggaaaaag

SEQ ID NO: 100529 - DNA, 460 bp, Homo sapiens
  misc_feature (1)...(460): n = a,t,c or g
tacggaagcctcgggacggnctaagtanattgtccgaaccacccgtccgcggacgcgtggggttctagagccacagccgccaagccaaggcaaatggccccatcatctctcgcaagagcaggagagtccctgggggcagaggccatagttgtacctttctgggcaaagggtcagcgtctgtagtgtccatatgggcagtggggctcaggggggaagcaggcccaggggtctgtttccaatgacctcctcaaaagtcagaactggaaggcaaaaccccttataggctgagtgcacctgtaatcccagcatgatgggaggctgaggggcgaggattgcttgatgccaaagcttgagaccaggcttggcaatgtatcaagacccctgtctctacaaagcataaaaatagcaaatttggctgggagtggtggctcacgcctgtaatcccagaactctgagaggg

SEQ ID NO: 100530 - DNA, 492 bp, Homo sapiens
  misc_feature (1)...(492): n = a,t,c or g
agccttccccnagggcgccccccctaaaaacccctacngngctgagcanagccncgaannngggncgacccacgcgtccgcccacgcgtccgcaacgtgcaaatggtatacagccgaatcagctgtaaggaggaacttctcttgggcagaacgagcccttccaaaaactacaatatgatgactgtatcaggttaagatatagtctgtggatggatcatctgatgatgatggataaatttgatttttgctttgggtgggctcctcttggggatggattatggaatttaaaccatgtcacagctgtgaagatctggcacaagatagaatggtaaaaaaaaaaaaaaaaaaaaaaaaaaaaggggggggccctttaaaagatcccttggggggcccaaattttacggggggggggaaggaaatattttttcccttatagggggcggattaaaaacccacctgggaattttgggaaagaacccttttttggggggg

SEQ ID NO: 100531 - DNA, 427 bp, Homo sapiens
  misc_feature (1)...(427): n = a,t,c or g
attgtcagttattcctgttgctcctgctgagtccctgaatctgtagctcaacccgacagcccgcactgtctctctcctgagcgtggctgtcactactgctctcaccggattgcctgtggtggggaggggacatgaagctgcttagacctgaatttctgtactagaacttttttctcagtagctgacacctccattcagtttaacatgtgcctatggtcacgcttctcagacacacaaaagaaatgtatgtcggtcaggagtggtggctcatgcctgtaaccccaacactttgggaggccgaggcaggcggatcacctggcctggccaacgtggtgaaaccctgtctgtacaaaaatacaaaaattagctgggcatgatgataggtgcttgtaatcccagctacttgggaggctgaggtgggagaatn

SEQ ID NO: 100532 - DNA, 931 bp, Homo sapiens
aatgaataaaatctgggtggtctgctaggtcatggatttcctcctggtgacagaggggtaaatgaggcctacatgacgtaatcctatctaggactcacattttcgtgggagatatggatactgaaaatgtgggttaacaaacaaatatgtgcttacagattgtgataggatccataaagacatgtgagagggaacaaaaaagaagtcattctttcaataaaaaagtgcagaaggaaaggtttgctacttcttgcccaacttgggacattccttattcccactacttcctatgttatttttctccatagctcgtacatctacccactcagcaaatattaatagtttatttatgtgtctggttctttacttgtatttactcactaacatgcaaacttcgtgatggcagggatttgctcagcaattcaacaaacctggcacgtagcatatattcaattaataattattgaataaatacatgcataaatacacagataaatgcaccctcttgtttaaagagaaaatgggattggtattaacacagaatagtataattattaataaagtaaaaattgtagagaacagtaaaactcctgcgggaaaagaaagatacacctctggcgtttatagaagaaagccatccagaaccagcacagtcacctcattcctgtaatcccagcactctgggagtccgaaggagggtggagtggcttgaaccccaggaatttgaggccaaccctgggcaacatggcaaaacccatctctacaaaaaatacaaaaattagccgggcatattgactggaacctgtaatccgagctacctgagagctgagatggaagaaatcgcttgagctcaggaagcggaggttgcaatgagctgagatttcaccactaccctctagcctggatgacagagtaagaccctgtcttaaaa

SEQ ID NO: 100533 - DNA, 380 bp, Homo sapiens
gtgagccacgcagaagacgggtgatttctgcatttccatctgaggtaccgggttcatctcactagggagtgccagacagtgggcgcaggccagtgggtgcacgcaccgtgcgcgagccgaagcagggcgaggcattgcctcacctgggaagcgcaaggggtcagggagttccctttctgagtcaaagaaagcggtgacggacgcacctggaaaatcgggtcactcccacccgaatattgcgcttttcagaccggcttaaaaaacggcgcaccacgagactatatcccacacctggctcggagggtcctacgcccacggaatctcgctgattgctagcacagcagtctgagatcaaactgcaaggcggcagcgaagctggg

SEQ ID NO: 100534 - DNA, 814 bp, Homo sapiens
ctaaagcccagaagacagaccagtgcaccggatgcccgtaccgcgtgatggccaggaaggcccggctgtgcagctcctgcttgatggcgctttgcagacggagccagtgaccaccgaggctgtgccactgcatcgggccaccatgctgatatgcccggtcccagagctgctagagaagaggtacagaggcagcgaagacacgttgagggggaggacgagaccaactgcgagacgccgagtcccgggctctcaggacgctctcccgtacctgcgccctcgtcagcccatcaccgaaagaacggcctgacccagggtcacactgcactgaatgcttcctgttttgctgtctctcggaggataaaagacactcttggctgggcgcagtgtctcaagcctgtaatcccagcacttcaggaggctgaggcaggaggatcacttgagctcaggagttggagacagtgagaccctgtctttacaaaaaattaaaaaatgacctagcctcaacttggtcaggcggtgcgtgtcacgccttgcaatctcagcaccttgggaggccgagatgggtggatcacgaggtcaggagttcaagaccagcctggctaagatggtgaaacctcctctctactaaaacacacacacaaaaaattagccggctgtggcgcgggcgcctgtaatcttagctacttgggaggctgaggcagataactgcttgaacgtgggaggcagactttgcagtgagccgagatcatgcgactgcactccagtctgggcaacagagactccatctcaaaaaaataaataaaaataaaaaata

SEQ ID NO: 100535 - DNA, 381 bp, Homo sapiens
ggcacgagcggctctaggagagagctagcaccatgagcttcaataccctggtagaatttctttcaaaattggagtcaaccctctcaaaccctgtcaccgctttcaactaagattatggaatattctaaatcctctggtgccatatcaacatagcagcttcaccagaagcagattccttctcaagaaaccactttttttgctcatccataagaagtaactcctcattcattcatgttttatcataaagactgcagcaaatcagtcacttttcaggtttcacttttaattctagttctcttactattttcaccacatctgcagtgacttcctccactgaagtcttgagcccctcagagttatccatgaggcttgggattaact

SEQ ID NO: 100536 - DNA, 422 bp, Homo sapiens
cctttgggccctgcctccccttcctgccacgtgcccctagttatttttttttttttaacaccatgggattaaggggggggttgcttcccccgacccattaagggaggggaaatgaatgggtttgtttagcccccctgctgggggcttgttcagcccccactttgggttggggaggggggggccaacggccctgggtagttgggcccaggaaacccacccttccacttttgggggtcccaccaggctattaagggggaatgttccgtgccaaaaaaaaaaaaaaaaaaaaaaaaaaaaaaaaaaaaaaggggggggccttttaaaaaattttgtgggggggccaaattttaggggggggggagaaaaaaatttttttttttttggggggggtttataaaaaggggggcgggggcgggtttaaa

SEQ ID NO: 100537 - DNA, 402 bp, Homo sapiens
atgaggctcctggcggccgcgctgctcctgctgctgctggcgctgtacaccgcgcgtgtggacgggtccaaatgcaagtgcttcccggaaggagcccaagatccgctacagcgacgtgaagaagcttggaaatgaagccaaagtaacccgcactgcgaggagaagatggttatcatcaccaccaagagcgtgtccaggtaccgaggtcaggagcactgcctgcaccccaagctgcagagcaccaagcgcttcatcaagtggtacaacgcctggaacgagaagcgcagggtctacgaagaagcgcagggtctacgaagaagaatagggtgaaaaacctcagaagggaaaactccaaaccagttgggagacttgtgcaaaggactttgcagattaaaaaaaaaa

SEQ ID NO: 100538 - DNA, 950 bp, Homo sapiens
ttttttttttttttttttctctgtgtatgatatatatttatatatataattgctctcattttattttacttaatcctctttttacagtagatctgacacaggcattaaataactgcagagagagaccatggtagggcgggtgcaggaaaacatgggggcccgaagggaagaaacccagatccagctagagaaaaagggaagggtccccctgtgggtggagtgtggaggctgcagcattaaaaaaagaaaaaggaggttagagaggatgaggacgtgaagggatgctggaggacaaagggttaaaatgcctctacagctacagaatattcagagcaggaggcaggaggcccctcatttgacattctgtgggcattatgggtttttttgtttttgtttttgtttttttttttaaaggcaaaggggtctgaagagatggagccaagacattcagaggctagatttggaattttcaggctggcatgcagaggaaaaggaaggagttagtgattagttgataacttgctaaaagaagccagagaaaggatggtgggggcagatctgggctcaggggaaggaggtggaatagtcccaaagccagccgatgtttccaaggtggccactggggacggagccagaatggccgcccctcccccagagctccctgggaagtggaacttgaaggatattctgggaaggcgaatgggggaagggagccatccataaaaacaaagtggatattcagcctaggtcaaccccgcccctctgggtagcagctatttgggtgacagaacggcctaggaagaaactgaaggccgggcgcggtggctcatgcctgtaatcccagcactttgggaggccaaggcaggtggatcacctgaggtcgggagttcgagaccagcctgaccaacaaggagaaacccccatctctactaaaaaatgcaaaaaaaaaa

SEQ ID NO: 100539 - DNA, 435 bp, Homo sapiens
tttaccactggaagatggtgagtgcatgattcatataatctagaggcactgccctaatgagaaaaaaaaaaacattgattttaaaaaataaaactttaaaaccaataaacgtctttacacgggaaaaaaaaaaaaaaaaaaaaaaaaaaaaaaaaaaaaaaaaaaaaaaaaaaaaaaaaaaaaaaaaaaaaaaaaacaaaaaaaaaaactaaaaaaccgcgcccccccccggaccaaaaaataaaccctacaaaaaaaataaagataggggtaaaaaacaagaatattttttttctttggggaagcccttctttgggtggggtggctgtacgggacaaaaaataatttttatgtgtagtaatctaagaaaaaattattttccttacatttattccttcccaggcatgctttttgggaaggggttaagaagaaaaa

SEQ ID NO: 100540 - DNA, 438 bp, Homo sapiens
  misc_feature (1)...(438): n = a,t,c or g
gaaatttgttttccatgcttgtgattttgtgtttgtaaacatttcaggaggaatttaggagtgtaactatagtttatacttctataatgttgtcttacatttacatttttaagtgcctaattgttaaaactgatttatgtttctcttctaaagaggatatgtgtacttggtttctaatctctttggttttgctttttaaaaaatgcaagagcctatactttgtatttacctaataaaccacagtgacatcaacagtcttttcaaaattaaaaaaaaaaaaaaaaaaaaaaaaaaaaaaaaaaaaaaaaaaaaaaaaaaaaaaaaaaaaaaaaaaaaaaaaaaaaaaaggaaaaaaaaaaagaaggaaaaaanannnnaaaaaaaaaaaannnnnannnnnnnaaaaaaagaaagaaattttggtagggtaggggggcg

SEQ ID NO: 100541 - DNA, 460 bp, Homo sapiens
  misc_feature (1)...(460): n = a,t,c or g
taactcatgcccccatgtctaacaacatggctttctcaccaattaaaaaaaaaaaaaaaaaaaaaaaaaaaaaaaaaaaaaaaaaaaaaaaaaaaaaaaaaaaaaaaaaaaaaataaaggggtggggggggttttttaaaatacttggggggggccccctcttttcggggggggaaaaaaaaattttttttttttttttggggggttttttaaacccccccggtttttttttgaaaaaaactttttttttgggggggtaaattgggcccccccccccccccaattttttttttcgtgggggaaaatatttttttttttgtggcgttggggggccccactttttcataacctctgggggggggggntttttgtttgatcttatattggaacagaatgacgccgccggttgggctgcnannacccgggtttatataaataggaaggttagaaaagataagag

SEQ ID NO: 100542 - DNA, 323 bp, Homo sapiens
  misc_feature (1)...(323): n = a,t,c or g
cgcagtaaaactataacctcgcttacaatctttcgcagggaaccttacttgtgagccgggacataaatgtgccaccttcctacagagaaaaagagctctagacgctgcttggaggcttttaggacagaaaggagataacctacctggctaggcgggttgcacctaaaatttcgcttacttggggatgattgaggaagatagatatactcgggaacctgggtttcnccagcctgggcaacatggcaagaccccatttctacaaaaaaatttaaaatgagctgaatgtggtggcacgcgcctgtagtcccagctactcggaaggg

SEQ ID NO: 100543 - DNA, 586 bp, Homo sapiens
  misc_feature (1)...(586): n = a,t,c or g
taaaacttctaaattccagaaaagtataccattgtcatggtttagctcatcacacacatatacccggtcttgtgcgtctgccagctcggctgtgtctggggcaggctgtccctgagcttaacatgcagggagttctcacatgtgcatgtgtggtgtgctcccgtttccagcttatgtgagtagataggccctaatgtgaaatggatacagtagggccacactgtctttttgatggcacatttaaacagtttggctctgcacttacagactcatctgctgctctgcgtctggcagcttacagtttaacaatgaagagcaggccaggcctctaatcccagcactttgggaggccaaggtgggcagatcacgagggcaggagatctgagaccatcctggccggcacggtgaaaccccatctctactaaaaatacaaaaattagctggacctggtggtgcgtgcctttaatcccagctactcgggaggctgaggcaggagaattgcttgaaccagggagtcggaggttgcagtgagccgagatctcgccgactgcactgcnacctgatggcagagtgagactctgtctta

SEQ ID NO: 100544 - DNA, 360 bp, Homo sapiens
atttttagtagagacggggtttcaccatgctggccaggctggtctcgaactcctgatctcaggtgatccacccaccttggccaaatcctgactcacaagatgttaggattacaggcttgagccaccgcgcctggcctttcttggatatttattaaccatcagacttttaaaaaataatcccagggaagatacaattctgccctcagagacctttactataccattgcccaacccagtttcccacttgctcctacgagttcccagctcccacacgaagccctatgtgcactggtcagaagaccctgtcggttgtccccagagggcatggcgccagtcacttgagtttactgtagatcccgc

SEQ ID NO: 100545 - DNA, 375 bp, Homo sapiens
cggacgcgtggccggacgcgtgggggaaacagaaactggccaccgcaccaggctaatttttatacttttgtagagacgggttcactatgttggccaggctggactcgaactcctgggcttaagcgatgttcccacctcatcctctctagatgctgggataaccggcatgagccactgctcccggccaagacctgaaatttcaagcagggatgtacataccattcctggagcccttcaagaaacctggcatactccggacctggcctcatctatccggagccttaggtgtaggctagattgccctcacaaccactgcccactggacaaagacggggttaccctatgaaacccgaatctaccctggctggacacgtg

SEQ ID NO: 100546 - DNA, 224 bp, Homo sapiens
cagtgcggacgaattcgaagcagaaaggatgctaggaaagggaatgtccaaatcatccccagagagggaaggaggaggacaagcccaaggtacctgttccctgtaactggacaagaaactgatggatggggacatggggctccctgcctggctcctcaaaacaagatccacatctcccccaaggagccccaggttacacagaagaaggggggcaaccagttgga

SEQ ID NO: 100547 - DNA, 345 bp, Homo sapiens
caaagtttccttcttggaagcctttcttgactccccttaaaaaaaaaaaaaagggggattttttccatgggggctcccaaaacaccaaaatacacaatacatttctgtatgtatgtaggtatgtatgtatgtctttattttggaggcagggttttgctatgttgcccaggctgcagtgcagtggcttattcacaggtgtgattatagtacactgtagctttaaactcttgggtttaagcagtcctcattctatgggctccctttccagatggtggaattaaagcccttcggtattacccatccctgcattacctttattattgttttcctgttgtatgttttttt

SEQ ID NO: 100548 - DNA, 368 bp, Homo sapiens
aaaaagaagaagaagaaggagaaggagaaggaggaggaggaggaggaggaagaggaagaagaagaagaagaagaagaagaagaagaagaagaagaagaagaagaagaagaagagcacgcagaatttactggtcatgtagaaagcattacacagtgtaagctgttgttatgtcatctttccctgagggtagaagcaggcatcacccaccttctctgtttcactgtgagggctgtgaccaggagccaaaggcttcttactaaaaggaggaatggttccgtggggcacacaagtgaataaaaccctttctgtctatggagaactacctgtcctcccaaaatgccattagagtttgggaattctggtgtccc

SEQ ID NO: 100549 - DNA, 336 bp, Homo sapiens
cccgtcttggcctcccaaagtgctgggactacaagcgtgagccaccacacctggtctcgaactcctgacctcaagtgatctgcctgccttggtctcccaaagtgacgggattaaagacgtgggccacgacaccgagcctcaagatttttacactctggggcaagacccatagtgggactcaatatggccaaaaggaatgctcttcttttgtcaagtgggagaggtacaggtatgggaagggaggtgggaaaggagggctgtcagacacagagatttaacagggaggcaaactttagaaagacagtacaagctaacaacgaagatttgtgcttatct

SEQ ID NO: 100550 - DNA, 339 bp, Homo sapiens
tcttgctctgttgcccaggctggcacgcagtggtactatcatagctcactgcagcctcaaacagaagtctgaggctgggcttaagcgatcctcctgcctcagcctctgaaagcactgggaccacaggcatgagccactgttcccagccagcaaaactcttaagtacatgtattagaaattctgtagcagaaactaagtattaccttatgtttaaatgtaagtaaaatgccccatgctgtggcctgacaatagtcattattctacatcattcccctcctcctcccttgctaatagaagccagcttttgcagaattatcaggcagctaactacttagaggc

SEQ ID NO: 100551 - DNA, 330 bp, Homo sapiens
taagggaaccctcaggcgtcaagtcacatacaagggaaccctcatcagaactagtagcagataccttggcagaaaccttccatgccaggaaagaatgggatgatatattcaaagtgctaaaaaaacactgtcagccaagaatactgtacctagcaaagccatccttcaaaaatgaaggagaaagtttttcccagagaaaatgtatcacaactagggtggcccgatcaaaaatggcaaagggtgtcctacatctggaagtaaaagacatatctaccatcattaaacaaatgaaaataagaagctcactggtagagcagatacacaaatgga

SEQ ID NO: 100552 - DNA, 1240 bp, Homo sapiens
caaaatgtgatctggttgatcataaacaatacttttggagctggattaatattaagtcacttgagagatacagaaaataatcaaagttgaccacgaacatggtattttagccgggttcatctggtttgcacattgagaccgtaatacttcaggttctaattgtgtccagaaggctatgtgttaacattcatagcaaactggttacctttatttcctgaaagttaaattttgaaagaaagggataccaagtgagaaagcaaccttcagttaaacaaaggggtacatcaagtttgatactcttggattaaaaatcaggtgacaattggaacatggaggagaaattcatgattatagaaaccatgaagccaatcttttttacaacaaagctgcttgtttttttcttaatcatgtagtggctgctatcaggccagttctggaacttcactgagtccctctgctcttctgaatcagctcttgattggtggtgacttctcggaagttctgaggaccacaaagaaagagcagtgtcagttcactaagttgagccatttggagattactaaatattccataactgtgggaaacacttaaatgtgttggttattagggttttcgtgtgttttccttttagcattacatcctcatatgcagtgttgttatagtagaggaggacattttttctagagggcagagagatctagggaatatgactgttaacatttgaacactttcaaatagcagtacgttttactgtggttttgataacctgacatagaataagctgctgagatgcaaggataccttggtatatagaaagagccttagacttcgtatgaaaaaaacttaggttttatcttcagcctagccatctaatgtctctgtaactttacagacatctggtgtttcacttaacctctctgagacttagtttccttttctgtaaattgatagttgtggccaggcaccatggctcatacctgtaatcccagcattttgggaggctgaggcaggaggatcacttgagcctaggatcctccaggatacttgagaccagcctgggcaacatagggaattaaaaaactttttaaaaatcagctgggcgtggtagtgtgcctctgtggtcccagctattgaggaggctgtgggaggatcacatgagcatgggagggttgaggcttcagatagccgtggccacaccactgcactacagcctggacaacagagcaagaccctgtctcaa

SEQ ID NO: 100553 - DNA, 482 bp, Homo sapiens
aagtttttcttacaacttttcctccattcttttatttatgaacattttcttttcttttcttttcttttcttttttttttttttgagaccgagtttcgcttttgttgcccaggctggagtgcaatggcgcgatctcggctcaccgcaacctctgcctcccaggttcaagcaattctcctgcctcagcctcctgagtaggtgggattacaggcatgcgccaccacaatctgctaattttggaatttttagtagagacggggtttctccatgttggtcaggctggtctcgaactcccgacatcaggtgatccgcccacctcggcctcccaaagtgctgggattacaggcgtaagccaccgcacccggcttgccttttattaatctgctttatgctgagttgattttttcagcgaatctttcgagggcgaaggggaagctttcccttcaccccaacacatgtaagtctcctccatgttttctcatg

SEQ ID NO: 100554 - DNA, 393 bp, Homo sapiens
atacctacctccaggggtggagcgaggatacatggcctattatagataaaaacggaacaagggccgaaccaccaggaagtgaagaaacgaacatgtcctttgtctttcaaaaaaaaaaaaaaaaaaaaaggggggggggggccgggtaaaaaaaacggggggggggcccaaccttaacggggaggggaaaattttttcctttttcgggagggggggtaaaaaaaaaaccgggccgcgggccgctttttaaaaaggggggaaagggaaaaacggggaattgggggtatggaaaaaaaaccttttttgggggggggggccggaagggcccccccccccaacaaaagttttaggggtaaaggaaaaataaaaatttttaagggggaaggggctaac

SEQ ID NO: 100555 - DNA, 370 bp, Homo sapiens
  misc_feature (1)...(370): n = a,t,c or g
aggcggatcacttgaggtcaggatttcgagatcagcctggccatggtgaaaccccatctctagtaaaactaccnaaaaaaaaaaaaaaaaagaattccccgggggggggggaagggcccggaattcccacttcctcggggggcgggggcggaaaattcctttaacccgggaaggagggggttgcatgaaccaaaaaaaaccccatggcactccacccgggtggnnaaaggggacccccatttgttttaaatcttacaagaacattatggatttttgggaaaaaggtctttttatggcttgattaaaccgaaaaaaataaaaattcttaaatgttaaacacaattgttttttgcttgccacactcttgtag

SEQ ID NO: 100556 - DNA, 371 bp, Homo sapiens
  misc_feature (1)...(371): n = a,t,c or g
cttttaatttgtgagtgtgcctcctatactacattatctctttaagattttttttttttttttgagacggagtctttgtttgccccccaggctggaatgcaggggcacgatctccgctcacggcagccttggcctcccaggttccagcgattccccgtctttactaaaaatacaaaattacccttgcgggggggcacatgcctgggaccccagctacttgggttgctgaggcatgaaaaaacctggaccctgggggggggaagtggcagttacccgaaatcaggaaaacgggccatggccctccaggggggggtacaaaacaaaacttgtgttccccatnaaaaaatggtaaaggcaagcccctagggggg

SEQ ID NO: 100557 - DNA, 365 bp, Homo sapiens
tcctagcctttctattagctcttagtaagattacacatgcaagcatccccattccagtgagttaaaaaaaaaaaaaaaaaaaaaaaaaaaaaaaaaaaaaaaaaaaaaaaaaaaaaaaaaaaagggggggccccctaaaaaaaaacccctggggggccccaattccccccggggcgacaaaaaaaaatttttccctttaagggggggtttaaaaaacccccccggggtttttttgaaaaaaaccccttttttggggggggaaatttgggcccccccccccccccaaaaaataaacccccgggggaaaaaaaaaattttttagggggtagggggcaaaaaaactcttttttgtctgcttggtaaag

SEQ ID NO: 100558 - DNA, 391 bp, Homo sapiens
ctcaccctagcattacttatatgatacgtctccatacccattacaatctccagcattccccctcaaacctaaaaaaaaaaaaaaaaaaaaaaaaaaaaaaaaaaaaaaaaaaaaaaaaaaagggggggggcctttaaaaaaaaccctgggggggccaaaatttaaggggggggggaaaaaaaaatttttttttttaaaggggggggaaaaaaaacacccggggggattttgggaaaaaaacctttttttggggggggggaaatttgggaaaaaccccccaaaaaaaaaaaagggttggggggaaaaaaaaaatttttagggggaaaggggggaaaaataattttttatctggggggggaaaaaatttttttaaaaaaaaaaaaaaaaaaac

SEQ ID NO: 100559 - DNA, 372 bp, Homo sapiens
gtgatttctcaagcccctatgcagtgttagatgccactatgaaatacgagccattgaaagagatctcttcaacttattattttttatcacgaacgtacatatcagttatttatgagattttttttttaaatatttcattttttttcacgactttttctgccattgaattagcctttttctcatgcactggtggtcaagaaatacatgccataataagatggcagttaaacttcatcagtattttttttttttaaataagattatttacccaggcacaggggctcgcacctgtaatctgaacactttgggaaggccaaggcaggaggatcacttgaggccaggagttcaagaccagcctaggcaacataatga

SEQ ID NO: 100560 - DNA, 613 bp, Homo sapiens
gaataaagactggagacattcagagtgacgcaagaagtacagtccacagtggaggaaaactccagctgccaggcaattgcccgctggtccctggcctggtctaggtggttgtgggggaaggggagctaactgcagtgactcacttaaccctttccgggcagaggaagataacgctttttaattgaagaaattttttaattaaaaaacatttttttgacggcttcttgttgagcagggctaccccacaggccatgtgcctagagtggccttaattgaaatttttgttacaatcattgtagattcctgtacagttataagaaataaaacagccgggcgtggtggctcatgccctgtaatcccagcactatgggaggccgagacgggcggatgacgaggtcaggagattgagaccatcctggccaacacggtgaagccccgcctccactaaaaatacaaaaaaaccagacgggcgaggcggcgggcgcttgcaagtcccagctactcgggaggctgaggcaggagaacggtgtgaacccaggaggcggcttgcaagcgagccaacaccgcgccaccgcactccagcccgggcgacagagcgtctccaaaaaaaaaa

SEQ ID NO: 100561 - DNA, 861 bp, Homo sapiens
tttttgagacaggatctccatctgtcacccaggctggtgtgcaggggtgcggtcatgggctcatgggattctcctacctcagcctcctgagtagctgggattacaggtgtatgccaccacgcctggcttatgatgaatatttctgagtgggatgtttggccacatttatggtcatgtatgtaggctgttacctcaagtgagtcactcagggaacaatgagcacttgaagatttttttatacaaaaggccacagtgaggccaccttgagtcaagccgactaaggcccctcaaccctgtcactaagcagcacgtgacactggcaggaccttcatctccagcatcccacccctgggtgtgggactttggggcagccgtgtgtgcaggtgtcggcacaggctagctcctcctggtttggtgtggtgtttgccattgcagagcaagctgccacgaagacccctgggcatgattttgcttgtatttccggaagtggggttgctgggtcatagggcaggtgtaattttttttacttgaaatgttccacttcttgttctgggaggtggttccaagggtgtctgcttttggccaggcgcagtggctcacgcttgtaatcccagcactggggaggccgaggcaggcggatcacaaggtcagaagttcgagaccagcctggccaccaaggcaaaaccccgtctctactaaaaatacaaaaattagccgggcatggtggtgtgcgcctgtaatcccagctactggggaggctgaggcagaagaatcgcttgaacccaggaggtgaggttgcagtgagctgagattgcaccactggactacagcctgggtgacagagcgagactctgtctcaaa

SEQ ID NO: 100562 - DNA, 274 bp, Homo sapiens
gcacgaggctctctctctctctctctctctctgtctctctctctctctctcggaagagggcgccctccgcatatatttttcttaatcgaacacttgaagtgtgtgtgtttctatctaatttttaaaaatgtattccttgccagggcacgcagggtggctcacgcctgtaatccccgctcttcgggaggctggggggggcggatcacctggggtcgagagtttgacacccccctgaagaaaccctgtctctactaaaaacacaagaattaggcgg

SEQ ID NO: 100563 - DNA, 368 bp, Homo sapiens
ggcacgagaactggttaagtatggattctcaaactagggctttaaatatccttcgtgattttttttggcatgaaaacttgtaagaccactggtgggctctgtacaaagtcggctaccccctcattctatatcttcctctgcccactttcctcccagctattaaaaatgaatgtaggctgggcacagcatctcaagcctgtaatctcagcactttgggaggccaaagcagaaggaaagcttgagcccaggagtttgagaccagcctgggtaacaaagtgagaccctgtttctatttttttctaaacaccaaaaataatgactgtaaggcagtatgtagccaaacaacttggcaaagtttgttatctttt

SEQ ID NO: 100564 - DNA, 344 bp, Homo sapiens
  misc_feature (1)...(344): n = a,t,c or g
ggcacgagggccttgcagttccatctggactgctgcgctagtggtgagcaaggctctgtgggcgtgggacctgctgaaccaggcagggatataatctcctggcatgctgtttgctaagaccgttggaaaagtgcagtattaaggctggcgtgtctcgattttcctggtacagtctgtcacggcttcccttgactaagaaagggaaatcccccgaccccttgcatttcccaggtgaggtgatgtcccgccctgcttctgcttgccctccctgggctgcacccactgtccaaccagtcccagtgagatgaaccaggtacctcagttggaaatgcagaaatcacccn

SEQ ID NO: 100565 - DNA, 361 bp, Homo sapiens
ggcacgagaggaatcataatttagtttgaagtctaaaatctagttggttttattagacccccaaacacagtgggcacactgccaaggagctccatgacttctgctctagtaagacagccctggatagacagatgcagctgataggttatgttctacatctagtttgcttttgtcctgctaaactccagtttagtatggtttgatacacatagttcactgatataatgcttttatttttttgggtgggggacagagatgaggtctcactatcttgcccatgctggtcttgaactcctgggttcaagtgatcctcctacctcagtttccaaagtgctggtattacaggcacaagccactgtgg

SEQ ID NO: 100566 - DNA, 363 bp, Homo sapiens
ggcacgaggttttccataatggttgtactagtttacattcccactagcagtacgctaagggtttccttttcctcacatcctcaccaacacttgtgatcattttggcattccttgcagttgcaccactccagtctctgcctccttggtcagcttggctcttcctcttaatctgtctgtggcctctcctcttttgtttcttataaggacattcgtcattggatttagggtctacctgagtataatctaggatgatcccatctcaagattttaaacttaattacatctgcaaagacccttttcccaaataggttacattcatatggtctgggtattgggatatggacacatctctttggggggccc

SEQ ID NO: 100567 - DNA, 370 bp, Homo sapiens
ggcactaggcgggatataatttcctggtgtgctgtgttgccaaggctgttggaaaagtgcagtattaggatgggagtgtcccgattttccaggtaccatctgtcatggcttccctttgctaggaaagggaattcccctacctcttgcacttcctgggtgcggtgatgccccgccctgctccatgggctgcacccactgtctggcaagccccagtaagatgaacccagtacctcagttggaaatgcagaaatcacccatgttctgcatcgctcacactgggagctgcagactggagcagttcctattcggccatcttggaacctcctctatataggagttatactcactaaaggaacaaatattttgccca

SEQ ID NO: 100568 - DNA, 406 bp, Homo sapiens
tgtttttgaggttcgtctatattgaggcatgtatcagtaatccattccttttaatggctgaataatagtccgttccttgcgtggatggaccacaatttatttgttcatccatccatctgtatacattgtttttgtggacctgtgtggctgtcataggcaccgggccctctagcactgttatgaacaagtagcgcgtgaatctttatctcaggagtggggaaacaccaaccaaacactcccatacgcaaatatcttggacgaaaaccacggtagaaatgcagagtggggctgagcgcggtggctcacgtctgtaatttcagcgctttgggaggccgaggcaggtggatcatctgaggccagcagttcagaccatcctgggcaacatggcaaaaccctgtctctattt

SEQ ID NO: 100569 - DNA, 395 bp, Homo sapiens
ggcacgagggcttcctggtgctggtcaatatatattcatgattgcacaagcaaacacggacacgggagaaactaaagctgggccaaggacctggtgaatcaaagttcacactcctcacagccgggctgggggtttcctatgggtgtgccgccggatgtgagcagactttacccaaacctggggttcacaggtcaaaaagggtcagcatcactgaggagttttcaggacaacgtaggacttttcagagcctttaaaatgcactggagggccgggagtggtggctcacacctgtaatccccagaggccaaggagggcagatcactggaggtcaggagttcgagaccagcctgaccgacacggtgaaacctggtctctactaaaaatacaaaaattag

SEQ ID NO: 100570 - DNA, 406 bp, Homo sapiens
cccacgcgtccgactagttctagatcgcgagcggccgccccctttttttttttggggttttttttttttggggggggggggggaaaaaaaggttttttttttggccccaaaaaggaaagggggggcccccataaaattggaaactttgggatccaagggaccccctggcctccccccccaattttttaaaaccaagggggggccccaaaaggccgggtttgggggatttttttttttttccgggggggggggttttttttttttccccccccctgggaaaaaattggggggtaaaaaaaattttttgttcccccccccaaaaagggggggaaaaaaggggaaaacccccccgccccgttttttttttttccccttggtccttttggaaaaaaaaaggaaacctttt

SEQ ID NO: 100571 - DNA, 396 bp, Homo sapiens
gcgcaaacacttgccaccacaccgcggttatttttgtttttctggaacaggccacgttacgccatgttggccaagctggtctcgaacttttgacctcaagtgatcaccgtgcctctgcctcccaaagtgctggaattacaggcgtgagccattgctccctgccggctacttccttttcaacccctcctttttctgtggcaaagatgctgaggggcacacaaaaaatgaaagtacctttgattggtcccctcccacaaccaataaggctagtggctggccactacttcatttacataacgtgaatccatggtaaacctctagagagcatttaaactgcagaaaattatgtaacttgactgtcttgagccactgctgcccccgctcccaccctgtggg

SEQ ID NO: 100572 - DNA, 396 bp, Homo sapiens
gcgcggacgcgtgggcggacccgtgggcggacccgtggggagaactttcatttttttccaagctggttcggattcggcgcggattttggttttgttcccctactgcactcttccccacccactccccggcctttttttttttttttttaaaacgggtattaaaagttgggttctccttaacccctcaccccggtttgtaatttttttagaaaaaaagattttcttgcctcagccccctttttttatattttatcccccccccacccggggggggccggggggggaaacccaaccgcccggaaaattaaagggctctcctaccgggacccaaaagaagggcataaaaggggggtggtggcccacacccccacaccctgaaaaaaaagggtgtttttt

SEQ ID NO: 100573 - DNA, 360 bp, Homo sapiens
  misc_feature (1)...(360): n = a,t,c or g
ccacgcccagccaacttttgcattttttagtagagacaaggtttcgccacgctggtcaggctggtctcaaactttcgacctcaagcgatttgcccaccttggtttcccaaagtgctgggaccacaggcatgagccaccgtgcctgaaaattattataaaatcagtattttatactgatttaccacttttataaaaatgatttataactatcactttttgtggnggcagaatgaagatagttttggaaacacaaaacctaaactctttgcctcctttagagctgttctctgaaaactactggaggtaatgggccaccaaaatatggaactatactagtcaagaggaattagatttaaaact

SEQ ID NO: 100574 - DNA, 363 bp, Homo sapiens
tctcactatgctgcccaggttagagtgcaatgacacgattccagctcactgcagccttaactcttgggctcaagtcattctctcacctccacctccaaagtagctgggactacaggtgtgcatcaccacttctggctaatgtttcattgtttataatatcatttccttagaacactgatgagaaaaaagaaactggtttcattataagttattttgcttaaagtcagtttccaagaacccgtcaatgacattaagtgaggacttactgtatgataaacaatggacaaatttgacttaagaattttttttatcaaaagatgcacagcaatgacaaaaactgtatttaggattccgagtttgaaa

SEQ ID NO: 100575 - DNA, 339 bp, Homo sapiens
caggagtaaaggggcgggggaggggctcgggcagcacaggggagggaagattaaggcacaggtgcgcggggcataaatttattttctgcttaagcaggttgagttgggttttctatttgcaatagcaaaagtcctgactggcaaggattaaaagtttggagactcttacaggtaagtgcagctcatgatcctgtgagtgcagcagaaagtcttaagaaatggctggggctggttgaacccagattttccattggagtgcagatatccccagaggcgtagaaaattaaatttgttttatgttgttccaaaagaggagaactgaggccagaggagcacact

SEQ ID NO: 100576 - DNA, 345 bp, Homo sapiens
ctcagagctagtcataaaacataaatacattactataactttccctccacctttctgtgtaaatactggccataaagaaattatctgactaccttgtgtgattgtaggttgttaggcccccattctagagaaggttgtgcctcagaccccgagggaaggaattcatgctcagagaggccaacaagaatctagataggcaggccaggcacagtggcttatgcttgtaatctcaacaatctgggaggccgaggcaggaggattgcttgagcccaggagttcaagaccaacctggcaacatagtaaggcctcatctctacaaaaaataaaaaattagtcaggcaaggg

SEQ ID NO: 100577 - DNA, 346 bp, Homo sapiens
  misc_feature (1)...(346): n = a,t,c or g
cgtgcatttatcagatcaaaaccgacccaaatgcccatcaatgatagaatgtataaagaaaatgtggcacatagacaccatggaatactatgcagccataaaaaaggacaagttcatgtcctttggagactattactctaggtgaagtaactcaggaatggaaaaccaaacatcgtctgttgtcactgatacgtggaagctaagctatgaggacacaaaggcatgagaatgatacaatggactttggggacttggggagagcttgggagggggcagcgagggataaaagactacaaatagtgtggaatgtgtactgcttgggtaatgggtgcaccaaaatctcacn

SEQ ID NO: 100578 - DNA, 346 bp, Homo sapiens
ctagccaaaaacactgtttaacaagactgcaaaagaaaaagagaacagagaaaaagggagagagagagagagtaaataagtctgtttcaacaaataagaccttaataaatgaagagatacatctctccactgaacgagaaaatgagatcagttcttaacaacagtccaaagacaagcccaagtacataaagaaatttagtatgtgataaaggtagtaccaggcacagtggctcatgttggtaatctcagcactttgggaagccaaggaaggaggatcacttgaggccaggagttcaagaccagcgtgggcaacatagtgaaaccccatctccacaaaaaaattttt

SEQ ID NO: 100579 - DNA, 357 bp, Homo sapiens
  misc_feature (1)...(357): n = a,t,c or g
atttttagtagagacgggtttgtccacgttggtcaggttggtcttgaactcttgacctcaggtgatctgcctgcctctgcctcccaaagtgttgggattataggcgtgagccaccgtgtccggccttgctttctttttgtatgcatttgcttggtataactttgcttatccttctatttttaagttttcagaatctctttgttttagatatgtctcttgtgtacaacatattgtttgtttgtttttgagaccgagatcacgccgctgcactccagtctgggcgacagagcgagactccgtctcaaaagacaaacaaaaaacaaaacaacaaaaaacaatgggaatttgtcactttgn

SEQ ID NO: 100580 - DNA, 337 bp, Homo sapiens
gtgtttttagtacagtaggaatattttaggttaaggcattattcttcccaagtcatctagaaaatcttcatcatttattctctacttgacaactaattttttttttttttaatatttaagcctttaaggacacttgtattaggatctgtggcctccttataaaagttaagtggccgggcgcgggggctgacccctgtaatcccaccactttgtgaaactgaagcaggaggatcgtttgagcccaggagtttcaaaccaccctgggcaacattgggggactcttctttaccaaaaaaaaaaaaaaatttttttaaataacccagggggaggccctgcc

SEQ ID NO: 100581 - DNA, 335 bp, Homo sapiens
gtctggggtgatgaaatctgctctgctttcccagcatttcccctctgattggaattttttttttttttgaaagggggtttcaccatgttggccaggctggtctcaaacttctgacctcaggggatcccgggcctcaccctcccaaagggctaggattacagctatgacccgccacccccaccctcttgtttgtggacttcttaatagcacccattgtgactggcggggaaggatacctcattggggttttgatttgcgtttccgggagggaccctcttgactgagggtgtcagggcctctgcttcaggaaagtatttccaggtttttgtgacctg

SEQ ID NO: 100582 - DNA, 383 bp, Homo sapiens
  misc_feature (1)...(383): n = a,t,c or g
cgcnngtcgacgtgccatttctacanttttgtggtgcctatgagagtattttgcttaatannaaataatgagtagtnnggaggagtaattaattttcatttaatgttcttaaccttggctgannataagttggcagacaccccacaatctcgttttgttttggtttgtgtataatagaaaccaagtattcgctttgttgcccaggtggtctccaactcctggcttccagcaatcctcccacctcggtctcccaaagtgccacaattacagatgtgaaccaccatgccgagtcacaagtctttttaaatttggtggttcctaaatctagtaagcctactaacactggactttaaggtctgataaaattatctttaagatttctc

SEQ ID NO: 100583 - DNA, 321 bp, Homo sapiens
gtttccaacctttcttctgatgagatttcatttatagaaatcccctttcttaggaacggtggacagaaaagtttgtccactgtcaaattctgtgcatacagcctgatcagtgcttgtcaggtgattaatagtgatgacatccacttagaacttttcttctttagggcatcaagaaatggcttcgggggcgaaggtgggaggatcacttgagcccaggagttcaagaccagcctgggcagcatagtgagactctgtcgtaaaaaaaaaaacaaaacatagctgagtgtgggggtacatgcttgtggtcctcgctacttgaag

SEQ ID NO: 100584 - DNA, 229 bp, Homo sapiens
caccgagatcaggaattcgagaccagcctgaccaacctggtgaaactccatctctactgaaaatacaaaaattagctgggcatggtagtgcatgcctgtaatcccagctatttgggggctgaggcaggagaattgcttgaacccaggaggcagaggttgcagtgagccaagatcacaccactgcactccagcctgggtgacagagcaagactctgtctcaaaaaaaaaa

SEQ ID NO: 100585 - DNA, 386 bp, Homo sapiens
cgaacaccacatcttattccttctaactgtatttgcatccccatcaattaactcctctccatccccgtctccccactaccctttccagcctctggtaaccactcttcttttcattaccttcatgagatcaaatattttagcttgcacatatgattaaaaacaggcaggctggcatggtggctcatgcctaggattttattctttattatggctttataatattccattgtgtatataaaaccacattttccttatccatgtgtccactgatgggcacttatgtggactccttatcttggctattaacagtgctgtaacaaacatgggagtacaaatatctcttcaatatgctcatgtccttccttggagaaatgtgtgtccaataa

SEQ ID NO: 100586 - DNA, 324 bp, Homo sapiens
aagcaataatactgtcgtagccttccgagaacctgggataacaggcatgtgccaccatgcccagctaatagttttattgtatatgcagttccaccatgttgatcaggatggcctagatgttcggacctcgtgatctgcccaccttggcctcccaaaaagctgggaatacaggcgttaaaccagccatccccggacatctagttcattctatggggccagaattaccctgttaccacaggcggacaaagacactgcaagaaaaggaacccatgggtcagtataccttatgaatattgatgcttgggaagtcctgaagcatttatt

SEQ ID NO: 100587 - DNA, 373 bp, Homo sapiens
gtggcaggcccacagccggctaatttttctagtctttgtagagacagggtctcactatattgccaggtcttgaactcctggccttgagtgatcctctcaccgtggtctcccaaagtgctgggattgcaggcgtgacccaccgtgccctgctgaatttgactactttttagatgcctcatttaactggaatcatacagtccttgccttttcgtgactcactgacttcactcagcatggtgtcctcaaagctcatccatgtagtagcacgggacaggaattccttcctttttaaggctgaataatactctgttgtgggccgagcgtggaggctcacgcctgcaatcccagctacttgtgaggctgagacaggaag

SEQ ID NO: 100588 - DNA, 472 bp, Homo sapiens
gtatttttagtagagacggggtttcaacatgttggccaggatggtcgtgatctcctgacctcgtgatccgctgccttggtctcccaaagtgctggaattacaagcgtgaccacttgtgcccagcttagtatacagtatttttaacaagaattatagtaaaatattatttgaatagaggcttgttttctgaaacaccatccaatctgaaagtagaagaaaaaggctgggtgtggtggctcatgcctgtaaccccagcactttgggaagctgaggcgggcggatcccttgaagctcagtttgagaccaggctgggcaactccatctttaccaaaaaatacaaaaatgagccaggcatggtggtgtacacctgtggtcccagcggctctgggggctgaggtgggaggaaggcttgggcctaggaggtggaggttgcagtgagccaggattgtgccactgcacgatagagccagac

SEQ ID NO: 100589 - DNA, 481 bp, Homo sapiens
atctttcacaaatatggatgtacaaaaagaagatattttattgaggaagttgcaatgtttttacatacatgcacaatgcttacacaaattcagcttcgtgataatgcactttcatggagtcaaatttgcaaaaatgcataaaatgaattagaactttctaaacatctttatacaatttataccttcagtattaaaaatggactgaggaggccgggcacagtgggctcacacctgttaatccctgactttgaggagggctgagtggggcggatcacttgaggttaggagttggagacctgcctgggccaacatagtgaaaccctgtctgtagtaaaaatacaaaaattaacacttgagcccggggggcggagggttgggagtgagctgaggattgtacccactggcactccagcctgggtgacaaagtgagaccctgtctcaataaaaaataaaaataaaaaaagtatgttattatttcctg

SEQ ID NO: 100590 - DNA, 553 bp, Homo sapiens
  misc_feature (1)...(553): n = a,t,c or g
cccgcctcctggactttattgggtttcaacgcctctacattgtctctctttcctgttaagctctcctattggtgccgtccagccacgtcgggnnngnnnnnttttgattcgatgactattancaccacgantacgccaagcttggcacgaggggttttgcaagagggcctgtagtaccagggggatttttaacagttgctgtctggatgagctttgcccaagcaggaatcaatccttttgtctgcattttctcaaacagggagctgaggcgctgtttcagcacaacccttctttactgcagaaaatccaggttaccaagggaaccttactgtgttatatgagggagcatctgtaaatctttagccttgtgaaaactaaccttctctgctgagcaattgtggcccatagccatattttgagaagaaattcaagaatggaatcagcagttttaaggatttgggcaacattctgcagtctttgcaatagttcacctataatcctattttaaatctcaaagtgatcctgctgactggcaacaaaagtttgtaattan

SEQ ID NO: 100591 - DNA, 400 bp, Homo sapiens
ggaggatgcccaggaagtagaattgcaggaaggaaaagtgcacagtgaatcagataaagcgatcacaccccactcacaggaggagtttcagaaacaagagagagaatctgccgagtgctgaacttacagaatcttaaaacatggtgcagttaaactcattggctgtttggaagaccagaatgtgaagaccgggaatagaagaaaatgaatgctgctgctgatactgaagaccaacatttcagaaccttgagaattggagagcaggcacatcaactgatatcatttctagagagcccctgacgatcctgaggcttcatcaggagctagagccatttaacatttcctcttttcaagaccaacctacaatttttccttgataaccatataaattctgattaag

SEQ ID NO: 100592 - DNA, 135 bp, Homo sapiens
aatttttcaatttttagtagagatggggtttcaccatgttggccaggctggtcttgaactcctgacctcatgatccacccacctcggccttccaaagtgctgggattacaggcgtattggcattcgactcggccg

SEQ ID NO: 100593 - DNA, 135 bp, Homo sapiens
aatttttcaatttttagtagagatggggtttcaccatgttggccaggctggtcttgaactcctgacctcatgatccacccacctcggccttccaaagtgctgggattacaggcgtaggggcatacgactcggccg

SEQ ID NO: 100594 - DNA, 454 bp, Homo sapiens
  misc_feature (1)...(454): n = a,t,c or g
ttttttttttgagacatggtctgactgtcacccaggctggcgcgacctcaggctcaagtggtcctcccacctcagtctcctggaaagctaagactacaggcacgcaccaccacgtccagttagcgtgtatgtatgtatgtacgtacgtgtgtgtgtgtgtgtatgtgtatatatgtaactcccccccccctccccagttaccttcccctcctttctttctagatggggtttcgccacgttgcccaggacggttttgaactcctggggccaagcgatctgccttcctcggcctcccaaagtgctgggaattgcaggtgcgagccactgctcctgggnccataagtctttcagtgtagaagagggaagcagaaagagggtcaaagtggtgccatgtgagagcttcaacccacccttgctggaggaagggagccagagccaagctgggaaaagggca

SEQ ID NO: 100595 - DNA, 370 bp, Homo sapiens
  misc_feature (1)...(370): n = a,t,c or g
gagaaatttcaggaattgtatggctgaagcctgacctacaagaagggaaaagagacatgagacttgcgggaggggcagttttctagttcttataaagctcctggacttggggggcaataagggtcatggtgatttttaggccgagatgtgccaagattaggttttcattttaaagatcgtagcatggccgggcgcagtggctcacgcctgtaatcccaacactttgggaggctgaggcgggtggatcatttgaggccaggagttctagatcaacatgttgaaaccttgtctctactaaaaattanctggatgtggtggtgtgtgcctgtggtcccagctacccgggaggctgaggcagagaatcacctgn

SEQ ID NO: 100596 - DNA, 486 bp, Homo sapiens
  misc_feature (1)...(486): n = a,t,c or g
gtagggccggggggaatttacctgataccctccgaatngcncttgataccatggcgaccnccgcgnncgnccacgcgnncggcaatatattggaaatatcatgggctttaatgtcacttatcaaatgcatgaatgaatagatgagtaggtgatcatctacaaccattttcacattctgactttgttactttcttaacctctcttcatttgtacactggggagcctaacatctgcctcacagggccactcattcattgacaaagaagtattgagtcactactatgaacaaggaattgcagagatagcaaaaaaaaaaaaaaaaaaaaaacttcccttgtttaatgagggaggggggaaagggaaaaactggaatttggggaaaaaaggggggaaaaaaaaaaaaaaaacatgaagtatgtaaaaggtggaaaatagggcttggaaaaaaaaaaaaaagaaaaaaaaaaaaaaaaaaacggtctgggg

SEQ ID NO: 100597 - DNA, 387 bp, Homo sapiens
aaaaatttttgtagagacggagtcttgatacattgcccaggctgatctcaaactcctggcctcaagtgactctcctgcctcagcctcccaaagtactgggattacaggcatgagccaccacacccagcccattttttaaaaggacagttaatgacacatataaggtgtttgtgctatactgctgaaggataaagaatgtaataaattaccatttaaagaataacacctattattcaatgtttatctatggataagaaatacttaagagctttatctcagtcaagctcagaggctcacatgtgtaatcaatcccaacactttgaaaggccaaggtgggaggatcacttaagcccaggagtttgagaaccgcctgggcaatgtagtgag

SEQ ID NO: 100598 - DNA, 384 bp, Homo sapiens
gttaaccttggtacagaaccatacaagtggacctgggccattcaacataagggccctgggcaaggcaacatttcaagtccactagagctaggcacggtggctcatgcctgtaatcgcagcacatagtagaccaaggcaggaggatcacttgaggccaggaattcgagaccagtctaggcaatatagccagatcccccttgtctctacataaatgaatgaatgaatgaatggcttttttgccaaatttgaggagtcctggatgggctggtctgtgaagcgattaattctagcagtgccccacctcccccaagcaagaaggtttctcagcctctcccaggcagtttccattttatcctgcttgtaactgaacaaagatttcagcta

SEQ ID NO: 100599 - DNA, 612 bp, Homo sapiens
aaaatgatgctgggaggtgttacagttctcatttttacttacggtgcagtgtcagtaaataggtccttagccaccttgttgctggacttggattatattttgtccactgtgatcagggctgcccctggcaccagtgttgtgatcttcattggcttctattgtggcattagcttccttgggcagataaccatggaggggtccataatatccttaaataccattggtgtggctttaagtggcttttgtttgttttactttgcttgaaaaaattttttaggcctggtacgggtggctcaatgccgggattataggcatgggccattgtgcctggctagctttttctttaaagccgtattcgtgtcctcttgccactgtaaaaaataaccacaaacttcgtggtgtcaaacaaaacaaatttagtctggctaacatggtgagaccttgtctctactaaaagtacaaaaacttagctgggtgtggtggcgcatgcctgtaattccggctacatgggaggctgaggcaggagaatcgcttggacccgggaggcagaggttgcagtgagtcgaggtcataccactgtactccagcctgggtgacagagtgagactctca

SEQ ID NO: 100600 - DNA, 395 bp, Homo sapiens
cataaggccatgctttttggttgagaatcactgcagtgagactcattattactgatgacaaggtgctgtgttatactccttaggtatgttggcaaaaaaaaaaatgttgatattgtgctacacgtaaagctctaaaattctactcagtataacaacaaactatgatttcttaatgggcttcttgcttgcatatttaaaaatacatagattaggccagttgggttaatccttaatcccagcattttgggaggatcacctgaggccaggaattcaagaccaacttgggcaacatagcaagaccccgtctttacaaaaaaaaaaaaaaaaaaatgggaaaatatgatgtagaaaagtttttcccctaaagatttctaaatctcatttataaaacattg

SEQ ID NO: 100601 - DNA, 357 bp, Homo sapiens
tgaatatagagagaagcatataaaacaaatttaatggttgacagataatatgataaatcattataataattgtaaggcaaatttctcattattcaccacccccaaaaaaagaacattgcaaatatcccaaaacttcttgtttgttccttcttcatcacaaatctaatttacctttttttaaaaaaagaaaggtatttacttatttattttgagacggtgtcttgctctgtcgcccaggctgcagtgagccgggatcgcaccactgcactccagcctgggagacgagtgagactctgtctcaaaaagaaaaagaaaggaaggaagggaggaatggagggagggagggaaggagatctt

SEQ ID NO: 100602 - DNA, 344 bp, Homo sapiens
atccactgctgtgcgggcacacatactcacacaggtaagcggggaaacgtacctatgcctctggcaaaatattctcggcataaatgaaggtcattttcacaggatattaaaattatttccgacaaactctaaggaaaagaaaatgagtttctcagtgaccgaacgctgaatgtgatacagggcaatgacggactcgctggcggactccactctacccaccgagttctgcttgtgctccatgagcttccggaaagatggctgcttggataacacctttcctcctgcacactctacgattgccttcatagtggaaagacttgggcagattccaggtgtgatgtaaa

SEQ ID NO: 100603 - DNA, 838 bp, Homo sapiens
tttgttttttttttttctttgagacagggtctcactctgtcacccaggccggagtgcagtggcgtcatcttgactcactgcaacctcctcctcctgggtgcaagcgattctcctgcctcagcctccgagtagctgggattacaggcatgtgcaagttccccacttttagtgagaaactcctcaatttgcctcctgagttgttttgaaatgaccccagaactctttgatggtgtattagctatctattgctgtgtaacaaatgacctcaaagcttagctgcttaaaaagaaaaaaacattttattgctcactattctgtggatcaagaattcaggcatcatccatgaggatgcttccctttgctccacatggtactggcagaccccattcatacttgcacactgtcacttctgccacaatctattggtgaaagcaagtcacagggacagattcagaaggagggagaatagaccctacctcttgatgcgatgggtggcaaagtcacatttcaaaggagaatgttgcttgggaagaaacattgctgctcccatctttagaagcaatctaccatagttcaccctctggccacagtagttcacatctttcccaaatgcaaaggacactcctctccccacagaagtctcactctctgcagcattggaacaaagtccaggacctccttatctaaatcaggttcagatcagataaagcttcttcgggctgggcacagtggctcacacctgaaatcccagcactttaggaggccgaggcaggtggatcgcttgagtccaggagttcaagaccagcctgggtaacatggcaaaaccatcttctctaca

SEQ ID NO: 100604 - DNA, 373 bp, Homo sapiens
  misc_feature (1)...(373): n = a,t,c or g
tttttgagacaggctcttgcttttttactcaggctgtgatgcagtggcatgatcatagctcactgcagcctcaacctctgggctcaagtgaccctctcatctcagcctcccaagtacntgggaggctgagatgagagggccacttgaacccaaggggctgaggtcacagagagctgagatcgcccccttgcactccagcctgggtgacagagcaggcctacgtctcaaataaaacaaatactgaaagaccttttcaaaaaatagaacatgtagaagggctttcatgtaccacacaaaagttctcttccaatgactgaaaataccctttggcaggtgcactgtcaatactgggaattggctcgtccatggcgcg

SEQ ID NO: 100605 - DNA, 549 bp, Homo sapiens
  misc_feature (1)...(549): n = a,t,c or g
ggaagcaggccnnnnnnnaaatgaaaactgacagcatgccggcaaagctngacaccgggcgacgttntttgatggtcgccccgctgtttttgatgaggcggattttcnncngttgccgtttatctcaccggcgctgaatacacgggcgaagagctggacagcgatacctggcaggcggagctgcatatcgaagttttcctgcctgctcaggtgccggattcagagctggatgcgtggatggagtcccggatttatccggtgatgagcgatatcccggcactgtcagatttgatcaccagtatggtggccagcggctatgactaccggcgcgacgatgatgcgggcttgtggagttcagccgatctgacttatgtcattacctatgaaatgtgaggacgctatgcctgtaccaaatcctacaatgccggtgaaaggtgccgggaccaccctgtgggtttataaggggagcggtgacccttacgcgaatccgctttcagacgttgactggtcgcgtctggcaaaagttaaagacctgacgcccggcgaacn

SEQ ID NO: 100606 - DNA, 557 bp, Homo sapiens
  misc_feature (1)...(557): n = a,t,c or g
gggggccngnnaattgagnnaactgacganctgctgcaaacggcacgagccaaataggaacagctctagtctacagctcccagcgtgagcgccgcagaagacgggtgatttctgcatttccatctgaggtaccgggttcatctcactagggagtgccagacactgggcgcaggtcagtgggtgcgcgcaccgtgcgcgagccgaagcagggcgaggcattgcctcgcttgggaagcacaaggggtcagggagttccctttctgagtcaaagaaaggggtgacggacgcacctggaaaatcgggtcactcccacccgaatattgcgcttttcggaccggcttaaaaaacggcgcaccacgagattatatcccgcacatggctcggagggtcctacgcccacggagtctctctgattgctagcacagcagtctgagatcaaactgcaaggtggcagcgaggctgggggaggggcgccctccattgcccaggcttgcttagttaaacaaagcagccaggaagctcgaactgggtggagcccaccacagctcaaggaggcc

SEQ ID NO: 100607 - DNA, 395 bp, Homo sapiens
  misc_feature (1)...(395): n = a,t,c or g
gttccatatttttgcaattgtgaattgtgttgttataaacgtgtgtgcaaatatcttttttttatgacttttctcctgggttgggattgctggatccccagtggtgggattgctggatccccagtactgggattgctggattcccagtgctgggattgctggattcccagtactgggattgctggatcaaatggtagttctacttttggttctttaaggaatctccacattgttttccatagtggttgtactantttacattcctgccagcagtgtagaagtgtttcctttcaccacatccatgccaacctccattttttaaaatttttttgataatggccattcttgcaggagtaaggtggagctgcatagtgggtttgatttcatttttctga

SEQ ID NO: 100608 - DNA, 409 bp, Homo sapiens
gaggccgagtccgacttttgataactgggacgtgtgcgcaaacatgtttggcaccttctttgacaccgaggaccctggcgagttcaagatgaagtactggggcgtaacctcctttctccagaaaggaaatgatgaccactggatcgtcgacacagactacgacacgtatgccgggcagtactcctgccgcctcctgaacctcgatggcacctgtgctgacagctactccttcgtgttttcccgggaccccaacggcctgcccccagaagcgcaaaaaattgtaaggcagcggcaggaggagctgtgcctggccaggcagtacaggctgatcgtccacaacggttactgcgatggcagatcaaaaagaaaccttttgtagcaatatcaagaatctagtttcatctgagag

SEQ ID NO: 100609 - DNA, 410 bp, Homo sapiens
attcccgggtccgacggctgcgagaagacgacagaaggaagacagatatgaggaatatgataaggtcctttccgacaagctgaaggaggctgagactcgagctgagtttgcggagaggtcattaactagattggagaaaagcattgatgacttacaagacgagctcgtacgctcataaactgaagtaccaagccatcagcgaggagctggaccacgctctcaacgatatgacttccatataagtttgtttgcttcacttctcacaagactccctcagcgagctggatgccccacctctctgagctctgcgttagtctattatccagctgaccctgtgtctctatcttagcatcctgacttacagcccagcacacactgtgctttctattggacagaagctcttcagtgaa

SEQ ID NO: 100610 - DNA, 439 bp, Homo sapiens
tcgctccggacttcccgggtcgacgatttcgttctatttctgcttctctcaagcttttgaggcaccttgtacttcagtttgtagctgcgaacagtgttgtggatatccttgtacatatttgacttgcattccagctgtgctctttgacttgtcaaagtctcaatttcctcatctgcaaagtggagatggtagaatttacagttcagcaggctgtaatcccagctactcgggagactgaagcaggagaatctcttgaattgaggaggcggacgttgcagtgaactgatgttgctgccactgcactctagcctgggctacagaatgagtgagactttttaaatcattttactgtttataccacagtcgcatttaaattggcagaatggctcccatgacagacaagacaggaacacactgtgaattaaaatgaagccagtgt

SEQ ID NO: 100611 - DNA, 412 bp, Homo sapiens
gctgcgagaagacgacagaaggggtagagggtttcatcattttggccaggctggtctcgaactcctgacctcaagtgatcccccacctcggcctcccaaagtgctgggattacaggtgtgacccaccgtgcccggcctgattggtctttttgccagttttagaagcatggactctgatgctttgaatgactttgaagccatttttctcctctcttggcagccttcctggaaaatgcgtcttccggtgctgccaagtcgaaaaggggaagagaagtccaatgaaatgaggggagtgtggtcttagcgccatcgccagggtggtcattggcaagtcttggccacaggattgccttcctggctcttctgggctcaagcagggatgggaccatggagcatgggcgtgcacaggcac

SEQ ID NO: 100612 - DNA, 249 bp, Homo sapiens
  misc_feature (1)...(249): n = a,t,c or g
tagacagggtctcgtctgtcgcccagtctagtcttgaactcctgagctcaagcaatcctcaccttggcttcccaaagtgctgggattacaggcccaacccacccctgccattttcttcacgttcactactatttctttcntcttttttaattttttgtagagacagagtctcaatgttgcccaagctggcctctagcttctgggctccgcccaccttggccttccaaagtgctgggattacaggcgtga

SEQ ID NO: 100613 - DNA, 481 bp, Homo sapiens
  misc_feature (1)...(481): n = a,t,c or g
agcgcgtggttgcnnnnaagccccnagnancgaccggcttnnngggncgaccacgcgtgcggagacaagaaaaaatgtaaaaactcctttcaaatgtacttcctgtataagagagtagctctggccaagcatggtggctcatgcctgcagtcccagtgctttaggaggctgaagtgggaggactgcttgaggccaagggttcaagaccagcccgggcaacatagtgagaccttgtctctccgaanaaaaaaaaaaaaaaaaaaaaaaaaagggggggcccgttttaaaatttccttggggggcccaaattttcccggggaagggaaggtatagcctttttccttttggggggggaaataaaaccccacctgggatttttgggaaagaacccttcttttggggggggaacaaatgggaccaacccccccccaaaatttaaaggctttagggaaaaaaaaaaattttaaggggttaagggggg

SEQ ID NO: 100614 - DNA, 414 bp, Homo sapiens
agacaagaaaaaatgtaaaaactcctttcaaatgtacttcctgtataagagagtagctctggccaagcgtggtggctcatgcctgcagtcccagtgctttaggaggctgaagtgggaggactgcttgaggccaagggttcaagaccagcccgggcaacatagtgagaccttgtctctccgattaaaaaaaaaaaaaaaaaaaaaatatgggggggcccgtttaaagatacccctggggggcccaatcttaaacgggcatgggaaaggaaaactttttccttttgggggagctaataaaaacccccctggggatttttggggagggacctttcttcctgggggggaaaatggggaaaaaaccccccaccaaaaataaaaggtttcggggaaaaaaaaaaattttaaggggtgtgg

SEQ ID NO: 100615 - DNA, 477 bp, Homo sapiens
  misc_feature (1)...(477): n = a,t,c or g
ctttgaaaccanttnaaatttgccccgcgctgcaggaattcggcacgagaaaacactcaaaaccagcctaggaaacatagtgataccccatttctaaaaaaaataaaataaacaataataataaattagctgggcgtggcacacacttgtggtcccagctactcgggaggctgaggtgggaggatcacttgagtcccaggcagtcaaggctgcagtgagctattgtgatggttaatatcaagtgtcaatttgattggattgaaggatgcaaagtattgttcctccatatgtatgtctgtgaggatgttgccaaaggagattaacaagtcagacccatcctcaatccagtggtcacaatctaatcagctgccagtgcagctggaataaagcaggcagaagaacgtggaaggacagactggctgagtcttctggtcttcatctttctcctgtgctggatgcttcctgccttcaaacatn

SEQ ID NO: 100616 - DNA, 454 bp, Homo sapiens
  misc_feature (1)...(454): n = a,t,c or g
natagatgaccattagaccgngcggnggaattcgtgggcgtaggaccctccgagccaggtgcgggatataatctcctggtgcgcctttttaagcccgtcggaaaagtgcagtattagggtgggagtgacccgattttccaggtgccatctgtcaccccttactttgactaagaaagggaactccctgaccccttgcgcttcccgagtaaggcaatgcctcaccctgcttcggcttgcgcacggtgctctgcacccactgtccagcactccctagtgagatgaacctggtacctcagatgaaaatgcagaaatcacccgtcttctgcgtcgctcacgctgggagctatagaccggcgctgttcctattcggccatcttggctgtcctcctatatcgagatctatcttcttatgaaaattctgcaaattcttcatggaaggaaagtatggccacag

SEQ ID NO: 100617 - DNA, 488 bp, Homo sapiens
  misc_feature (1)...(488): n = a,t,c or g
gggtccannnnaaagcnnagactgatnaccctaggaanaactgatgtcactagtcaagtgcggtggaattctggggtttcaccattggccaggctggtctggaactcctggcctcaagtgatccacccaccttgtggcctcccaaagtgcttgtggccacccactttggcctcccaaagtgctgggtttataggcgtgagccactgtgcctggtcaggttccctcaatttaaggccatgtttccaattattaatctgaaaaagtacaataaattaattaggtatcttccatatgctttcagactcttttttgttgttgttattgttttgtttgttcgtttttaaaattttttttggtattttttgtagagatgagatcttgctatgaggtgtgggctatgttgcccaggctggtctcaaactcctgggctcaagtgatcctcccaccatggcctctcaaagtgttgggattacaggcatgaaccaccn

SEQ ID NO: 100618 - DNA, 389 bp, Homo sapiens
  misc_feature (1)...(389): n = a,t,c or g
nggagcgcnntttgagatcatagtcagtgtggtggaattccccggctcgagcggcgagttccggaagactggcgtgcacgacgcggacttcgaggcccacatcatcgacatgctggccaaggccagcaagatcgaagtctaccggggcaactgagccgggcctcgccgcgacccttccggcccatctatcgggcaccggggctccggcccgggacccaggaccagcaacccgcgaccaatcatgctgcagcccaggggcgtctgctgtgccccgccaatcacgagactgggggaccggccgggcctggcaccaatctgcgctgcggtcgggcggagcttctgtttctcccagccaatcatgtgactcaaggaaaaaaaaaaaaaaaaaa

SEQ ID NO: 100619 - DNA, 489 bp, Homo sapiens
aatcgagacccctaggccattgtggtggcattcagcctacagaggcaggcaggcctccttgagctgtggtgggctccacccagttcgagttcctggctgctttgtttacctaatcaagcctgggcaatggcgggcgcccctcccccagcctcgctgctgccttgcagtttgatctcagactgctgtgctagcaatcagcgagactccgtgggcgtaggaccctccgagccaggtgtgggatataatctcttggttcgccgttttttaagccagtctgaaaagcgcaatattcgggtgggagtgacccgattttccaggtgcgtccgttacccctttctttgactcggaaagggaactccttgaccccttgggcttcccaagtgtggcaatgccttgccctgcttcggtttgcacacggtgcgcgcacccactggcctgcgcccactgtctggcactccctagtgagatgaacccggtacctcagatgga

SEQ ID NO: 100620 - DNA, 487 bp, Homo sapiens
  misc_feature (1)...(487): n = a,t,c or g
ccccgctcccgcnnnanttagaaattcgatgancactagtccagagaggaggaattcttactgagttgcagctgatagttcacaattgccagatgtggtggctcatgcttgtaatcccaacactttgggagaccaaggaaggaggatcacttgagcccagaagttcaagaccagcctgggcaacatggcaagaccctgtctctaaaaaaaaaaaaaaaaaaaaaaaaaaaaaaaaaaaaaaaatggaaattttccccggggggggggggaaaaccctgtacccccccttttttggaaaaagggggggggagaattttttggggccagggggggggcccccaggaaaaaaaaaaattcccccggggtccccccctggtttaaaaaaaaaaattttttttaaaaaaaaaaaaaaaaatttttttttttttttggaaaaaacccgcgtggggggggggggggcgggggccacacccggggcgggggggga

SEQ ID NO: 100621 - DNA, 575 bp, Homo sapiens
  misc_feature (1)...(575): n = a,t,c or g
ggcgcgaactcgatncccctngnannnnnnantttgatccactatccgtgtggtgcaattcccccgtctgggaggtgagaggtgtctctgcctggctgccccgtctgggatgtggggagcgcctctgcctggccgccccgtctgggaggtggggagtgcctctgcccggccgcccatcgtctgggaggtgaggagcgcctctgcccggctgccccgtctgggatgtggggagcacctctgcccggccgccccttgtgggatgtgaggcgcacctctgcccggccgccccatctgggaagtggggggcacctctgcctggccgctcttcgtctgggaggtggggagcgcctctgcccagctgctcttcgtctgggaggtggggagcgcctctgcccggctgcccatcgtctgggatgtgaggagcgcctctgcccggccgccaacccatctgggaagtgaggagcgcctctgcccagccgccccatctgggaagtgaggagcgcctctgcccggctgccctgtctgggaagtgaggagcgcctctgccaggccgccccatctgggaagtgtacccn

SEQ ID NO: 100622 - DNA, 826 bp, Homo sapiens
  misc_feature (1)...(826): n = a,t,c or g
ttacgggccgacccacgcgtccggagccatgctgaggagctgcgccgcgcgcctccgcacgctgggggctctgtgcctgccgccagtaggccggcgcctgccgggaagcgagccgcgacccgagctgaggtcattttcttctgaggaagtcattcttaaggactgttctgtccccaaccccagctggaacaaggacctaagactgctctttgaccagtttatgaagaaatgtgaagatggctcctggaaacgtttgccttcatataaacgtacacctactgaatggattcaagacttcaaaacccattttcttggtagaaacagccactttcccattaatatatctgagcatcaaatataaagctaagaacagattgaagtactagttactacctgaaaaaaagaaagaatataatgcaggattatggttctatagtcaccaattttatagaccagaaatcacaataaattttgcagattggagagcataaagcctattgtcaagaataagactgctcccaccctggcattcttatcaccattagcaagagtgaagaaagggccccagagagcttccaccctcctacaacctcatcacctctccgtcttgaggctgtcatctaatctcatttcaccctttatcccatatctggttatatcaccctaagaagcttagaacactcaggttatacccacatctcccagtatctaaatccccagggcaacccacccaacacccanaacacacacatagcaattcctatccttctgtgttttttactaatatactttcttagcattataattttatagagaaagtagccta

SEQ ID NO: 100623 - DNA, 922 bp, Homo sapiens
aggctgagtcttgctcttgttgcccgggatggagtgcaatggtgcgatcttggctcaccgcaacctccacctacagggttcaagcgattctcctgcctcagcctcccgagtagctgggattacaggcatgtatcaccacgcccagctaattttgtatttttagtagatacggggtttctccattttggtcaggctggtctcgaactcccgacctcaggtgatccgcctgccttggcctcccaaagtgctgggatttacaggcgtgagccaccgcgcctggccaaaataaaatgtttttatctttcttcacttaaaactatgaaggccttttcttgttctggtaaccccccacagtgtaattggtgctgaaaatagtttcgtgcctgaggtctgttgtcactcactcactttctgacaattaggtgagccacttgaggattttctggcctgaagttataaaaacttggcatctgtcctaaggtaattgtaaaggcaaaatgaaagcattgaggtgaatttaggttatatggcatttatctggtaatgtgtttcagaaaagctagaatgaaaatgtgatgtaagggatagcaagtgtaggttgattcataattcttggtataaaaccaagttttccttagtcttgaggaatttgaagaaaggtaaaatgttggattttaagcaaagtaggattgaccagagactgttctgactttgacattcagacctttcagatgttcttccttcagaccagtccaagacactcagcatttccagccaagttgtcttttttttctgccaataaagtattcattagttgatgtttgtttgtattttaagtaaagtcaattttttttaaagcattaatttaattcacgggtatgcctttcatttctctggcctttcagttggtttaaaaaaaaaa

SEQ ID NO: 100624 - DNA, 411 bp, Homo sapiens
cccacgcgtccgcccacgcgtccgctttattttattttattttttttgaaacaagatctcgctctgttgctcaggctgaagtgcaatggcgcaaactcggctcactgcaacctcccaggttcaagcaattctcgtgcctcagccatccctataggcatgcgccaccacactttgctaatcttgtatttttggtagagacggggtttgcaccatgttggccaggctggtctcgaactcccaacctcaagtaatctggcctcccagagtggtgggattacaggcgtgagccagcgcgcccggcctggacttaacttctgaagaactctttctgtttagattgcaggagcgttctctcggctcatctcttgttttctcacccagctgttcttcttctagttggccatcattctt

SEQ ID NO: 100625 - DNA, 429 bp, Homo sapiens
cggacgcgtgggcttatagtttcagagactcaaatttctgatgggactgtaggtatgcaccaccatggctggcttatagttgtgatttaaagaaaaacatttacaaatcatagctttattttagaaagagttattagaaataatctaattcaacttatttgttttaaaaataaaaaaagaaattgttcagagatattaactaattttccagaatacatatatatacatacatatatgtatgagagagagagatgagaatctctatatttaacatatatactgtcacccggtcatagccgctcatgcctgtaatcccaacactttgggaggctgaggaggaaggatcgcgtgaagccatgagttcaagaccagcctgggcagcatagtgggaccccgtctttacaaaagaaaattaaataaaaaattacg

SEQ ID NO: 100626 - DNA, 921 bp, Homo sapiens
ttttttttttttttaatagacaaaaggatttatttggaaatttccaaacctgccagaagtggcactcgccaagccctaggcccaccctcctcaccaagctccaaagggcaacaccagtcctcccagcctccccattcaccttaccctggcctccacatgcacataccccatacctcaggccatgctagagaactggagtgtcccctccccggcccaagccgctggagaggcagccctctggcatcccaggagatgatggcggccagagccgcttgcatagattgaggaaagaaaagaaggaggcacctaacaggctccctgaaaacccccaacttacccctgtacaaaaaaagtggctcccacatagaaaacttgctcccaaaatagtgcaaatacccaaaggaaaggaaaaaaccagcagcaaggctgggcttgtaggaatggcaaagaactttggtttagaaaggctaggaagagtctgggctgcacctcctcttcctagcccagctccccagagccagctctgaccctcgccccagggggagtctgtaaacatgcaaacccagcagcctttggttcggaaatgtcttacaatgtcaaagcacagcctccagcagtcctacttgggcctgcctgcaggggggcagaggaggcatctgctgaacccaattaaagccaatgcaaaaagtataaggctttggggaccaagcaacaaggaatcctatcactacatttataaaactaaagctggagagtagagggtgacagcagacactcctcaccccagcctacgtgtctgcggccccagcaaggacccagagggtggtctccctccaggctccagggctgggaagaaagatccctgagcagttaggtcaggcgaattcccagcacctgttccagttcctgcggacgcgtggg

SEQ ID NO: 100627 - DNA, 482 bp, Homo sapiens
  misc_feature (1)...(482): n = a,t,c or g
nggaggggggnntttgcccggctgcatgaattcggcacgagcagggttatatacttgttggccaggctggtctccaactcctggcctcaagtgatctgcctgccttggcctcccaaattgctggattacaggcctgagccactgtgcccagacatggatcagtttttattcctgttactagtgtttgaaagtacatttgctctatgtccttatcacttcttccactagtttttattgttagggtttggttttgttagccattctggtgagtatatagtgaatatacaggttgagtatcccttatcttaaatacttggggaccacagtgttttagatttcaggattttggtttttggtttttttctttttttaaaattttggaatatttgcattatacttactggttgagcatccctcattcaaaattccaaaatctgaaatgctgtcagtaagcattccccttgagtgtcatgcaaatgctt

SEQ ID NO: 100628 - DNA, 454 bp, Homo sapiens
  misc_feature (1)...(454): n = a,t,c or g
actggagaacctagagaagcgtcgnggaantcaaacactctggtcccggcatctcagataaaagataatcaacctgtagtaacaacacctacttaaacctacatagacactcagtaaaagtagtactattaattctgctgcctgctttttaaaattaaatcttttagagttttgaactacagtttactttttaaaatagaaagcaaataaacacttcaaattattttaatttatgttaatatttaaccaggttaatttgttaaaataaattgttcaggccgggcatggtggctcacacctgtaatcccagcattttgggaggccaaggcaggtggatacttgaggccagccagggcaacatgacgaaaccccgtctcaactagaaatacgaaaattagctgggtgtcgtggcgcacgcctgtaatcccagctactagggaggctgaggcacgan

SEQ ID NO: 100629 - DNA, 491 bp, Homo sapiens
  misc_feature (1)...(491): n = a,t,c or g
atggtcnccccnatcgagaccctagtccgtgtggaggaattcgcattctatctctgtggattggcctattttgagaatttgatataaatggaaccataccatatgtggccttccatttctgacctctttcagttagtgttgtgttttcaagactggcatttgtcagtgcttcatttcttttttatggttacacggtattccgttgtgtgtatgtaccacagtttatctgcttatccactggtggacattcaggctgtttccaccttttgactgttaatagtgccatgtacatgtatttgtttgagtatctatttttaatcctcctggttgtacacctaggagtggcattgctgggtcagatggtaattctctgtgtagctttttgaagacctgccaagcttgttgccactggggccgcatcattntacaattcctacctatcaacaatgcacaagggttccagtttctccatccttgccaacacttngtat

SEQ ID NO: 100630 - DNA, 466 bp, Homo sapiens
  misc_feature (1)...(466): n = a,t,c or g
cgccccccataganncccctnnnnatagtagacactagtccgtgcggtggaattcagcttcctgtagtattttttgtaaggcaggtctgctagcagtgaatctttcagtttttgtttatttaggaaagtctttatttcacttctgtttttgaaagatagctttgctgaatgtaggattcttgagtgacagttgtttttttttttttggaccctttggcttatgtaaccccccggctttgggcccccatttttttcggcggaaaaccccgttgtaaatttgggggggggccccgcccttatttttctttgggggtttcaaaaactttcccttggctttgccttttggccattttaataagaaggggctttgggagtttttcagggggggaaaattggggaaaataatggagttttgggggtaaatttgggaaaatttaagcccaccgttttttgaaaaatttctttt

SEQ ID NO: 100631 - DNA, 464 bp, Homo sapiens
  misc_feature (1)...(464): n = a,t,c or g
cggtgctnnncccgattgacatcntccgnagcgngcaattcgctactcgggaggctgaggcaggagaatcgcttgagcccaggaggcagaggttggagtgagccgagatctcgccactgtgctccagtgagactgtctccaaaaaaaaaaggaaggaaggaaatagcctctatttacatatagggagtatataaccatctttataaggtctttctgattggactttgaatttttcgttaactctgtattctaaggaatattatatgaggttaagatattttcataaggtagttccatgtaagccatccaaacctgtgcttcccaaatatttactcctgtaggaagctggattttgttaattcttttgcattaataaagagataagaggggagagaacagacttatttttattatggcaaaatatacaaaacacacccattttaagccatttttagggtacaggc

SEQ ID NO: 100632 - DNA, 534 bp, Homo sapiens
gtctaaagacattattcctgttttgccactgtatttttggtgaatgtgtagtaagtaactggcctctttagtatcacaaagctggatgaagaaaatgtggtacatatacaccatgaaatactatgccgccacaaaaaggaaatgagatcatgtcctctgcagggacatggatgaagctggaagccattatccttagcaaagtaacgcaggaacagaaaaccaaacaccacatgttgtctcttagaagtgggagctgaacgtacctaattcttgcaattcagtgtatttcctggcgagaggcagagatgaacaaccctggacagttaccacatatggctcttatgaggtaatgaggatggttgtgatgagaagggtaaaaaataaaaaagttattacaaaacatttttcaaggaattttccaaaaaatgattttaatattctctttgcttatggaatgatatttaaaaccatgatttctgtgtcctttaaaatgacttctgatttgtgaattgttctctgtgctccaaacttctt

SEQ ID NO: 100633 - DNA, 459 bp, Homo sapiens
  misc_feature (1)...(459): n = a,t,c or g
gggaggagcnnnntttgtagaccataattgatgtcgtgtaaccgagaggaggaattccctgtaatcccagcactttgggaggccacagtgagaggattgctggagcccataagtttgaggctgaggtgagccgagattgtgccactgcactccatactgggtggcagagtgagaccctgtctcaaaaaagaaattgtgtgacttgctcacctgaatctgtaggctaccatacctccaacacagagagcttcccctgcctatttctgtatctgctgtcctggnacttaagtcccgaaagggaaggcagagacttcagcatggtggcactgaggccctcgccagcccaggaggtgacaggagccagactggcggatggggtcctgtgtttgttgccacagtgagtcactggactccactgtagagaggagcagtctcgtgagcccatcagccatttattca

SEQ ID NO: 100634 - DNA, 578 bp, Homo sapiens
tttagactcttcccttttttggagggaggaaataagtaaatctatagttttgtggggttttttcccccttctatttaggatgtttccttagggtagacagccagaaattagaacttctgggtcaaagaacatttaaaaaaatttttatgcatgttaaaatgttttattttctaaaaatattctatcattttgcattttcacaagtgttttgtgagctgtacaaatgttcttttcaccacatttttaaaaagtcacacgaaaggctgggcgtggtggctccacgcctgtagtcccagcactttgggaggccaaggcaggctgatcacgaggtctggagttcaagaccagcctgaccaacatggtgaaaccccgtctctacaagtacaaaaattagttggatgtgattgtgcgcatctgtgatcccagctacttggggggctgagacaggagaattgcttgaacctgggaggcagagcttgtggtgggccgaggtcgcgccactgcactccagcctgggcgacagagtttggctctgtttcaaaaaaaacaaagaaacaagaaaaagtcgacgcggccgc

SEQ ID NO: 100635 - DNA, 570 bp, Homo sapiens
ttttttttaagacagggtctctctctgtctcccaggctggagtgcagtggcaaatctcagctcactgcaacttccacctcccagattcaagcaattctcctgcctcagcttcccaagtagctgggattacaggcacccaccaccacacccagctaatttttgtagttttagtagagacagggtgccaccttgttggtcaggctggtctcaaactcctgacctcaggtgatccatctgcctcggcctcccaaactgctgggattacaggcatgcgccactgcgcacaggcacatgttaatcttcttaaaacgccaccctgattatgacagtccccaaactggaaaacacacagctttacttcctagaagaccaagtccaaactcctcacctgagcatcctaatgcaatctaccctgcttttcccacctctcactgctcctctacatgggcaagtaccctaaactggccccctccctgtcatctaaatcctctgtatttcctcatctttgaggcttttctcagttactgcccttacttgtaataccactgtctttacctattaaaccctatc

SEQ ID NO: 100636 - DNA, 368 bp, Homo sapiens
tttcatactgagaagttccacaaggaaaggcaggaagtatgccgagtgaagactctcagcaccatcataattcattttgtttaaccttcatagcccaatctgctttgttcttctacatagaactacacatttaggctggacgcagtggttcatgcctgcaatcccagcactctaggaagctgaggcagacagactgcttgagtccaggagttcgagacacagcgaggccccgtgtctaccaaaaatagaaaaaattagccgggcttgttggcacgtgcccgtagtgacagctactcaagaggctgaggacggctaggggcggtggctcatgcctgtaatctcagcactttgggaggccgaggcgggca

SEQ ID NO: 100637 - DNA, 369 bp, Homo sapiens
  misc_feature (1)...(369): n = a,t,c or g
gttcactggacacttcttccagctttgctacanganngaaaaattttctaatcaaatattgagaggcaatcggtataaactcctttacttcttcatgggaccagtttcttaggctttcctcaataagaacacaagctcaggaaagggaaaaatctacgtttttattgctcacataatcaaactgaacttcagagttaaaacgagaaggccaggcgtggtggctcacacctgtaatcccaaatcccagcactctgggaggcccaggctggcagatcatttgaggtcaggagtttgaaaccagtctggccaacatggcaaaacactatctccacaaaaatacaaaaattagccgggtgtggtggctggcat

SEQ ID NO: 100638 - DNA, 362 bp, Homo sapiens
  misc_feature (1)...(362): n = a,t,c or g
aatttttatactttttgtagagatgggnntttgccatgttgcccaggctggtctcaaactcatgagctcaagccatcccaaagtgctgggattgtagacgtgagtcaccgcacccggcctggaagcagcttttaaagaaagggtctggccgggtgcggtggctcgcacttgtggtcccagcactttgggaggccgaggcaggcggatcatgaggtcaggagatcaagaccatcctggctaacaccctgaagccccgnctctactaatttttatactttttgtagagattgggttttgccatgttgcccaggctggtctcaaactcatgagctcaagccatcccaaagtgctgggattgtagg

SEQ ID NO: 100639 - DNA, 332 bp, Homo sapiens
gcgattctcatgtctcagcctcccaagtagctgggactacaggcatgagccaccacgcctggctattttttttttttttttttttggaattataagaaaaggggggtttacccatggtgggccggggtggattcaagccctggacctcggggaacatgccggctttgccctcccaaggggtggggttcccgggcttgttttcccccccccgcccagtgaggggttttttttatccattaccaaaatggggggggctttttcttcaaaatggagtaaaatttaaaaagggggggtccggggacctttttaaaatggaaaaaaaatagcccttg

SEQ ID NO: 100640 - DNA, 502 bp, Homo sapiens
  misc_feature (1)...(502): n = a,t,c or g
agggcnnnnnnccgcccatgagatcctatcagagattgagaatcctctcgagccgggttgggaccacaggtgtgtgtcatcgtgcccagctcatttttttgtattttttatagagatgggggtctccctatgttgcccaagagggtcttgaactcctgggctcaagcaatcctgccttgggctcccaaagtgctaggattacaggtgtgagccaccacacctggccatcatcagcatcttgcaaaacattgcttagtggtctagtgtcttgtgttgttgtgaagtccaaagccattctcttgcttcgtgactgaattttcctctcaggaagcttgtggaaccttttttttttgtccccagggtgactttacaaagatatttatattttcactcattttgataggcaccaaaaatttatgtctttttagcctgaaaattttcttaactttctctctcctattttctccatcctctttttcttgaattcattattctgaggttt

SEQ ID NO: 100641 - DNA, 438 bp, Homo sapiens
  misc_feature (1)...(438): n = a,t,c or g
ntttgatcgtcgtccctagtccgtgcggtggaattcgctaaacataatgtggtatcttgaaggggatcctggaacaggaaaatgacattagataaaaactaaggaaaccgcgtacatacatacatgctgacagcattattcatgacagccaaaaaatggaacaaacccaaatgtctgtcagtgatgaacagataagacaaatatggtctgtccatgcaatggagtattattcagccataaaaaggaatgaagcactgatatgtgttacaacatgggtgaatcttgaaaatattatgctcagtgaaagcagccagaaaacaatgggctgcatgttgcgtcgttccatttatatgaaaggaccagaataggcaagtccatagagacagtaagttagattagtagttggcagcagtggagattaggaatgggggaaatcag

SEQ ID NO: 100642 - DNA, 421 bp, Homo sapiens
ctgagattgtaccactgcactgcagcctgggtagacatagcaggactctgtctcaaaaaaaaaaaaaaaaaaaaaaaaatttttggggggccccggggggccggaatgggggggccaaagaaggaaaacgggcccccctttgttttggggggccccttccccccccaaatatttcttaaaaaaaagggggaacacccccccctttccttttgggggggggggaaaaaaaaatccccggaagccttttcctggggttggggaaggaaaaacctcccctttactccaaggccttgtggggaagaaggaaagggggggggaaaatggggccaccccttgggccaaaaaaaaacccccccggggaaggggaggccctcccccttccctttggaaagcccctggccacttctgggggcaaaaaaag

SEQ ID NO: 100643 - DNA, 487 bp, Homo sapiens
  misc_feature (1)...(487): n = a,t,c or g
aggtnntagnagnnnngnattganncccactgagaacctagtcagtgcggtggaattcggcgcagtggcttacacctgtaatcccagtactttgggaggccgagtctggtggatgtcctgaggtcaggagttcaagaccagcctggccaacatggcgaaaccccatctgtactaggaggacacgggaggctgacgcaggagaattgcttgaacccaggaggaggcggaggttgcagtgagccgagatcacgccactgcactccagcctgggggatagagtgagactgtctcaaaaaaaaaaaggggaggggaaaaaagggaggaaaaaaaacggggggggggggggcccctttttggaaggaccggaaacggccttcccagggggggtggaaggtttttggggggtacaaggccttgggcccacttttattggccccgggggaatcctcccgtttgaaaccgggtccccccggggcctctgggatct

SEQ ID NO: 100644 - DNA, 698 bp, Homo sapiens
agacaggttctggctctgtcacccaggctgaagtgcaggctgaagtcatggctcattgcagcctcaacctcctgggctcaagcgatctttctgctttagcctctcgagcagctggggctgcaggtacatgccatcacgcctggctgatttttgtattttttatagaaatggggtttcactatgttcccaggctagtcttgaactctgggctcgagtgatccacccgcctcagcctcccagagtgctgggattacaggtatgagccgctgagcctggtcaagtgttttcatcttattcctctatttttcacgtgtcctattttctgataataggtaccccggattccatcagtcttaaattatgacttccaaagaggtcttcactggattcagcacctgtcgtaactgactgtatacccagttctcagaaatgacttgtgtttagtctagtttttagtgtaggtaaggaaaaaaactgagatatctctttctaggactgctgtataaataagtactcacatataagtacaatgttcagtagaactgaaaacagaagagtggggcaaaaaggagataggataccaacaggaccacgtctctgtaccttaaagtttttaaaggaaatcttttcaagaagccacatactaaaaaactgatttttcatagtccaacaaattactgcttaaaaatgctggacaa

SEQ ID NO: 100645 - DNA, 1198 bp, Homo sapiens
gacctctggattccgcattaatttgatagcatggaaattctagcttgttcttgcctgaaatgggcaagatcacaatacatagaaaatctatacttcttctactcattcagcaaatcattactaaggatctatatgtcgaagtaatgctagctgccataacaaacaatctgaaaatgcataatggtttaaccacagtagaaatgtatttttcacataaagcctaaacagatgttcctgatgagcaagcagctcttctccaagtcctgattcagagacctaagtatcttcaatattgggggcctgccagcttcaacatgtggctcccaaaggattcgtgcttttctgcttcaagctggcagatgggaaaacagcatggaggacctgcccacaaagtttttatatgtcagaactggaggtggcacataccacttctgttcaaatgccattatgtagaactcagtcacttggctacacttaagtgtaagtttaggaggctaggaaatgtagtctgtgggcccaggatgaagagaataagagtttggtgctagctttctgcaataaacttttgggctgtctgctaggtgctggaaacaaaattataaaagagatattccagctaagtgcaaataaattgcaacatagtgaaaaaaatgcctcactacagatatagcaaatgtcatttcacagagtaagtcaaatgacacatgatcacagttttgcctcaaacaaaatcccatggtataacttgggacactgaactgaagctcttagtttcttgaatccctatcaccatatgtgcacatacaggctaataggttataaatattctgtgttccatttcagatacccacagtaaagtgaaatacctgcaataaagcaaagtcaccccagaattttttaaatttccccccagtgccatataaaagttatgtttaacacctatactgtagccttattaagtgtgcaatagtattatgttttttaaaagcccaatgtacataccttaatttaaaaattctttattgtgaaaagatgctaacgatcatctgagccttcagcgagtcggtaatctttttgctggtagagggtcctgccttgatgttgatggctgctgactgctcaaggtggtggctactaaaggttggagtgactgtggcaatttcttaaaataaaacagcaatgcaattttccacaaaaa

SEQ ID NO: 100646 - DNA, 270 bp, Homo sapiens
ctatcctctagactaatttggttgtagttcacattacagtagctgcttcgtaagtgatttttgggctgggcggggtggcttgtgcctgtaatcccagcacttcgggaggccatggtgggtggatcaagagaccgagaccatcctggccaacatggtgaaaaccctgtttctactaaaaatagccgggcgaggttgcattgagccaagatcgcgccactgcactccagcctggcgacagagcgagactccatcttaaaaaaaaaaaaaagg

SEQ ID NO: 100647 - DNA, 399 bp, Homo sapiens
  misc_feature (1)...(399): n = a,t,c or g
ctgctacaggcgtcagccaccacatctggccatgaacttttattttttattaaattttttttgtttgtttttttgtagaggcactctcactgttggccaggctgttgttgaactcccagcttcaagcaagcctcccgcctcagcctcccaaagtgctgggattacaggcatgtggcaccacaccctgcccctaaactttgaaatttgagtactgttttcctgatttttactgtatccttgtaatctctgaacttttttaaaagatttcttttattctactctctttctgttacttagnctagacctagcaaaacaacaacaataagcccataggtttattcaagctatttttgtatatacattaaaatgaatgcatcgctactaagtatttttggaagg

SEQ ID NO: 100648 - DNA, 368 bp, Homo sapiens
caaatatgtggaaattaaacaacatacttctgaacaaccagtgggtcaatggagaaatcaaaatgaaaatttttaaaaattgtaaagaaaaatggaaacacaacataccaaaacttaagggatgcagcagaagcctttctaaaagggaaattcatagcagtaaacacctacatcaaaaaagactacaggaagacctgcttgaggctgttttacagttaccatttttttaacaaggagaaggagtacactctaaaaacaatgataaaagtataatatagtagatacataaaccagtaacatagtttttattatcattatcaagtattatttactgaatataattgtatgtgctatacttttatatgacg

SEQ ID NO: 100649 - DNA, 398 bp, Homo sapiens
cggacgcgtgggccccatctctacagaatattaaaaaaaattttggtctgagagctaggagcaagagcttagggaaaggaggaataaaaggaggtagttggctaccaacagacatctgaattcttaaccaatgaagagaaaaaatgtaaaagtggtcccagccgcttgggagaatgaggcaggaggattgcttgagcccaggaattcaaggctgcagtaagctgtgattgtgccactgcacttcagcctgggaaacagagcaagaccctgaaaaaaaaaagagagagagagagaaagaaaagaaaaaaaaaaaaaggggggggccgttttaaaggatccaagtttacgtccgcgggctggcagaggaaaattttttttatggggcccccaaaattaag

SEQ ID NO: 100650 - DNA, 413 bp, Homo sapiens
tttcgtgctttaggctgctttgtttacctaaggaagcctgggcaatggcgggcgcccctcccccagcctcgctgccgccttgcagtttgatctcagactgctgtgctagcaatcagtgtgactccgtggggtaggaccctccgagccaggtgcgggatataatctcgtggtgcgccgttttttaagcgggtctgaaaagcgcaatattcgggtgggagtgacccgattttccaggtgccgtccgtcacccctttctttgactcggaaagggaactccctgaccccttgctcttcccaagtgaggcaatgcctcgccctgcttcggctcgcgcacggtgcacgcacccactgacctgcgcccactgtctggcactccctagtgagatgaacccggtacctcagatggaaatgca

SEQ ID NO: 100651 - DNA, 492 bp, Homo sapiens
  misc_feature (1)...(492): n = a,t,c or g
gggtgccgggtcccgnnnccctgcaaactgctacgtncnacnggncngnaannccggncgacgatttcgtctctgtcgttcagactggtgttcattggtgtggtcgtgggtcactgaagcctcaacctcctcgacttagctcaacctctcgcctcagttccccgagtagttgggactatgggcgtgttccttttaaacattttttgtagagatagggtctcattgtgtttcccaggctggcctagaactcctgacctcaggggatcctcctgcccgtctcccaaagtggtgaaattgcatacacgagtcactgctcctggccaatgagggcaactttttaaaaaataacattcatctgctctcatttttctaataaaacattgccatttattatatggctttattagtgttatctttgttgcaaaagtatatgtaatagtctctaaagatggttaagagtttgtgtcacatcaactgtatcaataacctatg

SEQ ID NO: 100652 - DNA, 482 bp, Homo sapiens
  misc_feature (1)...(482): n = a,t,c or g
nattgagatcgagcgctgtaggcaccggcccggaannnccgggncgacgatttcgncaggatggggccacggnnaaagggtggggccttcacgctggtgcacccaatgcccagtggagctgccttcccagggctgctcagtgagcctcacacacaggggccctcgcagctttgcagccagaagccccacgttgagatatcctgggcgtgctccctccaaaggttctggggaggaccctgcacggccgcctgccacaggtccagggcccaacctaatccaggatggcctggtcttgatgtcactcactgagaatgtctgctaagaccccagctccacaggaggtcctgctctgaggctccagctggactaggggctgcaatgccagtcgccagagccagtgcaggtgcctggcaggaaaactgggaagcagcctctctagaaagccacagcccagggagctctgatttttttttttttttttt

SEQ ID NO: 100653 - DNA, 481 bp, Homo sapiens
  misc_feature (1)...(481): n = a,t,c or g
tgtgtgcananaattgaagccatggactgcgctaccggaccggaattcccggnnnnaaatttagtgtctgtgccctgcccccagaggtggagcctacagaggcaggcaggcctccttgagctgtggtgggctccacccagttcgagcttcccggctgctttgtttacctaagcaagcctgggcaatggcgggcgcccctcccccagcctcgttgccaccttgcagtttgatctcagactgctgtgctagcaatcagcgcgattccgtgggcgtaggaccctctgagccaggtgtgggatatagtctcgtggtgcgccgtttcttaagccggtctgaaaagcgcaatattcgggtgggagtgacccgattttccaggtgcgtccgtcacccctttctttgactcggaaagggaactgcctgaccccttgcgcttcccaggtgaggcaatgcctcgccctgcttcggctcgcgcacggtgcgc

SEQ ID NO: 100654 - DNA, 392 bp, Homo sapiens
  misc_feature (1)...(392): n = a,t,c or g
tttcgttccatgctgaggacatgataaaccaaccccgaaattcaggccataaaacatgggctcgtctaactggtcacctgcataataattacttccaaaaattatgtaataataattattcatatttgtgaaaagcctcttgtgtgtagagcagttnctttctttttttttttttttttagaaaagggatttttttttttgccccccaggtggaggggcggggccaaaatttgggttaattgaacccaacccttttgggccaaaaaaaatccccccccctaaccccccgggggggggggaaccacgggggctcccccccgccccgggttgttttttttttttttgggaaaaaagggaattccccgggttgcccgggttggttttaaacctcc

SEQ ID NO: 100655 - DNA, 536 bp, Homo sapiens
agagatgagaagatgggaacctagaaggagatgtgagcagcccaaggtcaccagctcacgtggagcagtgctagggcttgagcagagctctgctgctgattctgggcttctgtgaagagtgattcatgctcagtgagcctgtaaatatgatcttacctgaacaagagagtttttctcatgacccacgaggaaacacttccttgttactcacagtagagacctggttagaaagtgccggagagggctaggtgtggtggctcacgcctgtaatcccagcattttgggaggctgaggtgggcagatcatttgaggtcgggagttcgagaccagcctgggcaatgtggtgaaagtgaaaccccatctctgctaacaatacaaacattggccaggcgtggtggcgcgcacctgtaatcccagctactcgagaggctgtggcaggagaattgtgaacctgggatgcagagtttgtagtgagctaagatagccccagtgcactccagcctgggcgacagagcaagactgtttcaaaaaaaaaa

SEQ ID NO: 100656 - DNA, 391 bp, Homo sapiens
tgtcactgggcaggcggtggttcatgcctgtagtcctggcactttgggtgccagggcgggaggatcgtttgggctcagcagttcaggaccagcctgggcatcatggtgagaccctgtctctatttataaaaaaaaaatgaaaaaaaaaaaaaaaaaaaaaaaaaaacctttcggcccgggggggggggttctaacttataacccaaccctttgggggggcaggggggggggaatcttttaaccccggggttttaaaaccccccgggccaaaaggggaaaaccctccctgtacaaaaaatttaaaaaacctttgctgggcctggggggtgggcccctgtacccccaggctaacaaaaaagaaggccccgcccctggaaggggggggttccga

SEQ ID NO: 100657 - DNA, 378 bp, Homo sapiens
  misc_feature (1)...(378): n = a,t,c or g
caggtctatattnannnnntaataaaattatattaccacctccagcagccacctttcccctttgccctgctgtgtactcccctaccaagacagaggtcccattgggcacttatgatctgggaaataagcatccacctgtacatgtccacaacttaaagactgaaatgcctttgtacagaaggaatgatttatttcatatgtaaacaaaaggggttattctttgtacagtgaaagtggtgaataagagcctggcacagtggtttgcacctgcaatcccagcactttgggaggccaaggtgggaggattgtctgagcccaggagttcaaaaccagcctggggaagatagtgaaacctcatttttacaaaacatttttttn

SEQ ID NO: 100658 - DNA, 449 bp, Homo sapiens
  misc_feature (1)...(449): n = a,t,c or g
ggtgttannaaccagaggcctaacngncgnannnncnnaannnnggnncgagnangcggtcgttctatgctgtgcattanaccttgagtttattcttgtatagcaaggactctgtaccctcggactaggggtgccccaaatcctgttgtcggagcccctgctaaccaccgttctactctctaattctataaatcaacattttgattccacatataagtgagatcatgtgatatttgtcctgttcctggcttatttcacttaatataaatgtcctgtaaattcacccatgttgcaaatggcagggtttccttttttatggccaaatagtattccatgatgtgtatacaccacattttcttaagccatttatccactttatccctttttcactttgcttctaaaccacgtaggttgattccgtatcttgactgttgaaaagtgctcttaag

SEQ ID NO: 100659 - DNA, 446 bp, Homo sapiens
  misc_feature (1)...(446): n = a,t,c or g
natcgcgtagcactactccagngnggnggaattccagtgagctaggctctgtgggcgtgggacctaccgagccaggcacgggagggaatctcctggtctgctggctgctaagactgtgggaaaagtgcagtgtttgggcaggagtgtcccgtttttttcaggtacagactatgatggcttcccttgggtaggaaagggaaatcccccgaccccttgtgcctcccaggtgaggcgacaccccgccctgcttcggcgcactctccatgggctgcacccatgtgcatcccatgagaagaaccaggtacctcagttggaaatgcagaaatcatctgtcttctgcatcgatctcactgggagctgcagagtagagctgttcccatttggccatcttggaagcaaaaacccctagggtttttaagccaaaagaagaggaaaaaaaatacagn

SEQ ID NO: 100660 - DNA, 457 bp, Homo sapiens
  misc_feature (1)...(457): n = a,t,c or g
attgagattagtaggccgtgcggnggaattcgaagactgggcctgggaactccagtttcattccacagggatgcacttaaagggctggcgtagagaatgaaaaactccccaatggagtgccttcctgccttctctaactacaaagttctttaagaagccaagggaggcgttaccttcttgtatgcagtcagacttccacaggtgccagcgccaaggggaaggcagggcaaaggctgaacactggctatggcagtgcccaccccttcatggagtccacatctgacaagcagtgcaggtggagctatgtgacatgtcccttggaggagttttgctccggctcactgcaatcttggctcactgcaacctccgcctcctgggttcaagcgattctcctgtctcagcctcccgagtagctgggattacaggtgcccaccaccacgcctggctaattntttgt

SEQ ID NO: 100661 - DNA, 395 bp, Homo sapiens
acctcctgggctcaagtgaccctcccacctcagcttcatgagttgttgggattacaggcgtaagccactgtgccaggcctcggcagccttgtttttaaagacactgacaaaactgattctaaaaatgtatataaaagtgcaaaggatctagaaaatccacagaattttgaagaagagttcagttggagggcctatactacataatatccagacgttctctaggtctgtcatggaggctcacacctgcaatcccagcactttgggaggctcaggcaggaggatcacttgatcccaaaagttccagaccagcctagacaatatagtgagaccccaactctacaaaaaataaaaatttaaaatttcagaaagaaaaaaaaagacttactctaaagcag

SEQ ID NO: 100662 - DNA, 276 bp, Homo sapiens
gaactttgggacaatttcaaagaaccaaatatatatctaaagtccctaaaggagaggaaagaatgtgtatgtgagcggggaaggagagacagaaataaaacacttgaagacataatggctaaaaatttttcaaactggatgaaaattataaacccacagatccaagaggctcaacaaaccccaaatctaagaaacaggaagaaaactagctctgaggcacatcacaatcaaattgctcaaaaccaatgataaaaagaaaatcttaaaagcagtcag

SEQ ID NO: 100663 - DNA, 360 bp, Homo sapiens
  misc_feature (1)...(360): n = a,t,c or g
atcacactactacactccagcctaggtaatggagtgagaccatctctaaaaaattgttagatttttaagtgttttaaagtttttgaagagtagcacttgataaaagagttgtggcatggtggctcatactcataatttcagcactttgagaggctgaggcaggagcatcacttgagcccaggagtccaagaccagtctgggcaacatagcaagacacccatctctatnaaaaaaaaaaaaaaaaaaaaaaattcccccgaggggggggggcccccttgggaccccaattactagggggggtgagggggagggttccttttttttggggggaatagcggccccccccccccccccccccct

SEQ ID NO: 100664 - DNA, 387 bp, Homo sapiens
ttaagtggtcaccccaccacagcctcccaaataactaggctgtacaggcacatgccaccatgcccagctaatgttgaatttttttgtagtcttgctgtgttgcctaggatggtctcaaactcttggcctggagcaatcctctcaccttggcctaccagaatgctgggattacagacctgaggcattgtatttggacccctaattttttttttttttgcaggggggttttttgtggggaaaccaaaaaacttgttaaaaaaaattttaaaaagctgtcccactgcagcctccaagtttgaactccccacctcagtatatactttgggtttttacaaaaccttttttaagtaaaggccccttttttttctaccttgttttgggccggtt

SEQ ID NO: 100665 - DNA, 1391 bp, Homo sapiens
cctcagctcccaagtagccggaattacaggcatgtgccaccatgctgggctaatttttgtatttttagtggagacggtgtttcaccatgttggccaggctgttcttgaactcctggcctcaagtgacccgcccacattggcctcccaaagtgctgggattacaggcgtgaccccgtgcccagcaaggattgctgttttaattcttgtatcttcgttgcttctttggtctttgcttaaacaaaacaataaagcttaatagttggggagaatgctgttaccagtgtcctctaggaaggctgttagcatatggctctactgagcagcagtgccatctggtgcctgagatcatgtgcttcaggcagttgtcacactgcatctacagccaagcatcacagaaacacttcactcatgtggtcagggaaggtgggactgattcacatgttagagacaggtcagatgggaaaattaaggcccaacttggtgttggggaataaccatactctggtctttcaagtgtagtagctgatgattcccaagaaactgatgaattttctgagtccagacaaaatttccccaagcctgctctctctgttggatatacataatagagaaagtcaaatcagccctttggggtttgtggtaaaaattcactcacccattgaagcctaaggtggctttgtaccttccagatctctcagcaaatcccctgggcagaaatgtcacctgcttgccatgtctttgaggggttcaggtcagcctggagaacaggctccttaggtcaaaaaccttgttttaagagccactgtggtacagtcaatgtaacccacttgtgcagaagccatgcttccaaggaaggtctcaggttgacaactagacatcaaatctgagaagccaactgtggagtaatgtgtttttttctctgtggacaagagtgatcagaaaggtgcttgatcttgaacaattgatccatgatgaaaaaatgaccattagctctcccccagaagcgtctgtgtttgctgaatggagctgagattttgatccgctatcagactccagaaagatccaggagttccaagaacatggcaaagagtcaaaatcttaggacaaggaattaaaatgccagaatgcaaatgtccaacaggcctggtagctcacagctatcaacaccctagaattccacactgcctcactgcagttgctcaaggatgggtatgtttctgtctctgaaattcgggaaaaagccttaagtgccagaggaagggtgctttccaaggactgtctggcaggattcctttcctaggggtctgtcttctgggtaccccaaaggggcagagaaggaaccctaagattagcatagaggccactcatctttcctcccttcccaccctttt

SEQ ID NO: 100666 - DNA, 401 bp, Homo sapiens
  misc_feature (1)...(401): n = a,t,c or g
gtaaaataaaacatttaacataaaaaattaggtagtatgctatgacctatgtggaatattccagaaaaaaaaatggattttctctcatacatgtcttaatttaaatgtgttgttataatctaagattatattttgttatgcctcaggtgactatttcattcagatgaacacagtttacaaagttatagtaataagacataattttttttagctgggcacagtagctcacacctgtaatcccagcacttttggaaggccaaggtgggaggatgtcttgaggcctggtaacagagtgagatcccatctctacaaaataataataataataataataataattagtcaggtgtggtggcatgcacctgtagtcccagctactcctgagactgaggcaagagggn

SEQ ID NO: 100667 - DNA, 421 bp, Homo sapiens
tgaaataacttctgacatgctacgacatggatgaaccttgaagacattatgctaagtgaaacaagacagtcacaaaaggacaaccacttatttgaggtatctagaatagttcaactcataaaagagaaaataggatcgtagttgcctggggataaaggagggagtgatagggaattgtaaaacaggtatagtttcagttttgcagtatgaaaagctctggagattgtttgcacaatagtattaatatacttaacatactaaactatacacttaaaaatggttaagatggtaaattttggccgggcatgctggctcacgcctgtaatcccagaactttaggaggctgaggcaagtgagtcgtttgaacccaggagttcaagatcaacttgggcaacatagggagaacttgtctttacaaaaa

SEQ ID NO: 100668 - DNA, 409 bp, Homo sapiens
  misc_feature (1)...(409): n = a,t,c or g
cccacagcgaggagacccatggtcaggagttcaagaccagcctaagcagcatagtgagatcccatttgtacaaaaagtaaaaaattaaaaaaaactcagaacagataaagaagatgaaattaccacaaagaaagcaaaaaaggccaagagtaaaattaaaattgaagaagatggagaagaaggaaaagtagtagtggtagaagaagaggtctctgtgaagaagaagaaggataaaaagaaaccgtggttgggcatggtggctcacacttgtaatcccaacactttgggaggctgaggtgggaggatcacttgaggccaggagttcaaaacaagccttggtaagtagcacctgaggagggagaaaaaaaaagaaaaatgagtctatcctggccaacataggaagaccccn

SEQ ID NO: 100669 - DNA, 420 bp, Homo sapiens
cccacgcgtccggtccaaaccgtagcctagaaattgtagctcaggaagtagagtgctgagaggaacaattcaaacaattttgtttcctaaatgtattcttcagttgaagtctttgtggttaatgttgatagtttgtaggcacaatcactattctatgcatagggacagcttttcctaactctggaaaagagggtgtgtgtgtgtgtgtgtgtgtgtgtgtgtgtgtgtgtgtgtgtattgtcaaaaaccagtggaagagaaactctttaaagtgggtgagaacagaaaacagcgtgaaatatggaccgcacacacccctgtatgcaaagaaaacgcacgtgcatggtctctaaaaaagacgcctcattctttgaatttttggctctttgacacacctgtgagacattaaattttttactg

SEQ ID NO: 100670 - DNA, 406 bp, Homo sapiens
cttactttttgttgttgtttttgggatagggtcttgccctgtcacccaggctggagtaaaggctggtctcaaactcctgggctcgggcaatctgcccacctcagcctcccgaagcattgggtttgcaggcgtgagccaccacacccggccctctttctcttatttaagaatactatttcttaagtccatgaaaagatctagaagcagtgacatccaagtatcagtgagcacatcaaatacccagattgtgatctctaaatacctttcccattaattggaaccaagactctttggaggaatggccaattccaaaagtgtgacaagaaatagacaagattagcctgggacattttgttgtgccagaaagtatactaatggataatgtcaagaggatacagaagctaac

SEQ ID NO: 100671 - DNA, 503 bp, Homo sapiens
  misc_feature (1)...(503): n = a,t,c or g
cgacaaaggagncggggtccnnaaattgatacctagctngctangcacgaccacaggaacggaaaaaccgggtcgacccacgcgtacgaaaaccccctgccataacccaataccaaacgcccctcttcgtctgatctgaccaaaagaaaaaaaaaaaaaaaaaaaaaaaaaaaaaaaaaaaaaaaaaaggaaaaaaaaaaaaaaaaaaaaaaggggagggggggggaaaaaaaaaaaaaaaaaattttatgaaaagagaaaaaaaaaaaaaaaattaggtgggaaaaaaaaaaaaaaaagaggaagaaaaagaggataaaaaaaaaaaaaaaggaaaaagtagggaaaagaattttttaaaaagaaaaagaaaaaaaagaaaggggggngaaaaaagaaaaaaaaaaaaaaaaaaaaatntnnnnnannannaaaagnaaaaannaaaaaaaattttntgtgtgggagaaggaaaaaaagtgaaaaaaagaaataaaatgaag

SEQ ID NO: 100672 - DNA, 400 bp, Homo sapiens
caaaacaaaggcagcaattcattttttaggagttttgggtaggttttcttagcttataaaattgataaccaggccaggcatggtggctcatgcctgtcgctccagcactttcgaaggccaagacaggaggatcacttgagcccaggagttcgagatcagcctgagcaacatgatgagaccccccccatctttgatataaaaaaaaaaacggttacctttatgagggggtgagcacttatagcccccagctgctagggaggttgtttttttatggggcaactaaacccaagaccttggccctgtttttaaaagggattggatgggaaaaccccgggctgacccaaataaaaagactttgccgctaatccccttttcccaagtggggaaaaaaggaaaagag

SEQ ID NO: 100673 - DNA, 414 bp, Homo sapiens
  misc_feature (1)...(414): n = a,t,c or g
ccctagtgaaatgaggaagcccacttcatttgctgttgttcccgctggcagctctcaccagggactgtggagaggcaccggtatttcccttcccagtgaatttctcaaaggcttgggtttctgggggatcaacttatgagcaaccaaaaaaaatacaatgtttactacaaactctgttaaggggttatttattttgaaagcaactgggagccactaaaatgttttttgtgtctttttagatggggtcttgctctgttgcccaggatggagtgcagtgggacgatcttagntcactccaacgtctgcctcccaagaataagccattcttctgtcttagttccaccccagctgcctgtccctagtgactgggactacagacaaacgccgcttcattctgaatagagcctccccgcc

SEQ ID NO: 100674 - DNA, 400 bp, Homo sapiens
atccagataggggaagatgtgggtgcccacacaaagtcaagactgtttacttccaggcagttatcagctgtgtcatcctgggcaagtaacttaacctcttaggctcaatttctttacctgttaagtgcaaatagtaggaccttccttttctcccaagggttgtgataagaataaaatcaggaagccgaggcaggaggattgcttgaggctagcctgggcagcatagtgagaccctgtctctaccaaaaaaaaaaaaatctgctgagggggggggcacatgcctgtattcctacctactggggaggctgagggggaagaactcttgaccccaggagttcgaggcttcagggagctatgataactgcactccaccccggacaacagagaaagaccttgtttt

SEQ ID NO: 100675 - DNA, 402 bp, Homo sapiens
ctattccacatgcttctagaatcaagagatggggtctatgtctcttcccttgagcttgagcagtccctactgccttgactaataaagtggaagcgatgatatgacttccaaagctggatcatacaaatgctatgcataggccgggcatggtggctcatgtctgtaattccagcactttgggaggctgaggtgggcggattgtgtgagtccaggagttcaagactagtctgggcaacaaagggagaccctgtctcaaaaaaaaaaaaaaaaaaaaagggggggcccttttaaaggaaacaagtttaacacccgggggggggaaaggtttaattttttttttggggccccaaaaataaaatcccgggcccgggttttaaaaaggcgggggggggaaaaccctgg

SEQ ID NO: 100676 - DNA, 371 bp, Homo sapiens
agtttttgcagagacagcgtctcattatgttgcccaggctggtactgaattcccaggcccaagtgatgctcctgcctcagcctccaaaagtgctgagccaccacacctggccaatcataaaattcagttttatgcattttaatcttttttaaaaatctcccttgaaaggcctgtgagcaaaaaatggaatttacagttgtagaaggtttttaaaaatccatagattattgcataacacaggaaaattatattaaagtcacatttcattgtttctaaataaagttacttgaacacagttacactcatttgtttacatattacctacaacatctaaaatatttactatctggtcttttacaaaaaagtttgcc

SEQ ID NO: 100677 - DNA, 404 bp, Homo sapiens
  misc_feature (1)...(404): n = a,t,c or g
cccacgcgtccgcaggcacctgcgtggctttctctaggctggattgcaggagggaaatggctgggtctgagtagatgaagggtctgtgggatttggtgtcttgtctcagtggatactgccacattgcttcccaaagtgcctctgtccacttctctgcccagccctcaggttttgaatgaagaaagccacagagatctgggttttagagcaaagcacagggaaggggctatgggttggaaggtgggaccaggaagccaagaaatcatggactttgtgagctgcagttccactcttaagaacatgcatttgggccgggcatggtggctcangcccataatcccagcactttgggagactgaggtgggcagatcgtctgagctcggaagttcaagaccagcctgggt

SEQ ID NO: 100678 - DNA, 400 bp, Homo sapiens
aaacaaataaataaatcttccttaaggatatcagggaaacctccaaactgtgaatgtgtattacacttgggaaaaagtgtaaataagtcactactggaaccacataaactggccagtgaccctacttgtgtgacttccttgagtcttcctgagcaggtgaaatccgtcaaagaattgaattgccatgtaaaccagtttatatacgctgggggccttggaatctgacatggcagaatatttctaacaaatacaccttggggccaggcatgttggctcatgcctataattccagcattttgggaggctgatgtgggaggaccacttgagtccaagagtttgataccaacctaggcaacatagtgagatcctgtctctacaaaaataaaaattagctgggcat

SEQ ID NO: 100679 - DNA, 415 bp, Homo sapiens
  misc_feature (1)...(415): n = a,t,c or g
agaggtcacacaaatgaaactgtccatatttgaccattttttgcctacaaaaacaacaacttagtatgattttatctaatatcacatgaattcctaaaatatctgtttttggtaccctggcttttctgaggtagctttatgtgtgagaagtggctaggctatgctgcagccacaaatcaaccctgaaacctcagtagcttaaaaaatagaaagaggctgggcatgatggctcacacctataatcccagcactttggggggctgaggcaggaggattgcttgaggccagaagtttgagaccagcttaggcaacatagtgagacccttctttaaatttttcaaaatannnnaaaaaaaaaaaaaaaaaaaaaaaaaaaaaaaaaaaaaaaaaaangggggggggccccttttaaaaa

SEQ ID NO: 100680 - DNA, 458 bp, Homo sapiens
  misc_feature (1)...(458): n = a,t,c or g
nttgaagactgcagctgtacgactgagccgcagttccggaattgacccacgcgtccgcccacgcgtccgcccccacagcattcgatcacttataaactgtgttaattttccccacagtgcctcacatagagtggtgctcaattacaacttactaagtccatttgaaaagaaatacactgttggtcaagaaatctgtgtgctgagtgcttcaagggacacaggcagtataaatgagacatcctgccctcagggaatgtatagtctgagtggggataagacaaggccacatgaaaagtctactaatagcggccaggggccatggcttcctacaatacaagcactttgggaggccaaggtgagaggatcacttgaggccaggaatttgagaccagcctgggcaacatagtgagaccctgtctctacaaaaaactttcccaggtatggtggtgggtgcctgt

SEQ ID NO: 100681 - DNA, 387 bp, Homo sapiens
agaagaggcagtggctgtgaagaatatgaagaggttagtattctcccccagtttggcagaggctggccatctgtgaactgcccatgctttctagaatgtcggagttttggagtgtgatgatgcgtctgtatatcatatctttctagtctttcattgtgctttcatttgttagtcttctcttgttttgccatttttctactccctcacatgtgcttttgcccttaaaaatattcttcgtctgtaatctgagcactttgggaggccgagagaccagcctgaccaatatggtgaaaatccgtctctattaaaaatacaaaaatgagccgggcgtggtggcagcgcctgtagtcccacctactcggtaggctgagacaggagaattgcttg

SEQ ID NO: 100682 - DNA, 390 bp, Homo sapiens
  misc_feature (1)...(390): n = a,t,c or g
ctggaaatcatctttaaatgcattcatttgctacatatctgttagttaatttacatttactggtcctttgtaggctatgtcctctatcaatgtactctggggaaaaatcatacattttgttaacaaaaagacccatgctgtggtttgctcaggcccatttccctcatggagttttagttctattactctgcgtatttttctcacatgccttacactgaagttatcctgttgctcttgttgttgttgttgttattgctgttgttgttgttgaaggttcactatcatatcacataaagtttggaggccattttagcaaactgatccaagagggtgaggtcaatacagcctgcggttagggagggaaggaaggaagttctgccaaactgcttn

SEQ ID NO: 100683 - DNA, 414 bp, Homo sapiens
caggcagccttttattagcacataaaatgtacatgttatcatctgttatcttggaatcaatgaaataagagtaatatcagaaggaggaattgaatgactagtgagagtccatttgaggagaaatacaactctcaaggaaaaaatctgttgctgagatgacaattaacattgacatatccaatgcagtacaaaatggcaagtctgtgtgccattgtagtccttcctaccttgctgaataatcattgttacctgccttctttcttacagcctgtgtcagccataattgttattttattgcaagatttttaaagttcataatgtggcgggcgcctgtggtcccatctattctggaggctgaagcaggagaatgtcgtgaacccgggaggtggagcttgcggtgagccgagatcgccg

SEQ ID NO: 100684 - DNA, 727 bp, Homo sapiens
gctcgactttttttttttgagacaagggtcttactgtcacccaggctagagtgcagtggcagatcctagctcacgacaacctccatctcctgggctcaagcgattcttccgcctcagtctccccagtaattgggaccacaggtgtgcaccaccacgcgtggctaattattattttttttacagatgggggtcttaccacgttgcccaggctggtcttgaactcctggcctcaagcaatactcccacctcagcctcccacagtgctgggattacagctctctttctgagagatacccttgtcagatttttcatgggaagcttctgttttccacagagctttggagcagcatttactgcacaaattccacaaagggggagaactgaggaactattcatattcttatttctgaatgattacttgttttcctagaaaactctgcattttgttgcaagtattctaacttattatcatacagttaacatgatatctgtttatctctaggtattccaaagaatttgtggaatttacttaatgcttaaatgtgacagcttattcagatttagaaaaacttttggtatgggccaaagaaaacatatccttaaggggatatggcccctaggccctcattttccttttctgtctgagcaattaaaaaaagcattaagtaaattccacaaattctttttttaattgctcacggacgcgtgggtcgacccggaaagtcgg

SEQ ID NO: 100685 - DNA, 387 bp, Homo sapiens
cccacgcgtccgtgttaacagctgactagagctgggcagctggaaaatttaatgttattccacctttgactcaaggatgtacaagtttggacctggttctagacctgtgtgtatattgaatacctggtgtttcaagagaagtctaaggtgtggtccacggcctgttgcggtggctcatgcctgtgatcccagcactttgggagcccgaggagggttgattgcttagagcttagaagttcgagaccaccctgggcaacataacaagaccctatctctatttaaaaataaataaaatgtggtcttagtgtagaggtaattaaaaacatattaggttatgttctaaatgtatttctaattttgtatttttaatatctgagcttaatcaag

SEQ ID NO: 100686 - DNA, 400 bp, Homo sapiens
tcaagccttcagatgactgtggaccctgttaacacccaactggtaccacaaatgagacctcaagcaagaactgcccagctgaggccttcccaaattcctggccaacaaaatcatcaggctttttaactacaaacagttttattttttatttaataaaaaagtttttatttaacttgattgttttattaaaagggaaaagtaattttttagtatctgttaatatataataaaaataaaggtataagcctgggcttggtggctcgtttctgtaatcccagcactttgggaggtgttgggaggatcgcttgagcccaggagttcgaggccagcctgggaaacatgccaaaaccccatctctacaaaaaattagccgggaatggtggcacatgcctgtagtccc

SEQ ID NO: 100687 - DNA, 425 bp, Homo sapiens
  misc_feature (1)...(425): n = a,t,c or g
atnntnnngtccaaattaatgctgttgtataatgcaagattttgaaggttttcagtgatacttcctgcctacttaggtcccctttgatttgtgcctccagacccttcctttctcatgggttgacatttaccaccctctccctttccccgattgccatggaggtatattttggtgggaatatttgagaccaaacgtattttctgtgctaatcattacttcttaaaaaattatagttgctccttcttccactgagcattttaatcgtggagtttgagcatcttagcctggccaacaaggtgaaaccccatctgtacaaaaatacaaaaaaaaaaaaaaaaaattacctgggcatgagggggggggcctgtaatcccacctcctcaggaggctgaggccggaaaatcttttgaacctgggaggtgggg

SEQ ID NO: 100688 - DNA, 422 bp, Homo sapiens
caaccatgaaaaaataggtggtattattacaattttagggaaggaaaaaaagtttcagaaagtcctattgcagtaccctgcacctagtaaatttcagaggcaggattcagacttatgtcactggcttcagtgcttgcatgcctgttaacacctgttcttaaggttttccagggctttgagtggcccaacgtaaagcaataaccataggtcatttgcattcatatgttagagctaatgttatttgtaacattaaaaaatctatattatatttttaaataaaagtatctttagtattactaaaaatacaaaaattagctgggcgtggtgtgcctataatcccaggtactcaggagtcttaggtgggagaatctcttgaacccggaagacgcaggttgcagcgagtctagattgtaccactgtac

SEQ ID NO: 100689 - DNA, 405 bp, Homo sapiens
cccacgcgtccggggcaacttggcgaaaccctgtctctaccagggtgtggtggcacattcctatagtcccagctactcaggagggtgagatgggaggatcactggagcctaggaagtcaaggcggcagtgagccactgcactccagtctgggtgacaggaatgagactgtgtctcaaaaataaaaaacaagttacagcttttgctttagaaaacttggaaagtacagaaatatataaataaaataaaaataacctgatatcacagaggtaactactacattttagtatatttctttcgaaacatatacacacacaaacatatttcttgtttatgtatacaattgacccttgaacaacataaagtttagcggcactgatcctctgtgcagtcaaaaatccacgtat

SEQ ID NO: 100690 - DNA, 539 bp, Homo sapiens
tttgcatacaaatgtttatagcagctttacttgtaattgtccaaaactgcaaagatcctaaacatccttcaactggggaacaaacagtagtaaatccacacaatggagtgactcagaaataagaactattaatatactgagaaatatggatgaatctcaaatgtattactcatagcaaaagaagtcgctctcaaaatgctacataccatataatttcatgtatataacagtcttcaaaagacgaaaatatatggccggacacggtggttcatgcctataatcccagcactttgggaggccgaggcgggtggatcccttgaggtcagaagttcaagaccagcccggccagtgtggagaaacccccgcctctaccaaaaatacaaaaattagcccagcatggtggtgggcacctgtagtccctgtcactcgggaggctaaggcaggagaacccgcttgaacccaggaggtggaggctgcagcgagccaagatcacgccactgcactccagcctcagtgaaagagcgagactctgtttcaaa

SEQ ID NO: 100691 - DNA, 406 bp, Homo sapiens
atcagctctgacatatctgggcaataaaaatttttcagctccactgtaatcttaaggaactaccactgtatatgaagtttgtcattgaccaaaaggtcattatgtggtgtgtgactgtaatataaaaatagctattgtgataaaattattttaagggagggagacaatgggtttggaagtaaaattagtcattttgttagttttttattgctgctgtaacagattatgacaaacttaaacattaaaataacacagatgggccaggaactgtgactctcacacttataagcccagcactttgggaggctgaggcaggaggattgcttgagcccaggagttggagaccagggtgggcaacatagtgagaccccatctctacaaaaaataaaaaataaaattagccagg

SEQ ID NO: 100692 - DNA, 1074 bp, Homo sapiens
  misc_feature (1)...(1074): n = a,t,c or g
ttttttttttttcactgttaaaaatacatttatcattaaaatatattacacatggagacaggatgcatcatatacagtttggaagacttgctggcccagaaaatcccacttgtttcaccgaacactcattttttcagtgattttacattttatttttagagacggggtctccctctctcacccgggctggcgtacagtgatgtggtcataggtcactgcagcctcaaactcctgtgctcaagtgagccacccacgtcagcctcccaagtaactgggaccacagggcatgcatcaccacacccagctaattttttaaaaatgtttttgtagagagggggtcttccctggtgttgcccaggccttggtcccaaactcctgggttttcaagtgatggcttcccaccttagttttcccaaagtgccgagattaccacccgtgagccactgtgcctggtcattttaattttttaaatgcctgtattgccctcagaggctgagcaaccagcctcagagttattgagccattatctgggcaggaacgggggtcgagtttgcatatgcatatacacatcctcagacagagcactgaaagcatctgaggtggctgtagcctattttatccagcagcttctgcctgcattcttgccatccaactcattggcctttcaggactttccatcaaatatctgatcatggggatctcagcccagactgactatgccctggaggtagggtgagtgagtacaagtacagttatttaaaaacattttaggccaggcacagtggctcacacctgtaaatcccagcactgttgggacggccaacggcgggcagatcacctgaggttgggagttcgagaccatccttggccaatatcggtgaaaccccgtctctactaaaatgacaaaaaaaataattagccaggcgtggtggcgggcgnctattaatcccagctactgaggaggctgaggcaggagaattgcttgaaccaaggaggcagaggttgcagtgagccaagaccacgccaacgcactccagcctgggcaacaagagtgaaactccatctcaaaaaaga

SEQ ID NO: 100693 - DNA, 486 bp, Homo sapiens
  misc_feature (1)...(486): n = a,t,c or g
gcgtcccagganggctaaagngaccagcaagngccgcggaanttctcacagntgtaatctcagcactttgggaggccaaggtgggaggatcacatgaggccaggagttcagaccagcctgtgcaacatggcaagaccccatctctacaaagaaaaaaagacattgtaatgtgggttggagaaagtgagatataaaattgtatatttattttatgctgggaaaattatacacaagtatacccatataccaggatggtggtattatgggtgatatgtttttctttctacttttccaacatttttaataatgtgattacattatttttatagtggaaagattttttaataattaaaaaactcgtaagtgcaagtagaaccgtatgccattatgaggagaatttttagaactaaggataccaggacacctggcctgacttanagcctagcaataggacacagggtttgaaattgaaactattcccccaca

SEQ ID NO: 100694 - DNA, 479 bp, Homo sapiens
  misc_feature (1)...(479): n = a,t,c or g
naatgtgcnnnnnnnattgagatcgtatgacattaggccgngcggnggaattccagatttagttatggcttatcttatattcttagctgatttttgatggtagttttatcttgtctaagtgagtagtcatgaagatagtcttattttcaacatgggtttaatgatgaatatatatttccttttgtgagagaaacagttttgtgatttgaaggtaattttcaaaaagattaataattctggatttttttcagtttttttttttttaaacattgtttttaaaacacgtaacataacatttaccatcttaaatttattgaagggtccatttcagggccaggcatggttggggctcttttctggggccccaggattttgggaggccaaaacaggaggattcctggagcccaaaagtttgagaccagcctggggaacatatggagacccctttctataaaaaaaaaaattaataagagtcgggg

SEQ ID NO: 100695 - DNA, 457 bp, Homo sapiens
  misc_feature (1)...(457): n = a,t,c or g
aattgaaaccctgatgatcactcgaaagngcgnnnnaattcttttttttaagagacggggcctcactatgttgtccaggttggtctcaaactcctggcctcaagtgatcctcacacctcagcctcccaaactgctggaattataggtgtgagccactgtgtctggcctaactgttctttaagcttgtaaagaacatcttctgactgcccacctttttgataatcctttaagttcttgtctttaagtcataggcacccatgattgcttcttatctcatgtgttaggaactcatcctgcataattaacgcatatttgttcactttgtgtgttttattcaattgatgatgtttttcgtaccagaagattttgttgttttgctttaaggacacgtatccctttatatttgggggacagtggaactctctatccgtgcacttgactgctgaaggagaacgcc

SEQ ID NO: 100696 - DNA, 442 bp, Homo sapiens
  misc_feature (1)...(442): n = a,t,c or g
tttcgtgccaagatggccgaataggaacagctccggtctacagctcccatcgtgagcgacgcagaagacggtgatttctgcatttccatctgaggtaccgggttcatctcactagggagtgccagacagtgggcgcgggccagtgtgtgtgcgcaccgtgcgcgagccgaagcagggcgaggcattgcctcacctgggaagcgcaaggggtcagggagttccctttccgagtcaaagaaaggggtgacggacgcacctggaaaatcgggtcactcccacccgaatattgcgcttttcagaccggcttaagaaacggcgcaccacgagactatatcccacacctggctcggagggtcctacgcccacggaatctcgctgattgctggcacagcagtctgagatcaaactgcaaggcggcaacgaggctggnggaggggcgccc

SEQ ID NO: 100697 - DNA, 419 bp, Homo sapiens
tttcgtcctgtccctagagggcttacagtctagtatgaaaaaccaggcaagtttcggctaattgctgtactgttggattaagggaaaatgttgagggggagttggtatcctataccacctaacccagcctggggctttagacagtgcctgaactgagagctagttgtaggttaaaaaaaaaaaagaaaaaaagggggaggattatttagcaaattttttcgggtcccccagcccgggaccatctggttgaagccccataggcaaaaaccagttgggggggggtccccggaacaccaataggcccacgcgaaaaaccgggggggaaggcaataccccggagggggtacccctccccaaccccaacgggggggggggggccccccaaaaaaggctggtcctgcctggatacagcattaacg

SEQ ID NO: 100698 - DNA, 498 bp, Homo sapiens
  misc_feature (1)...(498): n = a,t,c or g
cgctggagnnnnnnnntttgatncctttggtngtctgtacgccngcacgnaccggnccggaattggcgggtcgagccacgcgtccggggctcctcacctcccagatggggcggccgggcagaggtgcccacctcccggacggggtggcgggtgcgtgagggctggcccccagctccctcccggacggggcggctggcctggagggggcttacccccacctccctcccggacagggtggctgccgggcggaggggctcctcacttctcagacggggcggtcgccaggcagagggtctcctcacttctcagacggggcggccgggcagagacgctcctcacctcccagacggggtcgcggccgggcagaggcactccccacatctcagacgatgggcggcctggcagagacgctcctcacctcccagatgggatggcggccgggcaaagacgctcctcactttccagactgggcagccaggcagaggggctcctcacatg

SEQ ID NO: 100699 - DNA, 407 bp, Homo sapiens
ggaaactaaattcaaattagggagctcaaatggagaaaattgacagataatatttttgaaactttgaaaagtagtatttggctagattcaccttttattaccttttcctttttttcttttccttttttttttttttgggaagggggttttttttttggtcccccgggggggggggagggggccccaattttccctttttggcccccggggttaagggaacctttcccttcgggggaaaaagggatccccggcccaacccttccgggggggggggattaaggggcccccccccctggcccgagtaattttttggttttttaggggaaaggggggttccccatgggggcccgggggggtttgacccccgggcctcggggggacccccccccgggggcccccaagggggg

SEQ ID NO: 100700 - DNA, 490 bp, Homo sapiens
  misc_feature (1)...(490): n = a,t,c or g
gatgggcnanaatgagaccctagatagagcgccgtagtcactgactcttataataaagtaatctagagaaaagaaaatgttattaagaaagtcatattgaagagaaaatatatttactattcattaaacagaagtgaatcatcataaagaccttcaggccaggcacactggctcaaatctgtaatcccagcactttgggaggctgagatgggagaattgtctgaggccaggagttcaggaccagcctgggcaacatagtgtgactccttctctacaatttttttttaattaaaaaaagaaaaagatctttatcctcatcatcttcatattgagtgtgttgaggagatggaggaagaagaggggttggtcttgctatctcaagggtgggagaggtggaagaaaatccacgtgtaagtggacctgtgcagttcaaacctatgttgttcaggggtcaactatatatttataaataatttatgggctaacacag

SEQ ID NO: 100701 - DNA, 1136 bp, Homo sapiens
gaccagcgtggtggaattcggctcacacacgccctgcctgccctccctgcccagctgtaaggaccgggggtctccctcctcactaccgccagacaccccggtggaagcatttagaggggaccacgggagggacaaggcttctctgtccgcccttcacacctccagcctcacgttcacttaggcacatcacacacacactggcacacgcaggcatccatccatccgtcattcattcaaatatttattgagcacctactatgtgcccagccctgttctaggcactgggcattaccatagagaacaaaatagacaaatacatcttgccctcatgggaaggtgacgttcccaggagagggcacctacacagtcacgcaaacacacactaattcctggcagggcccccagcccctcccctggctgagcagccctgtggctgaaatgactagcagataaacagacccccttctgctccgcttcctcctgcccagccaggcaacaccctcaaccggctccatcacatcctcaggtctcgggaccatggggggctcagaggggagacacacctactgcttcctcagatgggcccctccgcagccccttcccttgctcggggaaagcccccaattctgcccacacccatttatttccttccttccttccttcttttctttccttccttccttcttttttgtttttgcccccaattctgcccatacccatttctttctttccttccttccttcttttttgtttttgcccccagttctgtccacaccccttccctttcctgtcctgtcctttctttctttcttttttgataggaatcttgctctgtcgcccagggtgggagtgcagtgggtgagatcttaggttcaatggcaacctccacctccgggggttgaaggtgaatctcgtggcctcaggcctcctgagtagctgggactggcaggcacgcgccaccacgcccagctaatttttgtatttgagtagagacggggtttcaaccatgttgggccaggctggtctcgaactccgcatctcaggtgatctgctcgcctcggccttcccaaagtgatggggattacagggcatgagcaccgctgcccggcttcacaacccatttctttaaaaaggat

SEQ ID NO: 100702 - DNA, 569 bp, Homo sapiens
  misc_feature (1)...(569): n = a,t,c or g
accactccttcgcgcactgctcttctcccctactctctactaaccgtcgtcgatatttttttctcttcccctccccccccccccccgctggttgagactagacacgtccggaannccgaacagctccggnctacagctcccagcgggagcgacgcacaagacgggagatttctgtatttccatctgaggtaccgggttcatctcattagggagtgccagacagtgggcgcaggccagtgtgtgtgcgcaccgtgcactagccgaagcagggcgaggcattgcctcacctgggaagcgcaaggggtcagggagttctctttccgagtcaaagaaaggggtgacggacgcacctggaaaatcgggtcactcccacccgaatattgcgcttgtcagaccggcttaaaaaacggcgcaccacgagactatataccacacctggctcggagggtcctacgcccacggagtcttgctgattgctagcacagcagtctgagatcaaaccgcaaggcggcagcgaggctgggggaggggcgcccgccattagccacgcttgcttaagtaaacaaagg

SEQ ID NO: 100703 - DNA, 466 bp, Homo sapiens
atatttgggagaaggggtcagggagcaccttacctctagtggacaagggccctgagctttacacagccctccgtatttattaggcaaaagagatagtgagaaggggtgtggaagaagaggtcagctgctcggtccagagtaggcttgcaagactgcattcctcgaacaataggctctagatgtcccagtagataacctcaaggagccggggccagggagcgatggccctcagcaaaccttctgggcaggcacagaagcgagtttgcccacattctgtattcatgataaacagtttgctgtttgatcatgtagcctccagtggaatgctgagttggtcaccatccctttggcctttttggctcccaacatttcccccttcttgtttatgtattaagtgaaagaatgtaaggccaggctgggtagctttcattctccgattggcagtccatccgatcccacgcgtccg

SEQ ID NO: 100704 - DNA, 472 bp, Homo sapiens
  misc_feature (1)...(472): n = a,t,c or g
nattgagtccgtgggccatagcanagngcggnggaattcctcagagatgtcctgggtttagtttcaaaccaccaaaataaagcaagtcacacaacatttttggtttcctagtgcatataaaggtatggttacgctatgcactagtctctttcatgtgcaatagcattatctctaaaaaactacataccttaattaaaaatactttattgctaaaaagtgctaacaaccatctgagccttcagcgagttgtaatcttttttgctggtggagggttttgtcttgatgttggtggcagctgacttatcagggtggtggttgctgaaggttggggtgattgtggcaatttcttaagacagcattgaagtttgctgcatcaattggctcttcctttcacaaaagatttctctgtagcatttaatgctgtttgatagcattttacccagagtagagcttttttcaaaattggagtcag

SEQ ID NO: 100705 - DNA, 390 bp, Homo sapiens
  misc_feature (1)...(390): n = a,t,c or g
cccacgcgtccgcaattctaattctactgactatcctagaaatcgctgtcgccttaatccaagcctacgttttcacacttctagtaagcctctacctgcacgacaacacataaaaaaaaaaaaaaaaaaaaaaaaaaaaaaaaaaaaaaaaaaaaaaaaaaaaaaaaaaaaaaaaaaaaaaaaaaaaaagaaaaaaaaaaaaaaaaaaaaaaaatataaaataaaaaaaaaaaaaaacaaaaaattaaaagaaaaataaaataaaaaaaggggggggtgggaaggaaaaaaaagaaaaaaaatgtgatatgtgcgacccaattttttcttgtaagagagagagagaaaaaaagaaaagaannaaaattnnnnaaaaacgcgtgtccgntg

SEQ ID NO: 100706 - DNA, 415 bp, Homo sapiens
tttgaagcttggcaagtcgaggccgctcattgagctgtgattgtgccgctgcacactagcctgggcaacacagtgagaacttgtctcaaagggggggaaaaaggtaatgtaaaaataattttaaaatctatctttacctcttgtcttaccttgccaacactgtaatgccatcttggcatgaagaaggcatttctaagaatgaaaccaaagcccagaaggaaaaaaaagaaattgatgtgttggaatgcattaaaaagtagagcagggagcagtggcttactcttgtaatctgagaactttgggaggccaaggtgggaggatggcttgagcctaagagttctagacctgcctgggcaacatagggagaccctgtctctacaaaaaaattaaaaattagccagacatggtggcacat

SEQ ID NO: 100707 - DNA, 407 bp, Homo sapiens
gcgcgtgccaccaccatgcccagctgaattttgtattttttgtacagacagcattttgccatgttgcccaggctggtcccaaacttctagcctcaagcaaccctcctgcctcagcctctcaaagtgctaggattgcagtcctgagctactgccccctaccctctttgcgtcttaggagtcatttagattttttttgatccttttgtttagtgcctctggagctgcttacaccaaggcaatacgccttgatatactggatggttgagaggcagcctctttttttttttttttttttttgaagaaaaggaaatttggttgtgggaaaagggggggaaaaaaaaaaggtgaaatttaaaaagccctctcaaaacccctttttttaggacaccccatagggaatgtggcct

SEQ ID NO: 100708 - DNA, 418 bp, Homo sapiens
  misc_feature (1)...(418): n = a,t,c or g
ggaggcaggaggctcgcttgagcccaggaatttgaggttgcattgtgcacagttgcgcctatgaatagccgttgcattccagcctgggcaacatagacagtctctaaaaaaaaaaaaaaattaaaaaataaaaactataaggaatattaacatttaaggggtaaacaggataggaatccacccaaaaaattaaaaagcagtggctaaagtggttggggggatggtgtaaaaaaaaaaaacatggattaattaaaatttgttttgccccttatttgactaaaggcaagtttctttcattcattcattcattcattcattcattcattcattcattcattcagagacggggtctcactctttccccaaggctggagtgcagngacgcgatcgctgttgactgcaaccttcatctcccgag

SEQ ID NO: 100709 - DNA, 800 bp, Homo sapiens
  misc_feature (1)...(800): n = a,t,c or g
gtcagtagtgccaaaattgaagaagccctgggatgagggattgcaaaggacctgttaacacataaaacaagtgtcttgtggtcaaaatcaggtaaaaatattccatttcactagcaatgaaggaaatgtaaattaaactgtttctctactagcatattgacagaatttttgaaaggttatcatactcaaatgtaacatgttgctttatattactgatgacactacaaagtatggtacatggcgtctggggagtttctgaaggttgaaacaaaagtcttgacgtatgtacttcatacttcggactcaataatttcacttacagaaatctatcctcaggtgataaatagatgcctacagggtttactattaggctgttaatcacataactacataattatttttaattgtaatgaagtagatgtgacctaannnnnnnnnnnnnnnnggaaacagttttggttttgcactaaggctgggagggaagggaggggccaaaccttgtccccaatgaaccctttttctttggggggtaaggggattctttcgttccccccccggtgggaatcccgggggggggaagaaagggggctcccccccccgcccgggggaatttttttgttttttgcgagggagggggtgtttnttgtggggccccggcctctccctcccccagagaagaagncggntaaaacnactggacggtcctccgggtaattgttttttttataaacgcgaggaagcccgcccccccccggcctaggtttattctcaccccgggcggcccgaggaattttggaccc

SEQ ID NO: 100710 - DNA, 396 bp, Homo sapiens
cggacgcgtggggtttcgctcttgttgtccaggctggagtgcaatgttgtgatctcagctcactgcaaccttcacctccctggctaattttgtatttttagcagagacggggtttctccatgttgggcaggctggtctcaaactcctgacctcaggtaatctgcctgccctgacctcccaaaggctgaggttgcagtgagctgagatcacaccattgcactccagcccggaccgcatgtgcgtaacaaagcgctgggagtacaggcgtgagccaccgcacccggcctgagactgcatcttaaaaaaaaaaaaaaggggcggccgctttaaaggatccaagtttaccgccccgtgcttgcgaggttttaccttttttttggggccccccaaatccat

SEQ ID NO: 100711 - DNA, 438 bp, Homo sapiens
ccgatgcggacttatgggtgcgaccgctgcgtccggtacttttgacggtcggttgattctcctccacgctacatgttcagtttccctgcgcctctgtgacaaccctacacctctggttatagatcatcttcttggcattcctcatgtgcacatactgatctctagcagtcccttatccatgccgcctcatcagattcctgcacacctgacagcctcttgcttgctatttgagctactagactactgacctctattgtacatgcctgcaatcccatcactttgggaggccagggtggtaggatggcttgagcccaagaatttaagaccagcctgagcaacatagtgggaccctgtctctaccaaaaaaagaatcaaggtatgcaccagttaagccagccacgttttaggaccacatagcactcttcccacaagagacct

SEQ ID NO: 100712 - DNA, 417 bp, Homo sapiens
accacacccagctaattttgcatttttggtagagatgggatttcaccatgttgcccaggctggtcctgggctcaaagagatctgcccaccttggcctcccaaagtgctgggattacaagcatgagccacttgcaccaggccattcctttgaaattcttagagcagtttataagattctctatcttagttttctaagtttgccctttgtgatctatttttgtttgtttaccctttaaatggtaatgttatttagggttctgtctttggttctcttctcttgatcatgctgagaactttccctgggtgattccatttttgttccttggccttgaccattgtgttcatatcaagagttgtaagtaaaatacttatggggccacataggtaacataaatgagtgacatggtaagggatgag

SEQ ID NO: 100713 - DNA, 450 bp, Homo sapiens
gcagcattccagtagactggccctcacgggctcctactcctaggggaagggagagtgcagctcatcaaggaaacaccctgtaggacaaaggaacctggatggcaggcttgagtcccagatctttctgctggagggaagtttctttcagcagatgcacagctgcaatgctgggttcaactgggaaagtctgcagttttgccccaacaatcaagaggccctggtgcccatgaaggatctcggagaagggggggttcttctcctccttgtccaccactgcagacacagctggtgttctccccacaggagcttagcatgagtgcacctatacacaggctttctgtaacacttcaaggtgactgcatctccacaggaggagcacctttcaggtgcaggcttgcatgagaagaagggcacatttcctctacttggacatcatcattctgccgatga

SEQ ID NO: 100714 - DNA, 1900 bp, Homo sapiens
actgaaaacctattgaacacgattactccaagcttgacacgaggatttgggatgctcatcctgtgtaggagaggctactcgattccatttaatgactgtcctagtcataatcatccagggataaaagcgaggtagatgttgaaagctctttccagggctgaaaaagtgttcttacgttctctgcatgtgactagcatcactgtggaaattaatgctctgttcttcactagaatgtagtaagtggttaaactgagctatcccccacctgatgactattggcatccatttgcaaggccaatggcctggattaagggttaggattattgtagctagaaggtaattttatttctgtgaaactaattggctcatatttgaggttaggtgtggccttgaccttaccagtacatttatacccactaccagttgactagcccagataattgttaaatggtgctttttttctgcttctcagtagacttccatgccattacaaaggaaatttgaattacctagtgtttgtatattccatgataactatgtataacttctgttacacagcttatgtattgttaacatttaagtgtaaaccatgccacagctaacacttaaaaatgaaaactaattagttcttgcttagggaaaatgccaggtatgaagtatggcatatacttgacactgtcctgtgtaaccctttactttgctcaggctttcaagattgagtcttttttcccccaaattaggttaacatgcatttgaccccaacctgtggggtttgagtaagctggaaatctgtgacggtaggctttctagtgtcacgaggtggtggtgactgaaggaaaagctgggatcacaggttccttctgatggagaggaaggtttatttctatgcccctcccaccaccctccacctagagctcacccaagtctgctccagtcccaggggcaggccattctgcaaaagcaggacctcacagaaacaagggctgggttgaggtcacccccttcagagttggttcctggccagatgggtaagaggcatttgtaattttaaaaatgtgaaacttgggtttggtgttttcttctaagtgcctaaataagcaagccaggctgttgatattttagccagagaaatcggcaagccaagattaacccgaatctgaagtttagaatcttgagtttgcatctgcatcatatcatgctgttttgatgaggaaacatttgccactgaggagttggagggagggcaagacgacagtgttaagtcagatcatttaatggtttcccctaagccctggaaaaatatttgaaagaatggcagcaaaaaggttaagaaagcaagccagatttactgcacaatatgcagtacccagtactactttaaatcccaagagaacagtgtgatgtctaatatatacaggtctatgaaaatactgtggaataagcccaggaaggttagatgtgtttgcaaataagttgcccaaagggtccccctctaagtaaaacaaatattcagaccacaggctttaatgtaaactgtcaaaaagtgggatgtggaggatttttgttaagtcaagtgtcaatcgaagttaaaaagcaagggtttttggcccaggcgtggtggctcacgcctgtaatcccagcactttgggaggccgaggccggcaaaaatcacctaaggtcaggagttcgagaccactactggccaacatggtgaagccccgtctctactaaaaatacaaaaaaattagcccggtgtggtggcaagtgcctgtagtcccagctacttgggaggctgaggcaggagaactgcttgaacccgggaggtagaggttgcagtgagccacgatcatgccactgcactccagcctgggcaacagagcaagactccatctcaaaaaag

SEQ ID NO: 100715 - DNA, 409 bp, Homo sapiens
  misc_feature (1)...(409): n = a,t,c or g
tcatataagcagagataagtttgttcatttatttattcattcttttatctattcattttacaattatgtattaagtgctcactgtgtattggcctttgtggtaagcactaaggagaaaacatataaaaagatatcctgtctgccattaaggaactcataatccagtgagggaaacagatgtctacataggactctagtgctagaaaaaaataagtgcccaagttttgtctttagaaataaacaggctgggcgtggtggctcacgcctgcaatcctagcactttgggaggccaaggcgggcggatcacttgaggtcaagagcctggccaacatggtgaaaccctgtctctactaaaaatataaaaattagcctgtggtggcggnggcctgtagtcccagctactcgggag

SEQ ID NO: 100716 - DNA, 359 bp, Homo sapiens
  misc_feature (1)...(359): n = a,t,c or g
actggaccagtgaaattgaagtgataagcctgttacaatttatctctcccactggtataagttatctctcccacagattatacctgaaaactttcgacagaatataaaaagcaacgaccagaggactctttctttctttttttattgagattgggtttcgctatgttgcgcaggctggtcttgaactcctgagctcaagtgatccgcccactttggcttcccaaagcgctgggattacaggcgtgagccaccacatccagcctccttttaaaaagtaaataggaacagccagagtggagaggaaagtgaaaatctgaacctctattacagtggngaggtttccatttttctcatcatca

SEQ ID NO: 100717 - DNA, 443 bp, Homo sapiens
gccagagatggtggtgtgtgccagctactcggaaggctgaggcgggagaatcacttgagacagagagttccagactacagggagctatgatcacgccattgttctccagcctgggctacagagcaagaccttgcctcttaaacaaaaagacaaaaatgggcacccaggaggaaaggatatagattttgttgcactagtattaggaatcaaatttaccattcgccctctccctagaaaactaaaataccttttatggtgaagtatttgagggtaagttgaaaattgcaggaaattgatacttgactttcaggtagttggtaatgcattttctaaagataaaggatactggtctactaaaaccacagtatttgtatttcaaccaagaaaagttttttaaaaaaataaaaaaaaaaaaaaaaggggttttttttttaacggggccg

SEQ ID NO: 100718 - DNA, 426 bp, Homo sapiens
ccccttctattcgtgtccccaccccttctctccgtgtctccaccccttcttccctttcctggccagcagcctccccacccccaagcacgcactctctgctccccagtgtacaatctgaaagcctgggtcagttcctgcatccaccggacccaccacctctggctttccctgctcccttaaaacaccaagaccttcacattagtcatctctaggcaaaactttataagagaaatcatctttctttctgcttccaaagggtccacgtttacgaccttgccatctgttctgctccttttacaaggctaaaaaccctcaaaatttccctcctgcaaaaaatacgtcccctccccccattctttatcttatctctttaacttctttttttggtccccttagaaacaaggtcttcctctgtcacccaagccg

SEQ ID NO: 100719 - DNA, 360 bp, Homo sapiens
  misc_feature (1)...(360): n = a,t,c or g
catccataagaagcaacttctcatctgttaatgttttatcacgagattgcagcaatccagtcccatattcaggcttcacttctaactctagtctttctagttctgtttctgtttccaccatatctgcagtgacttcctccactgaagtcttgaaccctcaaagtcatccatgagggttggaatcagtttcttccaaactccgggtaatcttgatatttttacctcctccatgaatcacagaagtccttaatggcatgtagaatggtgaatcctttccaaaagattttcagtttactttgtccagatctattagaggaatcattacctatgacagctatgtcttgcgaaatgttatttctn

SEQ ID NO: 100720 - DNA, 424 bp, Homo sapiens
  misc_feature (1)...(424): n = a,t,c or g
taacattttaaagtagcattttaagatacagttaatagaatactattagcacaaaaggccgaggagaaatgtaattataatgctataatgatcttatatttaggtggaacagtacaatatttactcaacaaagactatgagaagttcagaatgcatacttaacatttgcaattgagttactttgtaacttatacactttagtcatttctatcaattgctaaaaacataacacaaagaagtatatggaacaaggcaaagaaattgaagcttaaaaccaattcactttttcgctggctgtggtcgcttaaacctgttatcccagaactttgggaggctgaggctggtgggttgcttggcgtcaggagttcaagactgacctgaccaacatggtgaaacccatatctactaatatacaaaaattatn

SEQ ID NO: 100721 - DNA, 564 bp, Homo sapiens
  misc_feature (1)...(564): n = a,t,c or g
ctaaacaaaatattaacacactgaatccagcaatataaaatataatatatatatatttaaagccaaagatgtattaaagccaaggatgtattatagccaaggtgcaattatactagaaattcaaagttggtttaacattagaaaatcaaccaatatatttcacccacaccaacactttaaagaagaaaaactgagtggtcttttccatagaaaaatgtaattgataaaattcaccatccattcattttattttatttacttatttatctttttttctggagacgggtgtttcgctctgtcgcccaggctggagagcagtggcgtgatctcagctcactgtaacatccgcctcccaggttcaagcgattctcctgactcagcctccagtgtagctgggattatagcatgcgccaccacacacagctaattttgtatttttagtagagacgggtttcaccatgttggtcagggtggtgtcgatctcctgacttcaggtgatccacctgcctcggcctcccaaagtgtgtgancagcttgcctggcctcaccatccattcatgattt

SEQ ID NO: 100722 - DNA, 228 bp, Homo sapiens
  misc_feature (1)...(228): n = a,t,c or g
tctccctctctnnnnnnnnnnnnnnnnnnnnnnnnnnnnnnnnnnnnnnnnnnnnnnnnatatatattttatttctcaacataaacttcatcaagttacaagacacttttgtaagcgatgataccagccatctagtccatccctaaataactgagggtcctgagagttcagccatgtcaatacagtctttttttttacatcattagctgaagagaaatggatgccctt

SEQ ID NO: 100723 - DNA, 1241 bp, Homo sapiens
  misc_feature (1)...(1241): n = a,t,c or g
ctaaccagagaaactgaccctatatcagtgnnnnnnnnnnnnntttttttaatccttgccctcacttttcacattggggagttacagacaactcaattccaaaatacattattttctgatatattagtactacaatgacatccataattttcaagggaagaacatgtacagagaaatgtgcatattatactaataagcactcttaccctcatgccaagcaccaagaacccaatctcttccattaatgggtacttgctgacctgttgctgaatcttctcagatgaggcaaaaggatcatagctttttttgccctatctttacatccattatacagggcttattaaatttatgggtcacattttccagttttaggtataaatcgtttggggcagcgggaggtggccagatgccataatattttggcaaatattgtcgtagctctagaagaacaccatcggtacagtcagcagcataaaccatattatagaattccagctctcttgggccccttggaggtggttgtaactgtttcaaaactgtgccatctggatgttgcagtatacccattttgtccttcccatacctgtgcccggccacctgatgcaagatgggcacacagccactgaggaagcggagtctgccgcctgccggctgcagggtgcccttaggggtggcctcgatcgccggtggggtccgcatttctgggggacccggcgcctcgacccggagcggggatggtggctctcttgccataacggagaacagaagcggtagggtcagcaagagcaggaaaagaaaaatagggggagggagggggcgccggagaacccaggggtcgctcaggctcgggcgcgaggaggcccgggggttcccgcggctggtgcccgccaggggctccacccgcagccaaagtccaccctctgcgcgcaatatcagctcgggtttcctgcggggttcagtgtgggtcggcaggatgcggaagtgcagcagggtgagcgccaggaccaccttcatctcagccatggcgaacgcctgcccgatgcagtttctgggccctgccgagaagggaataaaagccagaggtgacctctccttgatgttctcttgggttgaaacggaaggggtcgtagacctccaggggtnttggccacacagttggggttgtaatgggatcccgataatattgatgaggcagacaatgcctttggggaatgacgcggccgtctgggagcacaaagtcc

SEQ ID NO: 100724 - DNA, 453 bp, Homo sapiens
ggcacgagctgcattcttgcttcaatgttgactaggcacaggcttcgtttttctttttgagacagagttttgctctgtcgcccagtctggagtgcagtggtatgatcatagctcactgcagcctcaacctcctgggcttaaactattttcccctgtcaacttcccaagtagctgggactacagacacatgccaccatgcctggcttcagcatccattcttaaactccttttcaccattgatctgggattttactcttagctggaacctgtctgagacccgactattggaggtctcttactgctggaggatggtatctctgggaaaggcccactcccagacccaggaatgtaggatccatctcagtgcagcttttctcagctctctacttggtctggggtaccacacttctcaaccggattctgtacttctcataaaggtattttgatcagtaa

SEQ ID NO: 100725 - DNA, 1132 bp, Homo sapiens
  misc_feature (1)...(1132): n = a,t,c or g
tttttttttttcctgagtagcagaaaagtatntggataaattttattgtgttgcacttttttaacaanaaacaaaaagcatcttgccaaccacagaaacacttgcaaccacctaggcgcctgggcgtttcccccagcattcattcactagcacctcatgttttgggggcacaagcacagggctttcttaggctgtaaaatcacctatatcatctgtctgtccactgcttcaactccttctgcagtatccctgcaacaatattacatgcttatgaaatgctgcagacagggaattcctgtccttctaggatcctcttctggctcgtgggcagctttaccataagttcttgtcttcttatgctgaaattgatttcattttcatcttcacgtattattgcttttttgctctctcggtgtccaactgagtctcatcgctctcccttctaatactccttctgtcatctattttgtcttttcttcttcagactgaaaatccctggtagtacctgtagtttccttccaggacacgatttttagtctgttccttcaattgccctgttgtaaagatcagaagtgcagagtgaaaccagttcttcccttgttctcgatactaactctcaaacaatacagtctacttaagctgttttggcacaagcatcacagatatttgaagcttacagaaaccagaacctctaagtcttttcatacctgctactgtttagccacatctctgctctgatcttctgttgctgctcaatagtttcctggacccaaggaaaagaactgacctactcgtcgaaacttcatcttactgtttggcccaccattccaaccttttaaaaattactagtaattcagttagttacttaagactaaataagggtcaggcgcagtggctcatgcatgtaattccagcactttgggaggtcgaggcgggcagaccactaggtcaggagatggagaccatcctggctaacacggtgaaaccccatctctactaaaaaaaaaatacaaaaatttagccgggcatggtggcgggtacctgtagtcccagctactcgggaggctgaggcaggagaatggcgtgaacccgggaggcggggcttgcagtgagctgagatcacgccactgca

SEQ ID NO: 100726 - DNA, 502 bp, Homo sapiens
ttttttttgaggtggagtctcactgtcaccaggctggagtgcagtgatgtgatctcggctcactgcaacctccaccttccgggttcaagtgattctcctgcgtcagccttccgagaagctgggactacaggcacgatgcccaactaatttttgtatttttagtagagaccgggttcaccatgttgtcaaggatggtgtcgacctcttgacctccaaaagtgttgggattgcaggcgtgagccaccgcgcctggccttgccttttttcttaaaaccgaactgtatctctgctgggggcagtggttcactccctacatgacagtcagctcctctcacccagcatgtcctttgatatccccatcactccccagttgagggtctcatccacactcagtctaggctttgggtagcctccatagaatcagatagtcaccaaccacacagcatatgaacttcatccacaaaagaccacattttgcttatcaagtctgatcacttgaaca

SEQ ID NO: 100727 - DNA, 377 bp, Homo sapiens
  misc_feature (1)...(377): n = a,t,c or g
gtggcacagtcacggcttactttggtctcagcctccccttctacctcagcctctcaagtagctgggactacagccatgtgtcaccatgtccagctggtttatgtttatttttagtagagacagggtctccctatgttgcccaggctggtctctccctccggggctcagcctcccaaagtactgggattataggcatgagccagcctgctgggttttggaaacaactgtgagctctgcttattctaactacatttctcaaagacagcacttgttgtccccaaggtccatttgtcagtcttagcacctacatggcctatcatctgcgccgtggtgatgtttcttcactggtgcctgtgtggggcgcgcaggctcatttn

SEQ ID NO: 100728 - DNA, 395 bp, Homo sapiens
aatacatgtggtcctgtgagattttctaatggcaaaagtgggccaggcacagtcactcatgcctgtaatcccagcactttgagaggccaaggtgggtggattgcttgagcccaggagttagagactactagcctgggcaacatagtatagtactttgctggaaaaaaaaaaaaaaaaaaaaagcccggggtggggggggaaccccaaaaccttggttttggcaaaaaaaggggggaaaacctttcccaaaaatttaaaagaaatttttttttttggggctttttttaaaaaaaaaggggtcccctggcccaaacctttttttttttaggggggcctttccaaaaaaaaaaggggaacgggcctttaaaaattatttacccgccccccaggggttt

SEQ ID NO: 100729 - DNA, 420 bp, Homo sapiens
aatcatgtgggtgtctctgaaaactctggtaaataacatatatgttggctgcattcattaggatatgtgatttgggtaataaaggtctgggagaaaaaaaaaaaacaaatttgatctctttaaccaaaggaattcctattcctccccaggctgggggtctgctctggaaatctcattggcaatgaaccacttgatgaaatgggcccacaactgtcaaatatcacacacgtcaggccttaggcccacactagttctgtaatctgaggcattttactctttggggacctcagggggtctattaataaaaaaggtataaactaggcatgggggcttatacctgtaatcccaccactttgggaggctgaggcgggaggattgcttaaggccaggagttcgagaccagcctgggcaacatagtgt

SEQ ID NO: 100730 - DNA, 416 bp, Homo sapiens
aatacatgttgtgttcacatgcctttagagaatataaaaatcactcaagctcaactacctctctcccttgatgtgaagtggctcatccaaactcctggtattaataccaggtaagaagtaggaagctggccatatttccaaaggcaaacagaattttctccaagagaaagggtcccaagggcttgtcaaaggatctctaaaaatggcattgatcttttttatggctgtgtagtattccatggtgtttatgtaccacatttcctttatccaatctaccattgatggccatttaggttgattccatgcatgtgtctttatggtaaagcaatttatgttcctttagatgtatacccaataatgggattgctggatcgaatggtagttctgtttctagctcttcgaggaatcgccacact

SEQ ID NO: 100731 - DNA, 389 bp, Homo sapiens
catgaatgactttgatgggcttataatactgaacacagccagaaagaatcagtgaacttgaagatatgtcaatagaaacttcccaaattgaaattgaaagatttcaaaaaggaatggaaaatttttaaaaacagcagaatatccaagaactgtgggataatttttaaaagtgtaggttggatgtagtgtcttacacttgtaatcccagcactttgggaggctgaggtaggcgattgcttgaggccaggagtttgagtccagcctgggcaacatgacaaaacccagtgtctactagaaaaaaaaaaaaaaaaaatatttctcttttttttcccgggggggggggccccccctgtaatccccctttcttggggggtggggggggggggata

SEQ ID NO: 100732 - DNA, 404 bp, Homo sapiens
aggtggtcttttcattctactcaggtcttctattgattggataaagtgcacatacatcatggagggcaatcttctttactcagaggacatcagtgtcaatgttattcccatccagaaacaccttccaagttgacacataaaattaacaatacacttttcctcatctcacccaaatttaggttaagagttctggatacctgaattaatattgccattggaatgccacttttacttttggagaaaaattagaaataacattttataaaattaaaaaactgtaggctaggcacactggtttacacctataatcccagcacttttggaggccaaggcaggaggatcccttgagcccaggagttcaagtctagcctgggcaacataaggagatcctgtctctacaaaaa

SEQ ID NO: 100733 - DNA, 366 bp, Homo sapiens
cccacgcgtccgagaaaatatggtacatgtataccatggaacactatgcattcacagaaaaagaataaaatcatgtcttttgtggcaacatggatgcggctggaagtcaacattctaagcaagctgatgaagaacgagatgatgagtgtcaacgggagatgaagctgacattttgggtttgcctgtgtgtaaaacggagaaaagaaatcacctgggcacatagactcttaaaatagccaagtctggagccactcatatcccagtttccatttcattaggttttaatcttcatcatttttagtgagttaaatttggttttctttactcttggctaaaataaccacacgtcctgaattagaggcattg

SEQ ID NO: 100734 - DNA, 402 bp, Homo sapiens
  misc_feature (1)...(402): n = a,t,c or g
tcgaaccaaagctgtcttaaccgaagcattagcctttgaaaatgactagctattgataattcaaaatcatttcagggccttggcttcccaagacacacttaagatattgaactaggaataataagccaggtctgctgctgtctcttcaaagctgagatcaatttttgtttgtttgtttctgaagtaaaattcaggctgggcttggtggctcactttgggaggccaaggcaggaggatcacttgaggccaggagtttgagacatgcctgagcaacaaagagagaccctttctctacaaaagtaaataaatacataaatacaagataaaaaataaaattcacatcacataaaatttaatatttcaacaattttatttgtttgcttgtttttttagtttgagacn

SEQ ID NO: 100735 - DNA, 454 bp, Homo sapiens
  misc_feature (1)...(454): n = a,t,c or g
gccttcggactgacgnnnngtccggattcccggtcgaccacgcgtccggtgttggaaaggatgtggattatggatttccctgtgnactgnnggngggaatggcaattggtgcagccattttggaaaacagtatggaggtgcctcagaaaattaaaagtagaaccaccgtatgagccagcaacccctcttccaggcatacatctgaagaaaacgaaagcagtagctcaaagagatatgtgcactcccttgttcattgtagcattccaacaccatcttttgaaaagactgtttttttcccgttgtgtattcttggcacccttgttgaagatcgcttgactatacatggatgggtttatttcagggctccctattctgttccattggtctgtatgacagtactatactgttttgattattggagctttgtaatatattttgaaatgaagtaatgtga

SEQ ID NO: 100736 - DNA, 404 bp, Homo sapiens
  misc_feature (1)...(404): n = a,t,c or g
acacaatcgaatggggggaggttatctcttaagttattcttccaccatggccaacaacgaaggacttttctccctggtggcgaggaagctgagcagacccctgtgatgcctgtgacctcaattaaagcaattcctttgacctgaaaaaaaaaaaaaaaaaaaaagggggggcccctttaaaagaaccaagtttaattccccggggttggaaaaatataatttttttattggggccccaaaattaaattccggggccggggttttaaaacgggggggggggaaaaacccgggggttacccaaattaatgcctttgggaaaaagggnnnnncnncntancggtgccnnggggttatggtgttagcacttatctacctgaacaacccaaggggatcgtgaatacggt

SEQ ID NO: 100737 - DNA, 410 bp, Homo sapiens
ttttctgttcctgtgttagttagctgataatgatggtttccagcttcatccatgtccctggaaaggacatgaactctttcttcaggaactcttgtaaggcaggcctggtggtaataaaattcctcagcatttgcttgtctggaaaagattttatttctccttcacttatgaagcttagtttggctggatgtgaaattctaggttgaaaattcttttaagaatgttgaatattggcccccactctcttctggtttgtagggtttctgcagaatgggagaaaatatttgcaaactatacacccaacaggggactaatatccagaattttcaaggaactcaaactactcaacaaccaaacagacaatctcatcaaaaagtgggctaaggatatgaatagtcatttttcaaaag

SEQ ID NO: 100738 - DNA, 387 bp, Homo sapiens
cggacgcgtgggtttttttatttggatggagtcaggagtctcgctatgttgcccagctggtcttgaactcctggcctcaagcaatcctcctgccttggcttcccaaagtgttgggatcacagacattagccatggtggcagcctacactgtgtttgtataaacagttcagaattgagtcttggattatctgacaatctctcttttaattcaggggttcccaactcctgggcgatggaccggtaccagtcccagtccgtggcctgttaggaaccagactgcacagcaagtgagcgcccagcaagtgagcattcccacctaagacccacctcctgtcagatcagcagcgggcattagattctcataggagtgggaacactggccacacc

SEQ ID NO: 100739 - DNA, 398 bp, Homo sapiens
gactacaggtgcacaccaccacacccagctcattttttatttttattttttgtagacagagggtctcactatgtttctcagtttggtcttgaattcctggactcaagcaattctcctgccttggcctcccaaattgctgggattacaggcatgtaccgccatgcccatacctggagttgaactcttatgggtctctggctgttttgtgaaggaatcatgagtgttatttaaggggcccattatggcttcgtttttcctcaggatgtttgtagccaatgcaccagacaactgttgctctctctgtccccgccttccctccatactctatcctgaaacagaaatgatttgtttggcttctcctctgaaggaatgatcctcttgacctccccttaacatct

SEQ ID NO: 100740 - DNA, 440 bp, Homo sapiens
  misc_feature (1)...(440): n = a,t,c or g
cctggacggacttcccgggacgacccacgcgtncggaggaaggaaggaaggaaggaaggaaggaatgaaaggaaggattgaatgaaggaaggaaagaaaggaaaggaaggaaggaaggaaggaaggaaggaaagaaagaaagagagagggagaaagaaaggaaggaaactaactctcagtaacaattcatcatctacatattttaacacagtcaggtcaggctatcagatggccctagtctgaggtgcaaccttaaaaaaaaaaagggtagtactatgacaaggcaggggactaataaaacctcaaaatccagactccaaagggggaagccccacctgtaaaagctctactccaggaactgaaaagagcctaatagggaaggttgtcataagactgaccacacctccaccaaaagctatttcattccagggtaaataaag

SEQ ID NO: 100741 - DNA, 431 bp, Homo sapiens
  misc_feature (1)...(431): n = a,t,c or g
gatgttccctannnntggnggannnnccnnnntgttttctacctgcgttggcttcccttagggctggtattataggcatgagccactgcacccagcagggggcccattattttggaaggctggggtgggaggattgcttgaggccgggagtttgagactagccagggcaacatagtgagaccacatctctacatacatacatacatacatacatacatacatacatacatacataagcaagcaagcttgctgggcattgtggtgtgtgcctataattccagctacacaggaggctgaggtgggaggattgcttgagcccacaagtttgaggctccagtgaaccaggattgtgccactgcattccagcctgggtgaaagagcaagaccctgtcattcattcattcattcggtcatttataaataaacaaact

SEQ ID NO: 100742 - DNA, 509 bp, Homo sapiens
  misc_feature (1)...(509): n = a,t,c or g
aaaataatatcttactttcatatgattctttcagactgcggtatggcattctgaagcaagtcttaacagagctaaaaatcacccttacccaattctctgcacttgacatatgtacacaaagtaatattttattattctccttcataaatggtttctttaattgaacctttgagccttatactatttttaaatttccctttaaaaattgaattacagccaggcatggtggctcatgctgtaatcccagaactttgggaggccatggcaggaggattgcttgaacccaggagttgtagaccagcctgggcaagatagcgagatcctgcctctgaaaaaatcataataatactttaatttaggaaaataccctgaattaggaagtgcttcattcctcatttgtgtacagctgttcctctatatacggagggggattnggtacccggnccactgcatncccaattaccaccccatacttcaagtcttcacaggctttcccnggccggaatccc

SEQ ID NO: 100743 - DNA, 768 bp, Homo sapiens
  misc_feature (1)...(768): n = a,t,c or g
ggcacgaggtcggcaggacgcgttccttgtggaggccctggcagaggatctgttccagccttcctcccagctgctggcggtgccggccatgcttggcaaggaggcttggcactccttgccgtgtagacgcgtcactccaggctctgcctccatcatcatgcagccttctatgggtccacgtctccttctctgtttcttagaacggcactcctccctaggnnnnnnnnnnnnnnnnnnnnnnnnnnnnnnnnnnnnnnnnnnnnnnnnnnnnnnnnnnnnnnnnnnnnnnnnnnnnnnnnnnnnnnngcctgcccaggtgcggagggtgagggtatggacagatctttctggagagccgtaactcaacctcctgggtgccaggttctgtgcaggcaccttatgttctgtttcctcctccgtaaatggggacacgggtgcatcccacgaggcttcgtaagcatcagaggagcgggttggggtgatggcctgagcagcgccctgcggctgcaataaacacctgcagattggatggttattcagagcagggcctcattctcctccaaggtgacccagggtccctcttcacaggagaggaaacagagactctgaagctccactcagcctggcgtggtggcacatgcctgtaatcccagctactggggaggcaggcgggaggatcgcttgagtttgaggctgcagtaagccaagattgtgccactgccactccagcctgggagacagagcaagncctggcattacaaaagagag

SEQ ID NO: 100744 - DNA, 420 bp, Homo sapiens
tcgagatccacccgccttagcctcccgaagtgctgatattacaggtttgagtcaccatgcctggcccccagtgaggttttaaaagagaaactcgttctagcaacttaaattgcctttgaggaagacagctaacagaggaagggccagtctaactaggtgtgtttgggcactgcctcccccagcagactgtgagctcctggaggatagtgactgggagaggacgaccccttccaactactctcaggcagctttgcagtgaacatttcttaaagtcatgaaagggtcaggtgtggtggcttacacctgtaatcccaatactttgggaggccaaggcaggaggatcgcttgagcccaagagtttgagaccagccagggcaacatggtgaaacccagtgtctacaaaaaaatagctgggcatgg

SEQ ID NO: 100745 - DNA, 408 bp, Homo sapiens
aatgaaatttgaaatgcaggtagacatttcgtatattactatattgagtaagggtaactgcgatacacaatttatcctgcagcaggagtggctgggataattaactgttataccttatttatcttttactggagacatgtagcccttctcttctatccttagtggtgacaggatgggactgagaagcaggaatgaggatgaggggatgcacctaagatcgtacctttcattttattaattaaaaatgtatggctgggtgtagtggctcatgcctgcaaccctaacactttgggatgctgaggttggaggatcacgtgagaccaggtgtctgagaccagtctgggcaacagggagactcctctctcataaaaaaaaaaaaaaaagagccggtttgggggccccccgctt

SEQ ID NO: 100746 - DNA, 389 bp, Homo sapiens
aaatgcaaatcaaagcccaatgttatatcacttcacacccacaaatatgactgttcttgggtttaaaaaaaatagcagaggttggcaagcacgtggagaaattggaacccttgtgcattgctggtggggatgtataatgatgcagccactttgggaaacagtctggcacttccttaagagattaaacaagctgggtgtggtggtgcacgcctgtagtcccaactactcgggaggctgagaagggaagatggcctgagcccggaagttcaaatccagcctgggcaacatagcaagagcctacctctaaaaaaaagagttaacaaatgactcagcaatttcgctccaagttatacagtgaagagaaagacttgcgtatgaatgttcatgac

SEQ ID NO: 100747 - DNA, 434 bp, Homo sapiens
gaattcccgggtcgacgatttcgtgcaaggggcgagaatcacccccattctacagatagcataccggggctcagggaggtaaaacgccgcttggctaatcagtggtcacacctcaactggagcccaagtcagcctgagtcttagctactctgtggccagcagcgtccatagaaatcggctgccctgttctccctggggccaggtcagcctcagctcagcctgcaaattccagcccttcttaggttctgccaaattaagctgagttttttggccaaatgaaatttagaaacaaacaaacaaaaaagaggctgcgtgtgatggctcatgcctgtcatcctagccctttgggaggctgaggtgggagaatctcttgagctcaagagttaagaccaggctggccaacacagcaagaccccatctctactaaaaataag

SEQ ID NO: 100748 - DNA, 393 bp, Homo sapiens
  misc_feature (1)...(393): n = a,t,c or g
tttcgtcttcggcctcccaaagtggtgggattacaggcgtgagccaccacgcccggccttccgagaggcaggtcttgctctgtagctcaggctgtagtgcagtggtgcaactatagctcactgatcactccaactcctgggctcaagcgatcctcccgcctcagcctcctgagtagctgggactacaggcgctctaccacatccttcagtggcttcttaatgaggacccttgaagcactgccttcttgttcttagcatcagaaatcaggggctttggcaggacaactgaaatggtatagcggctgcagcaaagcctggagtccaacttacgtccacgtctcacaaggtacatcttcataacatgtgccactcctggctcttttattttcctgn

SEQ ID NO: 100749 - DNA, 414 bp, Homo sapiens
tttcgtaaggtcctgggcaggaccggttctaacggactgtgcacgcaggtgcgcgtggaattcatggacgacacgagccgatccatcatgcgcaatgtaaaaagaccccgtgcgcgagggcgacgtgctcacccttttggagttagagctagaaaccctgaggttgcgctgagcttggctgcttgctggatcttggatgtcgcgttcgaccacttggacgatgggaatggtctgtcacagcctgctccttttttttgtccgccacacgcaactagaggcaggagaattgcttgaatctgggaggtacaggttgcagggatctgagattgcaccactgcactctggtctgggcgacagagggatattgtgtcttaagataaactaaatgaaacagaaaacccgctataaccggtg

SEQ ID NO: 100750 - DNA, 472 bp, Homo sapiens
gacgcggcaccggtcctgaaggccacggctcgccccacgcgtccggacagatggaaaatgacatagatagcttggatatacatggtgaaaccccatctctacaaaaaaatacaaatactttccgggcgtggtggtgcattcctgttgtcccagctactcgggaggctgacatgttttagctgtttgcagtaagtcttgctgctgcttgctgtttgggtccacattgcttttatgagttataacactccttgagaaggtctgtagcttcactccttgaagccagtgagatcacgaactcaccaggaagaacgaacaattccagacgcgccattttaagagctgtaatactcaccgtgaaggtctgcagctttactcctgagccagtaagaccacgaaccccacagaaggaagaaactctgaagacgtccgaatgtcaggaggaaccaagtctgaccacactgcttttaagaac

SEQ ID NO: 100751 - DNA, 393 bp, Homo sapiens
agaagaagaagaagacaggtcggtttaagcttgtggatgcagtacaaccggcgctttgtcaacgttgtgcccacctttggcaagaagaagggccccaatgccaactcttaagtcttttgtaattctggctttctctaataaaaaagccacttagttcaaaaaaaaaaaaagggggcgccttttaaaaagaataaaattttacacccgctggggggcgacaaaatatttttttataggggcccttaaatttaataatggggcgggcttttacaaaggcggggggggggaaaaccctggggtccaccaactttaatcccttggaaaaataaaacttttcatcatccttatctcttatacaattaaccctaaatactaccgtttccctgctgctcg

SEQ ID NO: 100752 - DNA, 410 bp, Homo sapiens
  misc_feature (1)...(410): n = a,t,c or g
aaacagggctgggctgggctgggggatttttctattttcaaaatttcttctcccccctttcgaggaacctcttcttctcattttgttgtttcttttgtcgatcttatcagaggaaccaggactgagactgctgtgggatgttcagaaagttgccgtcccggggtccgatgctgacaaaccggttggcagaggaggcgcctgtcgttgcgaatgctgtggggagcaggggagagagggagagaccctgtcaggccttggggcccacctgggcactgcccctcgggngggtgctgacagagggagagactgagttagaccatgctgcccgagtttaggctggcagtgggaaggatgggccagaggggcatctgaccttaaggccangctccgagcctgccccccactacagg

SEQ ID NO: 100753 - DNA, 371 bp, Homo sapiens
aatacagggggcacaaaatgttattcaagtttaatatttccatcatctatcactattattaaagtttttgcttgcaagtatgatggttttcttaacagttgtggtaagacttctagaattactttttttttttttgggggaaacagagccggcctttgtggcccaacccggaagggcaggggccgaatctgggttcactacggcctcacttcccaagtgtaaagcatttccccggcctcacccccccgagagctggaacctccgggttggaccccccatccccggctatttttggattttttaagaaaaaacggggttccccctgtgggcccgggcgggcttggacccccggcccccgggggggccccccg

SEQ ID NO: 100754 - DNA, 383 bp, Homo sapiens
actacactggcccggcgtggtggtctatgcttgtagtgctagctactgaggaggctgaggtgggaggatcgcttgagcccaggagttcaaagctgcagcgagccaccattgcgccactgtactccagcctgggcaacagttagacagtgagaccctgtctccaaaaaaaaaaaaaaaagtccccagggggttttccggcccaaaaaatattccggggctttcccttttcacggaaaaaaagttttccaaggccctggccatttttttttttcaagggctccctgaccccggggcaaaataagttaatttccgggttaaaaaaccggtgaaggccccctggaagttttttattaaccaaattagttaagtttttttcggtcttg

SEQ ID NO: 100755 - DNA, 378 bp, Homo sapiens
acggccgtcacggtcgatccctaccattcggtctacatcgaggtaaacgcgcgtccgggtgcatgcatgaacggtggtggcctactcaatggcgagcaaaacagtctcaagcggaagcagttggttcagacactgaataagcgtcacggagaggagctagcaatggtagattctctaaccctgggacccaagctagaagaggcggcagtccgcccgctttcgctagagtacgtcttcgcgcccgtcaagcttgccgtcgaaaaggatctcgtctttgttgggagcacctggtaagtaaggtgtaggtttgcacccgtggtcataagcgggatattaccacaatctgtgtgtacctattcatactggacattttaatag

SEQ ID NO: 100756 - DNA, 381 bp, Homo sapiens
aataccggcgtgtgtctagaaagaatgattatacttaaggagttcttgagttcaagagaacttcccacaaggaggtggtgggccaagaaatccacctgcctgcttggtggcggctcgtgaaggggcaaggccgacaatcttctgaatgttctgtccgaatcgacatagtacagaaaatatacaggaaaatgaaggaacagtctgtggtgtcatctcccatcatatttcgatgagacagtccttggatgtacgaaagagggggaaaaggaagctttgccaccactctaccataaaatatggaattgaacattcccattagggcagtaaaacacaaggcaatagctaacatggatttcattcgaaccattgatagatctctgg

SEQ ID NO: 100757 - DNA, 464 bp, Homo sapiens
aatacagtccctgtatactatgaacaaatgttaaacacctaatttttttttttaattacatgagatgggactgtgcacataccactatgcctagattgctaatggttatttttaatacatactatacagtaaccaagactcattccagaacaacaacaaaaaagttaactgtttaaataatcaacggcttttttttttttttttttttttgaaaaaaaagtctcctttccccccgggggggagggaggggggccattctggccccagggaaagatttccccccaaggtcccgaaatttttctggcttaaccccccggaaaaccgggaacaaaggggcccccccccctgcgggggcaatttttttttgaaccaaaaaaaaggttttccccgggggaacccagagagggccccaaggccttaatttttgaaaacccacaccctttatttgtgccccctgtggggaa

SEQ ID NO: 100758 - DNA, 378 bp, Homo sapiens
aatacaggggttcaaaactttatcagaggaagtatctgcagatgaggtagaaatagtaagggagctaggactacaagcggagactgaagatgtgactgaattgctgcatttcaacagcactgcatgctgcagagaaatctttcatgaaaggaagagacagcagatgcagcaaacctccttggtatctcattttatgaaaactgctacagtcaccccaatcttcagcaattgccactataaatcaatcacagccatcaacattgaggcaagaccctatgccagcaacaagattacatctcactggaggcttagataatcattaacattttttttttagccataaagcattttttaattaagggatatacattgttttta

SEQ ID NO: 100759 - DNA, 703 bp, Homo sapiens
gatttggaactattccacttgtgttatgtgcagatcttaattctttgccagactctggtgttgtagaatatttgagcacaggtggagtagaaacaaatcacaaagactttaaggagttgaggtataatgaaagtctcacaaacttcagctgtcatgggaagaatggaaccaccaatggaaggatcactcatggtttcaagttacagagtgcctatgagagtggcctgatgccttacacgaattacacatttgatttcaagggtataatagactacattttctattctaaacctcagctgaacaccttaggcatcctgggccctctggaccaccactggctggttgagaataacatcagtggctgcccgcaccccctcatcccctctgaccacttctcactttttgcacaactggagctcttactgcctttcctgccccaagtcaacggcatccaccttcctggcaggaggtagtcaagcaccttcagaggacagccttgattcacttgtaaacttgtgaaaatctgaacataggggagtgaggtatggccactgaggatttttggcttgcttaaagaatgatttgggactttcaatctgattaattttgataagggatatagtattgaaaagccaggtgctagcaacagacaaattctgagcccaatatgctttatactgctagacagggattggtgtgtttg

SEQ ID NO: 100760 - DNA, 1119 bp, Homo sapiens
tttttttcacttttacaaatttaatataaagcaagtccagtcttaaaaagacaaaccatatcactccttgctgcggcaccctttctgggccaggtctcgctgggaggtagaagagggcgagctggagggggaagggacacactttgcccagtgacactgagcaaagcccacaacagtggccccatggctgccactttgaatcccaagggctcagaagtacccagcaaggcctggacctccaggcagggcgcacgggtgaacgagcagaggctctaacagtctgtgggggaaggggacagaggtgccaggagatgccctcagggttccaggaatcgctctgacacaaagtcgaagtcccggaaggcggcctgttggcgggcagtgaggaggctgtggggtgcaggtggggtcagggcaggcggcagccctgtgaaactcgccctcaaagtagcgcaggtccgcagggccacacagggtaggcacgaaggggggctggatggtgcgggcgagcagggcttgccagttggtgggcctgaaaaatggctggaccttgatctcctcggcattctggtcacctgccccgaggggcttttccgggcacttttggaggagcttctgaatgaacttcagccccttgcaccgacagaaaagccggggtagggggccgtccatgtagacgaatgcagtcaaacacctcttcctctgtgtcccctgggaacgggcactcacccaccagcatctcgtagagcagcacacccagcccccaccagtccacagcccgtgtgtatgcctcctgggtcagcacctcgggagccaggaactccggggtgccacagaaggtgctagtccggtccccgaagccgatcccttccttgcagagtccaaagtctgcgatcttcaggaatccctgggcatccagcagaaggttatccaacttcaggtccctgtaaatgatcttcttctcgtgtaagaactgcagccccaggacaacacaagccacgtagaagcgggcctggggctcggggaagacatcctcgtggatctgcatcatggggtcaccaccaggcacaaactcagtcacaaagcaggcatggctggaggtctggaagcaggacgaaa

SEQ ID NO: 100761 - DNA, 475 bp, Homo sapiens
  misc_feature (1)...(475): n = a,t,c or g
aatacattggctgattggatgtttttaacaaggagaggtaggagacaagggagtgtgagacagactcccagtatgaccagaactattcctactaaggtcttaaatcttccaagggacgaaaaccagcccccaaagagggtatctggagaccatcctttccaaatttggactgggacatgggctaatttttgaatttttgcagttatatcttcaatgaccttcctattgtcatcaatttctaggcaacaattagtttaaagtttccgcatacccctccttctaacatggatagagggagtagcaagaacaaagtaaggaatagtatgttcatacccagcatggacaacagaggtccttatccaggggaggaggttgagcacagtgacaggttaatagtanaacaattaagattacaaggaanattactgggcttaagatttctaactacatttacttcctagatganacttcgctn

SEQ ID NO: 100762 - DNA, 412 bp, Homo sapiens
aatacattggtgtagtggtgcgcacctgtgttcccagcttctcgggaggctgaggcaggagggcggcttaaacccagaaggcagagggtgcagtgagattgcgccactgcactccagctgggatgacagagcgagactccatctcaaaatcatcatcatcatcatcatcttctacctttttttctcagatactctttaacttcaattaaacaaatattaatatctagtaaaataatcataactcactctatttttgtaacacattcacttcaagctaaaagcagtgtaaggatacaccactatctagacatttctctaatccaaattgcttaggaatatgtgccaacaatagcttggaaatcgagtacctatgttttacgaaaataaatggcaataagaacaaatacattcg

SEQ ID NO: 100763 - DNA, 1190 bp, Homo sapiens
ttttttttttaactgaactctctcaagaaaatgttttatgaaaaatttcatttatagttttttccataggcagggagttttaagggatggaaaagttttcacaaactttagacaatgaaactatacttttggatgtatgtgatcaactcaacagttcgttgacaacacaaccgaacatcagaaactaaaccagcaaataggccacaaaataagccaagtgggttaaataagttgaaaattggttagaaaaacatgcaaaaataatactgagttttcttttaaaaagttttaaaccgtcattaaatgtttcccttttgtagaaatctgaagagttctgcgtctgaatttgaaatttggactttataaagcctagaaaacagaggaggcggtgccctgcccttggtcagttgttgttctctttggtggtgatggtaaccagctgcttggcagccttggcgaatggtcgtacgcacactgggatgaccctgctgcgtgaccagctgaacgtctgtgggtgagccggggtcccctgggagggtcttcttgcactctgactgcagtcggtaggcactggacgtcagtaaacgaagggaagtcctcaccatatcagacttgggttttttggggaataatgctgccatttctgtaacagctacgtgtatcctctctgagcagggaatataactgtcatgtttattttcttgggctgctcttaagagctcctgtatgtttttggtgatctgttcagtcttcctgatgacatcttcggtgctagggagagtggggcttggggccacatggggttctgctgtgtctggtaccaagccatcccctggccacaccatacttctttgccgtccctttcggcttgaccccatgccatctggctccatgtcgttgggagtgttgtcgtagtcactctcaggtgtgctgttctgcttctccagcctggatgcccttcgggcgctttcgtccctcgaccaggaaagtgtggaggggaaggaaggcagagatgaagaggaggtcacaagtgcactcctcccgatgtgcgcggggaagggctggagtctcatcctgctctcttcggggcggctcgcttctcccattgggagatatggtttctgacctgatccggtctcgtacatggacatgggcctactgccccgggcagacggacgtctctttaagga

SEQ ID NO: 100764 - DNA, 429 bp, Homo sapiens
  misc_feature (1)...(429): n = a,t,c or g
ccgcaatacacctggctagtttgaaagttttttatagatacagggtcttgtctctatcaaaaggctggtctcgaactcctggcctcaagtgatcctcctgccttggcctcccaaagtactgggattacaggtataagccaacatgcccagcctgaaattgtttttaaaaattattttttctctcttataagtcaagtgcagaacaaaaagagctaaacaaacgaaaacacaacagcaaaaatctctgaataagtagctgttggcaactttactataagtagctcttggcaactttactatatgactgaggaagaaggacttgatttaggtcactttttagtgaccttgagcccacccaccctccttgtccagagagggtcccagagcacagagcagtatgtctcttgaccgggccacctgctctttgtn

SEQ ID NO: 100765 - DNA, 406 bp, Homo sapiens
ggggtatcgttaagttttttttttttttttttttgacaaagtgtcgcactgtcacccaggctggagtggagtggtgcagtctcggctcactgcaacttccacctcccaggtttaagcagttcacctgtctcagccccccggttagctgggactacaggcacctgccaatatgcctggctaatttttgtatttttagtagagacagggtttcatcatgttggccagatgggtctcgaactcctgacctcaggttatccacccacctcggcccccccagatgccgagattacaggcgtcatccaccgcacccagccttagcttggggttttttgttttttgttttttgtttttgagatggagtctccagcctgggcaacaagagcaaaactctgtctcaaaaaaaaaa

SEQ ID NO: 100766 - DNA, 528 bp, Homo sapiens
aatgtcacgaagttgatgcaatgaaactcacacatctcactctgagccagttgactataactttcccagcccttgatatattggaagattagaggggaattgccagaagtaaaccaactgtctgctgaaagaaaaagaagatatcgaataacttggaaaaatgggtacttagtgcggtggcaaaagccaaacacacccctgagtcttcagagctcagagtaatggtggggtgaaactgaataggttaaatgaaggtcctttgtccaccgttttaaaaggtagggttgcctgggcacagtggctcacacctgtaatcccaacactctgggaagccaaggcaggaggattgcttgaggccaggagtttgagaccagcctgagtgacatagtgagactttgtctctacaaaaaatgctttgaaattagccaggcacagtagcatgcaccaaggatcgcttgacttgagcccaggagttggaggccacagtgagctatgaccatgccactgtactccagcctgggtaacagg

SEQ ID NO: 100767 - DNA, 434 bp, Homo sapiens
aatacactctttgtaagagcaagaaagacataaagagtatatatcacattatgactctttaaaaacacacacacacacacacacacacacacacacacacacacacaagccttctacaacctttagttacacagaaacttttatcatgtgacaacaaaattcaagacataaggaagctcgcacagtgacccatataaatctcccaggtgagccaccagctttaacatattcatattcacctaaacatgaagaacgaggggttcagacaggcccagatgggtctctttcaagaccctccctcccgttgatgcagcgttaagactccgtttaggcgcagagccgcttcccattaaaactgcatgtgctagcaattactgcaaaatccacaggtggggggtaatataaatggaacttgagctctgtccatcagggag

SEQ ID NO: 100768 - DNA, 539 bp, Homo sapiens
atgcgcgctgacgtaagattgtagccagtagagtcgtcgcactacacggcgtgtgtgtgtctcttacttatatccccaacccgtttcgtccaggacgatggctgcaaccaggacagccccagcaatggagtcaatgatgatgttggtgccgctgggacctttatatctctccgtctcccccgtgggtggggacgtgggcagggggttatggatactgcagtctttgcctgtccagtctggctgacagatgcacttcccttcattgctgcagacctataggcagggcagggccaggagaggtgagcaggggcctgtcccctcttgtaagcttctcccgccatcccaggctccaggcagtcaccccgtggtgggagcaaatccggcgctccccactgtcggtgcaggtgctgaagttgaaggccaaagctggcaagcagagatggtccagggacaacatggtaggtccgcaggctgtgccatcctccacataagtcagggcagagccgtcccccacctggacgtgggctcctctgcaggcg

SEQ ID NO: 100769 - DNA, 511 bp, Homo sapiens
aatacatgcattgtttaccaacttcttataaatgggatggactttgttttgaagggtgttacccactaaagtataaggcatttctgggatggagagacctatattctatgtcaagattccctgaggatcagctagggtagatggagatggtaaaggggttaaagtgtcagtgggaccaaatgagcatccaggttcttctccccaggaaatagccctcaccgcacatgtgcccctcgcccagccaccctgcctcacacagtaatgtagaacttgttctaggtcagagaaagcagctgagggtctctggtccttagaaacctgggtcccaggtagagagacccagaagatgggtagatagatagatagatagatagatcgatagatagatagatagacagataatatgctgatagacagatgatagatttcttgatagatagaatcgatacactaattgggcaggtagatgattcgatatctaggttgacccgatgttttttgattcgattcg

SEQ ID NO: 100770 - DNA, 501 bp, Homo sapiens
  misc_feature (1)...(501): n = a,t,c or g
acgaagctagagtcctctanaccggccgcaatacacggctgtgacaatggcatttacaaatgacagtgccagttaccgtacaaaatgctttcccacgtcctgtcataggtgcctcacagcaaccatgcgaggtaggcatgagtattacaatgaaacctacacggaacattacatgatactaaacatgtgcaccatccatgtattttcttctggattgttctataattcgaatgcacggctgaataagtaaaaagagtattcctatcatgtatagcaaaccacatatgtagaaggaaaaatcatatttttgcgtgatgtcatagatccaccctgcaaaaggtggtcccagcaatgcagaaatgccattaacacagatgatgatgccgtaagcatttggcaagtgttcaatgccaaccaagtctcagtcactacgggcattatggagaaataaccactgggaaaccctatcagggcacagatgaacgccaggcagcgtacgtg

SEQ ID NO: 100771 - DNA, 444 bp, Homo sapiens
aatacatggctgctctggagaagtcaaaaaagttatcttcagataacagatcagctggtggggtgattgcaccccatttccaagagactgggttagtgagtgcatctctgtgaggaataagtagaaacaatctggaggactctggagacgttcagaggatgacagggaatccagagcaagctgttcacctcctgggagagggggaggcccacagaacactacaaccagtggggtgcagtgtctcacatctgcaatcccaacactttgggaggccaagatgggaagatcacttgaggccaggagttgaacaccatactgggcaatatatcaagattcctgtctttccaaaacaaaaaaaagtagccagcttggtggcgacacctgtatcccaatacctggaggcagaggacacttggtttagagccaggctccggacccggaggg

SEQ ID NO: 100772 - DNA, 419 bp, Homo sapiens
ttcccattcgtgcaaatttgatcaccagattgcagcatatctttcacatcttcaggttccacttctatttttcaaagagacagggtcttgctatgttgccctggtctcaaactcctgggcttaagtgatctcagcctcaaagtgttgggattataggcatgagccactgcacccagcccatgttccacttctaattctagttctcttgctatttccaccacatctgcagtgacttcctccactctagtcttgaacccctcatagtcatccattaagggtggaatcaagttcttccaagctcctgttaatgatattttgaaatcctccaatgaatcacaaatgttcttaatggcatctagaatggtgaatcctttccagagggtttcaatttactctgcccagagtcatcagaggaatca

SEQ ID NO: 100773 - DNA, 565 bp, Homo sapiens
atcagttgccttttacatactgggtccacataaggactgtgctatagttagattgtcaacatcacatatagtgtcctggtcaggctgcaactctctccaaagcatgctcttcacatgctttagttcaaaatgagtcattatatctgattgctgcgtggcaggctattctgctagtccttcctttcacatcccatttcagtaatggtgcttgaaattgtgcttcggtgtgtcttataaactttggtctgagagtcacttaagagaaagggctgactgtagtggctctcaccagtaatcccagcacttggggagactgaagcaggaagattgcttgagaccaggagtttgagaccacccccctggcaatatagcaagaccccgtctctgcaaaaaaattaaaaacttagccaggcatagtggcctgtgcctgtgagtcccagctactcagtaaggctgtggtgggaggattgcttgagcctaggaggtcgaggctgcagtgagctgtgatcttgccactgtactccagcctgggtgagagaggggaccctgtctcttaaaaaaaaaa

SEQ ID NO: 100774 - DNA, 402 bp, Homo sapiens
aatacactgtgcaagcataaacattcatatatactaatgaaagttgcataattatatcagtaatgaacagacaagccatattcataaagaaataggtcataaaggggctgggcgcaatggctcatacctgtaatcccagccaaggtgggaggattgcttgagcccatgagttcaagaccatcctgggcaaaacagtgagactccatcacaggaggctgaagtgggaggattacttgagcctacgaggccaaggctacattgagctgtgatcacaccactgcattccagcctgggcaacaaagtgagactctggattacttgccagagacaggaacttccgttcctttagcaagctgtagctcttcaacagattttctgctctagccagtttgtcctctgcta

SEQ ID NO: 100775 - DNA, 461 bp, Homo sapiens
ctgtctgttgttttagagatagggtctcactctgtcacccaggctggagtgcagtgggtgcactccagctcactgcagccttgaatgctggggctcaagccatcttcccgcttcagccttccgaagtgttgggattacaggcatgagccatggtgcctgcctggcctcctcaggttgaaatttgatcccagtgttgggggtgtggcctaatgggaggtgtttgggtcatgaggacggattcctcatgaatagattaatgggctccctggcgagtgaatacatccttactgtatcaggtccttgtaaagctgattgtttaagaactttggacttggcacattccccaatgtcttgcttcctctttcaccatggaaatttccttatgcaaatgggttttgcctttccccttagccgaaacatccttaggctctttaaaatcccaaactttcaaaatggggacc

SEQ ID NO: 100776 - DNA, 400 bp, Homo sapiens
atgagaaaacgccagtaagtgacagaggggccaagggctgcacagaatccttggtgaacaggcgaccatgcttttcagctctggaagtcgatgaaacatacgttccctaagagtttaatgctgaaacattcacctttcatgcagatatatgcacactttctgacaaggtaagacatttcttgaaaccgatagcactagtcatacttaatcatcacattttctagttatacttaaatctactgatatgtgatttctataaatgatttatgatttttatgatatttctctttactctatatatcataatttctattctttatattttagatctatgatgtcttctcattacttaaatttatttactttattaatttaatttgtgagtcataagagagttctc

SEQ ID NO: 100777 - DNA, 437 bp, Homo sapiens
  misc_feature (1)...(437): n = a,t,c or g
gagagctagcgaaaccacaacggtgatgaggacgacagtcacgtccgggcccagggggcctgcattgaggccaaacacgacaagtacatggcggacatggacgagcttttttctcaggcggatgataacaggaagaagcgagacatccccgactacctgcgtggcaagatcagctttgagctgatgcggcagccgtgcatcacgcccagtggcatcacctacgaccgcaaggacatcgaggagcacctgcatcgagtgggtcattttgaccccgtgacccggagccccctgacccatgaacagctgatccccaacttggctatgaaggaggttattgacgcattcatctctgagaatggctgcgtggaggactactgaggttccctgccctacctggcgtccttggacacgtgagccctgggcaaaagcccccggcn

SEQ ID NO: 100778 - DNA, 413 bp, Homo sapiens
  misc_feature (1)...(413): n = a,t,c or g
agccgtgctactgatcatgtacagagacaggggcatgggtgaggaattcacaactactcagactgggaaaatacagattggttcagagaaaccaaaaaccagagtgtccctcttagctgctgcatagagactgtcagcaatggtaatggcagcctggcccacccttacgacctctatgctgaggggtgtgaggctctagttgggaagaagctactagaattcatgatgcatgtgatctgggccgaactggcatttgcagctattcagctgctgagcatgctgagtgcttgcatcgtgatgtgcagaaagagtacagatcctgcttacgagctactcatcactgtcggcacctatgcctagttgacagctaaagcctgagctttttggacttcgtgtcatttggaaggagaatn

SEQ ID NO: 100779 - DNA, 496 bp, Homo sapiens
ggcataaggtaaggttagaggtttttgttttttgcatgaggatattgggttatttccagcatcggttgtggaaaagattattttgccattcaatttctttacatttgttaagaaattagttgactatatatttatgtgggtctatttttggtcttttttgagatgagtctcgctctgtcgcccaggctggagcttgcagtgagcagagattgagccactgcactccaccctgggcaacagcgtgagactccatctcaaaaaaaaaccaaaataagaaagtgctttgattacaggcatgacccaccgtgccataccatactttctttatccagtctgccattgataggtgtttatggtgattccatggcttttctattgtgagtagagctgcagtgaacatgcatgtctttggatctttatgatagattaatttatattttttggggtataaacccaattatgaggtgcctggctcaaaagggaatttctggttttg

SEQ ID NO: 100780 - DNA, 380 bp, Homo sapiens
gaatcatcatgcgactggctgaatgcctatttaactctcgtgagatgtgcccaggattgagcggactattttgctgaacgtctgtacaagtcgatgaagggtgcggggaccgatgaggagacgttgattcgcataatcgtgaccagggccgaggtggaccttcatgggatcaaagcaaagttccaagagaagtatcagaagtctctctctgacatggtacgctcagataccttcggagacttccggaaactgctagtagccctcttgcactgagccatgccagggcactttgttcacagtgtggatccacctttgttaagagcccattccaaatcaaactttctaatgaaactttctgaccaaaaccctttttatttccg

SEQ ID NO: 100781 - DNA, 1371 bp, Homo sapiens
acttcacatttaccagtcacttggcgggagggttggacggccatccccaaggaagacatgaggaagacgttcagggagcaagggctcagaaatggaagctcaattttaattcaggattctcatgatgataacagcttgttgaccaaggaagagaaatgggtcactagtatgaatgagattgactggctccacgttaaaaatttatgccagttagaatctgaagagaagcaagttaaaatatcagcaactgttaacacaatggtgtttgatattcgaattaaagccataaaggaattaaaattaatgaaggaactagctgacaacagctgtttgagacctattgatagaaatgggaagcttctttgtccagtgccggacagctatactttgaaggaagcagaattgaagatgggaagttcattgggactgtgtcttggaaaagcaccaagttcgtctcagttgttcctgttttttgcaatggggagtgacgttcaacctgggacagaaatggaaatcgtagtagaagaaacaatatctgtgagagattgtttaaagttaatgctgaagaaatctggcctacaaggagatgcctggcatttacgaaaaatggattggtgctatgaagctggagagcctttatgtgaagaagatgcaacactgaaagaacttctgatatgttctggagatactttgcttttaattgaaggacaacttcctcctctgggtttcctgaaggtgcccatctggtggtaccagcttcagggtccctcaggacactgggagagtcatcaggaccagaccaactgtacttcgtcttggggcagagtttggagagccacttccagccaaggtgcttctgggaacgagcctgcgcaagtttctctcctctacttgggagacatagagatctcagaagatgccacgctggcggagctgaagtctcaggccatgaccttgcctcctttcctggagttcggtgtcccgtccccagcccacctcagagcctggacggtggagaggaagcgcccaggcaggcttttacgaactgaccggcagccactcagggaatataaactaggacggagaattgagatctgcttagagccccttcagaaaggcgaaaacttgggcccccaggacgtgctgctgaggacacaggtgcgcatccctggtgagaggacctatgcccctgccctggacctggtgtggaacgcggcccagggtgggactgccggctccctgaggcagagagttgccgatttctatcgtcttcccgtggagaagattgaaattgccaaatactttcccgaaaagttcgagtggcttccgatatctagctggaacccacaaataaccccaggaaaaaaaaaa

SEQ ID NO: 100782 - DNA, 469 bp, Homo sapiens
gtcatctgtaaaatggagaaaataccagtgctttttagggttgccaacctaataagcattattcctgccccaaataagtccaggctatgtggaaaaacgcgaatttctcgttcagcaaagagtaaagctaataccagagttttcctggcctgcagatttggcctggcaggagacaatgccatagccaatgttcatgctccagatgcagacctggaggcacagagtgatgtagagaggacaatggatctgaagccatgtatctgggtgccagacacgctgggtgaagccgagcaaaccgctcctgcagatagattgagtatgcacacccagcactttgggaggccgaggcgggcggatcacgaggtcaggagaccgagaccatcctggctaatatggtgaaaccccgtctctactaatacaaaaaattagacgggcgtggtggcgggcgcctgtagtcccaggaggcgga

SEQ ID NO: 100783 - DNA, 429 bp, Homo sapiens
agctgggaccacaggagtatgccaccacacttggctaattaaaaaaattttttttctagagatggggtatccctgtgtagcccaggctggtctcgaactactgggcttaagcagtcctcctgccttggcctcccagagtgctgggattacaggtgtgagccacggtgcttggccagtttgttcttttttatgactgaaaaatagtccattgtatggacataccacattttgatcacccattcatccactgatggatatttcagttgtttttgctttgggactattgtgcatagtgctactatgaatgcttatgtacgagtttttgtgtgaacatatgttttcagttctcttgggcatattcctaggagtagaattactgggtcacatgataactctatgtttaactgtttgaggaactgccaaactgtt

SEQ ID NO: 100784 - DNA, 412 bp, Homo sapiens
ttaaaaaaaaaattatttgtttagggtctgtccctcccagtaaactgtagcttctaagacagactttgtttttgttctctgctatattgctctattcccacgtcctaaaacagcgtctgaaccatagaagtcactcaataattttcttttttttttttagtaattctagggacccgactcaataaatttttttaaataaatgcatgaaaaattgacaaattgtaccaagtccaaaaaaacaatagcaggttactgaactgccacatcaaataaggaacccttgaaaaaagtaagatgtttaatctggagaaaaaaagattgctgggcccgggggttcacagcctgtaatcccagcactttgggatgctgaggaaggtggatcatgaggtcaagagatcgagaccatcctggc

SEQ ID NO: 100785 - DNA, 811 bp, Homo sapiens
cccttgatcagtggggtggttcacccttgtaatcccagcactttgggaggcagaggctggcggatcgcttgagtccaggagttcgagaccagcctgggtgaactggcggaaccctgcctgtactaaaaatacaaagattaactgggcttggtggtgcgagcctgtaatcccagtggaggctgagacaggagaatccttttgtaatgcctaaccttgtttttttactaaccctatttttaaattttccctttttgtctccttaattacctagccttgtttcccatatgagtagactctcccttagctgggaaagcctgacgaacgccatctggccccttgatttacaagacattaagggctacttacccaacccccttcctcaaagagttaacctgcgtaagcagatcctcagcatttcaaaggagcccaattagctgataaggtactggaacaaacaatgtacgaagttcccaggattttgctcaaaagcataacaacataaagccttgagtctgtgtctggcatagcatccatatctaactcttatgaaggatttagagcccggcacctggttccgttgctttttttgtaaccatttgtcttttaaattgtttatttctctgtaaccatttgttttttgattcttgcatgtttttacttctgtagaattattgcatttgagctccgctccccttccgaaccaaggtataaaagtaaatcaagccccttcctcggggccgagagaattttggaaagtcaagccttctcttggctgccggcttaaataaaggactcttaattcgtaaaaaaa

SEQ ID NO: 100786 - DNA, 434 bp, Homo sapiens
atacgggataatcctatttattacctcagaagtttttgtcttcgcaggatttttctgagccttttaccactccagcctgggtaagaagatctcaaaaaaagaaagtgtcatcatctactagattggaaatatcagatattcttgagtctttcttctccctcatatacagttagtcatccagttcttcaaaatctcgttgaaatgtggcttcccctccagccagtctactgcctatcagtacttacctgtctgtgcattagcccccaccgacctctatcccaccagcatctccctgtggcgcctgtgcagtctgctgttggtcaccttcctcatcagaacaagcctgagtgtgccacactcctctccagaagccctgtggtcttgatagagagaggcaaatagggtggctcaaagaacagacttgaactagactg

SEQ ID NO: 100787 - DNA, 600 bp, Homo sapiens
gcacgaggagaaatcagatgtctaggtttgaatatgtgatctcccagtttaaaaatgtcggcaaatatttccaaacgttaagaaaatgatctggctcctttaaagacatctgccagccacatttccccaaggaccgcggtttgaaccttctgatgtagatgagctctgacattggaagattctggagtctgacaagtcacagcaggttgagggtagggagaaactgcaggtgaggggtgcatgctgaagtcctgatttctccaggtccccaggatcggctgagagccctggtggtgatccccatcatcttcgggatcctgtttgccatcctcttggtgctggtctttatcaaaaaggtggccaagaagccaaccaataaggtaggtcacccctgagaacccgggacagagttttgacaaactgggaagatggcctcacggttgcctatggggcagtaaaactgattcagagtctgtctctgcagccagtggggtggcagcagaattggggactgtcatccccacccaccatgctccttccatccagagctcaatcccccacagaactgcccctggcaccactggcagagcctaacactgg

SEQ ID NO: 100788 - DNA, 436 bp, Homo sapiens
gggtaggggccaagaggatggagagagatcagaacttgtggtagataaaaaccagaaataattagtgagtacttatctgtgagagtgagagagaaggtcaagccaaaggtaattcccatgtgtcttggttttgattgtttgtttgttcgttcatagaggcagggtctcaccatgttgcccaggctgatctccatctccagggctcaagcaatcttcccactttgacctcccaaagtgctgcaattacaggcatgagccaccatgcccagtcccgtgtatcttgagtggagtcctgggtggatggtggagaggcccctggggtggggaacacagcatggagagccagtttgagggacaggatagtggactcagacacagccaagtggggcccagcagacacttagatcctggagtccagggctcaagaagagaattg

SEQ ID NO: 100789 - DNA, 433 bp, Homo sapiens
aatattaaactgggatattaggggcccctggggtccagaatcttgccaatgaagagaagggcccctgtgtctgagtccctcagtacgaagatgaaaggctggttaaggtgatagtccagcgggaaggtgaggtgggcaggctgcagccctgggctgggggtggttcccgccccatcctcgttccactcaaagccagcccggtgttccacctgagtcagcttgatgggtttgcctgtgatcttgctaaagtctggtgaatcaaacaaggattgcagctctgtagagatggatagagatttccgttaaaaccctgcctttcccaacaccctaaccaagggatccctttgcaagcaagctggtatggcgcagcacttgtgactttctttgaggccttaaaaggctgaacttaccaaggtgagttgcttgccatgag

SEQ ID NO: 100790 - DNA, 312 bp, Homo sapiens
gagagagccaccacaccactccctggctaatttttaaaaattttttgtagacaagggtttcactttgttgcccaggctggtctctagctcctggcctcaggtggtcctcccgcctcggcctcccagagagctgggattgcaggcatgagccacagtgcccaggtgatacccctatcatttcatctcaaccatttagctgcacccatcctctagctccacgcctaccagattgtccataaaaaccctaacctgcaagcctctggggagactgatttgagtaggaactccatctcccacggggctggactcaca

SEQ ID NO: 100791 - DNA, 444 bp, Homo sapiens
gccgagggatttcgtatgcacgctcttgtttctcaggctgcctgcggaacaagtggctataaattatctgttggctacatggtacaaggcccattgactcatctgatgcttggtttgttaatttctttaatatttttatcacggggcagtggcaggacttgggcttttagccacagctagtataagacttctgatctcctgccctgccggaataggcgggaagtcattgaatttttacactataggaatttgcattctcacatatgtttgagtgttacgaaaacattcctttaaagggatctgcgctacgcaaaatatgccacgacctgacagactaagccattgctagacatgtcattcccatgatcagatctggaaacaggctgccataaccacttttacttcttggacactcagctcaactggaatgtaaaccggttctgg

SEQ ID NO: 100792 - DNA, 419 bp, Homo sapiens
gcctccagaaggagtgtggtcgaggtcctgccaacaccttgatttcagtttagtgatactgatttcagatttctggctcccagaactgtgagaggctcaaatgatcctcccacctcagcatcccaagtagctggaactataggtgcgtgctaccacaccaagccaattttttatttttatttttgtagagatagagtttcactctgatgcccaggctggttgaaactgtgttgttaattcagaactctcccacaaagatagattctagcccggatgacttcagtggtaaattctatcaaacacttaatattgtttttgaaaacataagaagagggaacacttccaacttacttcacaaaaacagtagaatcctgataccaaacttgacaaagacattgcatgattagaaaatgactgag

SEQ ID NO: 100793 - DNA, 429 bp, Homo sapiens
  misc_feature (1)...(429): n = a,t,c or g
ggacacggtcctggagcggagcggccagggcacggcggcactgccccggagcaccagcctggaccgggactgggccatcaccttcgagcagatcctggcctccctcttaactgagcctgccctggtcaagtactttgacaagcccgagtgcatgatggccaggattaccagtgcaaaaaacatccggatgatgggcaagcccctcacctaggccagtgactatgaaatctcggccatgaccggctgacacgggcgccttcccgggggagtgggaggagagggaggggaaggtttttaattggaaacctgccccaaatgttggattccaccatccaggtgcaccattgactagatgacgcacagaagcctggcgccttctttttgttgaaagatctttttagacccggatctattagaacccaaccttcn

SEQ ID NO: 100794 - DNA, 956 bp, Homo sapiens
ttttttttttttagtggagacgggtttcactgtgttggccaggatggtctcggtctcctgacctcgtggtctgcccgcctcggcctcccagagtgctgggattgcaggcgtgagccaccgcgcccagccggctctaagattcttaatgttagagaaccgaatgtgttaggaaacagttggaaacgatgttccacatccttgagcactcctagtccaaggaatttgagatcagcagctttccacagttaattacccaggtttgatttggtcagtggtaaagagtgcaggagttagaggtttaatctgaacacaagagatgactgagtgagaagattgttttgattttactgcgcccctaggactcaaaatagtgccttcttcatagcaggcatttgctgttgactgactgactgaatgcatgaatatcaatttcctagactatggatggatgctacaagaaagatgggttttctcattcacctcactgcagagcctttcagggcagccttaagtcagctagagcaccagctaaacatgcaggtcctgacaacaaaatcattttgattgcatgccataaactctttgattaagaggattgattaagataatctggccttgctgagtggtggtggttttaccttgagctttaccagttattttgtcaggtagcattccattaaattaggatgcatcatctttgagactgatggatttttgattcatttttccgagttttattgaatttggaatgacaccgagatcccaatagcctgtacaaagtgaagacagtaggtcaacaacagagccattcttgataatacagaatatttcacaccaggcacggtggctcgcgcctctaatcccaacatttgggaagccaagggaagaggattgcttgaggccaggagttcgagaacagcctaggcaacatagtaagaccccatctctgagaaaat

SEQ ID NO: 100795 - DNA, 441 bp, Homo sapiens
ggaaaatgcgcgcacacacacacacacacacacacacgcgacacacacaggcacgcacatgcacacacgcacgcatgcacacacacacacacatatgtgcaggggtgcagtctaagtcagtggagccaggactgtgtgcgcatgtgggcctgccacatttttggagtccccagggaatgagcctcaagatacacttcgtcccttgtttataagccaggctgcacgggcgtttgtgggtgagaaagcattgtgttctgtctacagtcagagggaaccgcccccaatctagaaagctaatttcccccgaaggttcatgaagccagaggcatgcccttgggggttggtcgagagaagggtgagaggcagttctgtagaaggggcctggcccgtggtgtctgagattctccgcgtgtatgtggccttgtgccttttttacactag

SEQ ID NO: 100796 - DNA, 493 bp, Homo sapiens
caaagtagattctgaacacaaactcgagaggagttcagggggagtactgggaagatttaaaggaaagggaagtggaggcttaaaccttggtaatttctttgcaagccgtaagggctacagtcgaacagggtttgaccggcttaacactgagggcagtgaccaagataaagaggatgatggaagtgaatcagaataggagtattcatgacctatgcctgcgctagaaccttgctcctcctgaaaaccaagctttgatttagattgagtaagatttacccagaatgtcggattcctttccctttagcacgtttaaagttctgtgtattgaattgtaaactgtactagaatgtgtgggactgtacacactttattaacttggttttgcataagttggcttttgaggctagttgccgagagtgctaccagttcatagcagtgccattggctttatatgacctaggctatgggaaaacgtctcttttccatcataatg

SEQ ID NO: 100797 - DNA, 447 bp, Homo sapiens
ggaagtcgagacaacatgaatgtgattttgatctgctttccaaatgcacccaaagtatcggcagaatcagtgaagaatgatgcacagttggacaagtacctggaatgcacagctcaagaaatcatatagaaccactgggaagacgtccccgacttattccatgtgatgcgcacattaccgagtgacaacatgcccagcctaccaccagggggtgaattggcaagcatgaggactgttattgaagccgtttactatagactgaatccttacataaatgacgacactgactctacatcaacagatgatatgtggttcaactgctcatctagccatggagtttaccttgacctccataggagagtacaggtcaactttgatgagacttttagcatgcatcctgaactttaacgaagggatatgacatgggtgaccatgattacctcctaa

SEQ ID NO: 100798 - DNA, 763 bp, Homo sapiens
ccaagatttcggcacgaggtttgctacagtcctattattttatggttattttaagtgtaccaggactctaaaaggaacttgtttgtataatgctattctatacaaggtatgtagcccacgaaatgaccagcctgatgtgtgctataacccatcttttttcctactgcccataaaaacaggcgaacttctaggtttcctggtctatgcttcccgagaaaagagaagcatagctataggcgactgaaaagatgacaagtggccccctgaaagaatcatacagtactatgggcctgccacttaggcacaagacagctcatggggataccgaatccccatttatatgctcaactgaatcatacgattacaagctgtcttagaaataatcactaataaaactggcagagctttaactgttttagccctgcaagaaatccagatgagaaatgctatctataaaagtagactagccctagactacttgctagcagctgaaggagggatctgtggaaagtttaacatgaccaattgctgtctgcacatagatgaccaagggcaaatagttgaagatataattaaaataacaaagctggcacatgttcccatgcagattccagacattgtatggaaaaacattgtgaaaatccctgtcctgttctgttctgttctaataaccggtacatgcagcccacagtcaggtaccccctgctggctcagtcgatcacgaccctctcacgtggacccctttagagttgtaagcccttaa

SEQ ID NO: 100799 - DNA, 406 bp, Homo sapiens
ctctctctctctctctctctctctctctccctccccgtccctccctctctccccttccttggggccttctgccccattccacctgagcaaaccaaccctgaggacactcctggtacgtgctctcattctgaaaactttaactctgaaagactggcctctctgaccagatgccccgggccatccagctctcctactcctacctatctccccttttatactaataatcttataaaaaaaaaaaaaaaaaaaaaaaaaaaaaaaaaaaaaaaaaaaaaaaaaatttttttaaaaaggggcccgggaattaatccttttgggggggggaaaaaaaaagtgggcccggggccggtttaaaaaacccggggggggggaaaaacactttttattaattgaccacgtcaaacag

SEQ ID NO: 100800 - DNA, 460 bp, Homo sapiens
ctccccttggagaggaggcaggctttccctccagctctggggaagggggcccctgtgaggggaggtgtttgttgggggactgaggcagcatcctcccaggggaagcagctgctctcctaccccacccactgcgcctgagagcacgcagtctccaacccgagctccctcccgcccttctcttctcgtcatttcattattgatccaccttttcctaggccaatcctggggcttggaaggggtgggggaagccaggttggggtgaggagagtagataagggacagttatactttagtgtggtggcggtggttgctttgggatgggagaaaaaggattatcaagcaaagttattccttacaaaggacttggggttgtctctgattcttgaaaggggacccatggcggatgaatggtcagagcgttgccccttccccattagtactgtggcaagaacggagttgg

SEQ ID NO: 100801 - DNA, 562 bp, Homo sapiens
  misc_feature (1)...(562): n = a,t,c or g
gttccataccacttcaataaagcgagtatcttgataaagcaagtcacattaattgttgggtttcctagtggaatcatatttttgctggaggagggtcttgagttagtattgactgatcgaggtggaggttgctgaagattggggtgactgtggtaatttcttaaaataagacaacgactaagtttactttcaactcttccttttatgaaagatatctctgagcatgtgatgctgtttaatagcattttactcaccagtagaacttctttgaaaatctttgaaaacccacatttgcagttacttacaacatgggagtcttgaacccctaaaagtcatccataagggttggaatagacttcttctaaatgcctgttaatattgatattttggcttcctttcacaaatcacaaatgttcttaatggcatctatcatggtgaatccttactcagaagccttcaatntactatgcctagatctatcagaaaaatcactcattatagcagctttatgaaatacatttattacgactttgangtccannatacttcttgatccatggct

SEQ ID NO: 100802 - DNA, 457 bp, Homo sapiens
ttactgtatttttaacaaagacggggtttcaccacattggcgaggcggggctcgaactcctgacctcatgatccacccgcctatgcctaccaaagtactgggattacaggcgtgagccactgcgcccggccactcccagctaattttttatagagacagggtttcaccaagatgctcaggctttctcttgttattcccaagggtattttaactcctcccagggattttccatttccctgccaggggatacctccccggttaaaattaagagaatggggggccccctttttttttcctgactgctgaaatcaacctgttgggcctgctcaaaaacctcacgggtgcccgggaaggtcttaaaaactgggctaccgagaccacggtgacccgtctataaggaccccttgggggggttttacccccggttctgaacatgatctgggtgggcagaaagaag

SEQ ID NO: 100803 - DNA, 453 bp, Homo sapiens
cattcttcgagacctatgtcagcgagttccaacttggtctgggtttccaagctgggctatggagttactagtagagaaagcaatcagcagtgcttctagccctcagagccctggggatgcactgagaacagtttttgaatgcatttcttcagggattattcttaaaggtagtcctggacttctggatccttgtgaaaaggatccctttgataccttggcaacaatgactgaccagcatcgtgaagacatcacatccagtgcacagtttgcattgagactccttgcattccgccagatacacaaagttctaggcatggatccattaccgcaaatgatccaacgttctaacatccacaacaacaggaaacgaagaagagatagcgatggagttgatggatttgaagctgaggggaaataagactagaaggattatgataccttttaaaaagggtg

SEQ ID NO: 100804 - DNA, 420 bp, Homo sapiens
  misc_feature (1)...(420): n = a,t,c or g
gagcggtgtggagcggagagaatactcgaagggctctcctgatactaacagttttacgatttaaaacttcgccagaatttcgacagggtctcactgtattgcccaggttggtctcgaactcctggcttcaagcgattctcccacctcagcctcccaaagtgctgggattacaggcgtgagccaccacgcctggcctcactcaaacagtaaacgaggtatgtgacgcattcccagactcttcagccaactgagcatcagcttcttcacagcaattgggtcctgattaatgtcctcccaagacagacttcattggatccacgatcaagaggactctgccaggtttttctgacccctctacattgctataaagtgccaaggccttaagacttgggtacgtgtgttacaacggcaagaatgccn

SEQ ID NO: 100805 - DNA, 411 bp, Homo sapiens
ggaaaatgcgcgcacacacacacacacacacacacacacacacacacacacacgcacatgcacacacgcacgcatgcacacacacacacacatatgtgcaggggtgcagtctaagtcaggggagccaggactgtgtgcacatgtgggtctgccccatttttggagtccccagggaaagagcctaaagatacacttcgtcccttgtttgtaagccaggctgcacgggcgtttctgggtgagaaagcattctgttctgtctacagacagagggaaccgcccccaatctagaaagctaatttcccccgaaggtttatgaagccagaggcatgctcttgggggttggtcgagagaagggagagaggcagtgctgtggaaggggcctggcccctgctgcgtgagattctacgcggg

SEQ ID NO: 100806 - DNA, 416 bp, Homo sapiens
ggagacagcaactgtgagtggagcgtgttatatgttatcattgctacctttggcattggggttgccttgggaatcctgtcttggactgtgatctgtatgctgaagaggcaaaacggaaaacccaagatgaaaagcaagtacaagaacctggatgccacggatcaggaaagcctgtagctgaagccagcctcccgagcaggcatcaaacagaaaggccttttgctaagtagcagcctgatgcactccgagtcaaagctggacagcgatgatgccatctttacatggccagaccgagagaagggcaaactcctgcatggtcagaatggctctgtactcaacgggcagacccctctgaaagccacgagcccgcgggaggagatcctgtagacacctggtcttgctcctgagggtaggga

SEQ ID NO: 100807 - DNA, 424 bp, Homo sapiens
ctcagattttctaagaaccaaaaaaaataagggaaaaaaaacccaaaactacaaaaaccctttttttaaaatattttatattttaatatcttttttttttttaagtgatttttaaaatttttgtgggtgttttttttttttttttttttttaggttttttttttttataatttttttttttttgttttttttttgtgtgtttttttttttttttttgttaaattaaaaatttttttttgggggcctttttttttgttttttcggttttttttctgccttggtttttttgggacttttcaaagttggaggtggttttttgccttgtttccttggggtttaatgtttttgttccctttacttttttttttggtttttttttgattggtttttttttttggtttttggattaaccccctttttggga

SEQ ID NO: 100808 - DNA, 364 bp, Homo sapiens
cccagactagcagcatccgtatcacctggggacatgttaggaatgcaagttcttgggttgggcacagtggcttctgcctgtaattgcagcactttgggaggccgaggcatggggatcacttgaggataggaatttgagaccagcctggttaagaaagcgagaacttgtttctacaaaagattaaaaagacaaaaaagtgcaaatttgtgaacccaaacccactgaaccagaaactctggaggtgaggcccagcagtatgtgttttaaccaccctttccagcaattctgatgcagctaaggtttggaaactactgccttagaacatagtaaatgttcagctctttcaatggtggtaatggcaatg

SEQ ID NO: 100809 - DNA, 453 bp, Homo sapiens
aacagaatgagcagtgttctggaaaaggtgctagaggatgagaagagagtagagtgaagggattgctcttctgataggaggaaggatactatcaggtgtaacagaaggaaagaagatgggaacagatagaggtaggttcataaatttggtgatgaaaagataaggactttctcaataaaggataagggaatgtcattattcaaaggattggttgctgatttaagagaaggcctgtgtccacagaggaggtctaaaggaaaaaaaaaaaagggcagggcctggctaggcatgggggctcacacttataatcccagcattttgggaggctgaggctggaggattgcttgaccccaggagttggaggctgcagtgagccatgatcatgccactgcactcggccctgggtgacaaagtaaaacctgctgagcccttgggatccataaaggtagtgcg

SEQ ID NO: 100810 - DNA, 386 bp, Homo sapiens
gctggtgtaaattttaagaatagatacattcaaagaagaattcgacattcatgtgacattcatactttggaactttgggaaagtataggaatgaccatagattggcttagggatagtcaatttacctgtctgtaaatggatccaatttagtattgttcctgtatttttctaagaccaacacttgtgtcattcacagttaaatatatgagttgtggccaggcccggtggctcatgcctgtaatttcagcattttaggaggctgaggtgaacagattgctcaagtccaggagtttaagaccagcctgggccacttagggtgacgctggcagtcatccaatttttataggtgcgttgctagatcggtggtttcttttttgtcagttggc

SEQ ID NO: 100811 - DNA, 332 bp, Homo sapiens
catctgtctcctgtgggctattgtagttccagtatcagtgcagttgcttcttttttttttttttttttttgaaaaggggttttggggggttccccaggggggttttaaacctggggccccaagggaccctcccacctggggcccctgaaaaccggggattaaggggggaaacccccaaccctgaccctttggatttttttaaaacgaacttttaaaaaaaaaaagtttaaaaaaattggggaaacctcccttaggggagggccttcccaatttggcgggaaagggccctgcctgccttcggttttaggaagccaaggccctgtagggggaag

SEQ ID NO: 100812 - DNA, 329 bp, Homo sapiens
gagagctgcaccatgagcttcaataccctgtggatatttaaacttcagttgtccaatacgtcttgtaggttcacagttggtctatcaaaaataaaagctattcctatcgtggcaaacaaaacttggatatctggttcaaataccatttttcaccacctcatgaactccattctcatcgatgattacaggtgcatggaattctttatctgccacatatctttctaatccttctccagcatacgagatcagaggagagatttcacattggattggtacatcattggcatcctataagttaggactgacattagctgtgatggtctctgact

SEQ ID NO: 100813 - DNA, 368 bp, Homo sapiens
agaaattaaaatttggctgagaaagtatatccaaagtagaaaatcctttgcttcactctttctttcagcaaatgctcagtgaggacctgctgcgtgcccacggctgccagcacttaccaaaggctgtgtgggcttcagagatggagaacagattagtggttgccagggtttagggatggtggagaggacggggtgtgtcatgtggcccaggcgggcccgaaactccggacctaaggggacccttccattaaggcctcccaaagggccggaattacaggcttgacccaccgaacggggccaaaatgaaagttttaaaaagccggggctaataaaatcatcccccatccatttttctaagggtaaaagcg

SEQ ID NO: 100814 - DNA, 1408 bp, Homo sapiens
gcgtgatgtcaggtcactgcaacctcttcctcccagtctcaagtgattctcctgtctcagcctcctgagtagctgggattacaggtgtgcaccacctaccacttgactaatttttatacttttagtagagatggggtttcaccatattggccaggctggccttgaactcctgacctcaggtgatccgcccgcctcagcctcccaaagtgctggggttacaggcgtgagccaccgcacccggcccccttccttcgtcttagtcaatcctatcccacctcttcttccaccagtcccctcacctgatggtcccaacatttcatcatccaccacctcctggagggggtaccccgaggtgctccgctggggactctgctcattctgggggtgcggttgacggctggtcgtgatctttcccgtaatctgtcccctcttacggaacctagtctccgttctgtccatggccttcttctggacacttctaggatccagaagagtatgttatcaattctcaagcctaggagaagtcaggagtagagaacagctctgagaagatactgttgtccaactgatctccaggcaccacggagtccggtccctccaatcaggaaggtcggaatctctgatgtcatcgttcatgccaacctggcaaccagtttgaaaaaaaacacatgtaactgccaggctgatctcttgtcctggagatcctgggtgaatggtatctcctgccactgtcccaacctcagaccattgtccaaaagcatcttcagggactccacatccctctattccctgtcccagcagaggctgtgtcctctccactcaaagcctgaagcatgttggggtctcttcgtctctgtacatgcccatttcagagtccagtctggtgggagagggaacagagtgggaaagaaaactagggtaagcagaaacgatgaaaccttataagagagtgagagtatcatgtacaagagtgagattatcatgtacaagagtgagattatcacgtacaagagatcccaggaatactgacttgatgaaaaagtcacatcagagcactcagtttggcagagcttttctgccgaatgtttactcacattcactgtccgagattctatactgggggtacacacgtcctctgccctaaggcaattttgagtccaagagacattttgaggcctaaaaatcataggaaactgcccctgagctcacacatatttccaatggtgtccccagtttcagggaatccatggattacctaagccagcccctccagttcggctaagaaactctagtctatatatcaagttttgtatcatatgtattgctctgaactcagaaatttcccttccatttatggattctatgaataaaatatcacatgtacaaaaagactaagtcaaaaaatttc

SEQ ID NO: 100815 - DNA, 427 bp, Homo sapiens
ccctgtctagaatgccagactctctgctgaccattctctctggtcagaactggatcactttatttgatgtaaattgtatttgatttatttttttcttttttaagagatgaagtctcactatgctgcccaggctggtctcaaactcctgggctcgagtggcccttccgcctcagcgtcccaaagtgctgggattacacgtgtgagccacagcactggccataaattgtatttgatttttacagctacctgtatttagccatgtgaaagtgattttccacttatgtcagagatacaaagtttcgtttagggataaattgtaaaaaagaatataggcctgggtggtggctcatgcttttaattcccatactcagcttgagtaccggaaccaagactagtcgaggcaacatagtgaacctcatttctttaa

SEQ ID NO: 100816 - DNA, 848 bp, Homo sapiens
  misc_feature (1)...(848): n = a,t,c or g
ctgacagagctgcccccaggggcgcaggacgagccggggctgtggggccacaccgtactggagactggggactcgcaggaactcctgcaggccggggccacgctaggcacataggccggggccccaagcagggcagagcagctggccagcgtggtcatctacacccaggagggctcctcggccgcggcggcaattcagagccatagagaaagcagcgaactccaggaagcatgagacgcgcggcacctttactcagcacagggcaggtgtgggaaggtccagcttcggtgggggaccgtgttccctgagcttcatctgaaaccttcaaaaccatgaggacaaggctcccgtgagctctgagcatgccctcccagcgagagtcacactggccaccagccaggcgcccacagagggtaccgtgggctgggcctcggggagcaggctgccaagtgcaggggagggccgggcgcaggccacacagggagctccggtccactgggggcccttcgatcagtggcctcccgcttcgtcctggccgctgtgctgaagagaagccaagtgttgttggtgtttttctctcccaagtgttttcccatttcagttatcagaaggtcatggccgtggggaaagtggtgaagatacccctcgtggcttggggtgcacctgcttgtgcagttcagcatgtagctgcctttccattttattctctactggggctaaaaattggcagctacaaagtgttaccatcttggaagcagtccacttccatttcaatttttttttttttaattttaggattaacagtgttcccccntaaccaaagggaagcctgctaagctcatttcatt

SEQ ID NO: 100817 - DNA, 1272 bp, Homo sapiens
tttttttgtgttttttttttaaaggcaaaaatcttttatttcaacttttagggaagccagcagcctcttctccacatctcagaagcacaaggagacaccctgatcaagaaggcaccggcagaagcggcatggccaccattaattgctttctcttccggtggaaggctgccttgctctcatgagagttgatctgcagcgggatataagcgtctagatgatacagctgctgggggccccccatcaccaggcggttctccccgatctccagcgacagccccagggctccatccagtttggggaggtcaacttcggccaagaggaggtcgggggcttccagccacaggttcaggtgaggcttttcaggccctgactcagctctcccgggggcgggcgtgtacaggtcccccagctcctggatccgaggacgctgctccgagcggatgttctgctgcgagatggagcccatgaatggccggttcttcatcatgcgccattccggattcagctgcaagttgtatttgtcctcaaggccctccctggcgatggtgatcacgagctcccgcaagaaatcgctgttctgcatcctccggtagaagtcgctgttgacagctacgtcgtaggcggtacatccctggccttttgcatccagttctgcatgaggctctcccagactcatggggatgcgaaacccagcttggtcctcctctagcatctgaagcagctcctcctcggtcacgtcggcgggaggagggatagagggggagtggcagatgttgatgaaaaccttcccttccgaggagttggtctttatgcagaaaccaggctgaggctggatttgtgtcgattctggtctggttgtctgggcttgctggagctccttcgaggcctgcagcagcagctcctcaaatcgcgccgaatcagcaccgatcgcctccgcctcgcttagctccagtcccagcagcttcgggttcgccatggccctgggaaagagatctaggcgtcctcgagaccctcaacgtgggaaactttgcccaggatccgaaccccagtgcctgctctggccctcaatcgactccggatacctactatcctgttcaaaaacctaagactggcctaagactacatttccattcaagaccgaacaccatcgtcaaatccgttgggaatatgtgtctctagacgcactaccctccgtcctacgtgccgaactgtaaacgaagccacacttccggtctatcggtaaacacaggactggagtatgccacacttccg

SEQ ID NO: 100818 - DNA, 458 bp, Homo sapiens
  misc_feature (1)...(458): n = a,t,c or g
gagcttcaaacctgggaagcagaggttgcagtgagccaaggccatgccactgcactccagcctgggtgtaggagtgagactccatctcaaaaacaaacaaacaaaaaaattgaagagacaccttaatcatgtaatcaaacatgtaaatgtaaactacaactacataggaatacaaataagacaaatgttctgtgggagtttaaccaaatttgggtgcccaagttcagggaaagtaatctgaaaaagcaacaaattaacagaaggataaataggagttaactagacgaagagttggagcatggtttgaaggagctttccagaaaacgtgaaattgcaatgacaaggaaactacaactgaagaaagcaccattacaatcccagaaaatattttaattatgagtggccttatttttaaagtagcccaaaggagaaagagaaacttcagaggatgcaagctn

SEQ ID NO: 100819 - DNA, 395 bp, Homo sapiens
gtttttagttctcctttgaacaacttttattggtagtaaaattcagacatttttaatctcatatttttgtctatttaaaaaatgtggcgttaataacattaagccatgagccaaatcaggaatgcaatcccattcacaattgccacatgaagactataatacctagaaatacagctaaccaaggaagcaaaagatatatataatgagaattacaagatacccctgaaagaaataagagatgtcacaaacaaatggaaaaacattccatgctcatgaataggagcacagctttgtaaataaaggacatatggtgaggaagccgggttggtttaagaaacctgtgtcccctgtgaaaaggcccatggcatatattggacaattaccagggagtcatt

SEQ ID NO: 100820 - DNA, 349 bp, Homo sapiens
ctctctgactctctctctatctatctgtttctgtttatagagatggggtctctctgtgttgcctaggctgatctcaaactcctggcctcaagctatcttcccaccttggcctcccaaagtgctggaattacaggtgtgagccaccgcaccctgcctaaattctttgttttaatcctcttaagatcctcaggaggtcatcattatccacaactttcagatgaagaaactaaggtttacaagggtttgctcatttattgaaggtctcaactagggatgggaatgggatctgaacttagatctgcatataactccaaagtccaggcttttccccactaagccaagggcatgg

SEQ ID NO: 100821 - DNA, 364 bp, Homo sapiens
tgcttacacatattgtggacggacctaattttctgacaactatgtaccaatgtttgatgtgcgtttgctgacaggagctaggttaccagcctgtgacaactgagcgctgccacaatgtctgcaatgattgcctacagcgctcctttaaggcacaggttttctcctgccatgcttgccggcatgatcttggccagaattacatcatgattcccaatgagattatgcagactctactagaccttgccttccctggctacagcttaggacgatgatctgcctgctttcactgagtagttcatggtggctttttggacacataacgaagctaatacgggcgccgagggcggatgacatggtggactgg

SEQ ID NO: 100822 - DNA, 338 bp, Homo sapiens
gttcattgccggaaataacaacagcctaaatgggtccagtaagtattaggtcacaaaattatcagtgtaatgcaacacagcctttaataaaatattgaaactcaaggcccagtgcagaggctaatttaacaccgttaatcccagcactttggtaagccgaagcatgtggatcccctgatctcaagcaattctccctcaacctcctgataactcgggaccacaggtttgcaacaccatgtctggctgatttttcatatttcttgtagaaatggagattcactgtgttgcccacagacgttttgaactcctggactcaagcagtcctcccacctcggtcg

SEQ ID NO: 100823 - DNA, 435 bp, Homo sapiens
ctaaacatttcaaatgttcatttctgtcactataaatatatatgtcctcaaaagcatttatatttatggaatgatcttgttcagaacccacgttttataggtttaggttgtaggatcattcattcaagcaactttgccagcacaacgtagaagtttcagattattttagatagttatgcctattactatgctatgggcgaggggttggggagcgaggcagcatctcagaataaaatttcaggccaggcacggtggctcatgtctgtaattccaacactttgggagaccaacgtgggaagattgcttgaggccaggagttccagaccagcctggggaatgtagtgagacctcgtctctacataaaatgttctaaaaattaggtcgggtgctgtggctcatgcctgtaatcccagcactctgggaagcccaagtggg

SEQ ID NO: 100824 - DNA, 347 bp, Homo sapiens
aactggaagagtgtgctataaagggaaatgaaagggttgagtaactgttatggagataaagggcaaaataaacttggttttggatatcataaaggatatttatgtggaaggattctcaacatattatttttaaagacaaggtctcactatgttgcccaggctggacttggactcatgggctcaagcaatcctcccacctcagcctcctgaatagatgggtctccaggaatgcaaccaccatgcccagctttcaagatatttttgatcacctagttgtaaatgcaaatggaagtttggacttatagagtcatcagcataggacaataatagccgttatgaaaaaagag

SEQ ID NO: 100825 - DNA, 289 bp, Homo sapiens
ggcacgagagacttttcagtgaaaactttataggccaggagagagtggcatgacatatttacagggatgaaggaaaaaaacttttatcctaaaaaagtatatgcattgaaaatacccttcaaaaatgaagcagaaacaaagaaagttgaagtgtagcattttattagttttctctttgtttgttagtttgtttatacaatcagtgttaagttgtcatcagtttaaaataatgagttgtaagatattatttgcaagcctcatggtaatctcaaatcaaaaaacctacaac

SEQ ID NO: 100826 - DNA, 449 bp, Homo sapiens
  misc_feature (1)...(449): n = a,t,c or g
tcctgcctcagcctctcgagtagctaggactgccggtgaccaccaccatgcccagctaattttgtaaaaagtttttttagaaatggggttctcaccatgttgcccaggctggtctcgaacttcttgcctcaagcgaacctcctggctcagcctctatcaggtttcataattttactttagccttcgcaatggaatttaaattgtgccagccatcttttatctgtcagacccaggggatttttattgtcattttgaaccagatctatttttgcttaattctatgggaaccacacatagtttgtacatttgccagaaatttgttttccagtgaatattactcaattctaagtaagtacattccgcattttcatactggggacatagtagggggtgaggttcaatttagggaccatcccttttttaaatttattatggatgttaggggnctt

SEQ ID NO: 100827 - DNA, 339 bp, Homo sapiens
aagaacagctcccagaacaccctaaaaaaagcaggatacaagactaagagtaatagaatctacaatgcatgcacctcccccagaatatcagcccttgcttgcatatataagttctttttaagaggtcaagcagaaccctaaacactatctgaggataggatgtagaattttttttttttttttggaaaggaagtctggctttggtggccaaggcgggagggcaagggggggatctaagttaatggaaacttcaacttcccgggttaaggcaatttttgggcctaagcctccggggtaactgggattacgggcacgggccaccaaacccagttaattttg

SEQ ID NO: 100828 - DNA, 330 bp, Homo sapiens
gcagtttgagtcaaagcctagtccagcctgggcgacagagcaggaccctgtctcaaaaaagaaaaaaaaaaaaaaaaaaaaaaaaaaaaaaaaaatgaaaaaaaaaaattcaagcaaatttaaaatgatccctttcacaaaaaggcaatattgagagggcaattggaaaaattaaacaaaaaatttggtctactgaaatatggtttacatccacatggatgggggcctgaacttttctccaaaatggggaaattcctttggcccattgggggccaaaaaaaaaagggctaaaggtaactatcccaaaacccttggattgattattccaaa

SEQ ID NO: 100829 - DNA, 361 bp, Homo sapiens
tccgagtggccaaagctggaatgatttgaatagaataaatggtattggattataacccaacgaataaacatccacggttctgtaatgattagactaccgaataaataaaaaatggggaaaaaggctgaaccttccttacagaattccagttactattaataaaaatagaagaggctgggcacggaggctcatgcctgtaatcctagcattttgggaggccaaggcgggaggattgcttgagcccaggagttcaagaccagcctaggcaacaaagcgataccctgtccctaaaaaataaatttttgatttgattgagatggagtctcgctctgtcacccaggctggagtgagccaagatcac

SEQ ID NO: 100830 - DNA, 408 bp, Homo sapiens
gaccggcctggccaacatggtgaaatgctgtccctactaattttttgttttttttgtagagatgggggtctcaccatgttgcccaggctggtcttgaaatcctgagctcaagtgatcctcccaagtcggcctcccaaagcgctaggattacaggacacagtacactgctccaaatttgatgcggtataattaacacaacatcacctactgtatttatgccaaaaatgttaacttgaatgacatcaacagacactataagagtagttcagattgatgggtgttctgtgagacaaggaaaatatcagggtcatgaaggatagaaaaaggatagaagaattgtagattaaaggaaactaaagaaatatgacaactaaatacagtttctgattttgatcggattccagattt

SEQ ID NO: 100831 - DNA, 383 bp, Homo sapiens
ggtaaaaacactcaataaactaggtattgatggaacatggctcagaattataagagctattttttaaaaacccatagcaaatatcatactaaatatgtgttcatttttataagaaatagacaaactgttttcctgagcgatcatatattgtaccttcacatactcagtgtatgtgagttccagttgtttcgcaaccttgccagcctttgagataatgtgttttttttccattaaattatccattctaatatgtgggtgatggtattgcattccctaaggactaaggctgcttagcatcttctttgtacttatttaccatctatgtacctcctttggtgaacactgtctaaattttgcccactttccattgagttgttacttcg

SEQ ID NO: 100832 - DNA, 360 bp, Homo sapiens
ctggaacatagcaattatgaaaacatttgccgaatgaacatgtggtgaggattcattcgccaaatactttaaaaaatttcctctcgatgcaaaaatgctgactggtacaagagcaaaatgaaattgttttccaaagtcagtaaaatagccctatttttcaatcagataaaagcagctttaaaaaatgtttaaggctgggtgcagtggctcaagtcagcacttgggagactgaggcagaaggatcatttgagcccagaagtttgagatcagcctgggcaacagagtaagacctcatctctacagaaaataaaaattaaccaggcatggtggcttgcgcttatagtcccccctactagggag

SEQ ID NO: 100833 - DNA, 344 bp, Homo sapiens
agcttcaatttttttcagagaaatagggagttaagttcagcaacagagagtgaaacagggcagaaagtattacagtatagttttgaagaataagaaaaaactatgcaactatctaagagtgggagaatgaatgggctaaagaaatataggctgggtgcagtgagtggctcacacctgtaatcccagcactttgggaggccgaggtggacggatcatttgaccctgggagttcgagaccagtctgtgcaatattggatgaacctgtatctccggataatatggattcttttggaatgcgccaagtggggagtgtggtgagtcaggagttgttgggacgatcggcg

SEQ ID NO: 100834 - DNA, 356 bp, Homo sapiens
attcagcatacattctccttattaatttttggaattaagtatagttattatgttcttaaaattgtttcctggctggccgcggtggctcacgcctgtaatctcagcactttgggaggccgaggcgggtggatcacttgagggcacgagttggagaccaatctgttcttcgccgtgaaaccctgggtatacgataaaaactcttttcccccgactttaaacttgagatttgctaaaagcgggcacctttgggaaccacgggggaaaaaccatgggccccctgagacgccgcccctaagcagagtaagccccccccaaagattttttcccgggggaactcggcccttaaaaaaagaaac

SEQ ID NO: 100835 - DNA, 498 bp, Homo sapiens
aatgtaaatgtgggaaagcctttcataatttttattcctttcaaaatcatgaaatatctcacactggagagatgctgtatgatataaggaatgtgggaaagtgatcgatttttttttaacaccattgtcaacataaaacaactcacagagcagaaaaactctgtgagtgtaaaatatgtagggaagccttcagtcattttggtaacttaaaagtacatgaggctgggcgcagtggctcacgcctgtaatcccagcacttagggtgggcaaattgcttgacctcaggaatttgaggcctgcctgggcaaaatggtgaaaccatgtctctacaaaaaatagaaaaagtagcaggtgtggtggtatgcccctgtggtcccagctgcttgggaggctgaggtgggaagatctcttgagcccagggggtgggggttgcagtgagccaagatgcactgcaccccagcctgggcgacagagccagaccctgtctcaaaaaaaaaa

SEQ ID NO: 100836 - DNA, 387 bp, Homo sapiens
catgagcttcaataccctgcttgacttatccttcttgggagttcctatgatttatttagcaagctggccatttttctttttctaaaaaaaaattatttatttgtgcattttttagtaatagagacgaggtctccctaatgttgcccaggctgggcttaaactcctgggctcaagtggtcctcctgccttggcctcccaaagtgctcggactacaggtgcgagccaccacccctgccaaactgggcattttttggggcttcatgtcagtttccctggggcagggagtatgcctgtgtagatccctgttgtgtcctctacccctaggacctggccaggtacacagtgggtgctcacagtccttcgtggaaaaaatgaacaaagaattag

SEQ ID NO: 100837 - DNA, 372 bp, Homo sapiens
tcgaaataaggatgataatggtacctatgattcctctagggattaaatgagataatttagcaatggtcttggcacacatgtaataactactcagtaaaaattagctgttaaatctagaatatgacaggtatggaggctcatacctataagcccagcactttaggaagctgaagctggaagattacttgagaccaggagtttgagaccagcctggtcaacatagcaagaccccttccctaacaaaaaaaaaaaaaaaaaaagaaaaccattaagggccggcaacgggggtaaacccttgaaaccccaccatttggggggtttaaaagggccaaatattggggccaaaaaatcaaaacctttttgcccaaatgg

SEQ ID NO: 100838 - DNA, 384 bp, Homo sapiens
agcaatattaagaggaatttgaaagaaatttatttcaaccctcatggatgactttgaagggatcaagacttcattggaggaggtaactgcagatgtagtagaaatagcaagagaagtggaattagaagtagaagtggagcctaaagatgtgactgaattgctgcagtctcatgatacaacttgagaagatgaggaattgcttcttcaaaatgaacaaagaaagtactttcttgagttggaaactaccctggtgaaagatgctgtaaacattgtttaaatgacaacaaaggatttagaatattacataaatgtagttgataaagcagcagcagagtttgagaggattgacccaactttgaatgatgttctgctgtgggtaaaatg

SEQ ID NO: 100839 - DNA, 795 bp, Homo sapiens
tttagtagagacaagatctcgctatgttgctcaggctggtctccaactcctgagctcaagcaatcctcctgccttggcctctgaaagtgccaggcaggaaagattacaggcatgagccaccatgcccagccttattttacaattttactattgcatttctaataaatgacaaccctgataactgaattggcagtacctttctgtgtttacagtgcaatacaatattgtattcagcacatgagaaagaattctagtaattaatatctagcatataattgttttttaaaacttagccgtttaatacatccacatttatgttcccttaggcaaagacattggttctgaaatgtctgcttacaactaggtaaagtctacacataagaaaaaaaagactggaggccgggtgcagtgcctcaacacttgtaatcccagcactttggttggctgaggcaggtggactgcttgagtgcaggagttcgagacctggcccaacatggcaaaaccccagcctgggccaacatggcaaaacccccatctccattaaaaatacaaaaaaattgggccgggtgcagtggctcatgcctcaggagttttgagaccagcctagccaacatagtgaaaccccgtatcaattaaaaatacaaaaattagccgggcatggtggcaggcggctgtaatcccagctactagggaggccgaggcaggagatcgcttgaacctggggggcggaggttgcagtgagccgagatcgcgccattgcacccagcctgggcaacaagagcaagacttcatctc

SEQ ID NO: 100840 - DNA, 353 bp, Homo sapiens
cggcacgagtctaaatctagagtacaaacgtgaaaaaatacctcactaaaaaagaagttcttttggtgccaaaagctcaggaatgttagcttggtggaagagtttgccttttggccaggtgcagtggctcatgcctgtaatcccagcactttgggagaccgaggtgggagggttgcatgaggccaggagtttcagaccagcctaagcaacatagggagaccacgtctctacagaaaaatttaaaaataatagttaaaagaaaagaaaatttagccttttttcagagtttccacctttctttgcatatgcactctgggaagaaggagatactttccctggaaagatgtagaagg

SEQ ID NO: 100841 - DNA, 355 bp, Homo sapiens
tttgttgggtctactcagtgttttaaaggtttttgtttgtttgttttttgtttttaagacaggctagtttcaaactcctgggctcaagaaatcctccttccttgggctcctaaaatgccgggattacatgtgtgagccactgggcccaacctaaaggcacatttttttttttttaaataacttgtcaatacgtattttaaaacctggatattttaaaatttctcttgaaaaactaaaccccaaaattagaagctctaacaacattgtcctgcatcctcacaaaatatcaaaggtctttggttccccacctgtcatttttgggcgccttttgcacttggggttgaaaaagcaccaa

SEQ ID NO: 100842 - DNA, 406 bp, Homo sapiens
  misc_feature (1)...(406): n = a,t,c or g
agctagctagctaggtccatccatatccatgcacatcatctggtttaatagatttctcattatgctgtattcatctgtatatattctaatgttggagaattttctcaaatttaaatatgatttagataaacttaacagagtgtcagcagtacttagataaagcgattttttttttttttttgaaaaagggcctttttgccccctaggctgaatggcagggaggcagttttgcctcactgcagcctaaacctcccaggctcaagaaatcctcccacctaaccctcctgagtacctgggattacgggggggccctaccatgccgggctaattttggaattttttttttttggaaaaaagggggtncataantncncccaattttttccctcattcatacaacccaacc

SEQ ID NO: 100843 - DNA, 344 bp, Homo sapiens
aagaccaacctgggcaacatggcaaaaccctgcctctacaaaaaaaaaaaaaaattctttttttttcgaaacagagtttcgaactgtcgcccaggctgaagtgcaggggggcaatctgggctaactgcaatctttgcctcccgggctaaagcgattttcctgcctaaaaatgcctgaagccccaaaggggcaaagttgttctctgattggctgaggtctttgacacctgctccacccctgagctggagccccacccaaagaaattgactgaaagggggggttctccagggggaaattaggaaaggttaacattattgggccctaacttttcacccttcccccta

SEQ ID NO: 100844 - DNA, 335 bp, Homo sapiens
ctgcaagaaactaccacgcgttactataaatattctgggtattgtttcagccatcctaatttaatgctgatatgctctagatttacattgctaagttctcactcttctcttgggcacttaactctgtttcttttgattgtttgttttgagaaggagtctcactcttgcccaggctggcgtgcaatggtgctatcttggctcactgcaaccttcgcctcccgacgtcaagcgacctttgcgccttctcttgaactatcccgctgaatcagacacgtgcctccacatactggctagttcaatgatcccttgactctattagtactacggatccttag

SEQ ID NO: 100845 - DNA, 384 bp, Homo sapiens
gagttctggggtaggaagtggtcccgggagattttggatggaaaagtcaggaggattgacagcagacttgcagaattacatagagaaattaggaacccccaaatttcatgtcaattgatctattccccctctttgtttcttggggcatttttccttttttttttttttggtttttttttacccccttttaatttttagcccctaaaacccaatttaacccccccccccttttaaaaggggggccgggaccaaagaaaaaaccccaaaaccccggctgggaaccccctggttttggcccccccctttttttccccctgggggattttggttttaattgggcccttgggcttgggatggactggggggggagccccccggggggcc

SEQ ID NO: 100846 - DNA, 379 bp, Homo sapiens
cacaatttagcccatcagtctttttattactagacgtttggggatttttatttccaattatcactcggtacttccaacattcagtgtttgcacgaaccagagataaatacctttgtgtggtcaaagtaatataatttttgataacttagtgaaaggagaattctagactccaaggatatggccctttattttcacatagctagtttacaaatagctgtcccggccaagttcagtggctcacgcctgtaatcctagcactttgggaggctgaggtgggcggatcaaaagatcagcctggccaacatggcaaaaccccacgtctactaaaaatacagaaatttgccaggtgtggtggtgggcgcctgtaatccaagctact

SEQ ID NO: 100847 - DNA, 337 bp, Homo sapiens
ctttgctgattgtggggggaagggagaaacagacaggttttcacattgttgccaaggctggtcttgaacacctggcctcaagcgatcctcccacctcggcctctcaaagtgttgggattgtaggcatgagccactgcacccagccagactttcctgatttaaatgagagtactgcatcattccctacttcatggcccaaaacttaatcctgggccaaatgcaggagcatctctcgacctctgggcagattggtgggtgcccaggcactagtcacagccttccagcccagccatgattgttggatgccccatccctccaagagcaatttgggcatcta

SEQ ID NO: 100848 - DNA, 382 bp, Homo sapiens
taaaaaaataataaaatctgacaattgagggcaatacctgacctaaaactggatcctctaatggagggaaaagaaatactgtcaagaacattattggggtcgggcacagtggctcccatctgtgatcccagcactttgagaggccaaggtggatggattgcttgagtccaagagttcaagaccagcctgggcaacatggcaaaaccccatctctatagaaaaaaaaaattattgggtcaagtcacaaaattggaatacaaatggtagagaaaataaaatgattgaattagtttacatttactgaatttgataactgtaccatggtacataagagaatgtcattttcttgggaaatacacattaagtatttaggagtaaaaga

SEQ ID NO: 100849 - DNA, 346 bp, Homo sapiens
gcttttcctattattttttaaaaaatagagacagggtctcccagtgttgcccaggatggtctcaaactcctgggctcaagcaatcctctcaccttggccccgcacagtgttggaattacaggtatgagccaccacacccggccaagaaaaattttttaaaatcaaagaaacttgaggaatactgggtgaaacaaaagctctgacattgtctacttttaaaaagcaaaaggcattagagggtctacaatgcaaatttgcatggcagcagatttctaagcaaaaggcatttagagggtctacaatgcaaatctgcatggcagatttctaagtattggcagggtattat

SEQ ID NO: 100850 - DNA, 335 bp, Homo sapiens
gttaacctttgttttattttatggttagggccaggtgtggtggctcatgcttgtaatcccagtacttagggaggtagaggtgggaggatagcttgaccctaggagcttgagacctgcctgagcaatacagcatgaccttgatctccacaaaaaggaaaaaaagacaaaaagtattttatgatgaggtttaattctttaaaatatgttattttctattaagctcaatgaatactttgcaactaatttcttaaatagccttgttagtagtaccactatccataccatattttctgaatagaatataaagactattttggatttctgagaccatatag

SEQ ID NO: 100851 - DNA, 378 bp, Homo sapiens
taaagattgaattaatttggttcagaagtttgaaactcatttgtaaattttatttacatgtttgttggcagtattttgcaaaggtcagcattaacaaatgttttcagccacatgcaatgccacatgcctgtggttccagctacatgggaggctgaggcaggagaacagcttgagcccaggagttcagtttgcagtgagttgtgatcacaccactgcactccatcccgggtaacatagcaagaccctctctcttaccaaaaaaaaaaaggttttcttaaggccctatgtaaattttaattccattaaaaccattgatttttaattcaggataattaaaaggttataatttccctttttaaaggcaccgtataacctgga

SEQ ID NO: 100852 - DNA, 712 bp, Homo sapiens
  misc_feature (1)...(712): n = a,t,c or g
tttgagcaataaagctgtttatttcacctgggtcgcaacgtgggctgagtccaaaaaaggagtcagcaaagggtgatggattatcattagttcttacaggttttgggatagggggtgaagagccatgtttgcaggcaggggtggatctcacaaagtacattctcaagggtggggagaattacaaagaaccttcttaagggttggggagattacaaagtaccttcttaagggtgggggagattatgaagaaccttcttaagggtgggggagattacaaagtatattgatcagttagggtagggcagaaacaaatcacaatggtagaatatcatcagttaaggctcttttcacttcttttgtggatctttagttgcttcaggccatctggatgtatacgtgcaggtcactgggaatatgatggcttagcttgggctcagaggcctgacagtaatatgatgggttgagggaaagttatcagaagagaaaaagaacaaaaaaatttctagctttactggagaatgttgaagatggggtaagcagaggtttacgctagaaatggattcaagtagacaaactgtattatttcatcataaatgcctctactttgttctttcctcccattaccctgctcaattcttggttttggnnnnnnnnnnncattctagntatgaaaaaaaacaaaaagagtttttttgtcttgacccaatgcaag

SEQ ID NO: 100853 - DNA, 332 bp, Homo sapiens
ccgggaggcggaagttgcggtgagcagagaacggatgtctcaaaaacaaaacaaaacaaaacaaaacaaaaaaatagtttagtgtatttccaagatggtatttaggtaccatgtgaatttcaatttgatctctacaaaaaaaaattgttgtaacttgctggtgtgttggtgcacacctgtagttctagctactcataaggctgaggcagaatctgattgcttgagcccatgagttcaaggttaccactgcgttccagcctgggcaacaaattgagaccctgtcacggcatataaatataaaattatttattctttccttgattttttaattt

SEQ ID NO: 100854 - DNA, 375 bp, Homo sapiens
caagaggccagcataattaattttcttaaacattattttttaaagtgatcttggccaggtgcagtggttcacacctgcaatcccaacacttcaggaggctgaggtaggaagatcacttgagctcaggaggctggttttgaactcctgacctcaggtgatctgcccacctcagcctcccaaagtgctgagattacaggcatgagccaccgtgctctgccctcttgttattaattttatgttactttgcacggattaacggtagcatgtgcatgacccttgtttactacagggttatattaacggtacatgatagtactattattatgatttaggaacttttgtgcttgacggcttgtggtgttgctatttgcttcc

SEQ ID NO: 100855 - DNA, 381 bp, Homo sapiens
gatcctcccaggtcagcctgccgaataactgggactacaggcgtgagccaccatgcctaagatttgtatttttattttttgtagagacaaggtcttgctatgttgcaagtcttgaactcctaggctcaggcgatcctactgtcttggcctcttaaagtgctcgggttatagacatgggtcactgtgattggcccaatctgagcgaaattcttttacatgtgagatagccatcatcgtctggtattaattgatcacctaccaggatgaaggaaggtgtgctttatgcaaattggtattttaccataaaatcttttatacaacctaatacaacctatttatgagggaataggtttcacaattaatggataaaaaatgatgatg

SEQ ID NO: 100856 - DNA, 345 bp, Homo sapiens
gtttaccaagtgtacaataccggtatgggggagaaaacacattatatatcttaattgatacaatacgttattactaggaaatgctaacaatctaccttcagcaaatcataatcattttgctgctggagggtcttgctttgatgttgatggctgctgactgattagggtggtggttgctgaaggttgaggtggctgtggcagtttcttaaaataagacacaaatgaagtctgctgtacccgtggactcttccttttacacaatatttctctgttgcacatgatggtgtttaagagcatttttcacccacagtaaaacatcttttttatttgtttttgctttttgag

SEQ ID NO: 100857 - DNA, 382 bp, Homo sapiens
gttataaacaaggatcacagtttattaagctagtcttttagcattaaaaaaaaaatcggggctcggcgctgtggctcatgcccataatgccagtacttcgggaggccgaggtgggaggatcacttgagcccaggagtttgcgaccagcctgggaaacatggcgagaacttgtctctacaaaaaaaaaaaaaaaaaaaaaaaaaaaggaaaaaattttacgggggtggggggcccccaaaggggggccccaatttttggaccttgggggggggggaaatcccctgccccgggaaaaccggggggcccaaacccctttccgggaaaaggggcccccacccttttttaaaaaaaaacttaaaaccccccccagaacccccccccc

SEQ ID NO: 100858 - DNA, 360 bp, Homo sapiens
ctcttcatcctctgtctccagggccgcctgctcctgtagccgcagggattccagggcctcaagcttctcggtgaggtccttgtcgacctgatccttctccagattctgcttctgtagacgcttcactgccaggcccagctctgtcactctggagttgggggagcaacagaggtgaatacgggaccaccccagcctctcaaatccactagctctgcgacaccatattatcccaatttccctgtgacttttcttttctttccttttttttttttgggaaggaatctgggccttttaacccaggctgaatgccagggggggggcctgggcccatggaaaccttggtttccggggtcaaaggat

SEQ ID NO: 100859 - DNA, 220 bp, Homo sapiens
ttcggagactgtcttctacctattatttacctgattagataaattaatacactggcacacatagaaccaggctttaaaattgtgatgtcagccaggtgtggtggctcatgcctataatcccagcacttggggaggccgaggtaggcaaatcacttgaggtcaggagttcgagaccagcctgggcaacacagcgagaccccctctctagtcgacgcggccg

SEQ ID NO: 100860 - DNA, 344 bp, Homo sapiens
tgaacacataacatatgtgtaaaacttttcgtaataaaatgtaggggctgggcacagtggctcaagcctgtgataatcccagcactttgggaggctgaggtgggtggatcgcttgaggtcaggaattcaagaccatcaataatgacaaatcaaacaagtggcaatacttagcaataatagaacaaataaacaacagaatgttaatctgcaaaaataaaaaggaattaactgatatatgcaacaacactgatgaatttcaaaaacacagggagtgacagaagccttatacaaaataggacatatatatgactcagtttataagaaattttagaacaggtgaaact

SEQ ID NO: 100861 - DNA, 377 bp, Homo sapiens
gttttagtagagacggggtatctccgtgttgggcaagctggtctcaaactcctgaccccaggtgatccacctgccttggcctcccaaagtgctgggattacaggcataagccaccgtgcctagtcttacatgcatttttgacttaatgacattttcaacttacaatggtttatcaggacataacctcatcataaagagcatctgtatacccagaagtggaattgctggatcttaggtttctacatttgatttttgagaaactgctatattgttttccacagcggctgcaaccatgttacattcttaccagcagtgcacaagggttctagtttctccacatcctcaacaacacgttatttgttgttttgttttttgat

SEQ ID NO: 100862 - DNA, 342 bp, Homo sapiens
gcctcctgaagcagctggattacaggccaccacacccagccaaattttttttttttttggaatttttagtaaaaaaggggtttcacttggttgttaagggtggttttaaaacccaaacttcagggggtttgcctgggtaggcctccaaaggggttggaattccgggggtaagccattgccccgggttaattggtgtttttaacctgacactaaaagttgcagtttctttaatggatttataaggatttaggctttagggacagtttttttgatttttggcggaaaactattgcggggtgattattgcggtacatgctgaaaattgctgtaaaaaataatttt

SEQ ID NO: 100863 - DNA, 378 bp, Homo sapiens
tcttgctcttgttgcccaggctggagggcagtggcatgaccttggctcactgcaacctctgtccccgagtttcccacaattcttctacctcagcctccccagcagctgagactacaggcatgagccaccgcattcagcctggttttcttttttttctaactaccggtaatataaaattcttcactaagaagactttatcttattcaaatgttttgagatttcattgacatttaactgtctgaattatgtggaatattgaaattttccatgaactcaaattgattaccatagataatcttttagtaaaagcttttctgaggcagagtaagatttataacattttattatcatatggaagatgtgtattagccatgtttg

SEQ ID NO: 100864 - DNA, 356 bp, Homo sapiens
gacagaagctaaactttattaagtactttttatatgtctttctgagctatttacagatgttactcagctaatattcataacaacaccatgggataaatgctatgattaccacattttacagatgaagagcctgatgtcctcccatcaattccggttacccaaaagttgattataagcaaaacgatggtccacattacacagctaaaacatgcatttgaaaaatggccagtacctagtgaactaaatataacttggaatttactaggttattttccctttaaaaacagcttttacgttgcacacagtggctcacgcctataatcccagcactgtgggaggccgaggtgggcaaatca

SEQ ID NO: 100865 - DNA, 378 bp, Homo sapiens
ggtagagacgaggtctcactttgttgcccaggctgggctcaaactcctggcctcaggcaatcctcctgccttggcctcccaaagtgttaaaattataggcatgaaccactgcactgactggacacacccgttactccacccctactagctgtggaaccctgaacccagtcactcacatagtcctagcatgtttctcacctgcaaaataaggtagttagatgatctttaagatctcttttagttctgagttttaggcaacaagtaatacagatgagtcagtggcatcaaggctccacatccactccagaggaaggccagatctacatcaggccctgggagacagaactggggatcccacatcagtccagggccaaagat

SEQ ID NO: 100866 - DNA, 323 bp, Homo sapiens
tttcaagttaaaatgttatgctctggctggatgtggctcacgcccgtaatccaagcactgggcgccgtggctcacaccggtaatcccagtactgtgggaggccgaggcgggcagatcatttgaagctagtagttttacaccagcctggactcaggcaatcctcctgcctcagcctcccaaagtgctgggattactttggcttgagccatcgagcctggaacaatatattttaattgtggtttccctatctatatcccccacaatattgtgagtagattatactttatgcactgttgtctccttagtggtggtcgacgcggccg

SEQ ID NO: 100867 - DNA, 306 bp, Homo sapiens
tctggggtcttcaaaaagtttgtggaaaatgaatgttacgaaataattatgcatggatttcaattatttttttttttgagttggagtctaactttgtcgcccaggctggtcttaaactcctaggctccagtcatttgccagcctaagcctcccaaaggggtaggattataggcatgaaccatgatgaccagctggataaattgtttcaggaagggttgaaatgatgttgaacatcatgccctccacatcaatttacggggaaaaaaattcatcttgtttctgccgattcaagaggactgacaagac

SEQ ID NO: 100868 - DNA, 386 bp, Homo sapiens
agcagggactataggcatgggccactgcatccaaccgattttgtattttttgtagagatgaggtttcaccatgttgcccaggctggtctcaaactcctgggcttaagtgacctgcctgccttgacctcctgaagtgtttttctatggtcagagatgtaaatacttgtcattgtgctatagttgcctacagtattcagtacagtacatgctgtacatgtttatagcctaggagccgtagactataccatatattctaggtgtgtagtactaggtttaagtacccgcttttgatgtttgcgtgacgaaatcatgtaacaatgcatctctcagaatgcatccccattgttaatcagtgcatgactgtacttcagaatgatttttttttt

SEQ ID NO: 100869 - DNA, 409 bp, Homo sapiens
tctagatcgcgagcggcccccttttacttgtattaaaaaaaaatgatgggttgaaaatgtactgaggattaaaaatgtacttttttataaataaagtgtttaaaacaaaaaaaaaaaaaaaaaaaaaaaaaaaaaaaaaaaaaaaaaaaaaaaaaaaaaaaaaaaaaaaaaaaaaaaaaaaaaaaaaaaaaaaaaaaaaaaagggggcccttttaaaaaaaaacccggggggggaaatctttcgcgctgctcaaaaaaaaaaatttttttccataaaaggggaatataaaaaaaaacagggctggccctttttataaaaacgtgactgggaaaaaaacctgcccggtgttttttttaaaaaaaaatttttttttgggggggaaaaaattaggcacacactccaaaaaaa

SEQ ID NO: 100870 - DNA, 400 bp, Homo sapiens
gaagcgtgaagtccaaacttgctgtccagactctagcttggctgggtctttgcttgtaccacccaaaaaaaaaaaaaaaaaaaaaaaaaaaaaaaaaaaaaaaaaaaaaaaaaaaaaaaaaaaaaaaaaaaaaaaaaaaaaaaaaaaaaaaaaaaaaaaaaagggggggctttaaaaaaaaaaaccagggggggaaaaataaataattggaaaaaaaaaaaaaatttttcttataaaaaaggtataaaaaaaaaaacccaaggagggtattttaaaaaaatggctggggaaaaaaaaatcattggggaaaatttttaaaaaaaaaattttttttggggggaaaaaaaaaaaagaaaaccccctaaaaaaaattaacctgctaggagaaaaaatatataat

SEQ ID NO: 100871 - DNA, 404 bp, Homo sapiens
aacagttgtaaaaatgtacttagaacaagcagtttcctgcctggttcagctgatgccacatgtgttatatagaagtatgtacagccacatccaaggatgataaagggaagaataattagcaaatttgtaaattgtgcctccgttttcttagttttgaaacattaaatcttacatcttgactaaaaaaaaaaaaaaaaaaaaaaaaaaaaaaaaaaaaaaaaaaaaaaaaaaaaacaaaaaaaaaaaaaaaaaaaaactaaaaaaaaactgaaaaaaaaaataaagcgaaacaattataaggacaaaataaagaaaatgaaaaaaaataaacggagggactgcatgttaaatgtgacggagataacactgtcatgatgaatagactcatgttttctctatttggg

SEQ ID NO: 100872 - DNA, 394 bp, Homo sapiens
acgcccacgcgtccgcaaatgtatattttgttgcttaaatgtgtctttgcagaaattgacaataaataacatattttgtgtcaaaaaaaaaaaaaaaaaaaaaaaaaaaaaaaaaaaaaaaaaaaaaaaaaaaaaaaaaaaaaaaaaaaaaaaaaaaaaaaaaaaaaaaaaaaaaaataataaaaaaaaaaaaaaaaaaaaaaaaaaaaaaaacaaaaaaaaaaaaaaaataaaaaaaaaaaaaaaaaacactaatacattacaaacctgaacgacaaaaataagaccctgtctcaaaataaataaattaattaactaaattaataattgctaaaacaaaccatttttgagaatataattaaattaaacattatatccaaaaaatttaatttaa

SEQ ID NO: 100873 - DNA, 383 bp, Homo sapiens
cccacgcgtccgatcatatttaaactacagaaaaaattgaaagtagaactactatttgattcagaaatcccattactgggtaggatatacattccatatattccatgggtgatacgtgtgtgtgtgtgtgtgtgtgtgtgtgtgtgtgtgtgtaatggaatactagtcagccataaaaagggacaaaatagtggcattcacagtaacctggatggaattggagaccattattctaagtgaagtatctcaggagtgggaaaccacacatcatatgctctcgctcataaattaagccaatctatgaagatgcataggcataagagggatatcatgaactttggggactcgggggaaggctgagagggggtaaggaataaaagact

SEQ ID NO: 100874 - DNA, 326 bp, Homo sapiens
ggtgaacttacaaccatctgtgggctccccctcatattcatcaccgtatcaacagcttagaagaaaaccccaaaaaaaaaaaaaaaaaaaaaaaaaaaaaaaaaaaaaaaaaaaaaaaagggggggggcttttaaaaaagccttggggggggccctatttttgggggggtggggaattaaagtttttttttttatgggggggttttataaaaatgggctcggggggggttttttaaaacggggaggggggaaaaattgtacatgggggttttttgggaagaacttttttttttgggggggaaaaattgggggaaacctttattaaa

SEQ ID NO: 100875 - DNA, 329 bp, Homo sapiens
cagtaatattaataattttcatgatttgagaagccttcgcttggaagcgaaaagtcctaatagtagaagaaccctccataaacctggagtgactatatgtatacgggttttactaccctaagctggctccaatggcatatcccttggcctcacagactttatgatggaggatactacgatggtcttgttttgacgtcaggacttgggccctattgaggctgtattattttggcccgtcttattagcaccgatttggtttaaaaggccgtgttttttgggaggactggttatatcccggggtgtgtatcccctttcaatatttaatggtc

SEQ ID NO: 100876 - DNA, 366 bp, Homo sapiens
attgtaagttcctaaaaacattttaataacaaaatgtctacttgtttaataaaaaaatgtgatctgtaatttctttgtgcagaatgatttgaagtattgtattcagtttacatgcattattggtttataattaatatctaatgaaaatacatgttgttatattgtaaaaaaaaaaaaaaaaaaaaaaaaaaaaaaaaacccaaaaaaaaaaaaaaaaaaaaaaaaaaaaaaaaaaaaaaaaaaaaaaaaggggggccccttttaaaaaaccccctgggggggcccattttttccgggggggacaaaataaaattttttccccaaaagggggggtttaaaaaaggtggcgctggggccttttttaaa

SEQ ID NO: 100877 - DNA, 361 bp, Homo sapiens
cagaggggaattttaagcccttctcatcacccaattggatgtttttgcttatagcaaattcctgcaaaataaataaataaatatttgcaaaactaaaaaaaaaaaaaaaaaaaaaaaaaaaaaaaaaaaaaaaaaaaaaaaaaaaaggggggcccctttaaaaaaaccccccggggggcccaaatttccccgggagtcaaaaaaaaaaattttccccccaaaggggggtttaaaaaaaaacaagccccgggccctttttaaacaaccagaaaggggaaaaatctctacctgggcaattttgaaaaaaacccttttttttgggggggaaaaaatgtgaaaaaaccccccccaaaaaataaac

SEQ ID NO: 100878 - DNA, 336 bp, Homo sapiens
catgattgcaccactatactccagcctgggcaacagagcaagatcccatctcaaaaatttagcaggtagagacgaggtttcgccatgttgcccgggctggtctcggactcctgagctcaggcactccgcccgcctcagcctccaagggtgttgggattgcaggtgtgagccatcgtgcccagctgcagatgggttgtagttttaaacagggtagtcacggtgacctcattgaaaaggtaatgtgagcaaagactcgaaggaggtaaggggattaccatgtggatatctgtaagaagattgttaataggcagatgaaacggtgcaaagctccgaagc

SEQ ID NO: 100879 - DNA, 357 bp, Homo sapiens
aaacatcactttggcttcgaagccgccgcctgatactggcattttgtagatgtggtttgactatttctgtatgtctccatctattgatgagggtcttaaaaaaaaaaaaaaaaaaaaaaaaaaaaaaaaaaaaaaaaaaaaaaaggggggccccctaaaaaaaacccccggggggccccaaatttaaccggccgggccaaaaaaaaacctcccccaaaagggggggcaaaaaaaaaccgagccacgggcccttttttaaaaaagccgggagggggaaaacccctacctgggaaattttgagaaaaaaccttcttttggggggggaacaaaatgggaaaacccccccgacgaaattag

SEQ ID NO: 100880 - DNA, 287 bp, Homo sapiens
acactgagactgactgggcatggggctttacacctggaatgccgccactttggcaggcccttgcaggaggatcactagaactcaccctttagagaccagcctgcacaacatggcgagaccccatctctaataacatctatactaaaaattaaaataaaaattagcaggcatggtggcgcgcaccatggggcccagctactcaggaggctgatgtgaaaacatagcttgaacccgggatagtgacgctgcaatgagccatgaacggacctttgaattccactctggag

SEQ ID NO: 100881 - DNA, 382 bp, Homo sapiens
cccacgcgtccggactagttctagatcgcgaggcggccgcccttttttttttttttcccggaacccaaaaaatttttggaagttataaggaagccaacggattggcaaaaaatacaataatattttcccaaaaaaaaaaaaaaaaaaaaaaaaaaaaaaaaaaaaaaaaaaaaaaaaaaaaaggaaaaaaaaataaaagggggggggcaggtctagaaaaagctacctagggtgaagaaatgcctgttggggatataacgaagattgacttggacaaagggggagactaattgcataggatgattggccgtgaagactctacactgaccgggaagtaggatgctgcctttcataggggggaagctatctgtttgtggcaaag

SEQ ID NO: 100882 - DNA, 353 bp, Homo sapiens
agaaccctctaaatccccttgtaaatttaactgttagtccaaagaggaacagctctttggacactaggaaaaaaccttgtagagagagacacagagagaaagagacactcagaaaaaagagaaaccaacacacagaggcaagagggagacagagagagaaccatccggagaccgagtgagagacaggacagagagacagagacaaacagaccaagaaacagaaagacacagacatacaggcatacacttacacagacagagaaaaaagagacaaaaagagacatcgacagatcagataggcagaggcagagaggatcagagacacagagagacaaagagacatctgagaaagg

SEQ ID NO: 100883 - DNA, 346 bp, Homo sapiens
ctggtctgatggctatgagcctatttcacaaccacaactaaataggaaacagggctcaaaaagtggggtgatttatctaatggcacagtcagagctgtactgaacctagcccaggctgacttctgtgtcagcatcccatcttatcatattaaacatggtaacacaaaaaataactgtggaggggagggaaaaaagaaaatactggttgtaacagctaagaagtctgagccaggtgtggtgactcatgcctgtaatcctaacactttgggaggctgaggtggaagggtaacttgagggcaatggttcaagaccggcctaggcaacatagtaagaccctgctctacaa

SEQ ID NO: 100884 - DNA, 333 bp, Homo sapiens
cttgaattcagtttgctagtattttgttgaggatttttgcatcaatgttcatcagggatattggtctgtagtcttcttttgatgtgtctttgtctggttttggtatcagggtaatactggcctcataaaatgggtttggaagtattccttctttctctagttcttggaaaaactttagttttgattggaccaagtcctttacacgtttgatttactcagctcttgagccattgttctctgcatcttttctctaccggcatactttgtatcttgctattgatgtgctgtcgtatctcattgccactcccggcttccgtccttacctgcatgtcc

SEQ ID NO: 100885 - DNA, 342 bp, Homo sapiens
gtccaagagagccaggccatcactaaaggcaccgagcacttacttgccatgagccttcaccttagggttgcccataacagcatcacgagtggacagatccccaaaggactcagagaacctctgggtccaagggtagaccaccagcagcctgcccagggcctcaccaccaacttcatccacgtgcaacaggccacaccaagaacgtgaaacacacagcagctccctaccaacagctacgagaacacactggcctatgcactatactactggaatgatctatacgttcacgcgacaaacctaccgacccttgtgatagctcgttgagcacatagaagctgaagg

SEQ ID NO: 100886 - DNA, 337 bp, Homo sapiens
ttcccatctttatgtgcatatgcactcgatgacttacgagaacatgttgttttcggttttctgctcctgtgttaattcactaacaacctccagctgcacccaccttgctacaaatgacatgattttgttcctttttatggctgcatagtagtccatgatgtatatgaatggctcacatttactgcacacttaccttcgtaacaactgtgagtcaggtactagcattattccagcttacagtggaaaaagctgagtcagagagggtaataaaattgcctcggatcacacagttatcaagtagtgaagccaagaatcaaacccaagcagtaagcctggg

SEQ ID NO: 100887 - DNA, 271 bp, Homo sapiens
ctcccgagtagctgggattacaggtgcccaccaccatgcccagctcatttttgtatttttagtagagacagggtttcaccatgttggtcaagctgctttcaaactcctgacctcaaaccaccatgcccggccccaataactacattttttttatttttttaaatgactataattccatggttaccgcggatcgaatgtttggacttaatttagtcatgatactaggtcataatgtgataatttttaaccttttgccttttagcccagaagg

SEQ ID NO: 100888 - DNA, 306 bp, Homo sapiens
tgtttttattccgagcagtctaatccttttagtagtcactcataggccatacttagggctaggatgatgattaataagagggatgacataactattaatggcaggttaaatgtttgtagggctcatggtaggggtaaaaggagggccttttctagatcacataataagaaggtaatagctactaagaagaattttatggagaaagggacgcggtcggcggatatagggtcgaagccgcactcgtaaggggtggatttttctatgtacccggagagatgtgggagccaaaatgtaataatcattact

SEQ ID NO: 100889 - DNA, 320 bp, Homo sapiens
ctctgttcataaggctgcagtagaatgtgacatgaacacaaagtagctacacacaaacccatgctaaaacttcgttaactagaacttttaaggaattggaattttccacaggtggaaagaactcctgctgcaaggtaaacctcaagttcatatgaaattttaaaagcattaaagatggtcagaaacacaaccaagtagctataaaaatcaagtcctgcctgtactcctagcactctgggaggctgaggtgggtggttcgcctgagtccaggagtttgagacaagcctagacaacatggtgaaaccccaactctactaaaa

SEQ ID NO: 100890 - DNA, 167 bp, Homo sapiens
cgcgggcatctggattctgactaataaaaaacatttatattcattgcaaaaaaaaacaaaaaaaaaaaaaaaaaaaaaaaaaaaaagaaaaaaaaaaaaaaaaaaaaataatttcatggatacaaaaataaaaaattaaattatgtaactatacaaaactcaggaag

SEQ ID NO: 100891 - DNA, 400 bp, Homo sapiens
  misc_feature (1)...(400): n = a,t,c or g
gttcccagctccgatcagtgcagccacgcagcctggaaatgaactgcccacgccctcatgtcagctccttcccattttctcttttctcttcctcttctcagagaggccttcaactcttaaagttgagttccagaatcaatcaagggcctcaccctgggcaagacagcaaaaccccgtctctattaaaaaaaaaaaaaaaaaatccaaaaattagggaagcccaggggcacacacctgtagtcccagctactcaggaaactacgggggcagaatcacctgagcccaggaagtaaaggctgcagtaaaccaggattatgccacgtgactctggcctggagacagagtgagatcgacgcggccgaaattccgatctatgaatcganatactgagaaccccgan

SEQ ID NO: 100892 - DNA, 338 bp, Homo sapiens
gtgcgatcttggctcactgcaagctctgcctcccgggttcacaccattctcctgcctcagcctcctgagtagctgggactatgggctcctgccaccagtttttttatttttgtagagatggagtctcccgatgttgcccaggctggtcttaaactcctaggctcaagggatcctgccagctgggccttccaaagtgctgtgatgataggcatgaaccacctatcccagcccatttcctttttccctttgtacagtaccagatatatgtgtggactggatagtagttttctacctgcggacgcttcgtcgggactagttaggtcacgccgacgcgaata

SEQ ID NO: 100893 - DNA, 308 bp, Homo sapiens
ggaagaggttgcaatgagctgagatcgcaacactgaaccccagcctgggcgacagagtaagaccccatctcaaaacggcaatacgaatgtccttaaaacaaatggaaaatagaaaagaaatgaaagttatagaaaaaaaagaccaatggaaattataggattaaaaaatacactttggaaatggagacgggcagataacttgaggtcaggaggtcaagaccagcctgaccaacatggagaaactccgtttctaacaaaaaatatacaaaaattagccggtgtcgtggcaccaagatcacaccactgca

SEQ ID NO: 100894 - DNA, 336 bp, Homo sapiens
  misc_feature (1)...(336): n = a,t,c or g
ctcccaaagtgctaggattataggagtgatccactatgtccagcctccaaatcctttctaaacactaggacttttcatgaaaagaaaaaagctatgccagttagacacacacagaaatctcatgattttattttgaatttctttgactaaattgaacttacaaataagtttattatggccaggcgtgncggtgcacacctgtaatcccggcactttgggaggctgaggcgggcagatcgcttgagctcgggggttcgggaccggcctggcggacgtggtgagacctcatctctacaaaaaatacaaaattagcggccgggagtggtggctcacgcc

SEQ ID NO: 100895 - DNA, 321 bp, Homo sapiens
tagtagatggtatgacctaaataatggcatccataaatgcttcagcacatagcttatattaacaaggatgttcccttatataactgtaatacgattatcaaactcaggaaatttaacactgatacaatattattattattattaatttttaaaattttttaatttttattttactttaagttcttgtgttagtttgctgagaatgatggcttccagcttcatccatgtccctgcaaaggacatgaactcattcttttttatggctgcatttattatttaaaatatatttcatctttaaaatttttctaattattccaatag

SEQ ID NO: 100896 - DNA, 310 bp, Homo sapiens
ctaggatttactataccatactttttattgttattatagagtgtgctcctgctatttactaaaaataaaaatacatattttatacatattttattttataaaatatatttttatagataaaaatatttttaaagtataaaaagtaaaaacataaaaatttaaattgaacaaaagcttacagaataaggatataaactattgctgtacagctgtatatttgttttaagctaagaattattacaaaagagtcaaaaagttttaaaaaattaaagtttataaagtaaaaaaagttacagtaaactaaggttat

SEQ ID NO: 100897 - DNA, 257 bp, Homo sapiens
cagtggtaagaaaagaacattcctctgtctttccctacaaaacaactcattttgttcacaggaatatggaggaaggcatataagaaagtactcagtgagctgggtggggtggtgcatgactgttgtcccagttactcaggaggctaaggcaggaggatcacttgagcccaggagtccaagtctaggctgggcaatacagtaagactccatctcttaaaaaaaaaaaaaactgctcagtgaaggtcgacgcggccgca

SEQ ID NO: 100898 - DNA, 339 bp, Homo sapiens
tagagacgggttttgccatactggtcacactggtctctaactcctgacctcaggtgatccgcctgcctcagcttcccaaagtgctgggattacaggcgtgagccaccatgcccggccatgtttacattctttaactgctttttttaaaaattggatggtttggcctgggcaacaagagtgaaatttcatctcaaaaaagaaaattaggtggtttgtagttttctccttcttctgtaggaaattttttttttttttttgaaacagtttttgctctggagtaaggctggagtcttgttctggagtcagggtttcgctttgttagccaggctggccttttct

SEQ ID NO: 100899 - DNA, 340 bp, Homo sapiens
agaaaaaacttttttaatttataattttgcgtgtttaacactatggatgttaaaaatatttaaattttccttatttttgtaccagatgttcacctgggctaacaaaaaaatttattacttgacacaatttaaaaaaaaaaatcaataaggatacaagagtagtgacaatacaaaagcattagtaagagaaactacaatactgtatcagataaaagttggctaggcacagtagctcacgcttgtaatcccagcactttgggaggccaaggtgggaggactgcttgaacccaggagttccagaccagcctggacaacacagtgagaccctgtgtctactatt

SEQ ID NO: 100900 - DNA, 322 bp, Homo sapiens
ttttgttgatttcagcatgcacatcctggacatgttaagtttatacctaagtatagtcatatgctacataacattgtttttgtcaataatagacaacatatacgtcaatggtccccataagattataataccatacttctattgtattaagtacattttttatatttatatatggttttgtttttggttttttgagacagtattgctctgttgtttttctgttttcaccttcaatgattactgctcttatcttcattatttccttcttctgggtgttttcggtttatttcactttttctaatttcttgaggaaggaccaccg

SEQ ID NO: 100901 - DNA, 305 bp, Homo sapiens
cgaactcctgggctcaagcaatcttcccacttcagcctcctgagtagctgggactacaggcatgtgccactgcacccagctaatgccttttttttttttaaagggccatagtcggaaccattaaccctggccagttccctacactggtactttcccggaggacattttttacagggacctgcaaaaatagatgacccaaatttttcccccattttgggaaagttgaaaaaaaaatcccccttttagctgaggataaataccagtattttttttgacctacaaaaggcatcattttaaaggcaacc

SEQ ID NO: 100902 - DNA, 328 bp, Homo sapiens
aggtgatccacccgcctcgagctcccaaagtgctgggattacaggcgtgagccatcgcgcctgcccttactttcccattcttaacgcctcccgtttcagacctgtccccttttccccgcatttctgactgtcacggcacatcacaaccagcagacagggcttcccctatttcacaggagaaatagaagccatcagatgggacctccttcaaagtcctgccaccaaacctcagcatgtacctggacccacatgtatcctcttttcctttgggattgaattagagaggtgccgctcgaaacccgctcctggatgggagtcttggctctat

SEQ ID NO: 100903 - DNA, 333 bp, Homo sapiens
  misc_feature (1)...(333): n = a,t,c or g
ttgacttgaattttttctaatggctaatgatgttgagtgtcattactcttttatgtacttattggccatttgtatatcttctttggagaaataactattccaaccctttgaccatttttaaattaggttgtatttatttatttatttatttatttatttattagaggcagatgacaagaccccataataaaaaaattagcagggtgtggtggtgtccaactgtggttccagccacttgggaggctgagatgggaaaatcacctgagtccaggaggtcaaggctgcagtgagctgtgattgtaccattgcactccagcctgggcgacatggcan

SEQ ID NO: 100904 - DNA, 334 bp, Homo sapiens
tccccatgttggccaggatggtctggaactcctgacctcaggtgatccacccgcctcagctttccaaagtgctgagattacaggcgtgagccaccacgcccggccaactttttatctctcttaacaagttggcttaactgttacctcctttaggaatcctcaataattttcttactcttctttggccaggacactcttctgtgtctccgtagtatcttgttcataattctatcccagcacctttccctccatattgtcatttctctgtatcatattttgctgttagactgtggctcattgatatgggtaattagctgttttgttcctgtattgg

SEQ ID NO: 100905 - DNA, 327 bp, Homo sapiens
atttttagtagagacggggggttgccatgtaggccagactggtctcgaacttctgacctccagtgatccacccaccttggcctcccaaagtgctgggattacacgtgagaatcactgcacccagccaatgaaattaatgcttaattctttgttatcttcagtggtcccaccatgacacaccatcacatgctaagctccctgtgaacagttgtgaggccctttacattaatacatctgtggcactgacgttgttgaataggtccaagcatacggaattatccaggcactatcagaacagagatgaacccaggagattgtggtatggaa

SEQ ID NO: 100906 - DNA, 299 bp, Homo sapiens
ggcatcccaagcacctgggactactggtgtacatcaccacaaccgcacttttaatttttttttttttttttttaataaaaaagggaccttgctatgttgcccgggggggtcttgaactcctggattccagccatcctccaacctaagggcccaaaagtgctgggattacaggcctggacaattctttataaggggtattatggaaaagaaatgtggcacaaggaaatctgcaaaggaacccacgatgttctgtccaagttgttaacaactaaacgttttaaaaggcttttataaaaatt

SEQ ID NO: 100907 - DNA, 304 bp, Homo sapiens
caagtttttattcaacacatttttcttcaatacccactgtacatttctaggtactataaaagcaaattatttaagtcactttttttggccgggcatggtggcttacgcctgtaatctcaacactctgggaggcctagatgggagtactgcttgaggccacgagttccagaccaacctgggcaacatggctagacactgtctctacaaaaagtaaaaaaatatatactgaatctggttttataagatagaccaaggaattagattatgttatgttccatttattgtataagatgtttactatccg

SEQ ID NO: 100908 - DNA, 301 bp, Homo sapiens
cgggataataaaatctgtgtggctaataaatcactgatttccaaaagcactactctacacctagtatacagtaatttgagaaactattacatttaaacatttaaacctacaggtatctctgactttgataattattctttaaaaaaaaaaaaaattccaggaggctgaggtgggaggatggccttgagcccaggacgtggaggctgcagtgagccatgagggtgccactgcacaccagcctgggagacagagcaaaaccctgcctaaccctgccccccgcctcccaccaaaaaaaagaatc

SEQ ID NO: 100909 - DNA, 297 bp, Homo sapiens
gcgagtggtgatcacaccactgcactccagcctgggtgacagagtgagaccctctctctaaaaaaaaaaaaaaaaaaatccaccatgttacactcataatctccatgggagcagttccttttatcagtaaattgctggtcacaggccacagggatcttttggggctttcatgaatatttcatcatgtttagggcaatcccataaaccttgaataacacgatgggacccatatggagggccactactgatgctgaaaatgctcccaaaaagcaaaaaaaagtcatgactttacaagaa

SEQ ID NO: 100910 - DNA, 580 bp, Homo sapiens
ttcatatcctgtgatatttgtacaccaaaatgtatttgatacagttagtaagtagacaattgctaaaggcaggtgtatctataaaggtaactagaaggaaatagattacataaaacaaaatattcactggattactcattctaattggtggctataaatttaaaatttaaaattatttgtaattattgagtgaaaaaaagatcattttctctttaacaaaatagtgagccataagttttcaagaatatagcatttggcaatgtaagtataagaaaaagaatcagggctgggcacagtggctcacgcctgtaatcccagcactttgggaggccgaggtgggtggatcacaaggtcaggagagcaagactatcctggccaacgtggtgaaaccccatctctaccaaaattcaaaaacattagccgggcatggttgtgcgcgcctgtagtcccagctactcgggaggctaaggcaggggaatcgcttgaacccaggaggcggagatttcagtgagctgagatcgcgccactgcactccaggctgcctggcgacagagcgagactccctctcaaaaaaaaaaaa

SEQ ID NO: 100911 - DNA, 290 bp, Homo sapiens
tgccacggcatcaagcttaggggttgacaggtcattgtattattttactggtaataagcttccaaggaaggtgattctttttttttttttttttttatgaaccgaactttttttttgcaaacgggttaaagtccggggcccctttttggtttaattgaacccttgccttcccggtttaagggattcttttggcttaaccttccctaaacatgggaatatcggcttgcccttaccgccccaatcaaattttttaaatttttaataaaaacggggtttccccattagggccc

SEQ ID NO: 100912 - DNA, 332 bp, Homo sapiens
  misc_feature (1)...(332): n = a,t,c or g
caggaggaaaatgtagaaaagttcagggactataaaaggcagggcacagtcaccatttcttcagttagtagctatagagcaatgtcaagactgttttcatttcagatctcaattttagtatttaaaaaaacaactacagccaggcatgatgatgcatgcctataaccccagctactcaaaaggctaaagcagaaggatcacttgagctcaggagttcaagtccagactgggcaacataacaaaactttgttgcttaaaaataaataattcattaatttttaaaattacagaaaacattgaataagttttctaaatactcagttcttagaagn

SEQ ID NO: 100913 - DNA, 355 bp, Homo sapiens
  misc_feature (1)...(355): n = a,t,c or g
gtttcagccccccacgcccaactggtttgtaagattttttttgagacagggtcctactacattgcccagtctgatctcaaacttctgacctcaagtgatactcccacctcagcctcccaaagtgctgggattacaggcatgagccactgtgtctggcctatatgttgatttttttaaaacttcaacccaatcttacagcattgtaatgatgatgctgtgagtgtactgattattgattatacaccaaatggtgtgattggacccatggagaaggaaatgcagtgctccgtgtctaagtgtttgccacttgaaggaagctgtcacaagaatcaaggtccaggggattctccactgn

SEQ ID NO: 100914 - DNA, 411 bp, Homo sapiens
ggcacgagcttttaacaatagccttatcatccccaccatcatagccaccatcgttgtagggacagtctcattgctgtcttctagcagacagaagagttaggtgccagaaaggacaatcttgatggtgggtcccctccctgaaggactttatgaaggcataaaggggttggagtggagggtggcccttgaaggccgagacccttggctgggtcaattttttctggaagccgtcgtcaaaaggactgcggcctttttacagttttttctctgcaaaaataacccttttatgatggggggggatgcctcttttatcacggaaattggcctttcctttttcaagggggaccttggactccctctctgaggagatggttttgccggttagggtttttagaaaaattggaacccccc

SEQ ID NO: 100915 - DNA, 392 bp, Homo sapiens
  misc_feature (1)...(392): n = a,t,c or g
ggcacgaggctttaagatgaccttactcacacgtttgggggttctggctgtttgcaggactacaagtctctggtaggctttgcaggtttgtttacatggtggcagccttctaaaagtagcaagaaagagttcccagcaccaagagggcaagatccagtgcaggagcaattcttaaacttctgtttgtgtcatgttggctaatacctctttggccaaagtaagtcccatggccaagttcacagtctgtgaggaagagggccatgtagggtcatggatacagcgaggtgtaatacactaggagtcactgctgtagcctgtatcacttttgcaccaaccgtgtgtgtgtgtgtgtgtgtgtgtgtgtgtgtgtgtgtgtgtatggttgacattan

SEQ ID NO: 100916 - DNA, 415 bp, Homo sapiens
ggcacgagggcgcagtggctcacacctgtaactccaccactttgggaagattgctgtgaggctgggagtttgagagcagcctgggcaacatagggaaactttgactctacagaaaaatacaaaaattagtcaggtatggtggcttatgcctgtagtcccagctacttaggaagctgaggcaagaggattgctgtagcgcaggcgccccttttttacttcccgaggggcgggattacccgggggaacgcccaccattatgaccggggctatgatggttatttccaggaggggctgtttattagctcaaaatcgataaacccttgttttgtctaaactcacacttatgcggggtaaatatagtcaacctgatgtctgagaatatggggcctgcaacccaggcattctggaaaacaaa

SEQ ID NO: 100917 - DNA, 269 bp, Homo sapiens
attttttaaacagttttcgtggagacaaggtcttgctatgttgcccaggctggtctcgaactcctggcctcaagtaagcctaccaccttggcctcccaaagtgttgggattgtaaacatgagccaccgagctcagccattcctttataataggaatacttggggctcatatctttgacctaagtcttatttgtatcagtgagattaatgagccagaactccgatgatatcaccagacatttttgatttgcatttatatacgtaaggggg

SEQ ID NO: 100918 - DNA, 362 bp, Homo sapiens
ggcacgagcacacaggagccagatcctaaaggctttgtatgccacattaggaaagaatttggaatacagcttctgtttggaaaacattttctgtaaccagcccgacacagagacggggttttgcatggtggccaggcttgactcgaactcccgatctcaagtgattagcccgccttggcctcccaaagtggtgatattacacgtgtgagcctgcgactctgacgcggaccatcttgtcttggcgttcccttttaccggtcggcggtggcccagcacatgtgtgtttactccgaggcactgtctgttagatggtgctttggatacgcgggtccttcggactgttgctcgccgggcttttgggg

SEQ ID NO: 100919 - DNA, 419 bp, Homo sapiens
ggcacgaggggtctcgctctgttacccaggctggagtacagtagcaccataatagctcaaagcagcctccaactcccaggctcagctgatccttctacctcagcctcctgagtagctgggactacagggtcatgccgccacacctggctttaaattttttatggaggtgggggtctcactgctttagcagcgtcccggctcacttaaagcgctagtgctaaccccctaccatggcatcctacaaccgaagtgtagctatcatggacttacccctgcttcatctcatttagacccagaggtttaggtcctactccttatactcctacctgaaagatctgttgcacggtttgaaagtcacctatgtgagatccaagaggcatagcgctttttctgcgaccctgttgaatgccctgcccctg

SEQ ID NO: 100920 - DNA, 422 bp, Homo sapiens
ggcacgagccatgagcttcaataccctgccctgaaattctagaattctttccacgtagggcacagaatcatgaagttcaatttctctagttgttttttatatgatagtctcatcttttcatctggattaaaagtccacatcttagagtcccttgccatgccctccatctcaattagggcacttaaagccaaacagctgccagcattttccacaattacatgtattacattacagacacacatacacacatacacatatacacatggatacatacttataaatctatacatgatatgtaggcatgatatgtatttacacacacatcatgggatatatatgtacataaaaaatacggtgtatgtgtatatatctaagacatatatgtatgtataaaacatgagatacatatgccttcatttatt

SEQ ID NO: 100921 - DNA, 390 bp, Homo sapiens
ggcacgagagcagctatgtacagatgtttgttccagtagtcccagctacatgggaggctgaggcagaaggatctcttgagcccgggagttcaagcccagcctaggcaacatagggagacctcgcctgcaaaaataaatataatttttttaaaaagatgctccatgacttacaatgggctacctagctacctcacaactgtaaattagaaatatcttgagttgaaaatgcattgaatgcatctaacctaccaaacatcacagtttagcctggcccactttaaacgtgctcagaacacttacattagcccacagctgagtaaaataatcttagataaagcctatttgtgatacagtgttgactatctcatggaatctactggacggtactga

SEQ ID NO: 100922 - DNA, 361 bp, Homo sapiens
ggcacgagaataaatgttagccactgtgattattctattattcccgtcctcgttgtaaatatttgtgtggcttggtgcctagcgtcttttgtagctgtatgtattgccaaggagaatcccaaggaaaaaaagtagaaatatggttaaagctggctgggcacagtggctcatgcctataatcccagcactttgggaggccgaggcaggcagatcacttgagtgcaggagtttgagaccagccagagcaacatagcaagaccccttctctacagtgtgctggcatatgcagtgcagccaccattgcccatggtagcgatgaggaagctgtggcttataccaacttccagaatcactgctctgc

SEQ ID NO: 100923 - DNA, 397 bp, Homo sapiens
taatacgactactataggagtcggcctcgaggcaagaattcggcacgaggcaacagtacttgataaaaaggtattttgtttgttttggtttgggatggtcagctctacaaagatgcatgtgaccttaaaaatatttagaaatattataatactacagacaggccgggcgcggtggctcatgcctgtaatcccagcactttgcgcggctgaggcgggcatagcacctgacgtgaagacccggagatctggctgactaaggcggacatatcacctgtggactcgagttacaaacccacctgggcatcagtggaagaacttgggattagtaataataccaaattacgtggacggggggcacacgcatatggtccagattctttgggggggaaccgcttaa

SEQ ID NO: 100924 - DNA, 1413 bp, Homo sapiens
gcatctgcccataggaccagctatcgctatatcctttgacagagcagcctacgatgccatgtggtagtgctcaggacagacatggtgcccatgcatacaggcataaagtcctgttcagaaatcccctatccaccttccctacccactgctggctgaaaaactaccagacttctatgtgggctctgatgtccttagcatgcagggtaagtgacaaacctggcttccttcttgtcacttgccagtatgacttcactgacctagacaggccgtaagaactctttccccataactcttaagtaatccaccaacacattccagaaaaccgactgcagaaggtgggctttaaaaccttaaaaacctaggacaatgaaggagtccaatcccttggcagatccaacaagatggctggggagagggagaaacaaactggaggctcccaaaggaacctaacttagcaaaggttctcatcttataccctccccttacccaaatactgtcctactgaaagggccctaccagttaagggatctcttctaaataacaggcaacccctagatccaagtagttcagtccaggaagactgggagccaatcactcttgaaccttgtgggcaaacagtatgggggaggaccctcttgacaggccttggtaggcaagattccaacgcaggaagacagcaagatggggcctagagtatggggccctacatgctgttaaggttgtggttaggaatggtgcaatgctgcaggagctggaacaaagctacaccaaggaacagagcacagagcagcaggggccgaaattgaggaggccttaaatgctttgagcttttgccttcagtctaaagctgtagaatagggggttaagagcttaggctgaccacagggaagtttacaagctagagcgaatatctggactgctaatatctgacaacagtaggcgaaatttactttttcttcaaatacacattttcaagaattgacacccaagaccatcctttattgtagtattagttcatggtaactgcatgaaaaaacatttcaggaggaatttacaatttccagcttaaagaacttgcccaccaacataaccaatttatgaaagtcaattcattaaaaggtatagaacctcttgttgggcatgatggcaagggacaaagctacaacttggcctgtgcctttggaagctgaggcaggaggaccatctgagcccaggagcctgagaccagcctgggcaacatagagaatccgtctcaacaaaaaaaaaattttagccaggtgtgctgtgagctgtagtcccagctacaaggtgggaggattgcttaggcctgggtgattgaggatgcaatgagctgtgattgtgccaccacactccagcctgggcaatacagcaaggactgtctcaaaaaaaaaa

SEQ ID NO: 100925 - DNA, 353 bp, Homo sapiens
ggcacgagggcagatcacttgatgtcgggatttcaagaccagcctgggggacataccgaaaccctgtctcttctaaaaatacaaagaagtcaggcgtggtggcatgtgcctgtaatgctacctactcggtagatcgacgcaagagaatcccttgaaaggcttatgaccatagcgttgttaaaagtgagaaatagatacattttctaatagaagatagtgggaaaagtggcattgctttactttcattctttgtttacaaaataaaaaaagggtttaagaggttaacaagtcttaaaagccctttcaaggggtggcttctaatagagacactctgtgtcctaatacgggtttcg

SEQ ID NO: 100926 - DNA, 340 bp, Homo sapiens
  misc_feature (1)...(340): n = a,t,c or g
ggcacgaggggagaggatattagcaatatatgtgaaaaataaaagttaatatctttaatattaaaagagctctcttttttactttttaaaaatagagacagggtttcactatgttgcccagactggtctctaactcctgagctcagatgatcctcctgcctctgtcttccaaagtgccgggattacaagcatgagccaccacacccagcctaaagagctcttaaaatcaacaagaaatacacttgaagaacccaacagagaatgggcaaaagctagagaatgggcacatagaagaaatacanattgttaaaaaacattaaaggatttcactttcattaat

SEQ ID NO: 100927 - DNA, 344 bp, Homo sapiens
ggcacgagctggaaggatcacttgagcccaagagtttgagaccagcctggcccaacatagtaagacctcatctcaataaaaaataataataataataaaggccaggagcagtggctcacacctgtaaacccaacactttgctttgggaggccaaggtgggcagatcccaaggtcaggagttcaagagtaacctagccaacatgatgaaacccagtctctgctaaaaatgaagaatacccgagggggactttcgatcttggcacccaggctgaagtgcaatggcatgatcttggctcactgcaacctacacctcctgggctaaagtgattctcctgactacacct

SEQ ID NO: 100928 - DNA, 338 bp, Homo sapiens
ggcacgagcggatcacccgaggtcaggagttcgaaaccatcctggccaacatggtgagacccctgtttccactaaaaatacaaaaaattaggcatggtggcgtgtgcctttagtcccagagtgctgggattatattttgttttacatgtttacaaattgcatggataataaattacctaaatggttaactttgtgttaaaaaagggcaagatgtagaaatcacctatatgacaaactttggatctcaaaaagaggtaactgtgcggactaaagacttttgacggatctggacttggtgctattccggagtaaattgttgctaaaattctttgagtggg

SEQ ID NO: 100929 - DNA, 340 bp, Homo sapiens
ggcacgaggtgaaatcatgtcctttgcagcaacatggatgcagttggaggccaatatcctaagtaaattaacacaggaatagaaagccaaatactgcatgttctcacttctaagtggagctaagcattgggtacttatgaacataaaggtgggaacaggagacactagggactatttgggctgcagtacccaagcagtactgaaaaacttgggtactagagctgagtagtacctatagggctgaaaaattacctactaggtactgtgctcaccacctgggagacaggatcattcatgccccaaacttcagcatcatacagtatacccatgtaacaaacct

SEQ ID NO: 100930 - DNA, 352 bp, Homo sapiens
  misc_feature (1)...(352): n = a,t,c or g
ggcacgagggtagaaattacacccttactggtagggacagctgtactctggcggcctcagctgagaaagcttgtggtgcctgcccactgtggggaaaatgtgatgctgagagcagcaaatgtgtctgccgagaagcatcggattgcgaggaagaagggattagcatttgtgtggatgtgaactgcaaggagcagactatgcctgagtgctaggcggtcgctctgtaatgcacagtgcatctcatctatgtcaccattaataacgctctgtgcctgccacaacttactctgttcttgtagcgtctgcttaagtttgcttggaaatcaccatctcagctgtttcttttagaaan

SEQ ID NO: 100931 - DNA, 351 bp, Homo sapiens
ggcacgagggtagaaattcattattattaacataccatttttcatttaaccatttctcagctatagggcatttggatcccttttccttttcttttctttggcgatgatgaatagtaccatatacatttttatatggatcgtctttttgttttggattatgtcagtggaacatatacacacatgcggatttatcctatcaaaagatttaaagaggactaggcacagtggctcacgcctgtaatctcaacacttttggaggctgaggccggtggatcatttgagcccacgagtttgagaccagcctgcgcaatataacgaaaccttcgcttagagaaaatcccgatatgttag

SEQ ID NO: 100932 - DNA, 307 bp, Homo sapiens
  misc_feature (1)...(307): n = a,t,c or g
ggcacgagggcagaggtaacagcagagatgagacagcatgatgccttcagggaccatgtagcttgtaaatggattttaatcttttgtcgtaaagacaataaagagcccctggaaggttttatttggtttaaagatctatctacctttattgtttttttttnttctctgatgacaaatcatatatgctcattataaaaagcaatgaacacattacangtatatatatttatctagatacagatgtgtgtgggtatgtgtgtgtatatatataagtnttatatatataaagtaaagcatatatatctat

SEQ ID NO: 100933 - DNA, 443 bp, Homo sapiens
  misc_feature (1)...(443): n = a,t,c or g
ggcacgaggaaaactgaggcttagacaggctcaatcatttgttcgggatcacatggctaacagtgagcagtgaggtttgagcccagctttgactggccctagggtctcagctgcaacacacctgtagagcctcttggcttcatccttgcatctgggacaacgcctggatcatagtaggcacgtgtctacctctgatcacatctagagtgaggtacagaccctgacaaatcaccagagctcaccagagggtggctgcatcaacaccgtttctagaggaggcactcacagatgtcaaagttgaaaacatggttcngggcagtggctcatgcctggaatcccagcactctgggaggccaaggtnggaggatcacttgagtgcgcgagttcgagaccagcctgggcaacactgcaagacccaatctctactggaattanaaaaaaan

SEQ ID NO: 100934 - DNA, 447 bp, Homo sapiens
ggcacgagctctctctttctctccttctctctccttttttctttaaaaatgagaaagggtctcgctaagttgcacatgctggtctcaaactgctgacctcaagtgatcctcccacctgagcctcccaaagtgctagaattacaggcatcagccactgtgccaggcctctcctctctcatttcttagcttacttagcacttccatgccatcaaaaccgtctttgcacaggccacttaccaagtacatgatgctaaattcactagacattttcagtcttttttttttttttggctggtcctttgggaagccctaatttttgacacccatttcttaattttgaaaaaaccctttttctttgggcttttttttcttttggttccacaatttggtttttggaaacaaaatttaacctttggcccccagcctgaaagccaagaatataatccc

SEQ ID NO: 100935 - DNA, 449 bp, Homo sapiens
gcacgagctctatcagtctatccttctctctcctcttttctttaaaaatgatatagggtctcgctaaatagcgcatgctggcctccaactgctgacctgaagtgatcctcccacctgagcctcccaaagtgctagaattacaggcataagccactgtgccaggcctctcctctctcattgcttagcttacttagcacttacatgccatcaaaaccgtctttgcacaggccacttaccaagtacatgatgctaaattcactagacattttcagtctttagtttttttttggctggctctttggcaagatcgcatttgtgaataccattcctcttattttgaaaaacgatttttctctggcttttttatccgaatggtccaacatttggttttgtgaaacaaatataacatttggcccccgggcggaaggcaagagtaatacacgcctccg

SEQ ID NO: 100936 - DNA, 397 bp, Homo sapiens
ggcacgaggctactcaagaggctgacgcaagagactcgcttgaatcccgggggcagaggctgcagggagccatcattgcactattgcactccaacctgggcgagacagagccagactgtggctcacaattaaaagctcataaagggatgattcatgtaccacccaggaccgagcataacagtgagagattttatcatgttactcagaatggtgtacactttaaaacttcaaagtgtttatttctgccattctcatttaatgatctcaaaccacagttgatcaagagtatctgaaacatggaaagcaaaaccacaggtaagggggttcctgtactgctccatatggtctaagtcttgaaatccccacaagaaaagatactgtttggatgtaactgaaa

SEQ ID NO: 100937 - DNA, 514 bp, Homo sapiens
ggcacgagagttggagttttgtttcccagcatccaaaggaaatccctaactttcattttttcttcccgtaagcagccccgaacacttacttataagccatctctacctgaattagcaatcatggataagctcaataactgatcatttccttatcagtttaaaccatatatattttaacactgtctctttttcacacacactagttagctaagaatgagctggggggctgggcgtggtagttcacgcctgtaatcccagcactttgggaggcggaggtgggcggatcacttgaggtcaggagtttgagaccagcctagctaacatggtgaaaccccgtctctactaaaaatgcaaaaattagctgggtgtggtggcaggcatctgtaatcctagctactcaggaggctgaggcaggagaatcccttgaacccgggaggcagaggttgcagtgggccaagatcacaccactgcactccagtctgggtgataaaacgagattccgtctcaaaaaaaa

SEQ ID NO: 100938 - DNA, 417 bp, Homo sapiens
gagaaactatatttagtgttaggtaaatataacatggctctttaattttgatataatcaagaggaaagatattgtgaatctcttaaaaactcaaagcttactggattgatgttgatgtactcttactaaaatcttaactaagtcctaggcaaggtggctcatgcctgtaattccagcactttgggaggctgaggcgggcagatcacttgagcccaggggttcaagaccatgggcagtgtggcgaaaccctgcctctacaaaaatgttttaaaaattagccaggcatgagagtatatgcctgtagtcttagccatgtgggaggctgaggtgagaggatcacttgagcctgggaggtccaggcagcagtaagccatgatcgtgccactgaactccagcctggacaacaacagaagtaga

SEQ ID NO: 100939 - DNA, 346 bp, Homo sapiens
ggcacgagcagggtcaggagttcgagaccagcctggctaatatggcgaaacccggtctttactaaaaatacaaaaattagccacatgtgctgacacacgcctgtaatcccagctactcaggctggtcttgaacttttgggttcaagcaatgctcccgccttggcctcccaaagtgccaggattacaggcatgagccatggcgtctggccagatgtaacttttttacaggaatcccctgggtgctgagttgagactaggtggatgcagggagaccaggtataggacaggttgagtcatgcaagtcacaggagttaggggtgcttaatggagctttttacaacaggcg

SEQ ID NO: 100940 - DNA, 315 bp, Homo sapiens
ggcacgagactgcatagggctcggcgtggtggttcatgcctgtaatctcagcactttggaaggctgaggtgagagaatcgcttgagcccaggaatttgagaccagcttgggcaacacagtgaggccccatctctaaaaaaaaaaaaaaaaaaaaagattttaaataatgcggcggaccgctattgcctcttaaagagggctgatcatattgtggacgcgtgccggatgttaagctttgatgcttgctaaagtggattctttggtctctgtagtagacgggtaagtgatttgtactgagacccttgtccgctttcg

SEQ ID NO: 100941 - DNA, 364 bp, Homo sapiens
  misc_feature (1)...(364): n = a,t,c or g
ggcacgaggacggggtttcaccatgttggccctgctggtcttgaactcccgacttcaggtgatccacccatgtcggcctcccaaagtgctgggattacaggcatgagccaccgtgcccaacctggatttttattctgaagactaatagggattctaaggaaggaaccagcctgattgaatttgcatatgtgtccacatctgctggctcacggctgtgtgggaggctgagtgatggggaggaaggattactgagtanggatctgaaggtgcggtctaatgctttatttctaaccagatgtgttgtctttgagatggtagcttagtttaagctagacacttaggacttgaatagcttctcaaacct

SEQ ID NO: 100942 - DNA, 370 bp, Homo sapiens
  misc_feature (1)...(370): n = a,t,c or g
ggcacgaggggacaatgtcttactatgttgcccaggctggttttgaactactgggctcaaatgatcctcccaccatggcctccctaagtgctgggattacaagtatgagccactgcacctggccaatagtgatcacctttggggagaggcactagaaaacagtagcaccaagagttattatttttcatttcatacctttctatacaatgtggtttgataggagctattccactattactggaaatgaaacttctatattatttcaatttcttactctgagcataaactatatatacatatacatacacaaaacaaatataaatataaataaatntgaggtcaaggaaagaaaagttttctcaattggctt

SEQ ID NO: 100943 - DNA, 1031 bp, Homo sapiens
ggaagcctttatgatttcagtattctttcctcttgtgtgtgctatttgtgataacacagattgtcacttactgattaggcatatgcagaagaagaaatttcatttgatttttctttagtgttctcttttaggtaatggaaatagatcggtctgccaattttgtaggtatgactcaccagaaagagatgcattgagtaagaagaaaaacaaatatatgtagtcagtttcctaactttagtaatgctaaatccaacactgatggcatgagttatccttcaggtgttaaagtatttttgctgattcatagcttgtaacttcgtgttctttagatgttgccagggatttttaataaattagctaagaagtgtgtgtgtgtgtgtttttaagagatggggccttattgcccaggctggactcgaacttctgagcttaagtgatcctcccacctcaggttccctagtagctgggattacaggcaggtgtcactgtgcctggctgaaagtatatactgaatgtttcatacatagcactctcctagaaataggggcaggaagtaaatgtcatggttgccttgcctgaaaggaacttaatcttgttgtggagcaagtgcaaacacttaagaaaacaaggaaggctgggccgtggtggctcaacgccctgtaatcccagcactttgggaggccgaggtaggtggatcaccttaggttgggagttcaagaccagcctgaccaacatggagaaaccccatctctactaaaaatgcaaaattagctgggtgtggtggcccgtgcctgtaatcccagctactccggaggctgaggcaggagaatcacttggatccgggaggcggaggttgtggtgagccgagatcacgccattgcactccagcctgagcaacaagagtgaaactctgtctcaaaaaaataaaattacccttttaaaagcaaaaaggagagaacaaaatgtgatgagacacagttaaaaatttttccttcaataaaactgaaaaaaattatttttcatcaaagtag

SEQ ID NO: 100944 - DNA, 350 bp, Homo sapiens
  misc_feature (1)...(350): n = a,t,c or g
ggcacgagagaaatatccagaattaaaacacgagtctcagcctgggcaatatagcaagaccctgtctctaaaaaaatacatatttttttagttagccaggcatggtagcacgtgcctagtctcagttattggggaggctgaggtgggtggatnccttgacctgagcccaggaggttgaggctnctgtgagctatgatcacaccgctgcactccagcctgggtaacagagctgagctatgtctcgtaatagaccaagaaagcgagcctctcagacctgcgcttggagcgaaattttatgccctcgagggaaaccactgttatctagatgctattcagtcttctatgatttg

SEQ ID NO: 100945 - DNA, 328 bp, Homo sapiens
ggcacgaggagaatattaaggaaaggcacggaagatatgaaaaaaaactcccagaggtgaaaaatacagtgtctgagatgaaaaatgtactggatgaataatcagcaaattagacactgtagaagaaaaaaatagtgaactagaagatatagcaatagaaactatctaaaatgaaacagagtgagggctgggtgcaatggcttacatctgtaatcccagcactttgggaggctgaggaaggaggatagcttgaggccaggagttcagcctggccaacatagtgagacccctgtctctacaaaaagtttaaaaattagctaaatggtgg

SEQ ID NO: 100946 - DNA, 253 bp, Homo sapiens
ggcacgagggcaaaagagtaaacagacaccatgaaaaaaaggatttccatgccagataagcatatatcattagatgtgctaagatacaacatcattagtccttagggaaatgtaaattaaaacctaaatgaggccggatacagtggctcacacctgtaatcccagcactttgggaggccaaggtggaaggatcacttgaacccacgagtttgagaccagcctgggcgacatgatgaaaccctatctctacaaa

SEQ ID NO: 100947 - DNA, 332 bp, Homo sapiens
ggcacgagagggctcgggaggacaaggctgcagtgagccataatggcgacactgcactgcagcctgggtgacagagcaagaccctgtctcaaaaacaataaagaaataaataaaaaataaaagcaatgaaacccttggaatactactcagcaatatataaaggagctaactattaatacacagaataatctagataaatctccagagaattatgctgagtgaaaagccaatcccaaaaggttacatagtatatgattctatttatagaacattcttgaaatgataaaattatagaaatggagaacagattagtgcttaccaggggttaagga

SEQ ID NO: 100948 - DNA, 340 bp, Homo sapiens
ggcacgagggaaaggaactggcatcttgcataagcattacacacacacacacacacacacacacacagacacacacacacacacacacattttagcttcccagctaattcttagagggatacatttgtaatattttagcagtcactacttctagaaatcatgaccagcttttctccatctcttggtctcaagtgttccttttcccagcaaccttcaggcttgctcagcagcatcgcaggggaaagggattccagaatccatggagagaacaccgtctctatgtgccttcacaacagactgaaggcagagctaagatcggatgtaattagtttacgtgtca

SEQ ID NO: 100949 - DNA, 385 bp, Homo sapiens
ggcacgagggtaaattgggggtggagccaagatggccaaataggaacagctccagtctagggctcccagcgtgagcgacacagaagatgggtgatttctgcatttccaactgaggtcccaggttcatctcactggggagtgtcggacagtgggtgcaggacattgggtgcggcacaccgagtgtgagccgaagcaggatgaggcatcgcctcatccaggaagtgcaaggggtcagggaattcgctttcctagtcaaagaaaggggtgacagatggcacctggaaaatcaggtcactcccaccctaatactgcgcttttccaatggtcttagcaaatggcacaccaggagattatatcccgcgcatggcttggagggtcctacgct

SEQ ID NO: 100950 - DNA, 359 bp, Homo sapiens
  misc_feature (1)...(359): n = a,t,c or g
ggcacgaggaactcctgacctcatgtcatccacctgcctcagcctcccaaagtgctgggattacaggtgtgagccacagtgtctggctaaggtgatgactttgaatgactctttaatactgctgtcaactctagaggttggagttacaacctgaattacattaaaaggctatgttgagtaataacgttacgttgaacttaagtgcttttgaaccttttggttctgtagataattaattttctttgaattgacaccatatttattactgagtatccgtgtaacagattattcactgtggtcatctaggactccttgactggaatgaaagctgtttctttctttttatatgagaaagagan

SEQ ID NO: 100951 - DNA, 341 bp, Homo sapiens
  misc_feature (1)...(341): n = a,t,c or g
ggcacgagcacaatgtgatactcagctgactttctgaaacaatacagctcagtgtgcaatgatatgagacagagacatagcgaacaaaccagcctggcagctctgtcaatccagaattctttatctagcacaactgcaattcatagatcaaggcgaactactacctgacttcagaatacactacaaagttatatgaacctgcacagcatggcactgacgtaggaacagactgatcgaccaatggaacagagctgatatcccagacttgaatccatgccaggcgtggcggctcacgcctgtaatcctagtgctttgggaggctgatgtaggtggatcatgan

SEQ ID NO: 100952 - DNA, 335 bp, Homo sapiens
ggcacgagtggggtttcaccatgttggccaggctggtctcgaacttctgacctcaggtgagccgcccgcctcggcctcccaaagtgctgagattataggcgtgagccactgcacccggcctctgtcttagttctttgaagatgtgggcatgtgtggaataaaaacatcagtgctgctggtcggacctctttgcaaaccaactgcaatttttccagacagatacttttaaacggtgtgcccagcatacttagaaaaagaaatctccagctttttacatgctgcacagaaagggcaaggaattagtcagaaatagcaaaaacaccacctggcttcca

SEQ ID NO: 100953 - DNA, 398 bp, Homo sapiens
tgcacgagaattaaagatctttattttttttctttttttaagggggtcccggtggcttctaaaaatgggcagggtaaggtaaaaacccgggtggtcttaaaattctggacctaggggaaccccccttactggccttcccaaaggctgggatttccggccttaaccccccacccttggccaaccatgggtttttttttttgaaagggactttcttttttgggcccaggttgaattccagggccttaatttgggcactttgaaccctcaccttcccaggttccaccatttttcaggcttaaccttcccgggcattgggaactaccggtgggtccccccaaaatggcttaattttggaatttttaattaaaaccgggtgtttaccatattgcccaggttgt

SEQ ID NO: 100954 - DNA, 379 bp, Homo sapiens
ggcacgaggttcagctctgtgagttgaactcaatggtcacaaagcgtttcctggcaatgctcctgtctcggttttatgcgcagacatatcctctactgccatacgcctcaaagcggtccacatctcccctttcagattctacccaaacacctgtactccccggtaccctcaaagctgatgcatgacaattgcttgaacccgcaatgctcacgttgcagtgagcctaaatgatgccactgcacttcaacctggacaactgagcacgactctctctcaacacgtcacaaactcaaatgcctgcttgacccatcaacgtaacccattttcctgttaattttgcactgccccacattcttacctttacttctgtcagagcccg

SEQ ID NO: 100955 - DNA, 363 bp, Homo sapiens
atatttataattttgaatttgaaattaagagtttctctgtcatcttttcctaagatacaaccttccaaaatggaatacaataataaactactatctgcctttggagggcaatggagggaggtggaggtagctaagaagttaaaattatacccttttttcatacagtagaaggtaagaatttaaaaccagaagtagccaagtaacacaattattttaagagaggttttaaagccaatcttccatgttaaaaattatatcagccaggcacagtggcatgtgcctgcagtcccagctactcagggggctaaggtgggaggattgcttgatcccagaagtttgaagttgcagtgatcatgccactgc

SEQ ID NO: 100956 - DNA, 352 bp, Homo sapiens
ggcacgaggatgggctttcatcatgttggccatgctggtcgggaactccggacctcacgtgatccacctgcctcggcctcccaaagagctaggattacaggcgtgagccactgtggctgacttctcccacccctccctttttgttcccagttctcattggtctacagtgtgagtaccaagctggaatttggaagaagcttggagctattggacataatgatagtaaaatagtgtaattgattgactataattaacatgaataatgaaatccaccattatatagcgctatctgtctggaacagtcgtgtggttgggtccttttagatcttggattaaatggtgaatcttatga

SEQ ID NO: 100957 - DNA, 342 bp, Homo sapiens
ggcacgagatcttttgtttgctttctacctgtgggaagctcaatcagcattctgaggagctatttgcatggtgataggctcttacataggaattgacaagcgcctgagagaagagcgaatctgcctagttgagattccaatcccctccatgtaggccagggtcttgcaaatagaaggtactcaaaatgtcattgctgagttcagggtttggtgagtagtaatgtagaaaggtctgtatagcctgggcaacatagtgagacttcatctcttaaaaaaaaatttaaaaaagttagccaggcgtggtggcgtgtacctgcggtcccagctgctggggaggctgag

SEQ ID NO: 100958 - DNA, 330 bp, Homo sapiens
ggcacgagaacccaagtgtctatgaactgatgaatggataaacaaaatgcagtatatcgatgcagtggaatatcatttagctataaaattgaatgaaatactgacacatgctacaacatggatgaaccttgaaaatatgctgattggaagaagctagacacaaaaggctacatgttgtgtgattccatttatggattctatttatgtatgatcccagaataggcaaatccatagagacagaaagtagattagtggttctgaggggaagtagggggagaaggaaatgaagaatgtctcctaataggtgtagggcttcttttggggggtgat

SEQ ID NO: 100959 - DNA, 344 bp, Homo sapiens
ggcacgagcagtaacttatatggaattgtcatcattttgaaaaacctaaatccactttgaaatattttcaatgttctaattataaattgaagcttctatttagtaccttaccatattcagctgtgatacattgcattatattgttttcagatcagtggttctttctttggttcataggttaaattgtgatataaaaatgtaacagttaaaagaatacttacatggccgagcacagtggctcacgcctgtaatcccagcactttaggcggccaaggtgggaggtttggttgaggccaggagtttgagactagcctgggcaagatagcgagaccctgtctctacaa

SEQ ID NO: 100960 - DNA, 342 bp, Homo sapiens
ggcacgagaccatttaaaaataaaaaccgcaaggtataggggctcacgcctcatcccagcattatgggaggccaagacgggaggatcacttgagcctaggagtttgagaccagcctgggcaacatggtgagatcccatctctacaaaaaaaaaaaaaaaaaggtttacccgggcgggggggtgtttgtttgaagccctggttcttaaaaattttgggggaaaagaatgtttgggttttaaccccaaagggttaaccctgcagggacccttgaccttcccattgaaacaaaacgaccccttgtttaaaaaaaggtaaaacctttaaaaactgggggtgggaag

SEQ ID NO: 100961 - DNA, 358 bp, Homo sapiens
ggcacgagagtctttaactccaccattagcacccaaagctaagattctaatttaaactattctctgttctttcatggggaagcagatttgggtaccacccaagtattgactcacccatcaacaaccgctatgtatttcgtacattactgccagtcaccatgaatattgtacggtaccataaatacttgaccacctgtagtacataaaaacccaatccacatcaaaaccccctccccatgcttacaagcaagtacagcaatcaaccttcaactatcacacatcaactgcaactccaaagccacccctcatccactaggataccaacaaacctatccgcccttaacagtacatagtacat

SEQ ID NO: 100962 - DNA, 383 bp, Homo sapiens
catacatattatactagcatttaccagctcacttctaggaatactagtatatcgctcacacctaatagcctccctactatgcctacacggaataatactatcgctgaccattatagctcctctgatacccctcaacacccactctctcttagcccctattgggccgattgccatactagtcattgccgcctgacaagcagcggtgggcctagccctactagtctcaatctccaccacatatggcctaaactacgtacataacctagccctactccaatgctgcaactagtccgctccaacacttatatgactaccactgacatgactgtcctaaaaacacataatgtgactcaacacaaccacacacagcctaattattagca

SEQ ID NO: 100963 - DNA, 338 bp, Homo sapiens
aaaatcccacctttatgggccaaagattttttttctcctgaaagcaagaaaaaatgaaaacaaaagacaaaaaaaaaaaaaaaaggcgcccgggcccgggggttaaggcgggaaaccccagcttttgggggggccaggggggccgaatcacggggccgggaaagggaaaccatccgggttaacgcggaaaaccccggtttttactaaaatttcaaaaaaggacccggccggggggggggccccttgaagcccaagttgttcggaaggctgagccagaaaaagggcgaaaccccgggggggggattttgcagggacccaaaatcgttccattgcactca

SEQ ID NO: 100964 - DNA, 438 bp, Homo sapiens
cggacgcgtgggcttttggaaggactagtgacttggttaaaaactaatgagtgtttgcgtgtggtgtttctatgcgagcacccattctcaatttttttttttttttttttttttttttttttttgggggaaccccttggggggaattttgggttaagggggggggtcccttaaagaaaaaaaaatttcccttttaaacttgggggccaaaaaaggcatccttttggaaaaaagataaaaataggaaaacttcccaaggggaaaaggggttttttttcaaaaattttgggggaaaaattggggggatagaaaaaactaggggttttttggttggggggaatggggttggtttttgcctatggggaggggcttttaaacttgggggaaaaaaaaagattctttaaataagaaaatttaaaactaaaaattttctttgggg

SEQ ID NO: 100965 - DNA, 379 bp, Homo sapiens
ggcacgagttgaaatgtgaggtaccgcggcattcatcatgctctttgttgcctgtgtactttgggtttttttgttttttgcttttgttttttaacttgattttttgttttgtttgtcttatgtgatttatgtttttattatgtttttgataataaaataataaattattatatataaaattaaaatgatgtttaatataatgagtaatataaaataaaaaaaattaataatcaaaattattaaaatattaaaattaataagaatataataaaatatataaaataaaagattaaaaatcatattaaattaaaatatattaaatataaagatgtaaaataatattattataaaattataaaatttaatatatagatatcag

SEQ ID NO: 100966 - DNA, 335 bp, Homo sapiens
gtttcaccatgttgtctaggctggtctcgaactcctggggtcaagcaatccacccacctgggccttccaaagtgctgaaactacaggtgtaagccaccacgcccagcttccccattttattctaagaaaacaagagctcttatctttaggtctttgatgcattttgggttaatttttatatatgttgttaggtaagggtctggcttaccttatttcacttagcacttgctaagtgaaataaggtaactaagaaaaaagttggctaagaaataagccaacttttttcttttgtatgtggatatccagttttcccagtgccattagatgaaaaaacg

SEQ ID NO: 100967 - DNA, 318 bp, Homo sapiens
gtttaccaagtgtacagtagcgttgtgtctgagaaaacacagtatatatcttaattttaaaatacgttattactaggaaatgctaacaatctaccttcagcaaatcataatcattttgctgctggagggtcttgctttgatgttgatggctgctgactgattaaggtggtggcagttgaatgctgatgagtctaaggcacttcatttccatttctcggagctgatttctgtttagttcattgacgttttattaattaccatcaggtcctgttactttgtattgaatataatatgtcttgtgaattcatcttggtgtcc

SEQ ID NO: 100968 - DNA, 306 bp, Homo sapiens
tttttttttataagattattagtataggaggggagataggtaggagtagcgtggtaagggcgatgagtgtggggaggaatggggtgggttttgtatgttcaaactgtcattttatttttacgttgttagatatggggagtagtgagattgaggtggagtagattaggcgtaggtagaattagaggttaaggggggtgttggtggatatgtttgttgggattaattgtgttattggttattggaagaggtatataagggggctgggatttgatttatagttaaaattggatattgtgggggagaaag

SEQ ID NO: 100969 - DNA, 306 bp, Homo sapiens
ttttttgtagagaagggatctagctatggtgcccaggctgttctcaagtagtcctggcctcaaatgatccctccaccttggcttcccagagcactgggattacagtcatgagccaccctcctggctccttttttttttattcttaataacagaagggtatttcttttgaatgtgaaattttaccacatggcatgaattagtccaagtgctttaatactaaattcacatagtatacacttttcaagtaagtcccaagagggttaaccactgtttatgaattgaatgttaaaaaaaaaatctctatgc

SEQ ID NO: 100970 - DNA, 326 bp, Homo sapiens
aggtaagaaaactattttgaataaataaactatttatttaaaaaaaaaaaaaaaaaaaaagaaaaaaaaaaaaaaaaaaaaaaaaaaaaaaaaaaaaaaaaaaaaaaaaaaaaaaaaaaaaaaaaaaaaaaaaaaaaaaaaaaaaaaaaaaaaaaaaacccccggggggaaaaaaaaataaaaaaaattttttaaaaccccaaaaaaattccccgaaaaaaatttgtgtttttttttggtgtgactaaaggggggaaaaaaaccctttaaaaaaaaaaccggggggggggaaaaatttttattaagggggggccaaaatttttttg

SEQ ID NO: 100971 - DNA, 304 bp, Homo sapiens
tttttgggggggtgtaagagataaggtctctctttgttgccgaggttggagtggatgggctcaaacgaagctcatagcaacctagaactccagggctcaagcaatcctcctgcctctgcctctaaaagcactatgattacaggtgtgagccattgcgcctagccaggaacttctaatgatgagatccagagacgaaacagccgcaataggatcagccctatagctgaaagaccgaaggactcgctcatcgagacctcaatgcactgtataaataacattttgatcaactacctcttaatgtggt

SEQ ID NO: 100972 - DNA, 300 bp, Homo sapiens
gtgtgtgtgtgtgtgtgtgtgtgtgtgtgtgtgtgtataaaatgggattcctactcagcaataaaaaagaatgaattagtggcatttgtagtgacctggaagagattggagactatcattctaagtgaagtctctcaggaatagaacaccatatatcatatgtcctcactgatatgtggaagctaagctatgaggatgcaaaggaataagagtgacacaatggactttggagacttgggggaaagaggtaagggataaaagacacatattcggtacagcgtatactgcttgtgtgatgag

SEQ ID NO: 100973 - DNA, 318 bp, Homo sapiens
caaaatacagatgtggccaggtgtggtggctcatgcctgttatcccaacactttgggaggccaagatgggaggactgcttgaggccaggagttccagactagcctgggcaacatagcaagaccctgtctctaccaacaacaacaacaacaacaacaacccagatgctccttgacttatgatggggataagtcataaacccatcaaaactaaagtgtcttaagttgaaaatgcatttaatatacccagtctatcaaacatcatagtttagcctagcctaccttaaacatgctcgaaacgcttaccttagcccacatttg

SEQ ID NO: 100974 - DNA, 376 bp, Homo sapiens
ggcgtaatctcagctcactgcaacctccgcctcctgggttaaagtaatggtcctgcctcagcctcccgagtagctgggactacaggcgcccgccaccatgcccagctaattgttttatgttatgcgaattttttagaacaaatggggttttcccgtgtagtccaggcgtttactttgaacccaggaattagaaacccgcctggtcacactggtgaaaccctagtttcttgaaaggctcaagcattatacgggcttgatgcctcaagcctgagctcgcagttacccgaaatactgccactgtactacagcctgagcgacagagcatgactctgcctgaaactgcaataatcctccgtgtcctccctaactcctccag

SEQ ID NO: 100975 - DNA, 332 bp, Homo sapiens
ctcgatctcctgacctcatgatccgcccgcctcggcctcccaaagtgctgggattacaggcgtgagccaccgcgcccggccgctagttctttttttaagagacagtctttactctggcacccaggctggagtgccatggcgtgatctcagctcactgcaatccagacttgctgagcaaatgcgattctgcttcccctagactatgcggacctagtgatacaggggccctacagtattcggaattgccatgtggcagactagatagacaatgctttcaggctttttgagaagtgctggacttacaatgatctcctcggcatggaagtcgcact

SEQ ID NO: 100976 - DNA, 313 bp, Homo sapiens
gagaaaatctcagcaaagaaatcagacacataagaaccaaatggaaattttagaacttaaaaatacaataaccaaaataaaaacacttaatggatgggctcaacagaatgaagggaacagaagaaagaatcaatgaacttgaagacagaacaatagtaattagtctaaacaacagaaagggctgagtggggtggctcacccctgtaatcccagcattttgggaggccgaggtaggtggatcaactgaggtcaggagtttgagaccagcatggctagcatggtgaaaccctgcctgtctctactaaaactataa

SEQ ID NO: 100977 - DNA, 363 bp, Homo sapiens
gtgaaatcatgtcctttgcagcaacatggatgcagttggaggccaatatcctaagtacattatcacatgaatagatagccaaatactgcatgctctcacttctaagtggagctaagcattgggtacttatgaacatagaggtgggaacaggagacactagggactatttgggctgcacatacccaagcagtactgaacaacttggctactacagctgagcattacctatagggctgataaattacctactaggtactgagctcaccacctgcgagacaggatcattcatgctccatacttcaccatcatacagtataccgatgtaacagacttgcacatatgcccctgagactatcttagaga

SEQ ID NO: 100978 - DNA, 521 bp, Homo sapiens
tttctcacccttaacatagccttctgccaggatgggagaagaaatccagaagtaagtcatggcagtgcatactgttggctcagaattctgtgcagacagagcccacagcagcagccctgcccagcatctgcttctgaaacagcctctccagcctggctggtgccctgctcattcacttgcatggccagaagtaccaggtacctccaactcctgagtttttagaatcttcttagcccagcgcagccgctcatgcctgtaatcccagcactttgggaggcggaggaaggtggattgtttgagtccaagagttcgagaccatcctgggcaacatggcaaaaccctgtctctactaaaaaataatacaaaaaactagctgggcatggtggcacgtacttgtagtcccagctacttgggaggctgaggtgggagaatcacccaagccagggaagtcaaggctgcagtgagctgagatggtgccagtgcacaccagtctgggcaatgggggtgagaccacagtctga

SEQ ID NO: 100979 - DNA, 322 bp, Homo sapiens
gataaaacgtacggaccattaacgccaggtaatgggaactgagactcttaacataaattctagacttaatgtgttatggagttaaaggactgtacattatgtgaaggaatgaactggaaaaaaccttagtaccaacataagagatgacaaggtaacatggacgtttaggctccaggaaactttaagacaaattaacgtaaaaatggtttctgggctggtaatacccttggtgtttctgttaaaaacatgaagaacggctgggcgtggtggctcacgtctgtaatcccagcactttgggaggccgaggcgggtggatcaccta

SEQ ID NO: 100980 - DNA, 353 bp, Homo sapiens
ggcacgagtccacactatggttctttccatggtcaccagaaagatgttacaggaaaggggtcccaatccagaccccgagagagggttcttggatctcacgcaagaaagaattcactgccagttcatgaagtgaaagcctatttattatgaaagtacctcagtattctaagggctacccatatactaatcagtcctgatggctgctgggtgcccattttcatagctcagtcctacattttcctttcttcctgtggtttctttcttttattctttttgttattacttacactgtctttctgtagttggcaccttattatctctttcttagctttatttgtcattcctctttatac

SEQ ID NO: 100981 - DNA, 370 bp, Homo sapiens
ggcacgagtaacatgagggtgaggagcgtagcagagatagaaaagcccaggccggaaaacagctgaaggagtaacatgagaagattctcctggccaacatggtgaaaccctgtctccctgtctctactgaagatgcagaaaatcagcctggtgtggtgacggatgactgcggtcctagctgcttgctaggctgacataggagagtcgcttgaacccgagaggcggaagttgcagagaactgatatcgcgccactgagaaacagacagagactccagctcatatctgaatgcagaccctccactatggacggattccacctgatccctttgctggggatacattctgcacagcacgcacccgcctgtataa

SEQ ID NO: 100982 - DNA, 361 bp, Homo sapiens
ggcacgagcagaaaaattaggaatatcttgaatttgaaagggaccgaatgcctggcacagtggctcacgcatgtaatctcagaactctgggaggcagaggtgggcggatcgactgaactgaggatttgagacccacgtgtacaacatggagatgccgatgctctagcaagctcataacgaagttcggatattaatagcattctgcccaacatggtgaaacctcacctctactaaaaatacgaatgttcactgggcgtggccacacttgcctgtatacccggcttcttaggaggctgatgctagagaatcgcttgaaccacgtagcccagcttatattgcgccactgcattccatcctggcg

SEQ ID NO: 100983 - DNA, 369 bp, Homo sapiens
  misc_feature (1)...(369): n = a,t,c or g
ggcacgagcagactgctgtgctaggaatgagtgaggctctgtgggcatgggaccctctgagccaggtgtaggatataatctcctggtgttccgtttcctaagaccattggaaaagcacagtattagggtgggagagacccgattttccaggtgctgtctgtcacagctttgcttggctaggacagggaattccctgaccccttgcacttcgtgggtgaggcaatgcctcgccctgcttcggctcatgctcggggcactgcacccactttcctgcacccagcggccgacaagccacagtgaanatgacctggtaccttagttggaaatgcagaaatcacccatcttctgcatcgctcatgctgggagctg

SEQ ID NO: 100984 - DNA, 431 bp, Homo sapiens
caggcacgtgcaccatgaccagctaatgtttgtttgtttgtttgtttgtttgtttgtttgtttgtttttggagagatgaggttttaccatgttgcccaggctggtctcaaacttgtgagctcaagagatctgcccgcctcaacctcccaaagtgctgggattatatggatgtgagccaccatgcccagcccaatgtctcagactttctgtggttatttttgctttattccaatacctagctgcataatacatctaaaatctatgggagtagcttccagacatgagtatttttcgggaactcttcagatgcctgcacacccggtaagaaactctactctagagaatttatgggtcgactgttccagaagcctcaggagtacagttctgccttttccttgatgctgtttgtagaaagaattggaaaaaaaaaa

SEQ ID NO: 100985 - DNA, 351 bp, Homo sapiens
ggcacgagtgggattacaggcgtgagccacctgggcaggcttaggctggtcttaaactcctgacctcaagtgatccaacctccttggcctcccaaattgctgggattgctggtgtgagccacagcgcctagcccatttctccttttaataggacctgttgctgtctctgttctcccaacatggtaaacaccacccggactgcgtgtatgtcccaaattacaattctttctttgcaaatgaaatgtgaaatttagaggcccttctccacactttaaatttgacttgacattttctaggcagatataagttattagagaatgagattctctataaaaatgatcccttcatgcg

SEQ ID NO: 100986 - DNA, 371 bp, Homo sapiens
ccgacgttactcggactaccccgatgcatacaccacatgaaacatcctatcatctgtaggctcattcatttctctaacagcagtaatattaataattttcatgatttgagaagcctaaaaaaaaaaaaaaaaaaaaaaaaaaaaaaaaaaaaaaagggggggccttttaaaaaaacccttggggggcccaaatttaaccggagaatggaaggaaaaaatttttccctaaaagggggccgataaaaaccctacttgggaattttggaaaaggaactttattttggggggggaaaaaaatgggaaaaactccctacagaaattaaagcctttaggggaaaaaaaaaattttaaagggaaaagggggaaaaaaa

SEQ ID NO: 100987 - DNA, 349 bp, Homo sapiens
acaaaattactgggtctctattataccctcctacaagcctcaaatgacttcaagtctccattctccatattcgacggcatctacggctcaacattttttgtaaccacaggcttccacggacttcacgtcattattggctcaactatcctcactatctgattcatccgccaactaatatttcactttacatccaaacatcactttggcttagaagccgacgcctgatactggcatttagccgatgcgagacgacactctgagtccatcacccaccagtgctgcagtctttgactattcctttctttgttgccaccctttaccgaaccctgtacggagtcagttcaacctg

SEQ ID NO: 100988 - DNA, 346 bp, Homo sapiens
cccacgcgtccggttctagatcgcgtagcggcctccattactttttcaaaaaaaaaaaaaaaaaaaaaaagaaaaaaaaaaaaaaaaaaaaaaaaaaaaaaaaaaaaaataaaaaaaaaaaaaaaaaaaaaaaaaaaaaaaaaaaaaataaataaataaaaatttattattttatattattataatatattttatttatatttattatttaaaatttttattgtttaaatgtaaattattttctaaaaaaaaaaatttatattatatataagtctaaaatttttatgataaataattttaatctcttatttattttaatatatatcttatttgtaaatattattat

SEQ ID NO: 100989 - DNA, 367 bp, Homo sapiens
aacagctgtaggaggcagcgcctactagacttactactattaccaattacattatgactaccacaactcatcgggtacatagaaaaatccacccggtacgagtgcggcttccaccctatatcccccgcccgcgtccctttctccataaaattcttcttagtagctattaccttcttattatttgatctacaaattgccctccttttacccctaccatgagccctacaaacaactaacctgccactaatagttatgtcatccctcttattaatcatcatcctagccctaaatctggcctatgagtgactaccaaaaggattagactgagccgaataaaccacccaatatactcttcgtccttctctgg

SEQ ID NO: 100990 - DNA, 406 bp, Homo sapiens
acacactattaacctactgggagaacgatatgtgctcgctaccacgtactgatgatcaactatgactctcctacttacaggactcactgtactacacacaggcctatactccgtctacctaatgaccacaacacaatggggctaactcacccctcacattatcaacatgaaaccctgattcacacgataagacaccctcgtgttcatacacctatcccccattctcctcctatccctcaaccccgacatcattaccggggttgtactcgtactattaagttatgagttgtacttgctgacttgaaagagggataaactatcattattcacacttagctgatatggccgccattggggtacatgaacaaagtgagcctgtcactttaggatatatacctagaaggag

SEQ ID NO: 100991 - DNA, 390 bp, Homo sapiens
aactgcagttctggccaccgtactagcatgaccactgatttctagagacatcttagactacgcacaacgtcatcggctacatagaagcatccaccgcttacgagagcggctgcgaccctatatcccccgcccgcgtgcctttctccataaaattcttcttagtagctattaccttcttattatttgatctagaaattgccctccttttacccctaccatgagccctacaaacaactaacctgccactaataggtatgtcatccctcttattaatcatcatcctagccctaagtctggcctatgagtgactacaaaaaggattagactgagccgaataaaaaaaaaaagaaaaaaaaggggcggccgttttaaaggatccctcggggggct

SEQ ID NO: 100992 - DNA, 408 bp, Homo sapiens
  misc_feature (1)...(408): n = a,t,c or g
atnnnnnnnnnnnnnnnnnnnnnnnnnnnnnnnnnnnnnnnnnnnnnnnnnnnnnnnnnnnnnnnnnnnnnnnnnnnnnnnnnnnnnnnnnnnnnnnnnnnnnnnnnnnnnnnnnaggaggaattagtggatcccctaacaacagtgagagagcaatgcgagcagttggagaattgtgtaaaggcccggtagcggctatagctctgtgatgagcgtgtatcctctcgatcacattcagaagaggattgctcggaggatctctttgacttcttgcatgcgagggaccattgcgttttcctcatactctatatcaacttgaaatatatgtgtgaacttacttgacctccagtctttatcatttgtgcatcagaatatttccttatggattttgaatgtaccatttgtttg

SEQ ID NO: 100993 - DNA, 493 bp, Homo sapiens
  misc_feature (1)...(493): n = a,t,c or g
ggaagctggccggattgctgaaatactgattaccgacagcantcgcatcggactttccgggtcgacccacgcgtacgctctcatttatggtgcagaacactggggtactgtgaagccaccaagctgaatacggataggtaccatgactttttcaaaaaaaaaaaaaaaaaaaaaaaaaaaaaaaaaaaaaaaaaaaaaaaaaaaagggggagattaaaaaaaaaaaccgaggggggacaaaaatttaaagggaagaaaaaaaaaaaatttttactaaaagagggggaataaaaaaaaccttgggggaatttttgggaaaaaaattttatttgggggggaaaaaaataggaaaaaaaacatatgaaaaaaaaaatgcaataggaaaaaaaaaaataatttaaaagaaaagatggataataaaaaataaaaaaagtaatgaaaaaaaaattattaaaatagaaaaattaaatataaataaaatataaacagagag

SEQ ID NO: 100994 - DNA, 400 bp, Homo sapiens
aatccaggtcggtttctatctacttcaaattcctccctgtacgaaaggacaagagaaataaggcctacttcacaaagcgccttcccccgtaaatgatatcatctcaaaaaaaaaaaaaaaaaaaaaaaaaaaaaaaaaaaaaaaaaaaaaaaaaaaaaaaaaaaaaaaaaaaaaggggggccccttaaaaaaaaaccccgggggggccaaaaataaaccgggggggaaaaaaaaaaattttttccaaaaagggggggaaaaaaaaaacccccggggaaattttgaaaaaaaacctttttttggggggggaaaaaaatgggaaaaaccccccaaaaaaaaataaaccccttggggaaaaaaaaaatttttaaggggaaaagggggaaaacaccccctttat

SEQ ID NO: 100995 - DNA, 373 bp, Homo sapiens
cagggcctcactctgtcatccaggctggagtgcagtggtgtgatcatggctcattgcagccttgacctcttggctcaagcaattctcccacctcaactctctaaagtgctgggattacaggcatgagccaccacacctggcatagctaagatttgaacacaggcattctggctctagtatctgtactcttaaccgctaaattctactgtcttttccaattttaagtatcagatataaaaatggactaatcttatattaattatatatttagattcacaaatattgtctccacactgatgtgaagactacaaaaataaaatacgcattgcacttttcaatggctacttgtgattgtcttcatgacaaatttcag

SEQ ID NO: 100996 - DNA, 379 bp, Homo sapiens
cccacgcgtccgcccacgcgtccgcaaccttagccaaaccatttacccaaataaagtataggcgatagaaattgaaacctggcgcaatagatatagtaccacaaaggaaaacatttcaataaaggatcatttgacaaaaaaaaaaaaaaaaaaaaaaaaaaaaaaaaaaaaaaaaaaaaaaaaaaaaaaaaaaaaaaaaaggggacacactttgaagacgaataaagaagaggaggaagaggaagaagaagaacacatatcaggcagtgctaaaaagtgaagccctaaaaatgtgctgggaaaactttttgaggggggtagtacctttgggacaaagcaccctgaaagagaccctcctgctgacagagaaagcaaggag

SEQ ID NO: 100997 - DNA, 359 bp, Homo sapiens
ctgttaccttcttataatgcgatgtagagattgccgttcttataccgctaccatgagccctaccaacaactaacctggcactaatagacatgtcatccctcttattaatcatcatcctagccctacgtctggcctatgaatgactacgaggaggattagactgagccgaatactattaaccccccgaactgcaacgccgaggagcatcaggccacacactctgcatacgaaagggcaccccctctttgagtacttcagggggggagtttggaactctaccctggtaggaaagcaccgcagcatgtggggaagcaagacgtcctggaatgaagcatgtagctctatgggccgaggtgggg

SEQ ID NO: 100998 - DNA, 373 bp, Homo sapiens
gcgatccggaatgccccgacgttactcggactaccccgatgcatacaccacatgaaacatcctaggatctgtaggggcattcatttgtctaacagcaggaatattaataattttcatgatttgagaagccttcgcttcgaagcgaaaagtcctaatagtagaacaaccctccataaacctggagtgactatatggatgccccccaccctaccacacattcgaagaacccgtatacataaaatctagacacataaggaaggaatcgaaccccccaaagctggtttcaagccaaccccatggcctacatgactttttcaaaaaaaagctggggaccataactgaaaaaaattaatgctctgcaaaacatcatccg

SEQ ID NO: 100999 - DNA, 363 bp, Homo sapiens
cctcgaccaaacctacgccaaaatccatttcactatcgtgttcatcggcgtagatctaactttgttgccacaacactttctcggcctatccggaatgccccgacgttactcggactaccccgatgcatacaccacatgaaacatcctatcatctgtaggctcattcattgctctaacagcagcaatattaataattttcatgatttgagaagccttcgctaaaaaattttaaagggaacaggggggaaaacaaactcaaaaaccctctctgtggggggggcgcctttcttgaggacctttagggggaaaaattaaccccggggggtggggttggccccgtcctcccttggggggggggaaaaa

SEQ ID NO: 101000 - DNA, 353 bp, Homo sapiens
cacaagcctcctagccgtactactaataatcatgacgttgtgactaccacaactcaacaggtacatagaaaaatccaccccttacgagtgcgggttcgaccctatatgccccggccgggtccctttctccataaaattcttcttagtagctattaccttcttattatttgatctagaaactgccctccttttacccctaccatgatccctacaaacaactaacctgccactaatagctatgtcatccctcttattaatcatcatcctagacctaaatctggcctatgagtgactacaaaaaggattagactgagccgaataaaaataacaacaaggggggcccctgttgtagg

SEQ ID NO: 101001 - DNA, 194 bp, Homo sapiens
ctccatagaatgcttcttagtacctattaccttgttattatgcgatctagaaattgccctccttttacccctaccatgagccctacaaacaagtaacctgccactaatagttatgtcatccctcttattaatcatcatcctagccctaaatctggcctatgagtgactacaaaaaggattagactgagccgatt

SEQ ID NO: 101002 - DNA, 215 bp, Homo sapiens
ctctacacaacatattttgtcaccaagaccctacttctaacctccctgttcttatgaggtcgaacagcatacccccgattgcgctacgaccaactcatacacctcctatgaaaaaacttcctaccactcaccctagcattacttatatgacatgtctccatacccattacaatctccagcattccccctcaaacctaaaaaaaagaaaaaaaagg

SEQ ID NO: 101003 - DNA, 236 bp, Homo sapiens
tcaacacccctaccatgagccctacaaacaactaacctgccactaatagttatgtcatccctcttattaatcatcatcctagccctaagtctggcctatgagtgactacaaaaaggattagactgagccgaaaaaaaaaaaaaaggggcggccgttttaaaggatccctcggggggcccaagttaacgcgggcatgcaacgtcatagctttttccctatagggagccgaattataa

SEQ ID NO: 101004 - DNA, 373 bp, Homo sapiens
cacgcgcccgtctggagtgactatatggatgccccccaccctaccacacattcgaagaacccgtatacataaaatctagactaaaaaggaaggaatcgaaccccccaaagctggtttcaagccaaccccatggcctacatgactttttcaaacacataaagaactatagaaaaaataagagaaaagagggactggcctctgtaaaagaaaatgacagggggccttaatcttgcatctgactttcatgtcactcactatacaataggggtcttaacctggcaccagtataactatcttgcactagactgacattgaactgagacttacatttcatggacagcattaactagaatgagatgaatttgtactgtag

SEQ ID NO: 101005 - DNA, 311 bp, Homo sapiens
cacgcgtacgaccacgcgtccgcacaactcaacggctacatagagcaatccaccccttacgagtgcggattcgaccctatatcccgcgcccgcgtccctttctgcataaaggtcttcttagtagctattaccttcttattatttgatctagaaattgccctccttttacccctaccatgagccctacaaacagctaacctgccactaataggtatgtcatccctcttattaatcatcatcctagccctaagtctggcctatgagtgactacacaaaggattagactgagccgaataaaagaaaaaaaaagg

SEQ ID NO: 101006 - DNA, 359 bp, Homo sapiens
acacttgctcgatataacatgtcttagtaaggatgacctagttaatatacgatctagaaattgccctactttgacctgtaccatgagccctacagtcaactaacctgccactaataagcatgacatccctcttattaatcatcatcctagccctaagtatggcctatgagtgactacaaacaggattagactgagccgaataggaaaaaataaaatgaataaaaaaagggggggcccttctaaaggaaccttcggggggccaaatattaccggtcataggagggtgatagctcaaccccttatggacaggagttaataattaacctgggaattttggggagggaccctaatttgggggg

SEQ ID NO: 101007 - DNA, 357 bp, Homo sapiens
agcaacacactgctagccttggtactaataactattacgtcatgactaccacagctcagcgggtgcgtaggggaatgcaccccttacgagtgcggcatctgccgtatattaaacgcgcgtgccctttgctgcatgcaaatcttcttaaaagctattaccttcttattatttgatctagaaattgccctccttttacccctaccatgagccctacaaacaactaacctgccactaatagatatgtcatccctcttattaatcatcatcctagccctaagtctggcctatgagtgactacaaaaaggattagactgagccgaataataaaaaaaatataaaagaaaaaaaagggggggg

SEQ ID NO: 101008 - DNA, 353 bp, Homo sapiens
cggacgcgtgggataatatttcgcccactaagccaatcactttattgactcctagccgcaaacctcgtcattctaacctgaatcggaggacaaccagtaagctacccttttaccatcattggacaagtagcatacgtactatacttcacaacaatcctaatcctaataccaactatctgcctaattgaaaacaaaatactcaaatgggcctaaaaaaaaaataaaaaataaaaaaggaaaaaaaaaaaaaaaaaaagggggggggcctttaaaaaaaccccccggggggcccaaattaacgacgcttaaaagaaaacacttttttccccatgagggggatgattaaaaagcac

SEQ ID NO: 101009 - DNA, 334 bp, Homo sapiens
cggacgcgtgggcggacgcgtggggtactccatagcattcttcttacaagctattaccgtcttagtattggatctagaaagtgccctccttttagccctaccatgatccctacaaacaactaacctgtcactaatagttatgtcatccctcttattaatcatcatcctagccctaagtctggcctatgagtgactaccactaggattagactgagccgaatactggggcgaaatgatgacaaccaccttggacgcataggatcggggggcatcgttaaataaccccagggagggcctcgacatcatgcgccttcgtgccatgtgcgacctgacg

SEQ ID NO: 101010 - DNA, 366 bp, Homo sapiens
cccacgcgtccggatttcttcgatggcgataatttatatatgtgagtgatcagaccataagagagagaagaatgaggagtctgaactgagaagttcatccatattcttacccttcactttggaaagaatgagtctgcacagctcagcaggtagtgactcctctcatgcgttggcatcacatataagcatacatgggagtagacatataaactgtatggcccccagcaagatgcaccaccaccaagagttcaattgtctaaattgtattagcttagcttggtgtggtggcatgttcctgtaatccaagccactcaggaggctgaggcaggaggatcacttgagccaaggagtttgaggtcgcaatgt

SEQ ID NO: 101011 - DNA, 133 bp, Homo sapiens
agccctacaaacaactaacctgccactaatagttatgtcatccctcttattaatcatcatcctagccctaaggctggcctatgagtgactacaaaaaggattagactgagccgaataaaaaaaaaaaaaaagg

SEQ ID NO: 101012 - DNA, 362 bp, Homo sapiens
gaaacctgagtgtggtagagaggggatcctgccatgttgttcctcatcagcctggccagagggcagctttagaccttttcaaatgaatctgggttcttttctttcttttttttttctttttttttttttttttgaaaagggacttttcctttgccccccggtttgaagcccatatgggaaatctaatttattggaaccttccgcttccaggtttaaacaatttttctgccttggccctttaaataactgggattaccggctttttcccccattcccgggaaattttggggtttttaaaaaaaaccgggtttttcccttttggcccagtttggtctaaacccccgattccaggggaatccccg

SEQ ID NO: 101013 - DNA, 176 bp, Homo sapiens
ccctgttcttatgaattcgaacagcatacccccgattccgctacgaccaactcatacacctgctatgagaaaacttcctaccactcaccgtagcattacttatatgacatgtctccatacccattacaatctccagcattccccctcaaacctaaaaaaaaaaaaaaaaaaaaagg

SEQ ID NO: 101014 - DNA, 176 bp, Homo sapiens
ccctgttcttatgaattcgaacagcatacccccgattccgctacgaccaactcatacacctcctatgagaaaacttcctaccactcaccctagcattacttatatgacatgtctccatacccattacaatctccagcattccccctcaaacctaaaaaaaaaaaaaaaaaaaaagg

SEQ ID NO: 101015 - DNA, 359 bp, Homo sapiens
  misc_feature (1)...(359): n = a,t,c or g
atcaacaccctcctaaccttactactaataattattacattatgactaccgcaactcaacggctacataaactaatccaccccttacgagtgcgggttcgaccctatatcccccgcccgcgtacctttctccataaaattcttcttaatagctattaccttcttattattcgatctagaaattgccctccttttacccctaccatgagccctacaagcaactaacctgccactaatagatatgccatccctcttattaatcatcatcctagccctaagtctggcctatgagtgactacaccaaggattatactgagccgcataaccagaaaataatcagggcgcccgctataagagccn

SEQ ID NO: 101016 - DNA, 379 bp, Homo sapiens
attttaataatcaacaccctcctagccttactactaataattattacattttgactaccacaactcaacggctacatagagaaatccaccccttacgagtgcggcttcgaccctatatcccccgcccgcgtccctttctccataaaattcttcttagtagctattaccttcttattatttgatctagaaattgccctccttttacccctaccatgagccctacaaacaactaacctgccactaatagttatgacatccctcttattaatcatcatcctagccctacgtctggactatgagtgactacaaccaggactagactgagccgactaatagtaaatcaactgttttgtatacttggtttcagttttcatttcat

SEQ ID NO: 101017 - DNA, 373 bp, Homo sapiens
aagcgaccgaaaccacataattcacgcactggttattacaattttactggggctctattttaccctcctacaagcctcagagtacttcgagtctgccttcaccatttccgacggcatctacggctcaacattttttgtagccacaggcttccacggacttcacgtcgttattggctcaactttcctcactatctgcttcatccgccaactaatatttcactttacatccaaacatcactttggcttcgaagccgccgcctgatactggcatattgtagatgtggctggactatttctgcatgtctccatctatcgaggagggtcttataaccaccagatcattccttctgtagctcaagagagcacccctgcg

SEQ ID NO: 101018 - DNA, 381 bp, Homo sapiens
  misc_feature (1)...(381): n = a,t,c or g
cggacgcgtgggccatagtaggcctaaaagcagccaccaattaagaaagcgttcaagctcaacacccactacctaaaaaatcccaaaaaaaaaaagaaaaaaaaaaaaaaaaaaaaaaaaaaaaaaaaaaaaaaaaaaaaaaaaaaaaaaaaaaaggggggggggggttaaaaaaaaaccggggggggggcaaaattaaggggggggggggaaagaaaaatttttcccaaaaggggggggaaaaaaaaaacccgggggggattttgggggggggacctttttgggggggggggaaaaaggggggaaaaccccccggagaaaataaaggcctgggggggaaaaaaaaattttaggggggaaaggggggaaaaaagagggncn

SEQ ID NO: 101019 - DNA, 391 bp, Homo sapiens
caaacaactaacctgccactaatagttatgtcatccctcttattaatcatcatcctagccctaagtctggcctatgagtgactacaaaaaggattagactgagccgaataaaaaaaaaaaaaaaaaaaaaaaaaaaaaaaaaaaaaaaaaaaaaaaaaaaaaaaaaaaaaaaaaaaaaaaaggggggggggctttaaaaaaaaaatttggggggggcaaaaaaaaaggggggggaaaaaaaaaaatttttttttttaaagggggggaaaaaaaaaaccccggggggttttttgaaaaaaaaaatttttttgtgaggggggaatatgcggccaccccccccaaaaaaaaaaaaacgtttagaaaaaaaaaaaaattttgagggggggggggg

SEQ ID NO: 101020 - DNA, 357 bp, Homo sapiens
atgattgtgagacctccccagccatgtggaactgtgagtccattaaatctctttttctttacaaattaaaaaaaaaaaaagaaaaaaaaagaaaaaaaaaaaaaaaaaaaaaaaaaaaaaaaaaaaaaaaaaaaaaaaaaaaaaaaaaagaaaaaaaaaaaataaaaaaaaggaaaggaggtaataaagaagaagaagaggatgaaattgaaagaggataacaaaaggataaagatgatgaaagggaagaaaatggagaggatatagataatatggaagaatgaaacattaggaacaatagagattataatataaatgagaaaatggaacaggaaattaggtataactaaaaggaaa

SEQ ID NO: 101021 - DNA, 401 bp, Homo sapiens
cccacgcgtccgcccacgcgtccgcacaactcactacaactttgaactcctggtcttaagcaatcctaccccaggctcccaagtagttgggactaaaggcacatgccatcccacccagctaattttagaaagtttttttagagatggcatctgtattgcccaggctggtcttgaactcctgggctcaagcgatctttatctctctccccaccctttttttttttttttaaaaaaccgggttcccatttggccttccgggttaaagggcaccccacattcttagttactggaagcctaaaaacccggggctaaggggatctttcaacttaaccctcttgagtactgggaattacgggggcgggttacaaacctcggttaattataaagtttttttttttttc

SEQ ID NO: 101022 - DNA, 1410 bp, Homo sapiens
cgtttcgtttctaagttctggggtatatgtgcaggatgtgcagatttgttactaaggtaaacgtgtgccatggtggtttgctgcacctgtcaacccgtcacctaggtattaagcccagcatgcagtagctgtttttcttaacgctctgcctcccgaaaggccccagtgtgtgttgttccccttcctgtgtccatgggatctcacttttcagctcccattataagtgagaaggtggcgtttggttttctttccctggattagtttgctgacgataatgaccacacatcaccactgtttttgttttttagtataaagagtagtattttattgaataagatttgctcacagaaaaataagcttaaatctacaatgaatgccagaccctacagcagaaagccattttctcacttttccacacacaatggttcctactaagtgaaaaaaaagccataaaatttcattcacaaatgtactactctgtctcaaaacatcgcacataatcatgcactgtactaaagccattagatcagttcttcagtcaggttaaagaagtatccctctaataactgacttttataatgctatcaatatccactcccaatcagtctgccattgttaatggtgtacagcattactgaatacaatggaattgatgacgcccatatccacggacaaaccgtgacttatgatggtttgatttacgatttttcaacgttatgatgggtttactggaatattagatgcgtttctgagttacactgggtttatgagtatgcgaccctatactccagaaacagctgtagaaggaaaaacaggtttacctaatgaaaatatgcttagtgacttgggataaaccaatagatgttcacaactgatggagagccgtgaaagagagataacggtaaattgttacaataacacaattttcctgcacctgtcgaggatttccccaaaaaaacgcagaatgtgggatgcacctaaggcataggaaagagagagggcagaaggagtaagagagaaataggaggaaggagggaaggaaagaaggaagtcaggaaggaaggaaggaaggaaggaaagaaggaaggaaagaaggacgtaaggaaggagaaaacaccggtgttactaaaagcccccaataaaatggtttccccctgtgggtaagcctacaatgtggacgaatcttgaaaatattgtgctacgtgttatgtcagtcataacagctcccctattgtgcaattccgcttataggaaatgtccacaatatggtaatctatgcatatgggattgatcgcactaggtagttgctacctagggctgagggtcagggagagggtttgagacagaatgaggagtgactaatgtctacagggtttttctctggtcgggagtgactatagtcaaagcaat

SEQ ID NO: 101023 - DNA, 334 bp, Homo sapiens
ctatcagaaacaaaaaacaggctaggaaaagtggctcacgtcttttggccaggatggtctcaaactcctgacctcaagtgatctatccgtcttgacctcccacagtgctgggattacaggtataagccaccctgcccagcccaatcctcttaacgtaaacactttaatgtcaattaatgcttgaactcaatgtcaagtcaactgaaactcaagtcaatgctgaattgactctaatgtcaattaatgcttgatggtttgctatactcattgcatttggaacaattatctcaggaatgaattttctgatgttttgcaaggagtgacctctaactga

SEQ ID NO: 101024 - DNA, 362 bp, Homo sapiens
ggcacgagctggaagacttaatagagtagtgagattcttgcatctatacatggaagctctggatacaataaccacaaatgcagcctcatacaagggtgttatgtcgatgactcattataggcaggattattgtagatgaccttctgaaatgatgacaattcagtagaatttggaataagactacataaagggctgggcacagtggctcacacctataagcccagcactttgggaggccaaggcgggcacattgcttgagctcaggagttcatgaccagccttggccatatgacataatcgtcgctctaccataaattaaccgagtatggatggcgtgacacagctagcctgttaatgtgtgg

SEQ ID NO: 101025 - DNA, 296 bp, Homo sapiens
ggcacgagccccccaccatctctgcactgcctaaagggatattgccaggtctggaagtgaggaggggacctcagacactggcccagcagtgattctttctttctctctctctctttttttttttaaaataaaaatggggggggtctcgctttgttgcccaggctggacttgaactcctggtctcaagcaatcctcccgcttaaacctcccaatgcgctgggattacaggcttgacccaccatgcctggccagcccagcagtttcttatcccatgtaccaaccactggtgcaggggg

SEQ ID NO: 101026 - DNA, 346 bp, Homo sapiens
  misc_feature (1)...(346): n = a,t,c or g
ggcacgagcggcacgagggtgtgagccactgtgcccagcctaatttgtttgtttgtttttgttttttttttttgaaaaggagtctacctttcagcatgatctcagttcattgcaacctccgcttcccaggttcaagcgattttcctgcctaagtctcccgagtacctgggactacaggcttgccccacaatgcctggctaatttttgaattttttagtaaaaatcgggtttcacatttgggccncnnnacannccnannccccnaccnccccannnncccnncnnnccacacnnncnnnnannccccnncccnnnnnnaacccncnnnaaccncnnacnnnccaac

SEQ ID NO: 101027 - DNA, 344 bp, Homo sapiens
  misc_feature (1)...(344): n = a,t,c or g
ccaaagcatgcctgcccaccctcgctgtgccttagtcagtgtgtacgtgtgtgtgtgtgtgtgtttggggggtggggggtggnnaactnnaaatannanactatatctaatantataatattgtgtttcattacttatcttttttattttcataatttacatatttattcttttgatttttaaatttctatttatcactttaaattatatttcattcctgtttttttatttttaacattaattctatttttaaaaaaattttatatttgtctttccctttgggtattttccaaggccttaaattgatttgttaaatacagtatggatatttgtattttttggtg

SEQ ID NO: 101028 - DNA, 359 bp, Homo sapiens
  misc_feature (1)...(359): n = a,t,c or g
cttaaactccagcaccacgaccctactactatctcgcttgtaatcaccagaaactggaaacagcccaaatgtccaaatgtgcaacaaattgtacattagtcagcaataaaaaggaatgaactattgatacatgcaaaaacgtggatgaacctcaggggtattatgctgagtgaaatatgccagcctcaaaagattttatacttggaaattccatttatatgacattctggaaaaggtaaaattattgggacagatcagtggctaccatggattaggaatgggagaaaggtccgagtgcaaagaggcagcccagctttcttctttgttttctatgagnttctattttcctctccactaan

SEQ ID NO: 101029 - DNA, 345 bp, Homo sapiens
  misc_feature (1)...(345): n = a,t,c or g
attaagactggagtgccatcaccgcgggtgatgatttagcttttgctgtgtgtgtgtgtgtgtgtgtgtgagccttccaaaacatgccataattgaaatgctgaatcagacacacccttacgtgcccaagggcgtagcctacctgcctgagcgcgagcccttcatcgtgccaatggaccccgagctcacagcataatacgaagactaccgcacacacgagtctgcacaagagccttctgagccccaccagctctcacggcgctccctgccccactgacccggacatgcaaccagagatcactcgccgcccaccgactcttgggggaagcgtcgaacctctcattn

SEQ ID NO: 101030 - DNA, 384 bp, Homo sapiens
tggtcatccacttatgagcgggcgcagtgattataggctctcgctctaagagtacaaatgccctagcccacttcttacggcaaggcacacctacgccggttatcctcgtactaggtattatcgaaaccatgaacctactcattcaaccagtagccctggccgaacgcctaaccgataacattactgcaggccacctactcatgcacctaattgtaagcgccaccctagcaatattgaccattaaccttacctcgacacttatcatgttcacagttctaattctactgactatcctacaaatcgctgtcgccttaatgcacgcctacgtgttcgcactgctagtatgcctctacctgcacgacgacgcatatgatcacggaggcg

SEQ ID NO: 101031 - DNA, 373 bp, Homo sapiens
ctttataaagctagggtcttgccatattgcccaggctggtcccaaactcctggcctaaagtgatcctccaagtttggcctcccaaaatgctgggatgacaggcattagccactctacttggcatgcctcattctagtggtagtttccagtttttgtcatttaaagaagttcaattttctttttaatcaaaagtatttttgaattttaaaaattagggttttttttctttctctttaaacaatttgtaatcatactcattgaaaatcaagacaagcttagttaatgtatatgtgatgttcagtttggttatgttagcaataacctgttaggcatgcttataagacaggtttttaaagtagtttgtgactctcaa

SEQ ID NO: 101032 - DNA, 908 bp, Homo sapiens
  misc_feature (1)...(908): n = a,t,c or g
ggaaccacaatgactagtaaaacggtggtctcaatgcccacttagcctctgcctctgaatttgaccatagtggcgttcagctgatagagcgggaagaagaaatatgcattttttatgaaaaaataaatatccaagagaagatgaaactaaatggagaaattgaaatacatctactggaagaaaagatccaattcctgaaaatgaagattgctgagaagcaaagacaaatttgtgtgacccagaaattactgccagccaagaggtccctggatgccgacctagctgtgctccaaattcagttttcacagtgtacagacagaattaaagacctggagaaacagttcgtaaagcctgatggtgagaatagagctcgctttcttccagggaaagatctgaccgaaaaagaaatgatccaaaaattagacaagctggaactacaactggccaaaaaggaggagaagctgctggagaaggatttcatctatgagcaggtctccaggctcacagacaggctctgcagcaaaacttcaggctgcaagcaggacacactgctctttaccaagaagatgaatggctattcaagaaggatcaaaaatgcaactgagaaaatgatggctctttgtgcttgactgtccatgaaacaagcccctaccattgaactccaaaaggaagttcagggagaaagaagaccttcntcttcactggcnattccaggaaaaaaaaaaggtcctgcccctcattanggaaattggagaaggaatgggttggaagtcctttccagaagaaaaaaatgcacgcccttgcccattgctgaaaaagccttaagaagttcttgggaacacnanaatcgcccgctggtccccatggtgttttcacaactgtagaaacaacgttccgatggctttcat

SEQ ID NO: 101033 - DNA, 428 bp, Homo sapiens
cccacgcgtccgccctactctgcccctaagctggctgtacctgttcctcccccataaaatgatcctgccaatctaatgtgagtgtgaagctttgcacactagtttatgctacctagtctccactttctcaatgcttatgagacagatcactcctggaggctggggatggtaggattgctggggattttttttttttttaaacagggactaactttgttgcccaggctaaagtgcaatggggcattcacagttcactgcatccttaacctcctgggttaaagcaatcctcttacctaaacctcctgggtagctaccaccattggttgcgcccccatgccctatttttctttttaaaaaacaggggctcgttattttgcccaggttggtttggaactgggtttaggggaaccaccttttggggggccaag

SEQ ID NO: 101034 - DNA, 426 bp, Homo sapiens
tttaatctttctgtcatttaaagcaatatgataagggtattcaataattgggtgccctaaatttctggatgagaaaattttcgattctggccatgagaaagaaagaaaaataaacagccttcttttttaaaaaaaaaaaaaaaaaaaaaaaaaaaaaaaaaaaaaaaaaaaaaaaaaaaaaagggggggccttttaaaaaaaacctctggggggcccaaaattaaacggggagggggaataaaaaattttcccataaaggggggggttaaaaaaacctctggggagttttttggaaaaaaacctttttttgggggggaaaaattttgggaaatactcccttagaggataaaatcctttagggaaaaaaaaaatttttaaggggataatggggaaaaaaacacctaaatatctttgggtggagaaat

SEQ ID NO: 101035 - DNA, 466 bp, Homo sapiens
ccacaatgaaaactgcacttaaaaaacaaaaatgctgaaagaggaaggaaatatcaaaaaggtctgaatagacaacaggcaaatatgcttgcacctaccgaaagagttttaggttggcagacagatgggtgccttattttctgtgaaactgaagttttaaacactggccagaaaatgtttgattgccatttcaacacatggaaatagttacattgatgcctaaattgccattttctgcaaaaagctgtgcaatgctggtgtcaaagactagacagtcgctattcataatggctggtgcaattccttcatgaatacatcgaggagtttctttccaagtcaatcgttttctatgagcatgtagcttcggttggttattttattctgcaccctgtttgatgtattcttaaagtgggccgttgataggtttcgtttttaccattcggttcttcgtgtgtcacccttctcg

SEQ ID NO: 101036 - DNA, 410 bp, Homo sapiens
tgtaatgatgatattacacagcacaacacacgcacagtattaatgctaaacactacattgaaacgcacactaatttctggggaaataactgtgctgttgatgcacgtcacgagcaagctgagaaatagctgtatataaatatataactgaggatattaagtcccattatataaccatacttatgtgactcgtaatacaccaagatgtacgaactactatatactaacacaatgtgagctggtccataatatatatatcaacagcggtaaatactgtagattcttctatatatatatatatatatatatatatatatgcaaaatatatatagatacactcaagcactatttgtttatgagatatatgacattttttatctgtatactatgttgatgagagagtcagttaac

SEQ ID NO: 101037 - DNA, 410 bp, Homo sapiens
cccacgcgtccgcaaaaactgaagaaaaactgcaatggtgttagtaatggtgatctttgtttctttgggggtgggcaatttttgatttggggctttttttttttcttttgcattttaattgagggggggctgaattccaaaaattatgagctaaaatcactgataaaaacctacggggccaaaaaagcggaaatagaacacactgaaaactaaaaaaaccgggaaaccctcttggaaagagctgcccaattggccattaaagtcactaaccccaatgccatgctgcgcactgtagaacatgactatgctatgtatatgcacaatttctggttaaataaattgaataactgccacaaggttgccatctcatgtaaacaatagtgtactgtagttcaatagaacatgaaagg

SEQ ID NO: 101038 - DNA, 437 bp, Homo sapiens
cggacgcgtgggctcacatgcagtacctccctactggacatattgttgcacccaagtcggccctttcctaaatgcttcaaaaataacctgttcctgctccccttaccttcctctatataacaacccaggaaggctggtctcagccaggtgtaggtgtgaacacatttaatccttgagaattttctcccaacattgataggtgcagtccaataataacaaaaattttaaacgtagaagattgtgaccaggtgtggtggctcacacctgtaatcccagcactttgggaggccaagccaggaggatctcttgagcccaggagttggagaccggcctgaacaatctaatgagaccttgtaattacaataagtttataaatgtactggatgatgtacatggtgtcacttcccctgtatcacaatattataagaaggtttgtg

SEQ ID NO: 101039 - DNA, 403 bp, Homo sapiens
cgcgccgaaggcggtagggcgccacggagaggaaccgctctagacagaggtgttccaggccttgcagtaaagttgattctttgtaaaaaaaaaaaaaaaaaaaaaaaaaaaaaaaaaaaaaaaaaaaaaaaaaaaaaaaaaaaaaaaaaaaaaaaaaaaaaaaaaaggggggccctttaaaaaaaacccctgggggggccaaatttaaacgggggaagaaaaaaaaaaatttttcccaaaaaggggggcaaaaaaaaaccccctggggaatttttgaaaaaaaacttttttttgggggggaaaaaaattgggaaaaaccccccaaaaaaattaaaccctttagggaaaaaaaaaaattttaaagggtaaaaggggaaaaaaaacccgaaaaatctggggggta

SEQ ID NO: 101040 - DNA, 395 bp, Homo sapiens
tccacgcgtacgcccacgcgtacggtacaaactccagactaagaggtgtgaccttacattgccttcctgaggacactctcatgtgtctcttagaaacacaacatttgatgctctcaaatcttgagacacagattcgctcttgtctcccaagctggagtgccatggtgtgaacacccctaactgtaacctccgtctaccaagtttaagcgattatcctgcctcactctcccgagaggcttggatcgcaagcacccgacttcgtgcctgggaaatttttgtatttttagcgcagatgcggcaggattattgcatgaacccgggaggcggaggttgcaatgagctgaaatagcgccactggactccagcctgggccacacagggcatgactgcctgtg

SEQ ID NO: 101041 - DNA, 420 bp, Homo sapiens
cttgtccatgatggacacgctggtctcaaactcctgacctcaggtgatcggcccgcctaggcctaccaaagtgctgggattacaggagtgaggccgctgggcccgccaacatactactattttcgaactgcatccttcatgacatttatatgtgaatttgccactgtatgagtatgtataggtatagacacacacatccgtatgtctgtatagatatatctgtctctctggaagtacgactttttttttacaaaggacagaactgttagtgcctatgcctacaatacacttctttattcaaacatgttcggagaattgttagacgtgctccttatttcaaggcgcacactcctatcgtcagcctagcctgcacaaagctctttggttctttattaattttcctcttctgagcccctctca

SEQ ID NO: 101042 - DNA, 397 bp, Homo sapiens
cccacgcgtccgtatgttcatgagggtgaagacttcatgaatggggttagtgttcttttaaaagagacaccgcgcccggccatgtttttctatttttaaaccatggaagtgtattcaacaattaaaccagctgctatagactgaaagtttgtgtccccgcaaaatgtatgccttgaagcctaatcctcaaggggaggatcgcttgcatctaggagttcacgaccagcctgggcaacataccaagacttcgtctctaccaaaaacaaaaattttaaatttaaaaattaaaaaaaaaaaaattagccaggcttggtggcatacacctgtaatcccagcactttgggaggccaaggagggtggatcacctaaagttaggagttcaagaccagcctggcca

SEQ ID NO: 101043 - DNA, 405 bp, Homo sapiens
ttagaccgcggggttgggggaacttggctgtcccacgtctttcaaataaagctgttttgtctaaaaaaaaaaaaaaaaaaaaaaaaaaaaaaaaaaaaaaaaaaaaaaaaaaaaaaaaaaaaaaaaaaaaaaaaaaaaaaaaaggggggcccccctaaaaaaaaaattcaaaagaaaaaaaactaccccggccacaaaaaaaaaaatattttttcaaaaaaaaaaatttaaaaaaaaaaaactttttattttttaaaaaaaaaattttttttgggggggggcattttggaaaccccccccccaaaaaattttgaggccggagaaaaaaaaaaaaatcttaaaaaaaattttggcaaaaacatctcaaattttttttttttaaaaaaagttaaaaaaaaaaaaaaa

SEQ ID NO: 101044 - DNA, 433 bp, Homo sapiens
  misc_feature (1)...(433): n = a,t,c or g
cggacgcgtgggtttgcaggctactaaagctgcttttactttgtaactttctttaaaataactggttttattataaagtaattgctcaggcttaaaacaatgtattgctgctttgttacaaaatgttctaaagtggaaacactgtatatagaccaggagcagtggctcaggcatgtaatcccagtactttgggaggccaaggtgggtagatcccttgaactcctgacctcaagtgatccacctgcctcggcctcccaaagtgctgggatgacaggcgtgaacctgcgctggccgatatcttgatatcttgatatgttgctctggccccaagcgattctcccaccttggcctcccaaagctctgggattataggctcagccttgggctttctttaatggatttatttcacttttccatgctgcatctctgatcn

SEQ ID NO: 101045 - DNA, 401 bp, Homo sapiens
aacagagcgagactctgtctcaaaaaataagtatatatatatacacacacacacacacacacacacatatatatgtgtgcatggcgtaatatatgtatatatataatcattactcttaatatataatatagcatatattttaatatatcatgtattttacatattattaatttttaaagcttaaatactaaactatctggttgttctgccttatgatgtttacacatttgagagccctaaagggatggagtatttaagtacagacttacaggacatgatataaaaccagactaaatgaaaccttggatttcatattgaacttttttaaaaaaaaaatctatgggttggaaagatttatgattgaagattttgtccaacttgttgaatacagactggtggtg

SEQ ID NO: 101046 - DNA, 437 bp, Homo sapiens
ctgaaatggaatctgttgtctcttcgaaatatgtactgctgtaacagtgaaacaaccctcagagtatgccttcgtgtgggctgctcgttgtggttttgaacttgggggaactgtctgtgtttgggtcaagaatatgcaactggctgcgcacattggctcacgcctgtaatcccagcaatttgagaggctgaggcaggtgaataacctcgaagtagtactttaagaccagactggccaacattgttaaaaccacatctctacatgaaaatacaaaaattatattatgcatagtgttacgaaccttaaataaacagttatctgaatgataagtcacaaaatatgttcgaacaacaagattttaaactaactttaacccatactacacatacacagtctatatttgttataactaactcttaacacctcactacacattc

SEQ ID NO: 101047 - DNA, 388 bp, Homo sapiens
  misc_feature (1)...(388): n = a,t,c or g
aacaagcgttcgaaagtacttctagtatcccttcaccattaccgaccggatctacggatcaacatgggttgtagccacaggcttacacggacttcacgtcattattggctcaactttcctcactatctgcctcatccgccaactaatatttcactttacatcctatcatcactttggctccgaagccgccggctgatactggcattttgtagaacccgctcgactatttctgtatgtctgcatatattgatgagggtcttaaagaaacatgaagacattctcctccgcataagcctgcgtcagaaaaaaacactgaactggcggttaacataccaatatctacaaccggcccccttgtcgttnttaccctcactgtcaacccaacacg

SEQ ID NO: 101048 - DNA, 430 bp, Homo sapiens
cgggcgcgtgagctcgcataaggaggttcagtcaccggagcttatcataggatactagatcacgaccgaaaccaaatatttctagcactgcttatttcaatgttactgggtctctattttaccctcctacaagcctcaaagtacttcgagtgtcccttcaccatttgcgacggcatctacggctcaacattttttgtagccacaggcttccacggacttcacgtgattattggctcaactttcctcactatctgctggatccgccaactaatattgcactttacatccagacatcactttggcttggaagccgccgcctgatactggcattttgtagatgtggtttgactatttctgtatgtctccatctattgatgagggtcttaagattctcaacacgatgctgatgtcaaacattttgaccgatgtg

SEQ ID NO: 101049 - DNA, 405 bp, Homo sapiens
acaattttactgggtctctattataccctcctacaagcctgagagtacttcaaggctaccttcaccatttacgacggcatctacggctcaacattttttgcagccacaggcttccacggacttcacgacattattggctcagctttcctcactatctgcttcatccgccaactaatatttcactttacatccgagcatcactttggcttcgaagccgccgcctgatactggcattttgtagatgcgacttgactatgtatgtatgtctccatctattgatgagggtcttaaaagaacaccagaaaccctacttaatggacgatcagataggtgacagtcgcggcagcccgctgatagcggccctcagagcgagacaattctctccagagagctcaaggtctattt

SEQ ID NO: 101050 - DNA, 400 bp, Homo sapiens
atttaaactattctctgttctttcatggggaagcaaatttgggtaccacccaagtattgactcacccatcaacaaccgctatgtatttcgtacattactgccagccaccatgaatattgtacggtaccataaatacttgaccacctgtagtacataaaaacccaataaaaaaaaaaaaaaaaaaaaaaaaaaaaaaaaaaaaaaaaaaaaaaaaaaaaaaaaaaaaaaggggggggggcttttaaaaaaacccttgggggggcccaaattaacgggggggggaaaaaaaatttttttttttttaaaggggggggtaaaaaaaacccccgggggaatttttgggaaaaacctttttttgggggggggggaatttgggcacccccccccccaaaaatttttg

SEQ ID NO: 101051 - DNA, 403 bp, Homo sapiens
ttctagatcgcgagcggccctccttttacccctaccatgagccctacaaacaactaacctgccactaatagttatgtcatccctcttattaatcatcatcctagccctaagtctggcctatgagtgactacaaaaaggattagactgagccgaataaaaaaaaaaaaaaaaaaaaaaaaaaaaaaaaaaaaaaaaaaaaaaaaaaaaaaaaaaagggggggggcctttttaaaaaacccctgggggggcccaattttccggggggggggaaaaaattttttttttttttttggggggggaaaaaaaaacccccggggggtttttgggaaaaaacccttttttgggggggggggaatttggggcccccccccccccagaaatttggggccttggggaaaaaaag

SEQ ID NO: 101052 - DNA, 418 bp, Homo sapiens
cccacgcgtccggccccatcacatcttctttactgtaaaaatattaaaaagctgtttccaagtgggacagctaatgaagctctaattattgcagacatatttttgagatgtaaaaaaaaaaaatttaaagttaaatgataagtcttaaaggcgagtgaggaataaaatggatgtaaacatttacatgggatgcattaaaattctgctgtgtgtactgtcttttggttgaaacaaattatgaacagtgactaataataaaaagtcaatacccaatgaaaaaaaaaaaaaaaaaaaaaaaaaaaaaaaaaaaaaaaaaaaaaaaaaaaaaaaaaaaaaaaaaaaaaaaaaaaaaaaaaaaaaaaaaaaaaaaaaaaaaaagggggggaaaataacaaatgaaaaaatctgtgtgttgtgt

SEQ ID NO: 101053 - DNA, 409 bp, Homo sapiens
agtgaataaattaaatgtggtacatgcatacagtggaatgttattcagactttaaaaggaaggaaattctaatacatgctacaacatggatgaacctggaagacatcatggtaagtgaaataagccagtcacaaaaggacaaatattgtatgattctacatatagaatataaactatatatacatatgtagagtagtcaaattcacagggacagaaagtagaatagtggttgctgggggagggaggaatgaggagtgggtacagagtttcatctggggaagatgaaaaagttctgtagacggatggtggggatggttgcacgacagcgcgaatatacttaatgctacagaactgtacacttaaaatggctaaaatcagccgggcacggtggcacacctgtaatctcagc

SEQ ID NO: 101054 - DNA, 416 bp, Homo sapiens
tatctttttgcttatgaatattctgtattataaccattgtttctgtagtttaattaaaacattttcttggtgttagcttttctcaaaaaaaaaaaaaaaaaaaaaaaaaaaaaaaaaaaaaaaaaaaaaaaaaaaaaaaaaaaaaaaaaaaggggggccccactaaaaaaaaaaaaaggggggggcccccataaaaaaaaaaaaaaaaagaacatatttttttatttaaaaagaaaaaaaaaaaaaattccctaaaaaatgaagaaaaaacaaacttcttggggggggggaaaaaagaaaaaaaacctcccgaaaaaaaaaaaaccccaaacaaaaaaaaaaaaaaataaggtggagaggaaaaaaaacaccctaatgttggggagaaaaaaataccccaacctgagaaaaaaaag

SEQ ID NO: 101055 - DNA, 419 bp, Homo sapiens
  misc_feature (1)...(419): n = a,t,c or g
aataatataacaaagcagagacttggaagaggaaggatacagttattcccaagcagagttgcagagaaagggtgggaatcaaaaagaggagggaatctcagcacaccccaaacttaggctaaatggtaacagacatttgatagagggctttaaatttaaaaaccaacacacaaacaaacaaacaaacagaaataaaaacaaacaacaacaacaacaaaaaaacccttaatgtaggaagagaaaacagaagagacaagaaaccaattggagcaaagttacattcccccaaatttatcggaagtggaagctcccaggaagagatctgtgagtaccatggactacactggctggaaaagtgacattcccccaaattcatcaaaagtggacccggaagagatccaaatacgttctcattnttt

SEQ ID NO: 101056 - DNA, 408 bp, Homo sapiens
tgggcaacatagagagattccgtctctaaataaataaataaataaataaataaataaataaatagataaataaataaataaatttctttttgaaattccaggaagatataccgaaaataatcattagaaataaagcaatgaccaggcacagtggcccacacctgtaatcccagcactgcgggaggccaaggcgggcgcataccttgaggtcatgagttcaagaccaacctggccaacatggtcaaactccatctctactaaagacacgaaaatgaggcatggcgcacacgtgtcaacctaaactgtagcagtttgggagggcccactctttgaggcatagaggttcaaacaacgttgtccaattggccatcttcatctctctcaaaccaagctttttggctgtccacc

SEQ ID NO: 101057 - DNA, 469 bp, Homo sapiens
  misc_feature (1)...(469): n = a,t,c or g
gcccctcagagtacttcgagtctcccttcaccatttccgacggcatctacggctcaacattttttgtagccacaggcttccacggacttcacgtcattattggctcaactttcctcactatctgcttcatccgccaactaatatttcactttacatccaaacatcactttggcttcgaagccgccgcctgatactggcattttgtagatgtggtctgactatttctgtatgtctccatctattgatgagggtcttannaaaaaaaaaaaaaaaaaaaagggggcggcccctttaaagaacccctggaggggcccaagtttacccgggctggcaaggtaaaagttttttccctatggggggccgaattaaaacctacctgggaatttttgaaaaggacccttacttcgggggggggacatattggcccaaacctcctccaaaaattaaagcctctaaggaaaataaaaaa

SEQ ID NO: 101058 - DNA, 406 bp, Homo sapiens
cggacgcgtgggcaaacatcactttggcttcgaagccgccgcctgatactggcattttgtagatgtggtctgactatttctgtatgtctccatctattgatgagggtcttaaaaaaaaaaaaaaaaaaaaaaaaaaaaaaaaaaaaaaaaaaaaaaaaaaaaggggggccccttaaaaaaaaaccccgggggggccaaaattaaaccggggaagaaaaaaaaaaattttttccttaaagggggggaaaaaaaaaccccccggggaatttttgaaaaaaaacccttttttggggggggaaaaaattgggccaaccccccccaaaaaaattaagcccctggggaaaaaaaaaaattttaaaggggaaaagggggaaaaaaacccccaattcccttccttaaaaaaaat

SEQ ID NO: 101059 - DNA, 400 bp, Homo sapiens
cccacgcgtccgatatcattcactattcagtgcaaattttaaacactgtagttttatttttcaatagaagatgtaatgtttttataaatgacataccaacctttaaattatgttttacaaaccaaacaatcattgcagaattgaaatacaagagtagaaactctcttagaaatttaagaaatgtctttgtatcattatatgtgaataaaagaaactcatgtactggaaaaaaaaaaaaaaaaaaaaaaaaaaataaataaaaaaaaaaaaaaaaataaaataaataaaaatgggggggggggggggtgttgtttttttgggggggggggggaaaaccccctctcctgcctttttaagtttttttcttttttggggggtttaataaaactttagggggggt

SEQ ID NO: 101060 - DNA, 422 bp, Homo sapiens
cccacgcgtccgcatcactttggcttcgaagccgccgcctgatactggcattttgtagatgtggtctgactatttctgtatgtctccatctattgatgagggtcttaaaaaaaaaaaaaaaaaacaaacaaaaaaaaagggggggcccccttaaaaaaaaaccccggggggcccaaagttaacccgggagggaaaagaaaaaatttttccctaaaagggggccaaataaaaaccaccttgggaattttgaaaaaaaaccctaattttggggggggaaaaaaggggaccaacccccccacaaaaattaaaccctctagggaaaaaaaaaatttttaaagggaaaaaggggaaaaaaaacccaaaaatcctggttgttaaaaaattttcctaaacaggtttgttttaaaaaaattttttcccca

SEQ ID NO: 101061 - DNA, 437 bp, Homo sapiens
agtcaacaccctcctagccttactactaataatgattacattttgactaccacaactcaacggctacatagaaaaatccaccccttacgagtgcggcttggaccctatatcccccgcccgcgtccctttctccataaaactgttcttagtagctattaccttcttattattggatctagaaattgccctccttttacccctaccatgagccctacaaacaactaacctgccactaagagctatgtcatccctcttagtagtcatcatcctagccctaggtctggcctatgagtgactacaaagaggattagactgagccgaatggctccattctctcacccaacctactaacaataattgaaatgcaaaaaggaaactggggggcgcgtgcctagagctttaatgggggggcagaaaactgtgcggctccagatacg

SEQ ID NO: 101062 - DNA, 424 bp, Homo sapiens
  misc_feature (1)...(424): n = a,t,c or g
atgactcctaaatttgtgtcttaacttagagctctcccttgaagtcagactcctatattgaactgcagtaatcaacatgcagtgaaggtacataaatgttttttgccaggcgtggngnntnatgcctttaatcccagcactttgggaggccgaggtgggaggattgcttgagctcaggagttcaagactagcctgggcaacatagtgagacccccatctgacacctgtaatcccatagtactgggattacaggcgtgagccaccgcgccttgccgcacctgagcatattcatttttatgaaagatccctcttttagctaccccccctaggactttaaatagatggggaatcctcctaatctccccctgcttttaccttgggaaaaactctttgcgaacaatatttggtgggaaaccagaacttc

SEQ ID NO: 101063 - DNA, 400 bp, Homo sapiens
atcaagcccgaatgatatttcctattcgcctacacaattctccgatccgtccctaacaaactaggaggcgtctgataaaaaaaataaaataaaaaaaaaataaaaaatagtaggggggggggcaaattaaaaaacccttgggggggcccaaatttatagcggggggggaaagaatattttttttcttaagggggatcaatataataccaaagtgggggattgtagaaaaaactcttttttttggggggggaaaaatggggccaccccccccaaaggaatttaaaccttggggggaataaaaaaatttttaaaagaaagagggggaaaaaaagtagtttattgctgggggtgaaaaaatttttttttcgggtggtgtttaacaaaaaacttaacccgggca

SEQ ID NO: 101064 - DNA, 432 bp, Homo sapiens
cccacgcgtccggtttcaccgtgttagccaggattgtctcgatctcctgacctcgtgatacacctgactctgcctctcaaagagctgggattacacgcgtgagccactccgcccccacccaagaaatttattttacgtgcctatgcctagaaaagggaacacagatatggcccacccacaatatccacatcgttgtgaccaagtcaacatattggtagtgagatatattttctctctccagcacatttttttcataggtgaggaaacatacttcacattcctcaaaaaaaaaaaaaaaaaaaaaaaggggggggcgcttttaaaaaaaacagggggggcccaatttaaacccggtttcaacaaaaaatttgtcttttttttttggggccttatttaatccccagggggagatttttgggaggactcctcttg

SEQ ID NO: 101065 - DNA, 429 bp, Homo sapiens
cccacgcgtccgctcaaccggcttttcatcaatcgcccacatcactcgagacgtaaattatggctgaatcatccgctaccttcacgccaatggcgccaaataaaaaacaaagaacgggaaaaaaaaaaaaaaaaaaacattggggggggccttataaaaaaatacatggggggggcagaatataaatgggtggaaaaaaaattatcattttctttatagggggggaataaaaaagcatactggggcattttgaaaaaaaacctttattgggggggggggcttcggggcacaacaccccaaaaaaaaatatcccccggtggggaaaaaaaaaattttatagagaaagtggggaaaaaattatccttccatctgggtggttgaagtcttcccaccggcctattctaaaaaaaattttcacagagcggtgga

SEQ ID NO: 101066 - DNA, 447 bp, Homo sapiens
  misc_feature (1)...(447): n = a,t,c or g
caacaccctactagccttactactaataattattacattttgactaccacaactcatcggctacatagaaaaatccaccccttacgagtgcggcttcgaccctatatcccccgcccgcgtccctttctccataaaattcttcttagtagctattaccttcttattattcgatctagaaattgccctccttttacccctaccatgagccctacaaacaactaacctgccactaatagtgatgtcatccctcttattaatcatcatcctagccctaagtctggcctatgagtgactacaaaaaggattaactgagcgcgatactganccgaataaaaaaaaaaaaaaaaaaaaagnnttnntgggggggggggcctttaaaaggcccccgggggggcccaatattccccggggtaagaaaatttattttttttcccttatgggggagca

SEQ ID NO: 101067 - DNA, 422 bp, Homo sapiens
  misc_feature (1)...(422): n = a,t,c or g
aagatattgtgaatgtgtatttcataagagaatgcagctagccatagtcttgttaaatgctaggcaaagttcatgtaaatgaaatgtttatgctgagcattacgctctaagtatttaatcgatccttaaccaagaaaaaaaaatcaatgctttctttttaattctgtcagtcacagcaactgaaaataaagggatatatatatatatatatatatatatatatatatatatatatcacacacacacacacacatatatatgtgtgtggtgtgatacacacaggagagaccattaccaggaaacagaacaagagntctcttttctcttgtgggtttgtgcattacattatcagatacacattcttatctatttcaaaaaaaaaaaaaaaaaaaaaaaaaaaaaaaaaaaaaaaagaaaaaaaa

SEQ ID NO: 101068 - DNA, 432 bp, Homo sapiens
  misc_feature (1)...(432): n = a,t,c or g
cgagcctggtgatagctggttgtccaagatagaatcttagttcaactttaaatttgcccacagaaccctctaaatccccttgtaaatttaactgttaaaaaaaaaaaaaaaaaaaaaaaaaaaaaaaaaaaaaaaaaaaaaaaaaangggggggggccttaaaaaaaaaatcttgggggggcaaaaaaaaaacggggaaaaaaaaaaaaaaatttttttttaaaagggggggaaaaaaaaaaccccgggggaaattttaaaaaaaaaactttttttgggggggggaaatttggggcaaaaccccccaaaaaaaataaaggctttggggaaaaaaaaaaattttaaaggggaaagggggaaaaaaaaaggtaaatttcttgggggaaaaaagtttttttttccggggtaaaaaaaaaaaaaaaaaaaacccgg

SEQ ID NO: 101069 - DNA, 400 bp, Homo sapiens
  misc_feature (1)...(400): n = a,t,c or g
cggacgcgtgggcggacgcgtgggcaacaatcctaatcctaataccaactatctccctaattgaaaacaaaatactcaaatgggcctaaaaaaaaaaaaaaaaaaaaaaaaaaaaaaaaaaaaaaaaaaaaaanggggggggccctttaaaaaaaacccttggggggccaaaaattaaccggggaagaaaaaaaaaaatttttttctaaaaagggggggaaaaaaaaaccacctgggaaattttgaaaaaaaaacctatttttggggggggaaaaattgggcaaaacccccccaaaaaaataaaagccttaaagaaaaaaaaaaaattttaaagggaaaagggggaaaaaaaaccgtaaattcttgggggaaaaaaaattttccaaaaaaaaaaaaaaat

SEQ ID NO: 101070 - DNA, 411 bp, Homo sapiens
  misc_feature (1)...(411): n = a,t,c or g
aaaaacttcctaccactcaccctagcattacttatatgacatgtctccatacccattacaatctccagcattccccctcaaacctaaaaaaaaaaaaaaaaaaaaaaaaaaaaaaaaaaaaaaaaaaaaaaaatagggggggggcggtataaaaaaaacctggggggggccaaaattaacgggggaggggaaagaaaaaatttttcctataaagggggcggaaaaaaaacacacggggggtttgtggaaaaaaaaattttttgggggggggggaaaaatgggaaaaaacccccaaaaaaaatttaagtcccgggggaaaaaaaaaattttaaaggggaaaaggggggaaaaaaagggacatgagggggggggaggaaatccctccttcggggaaatactggaaaaaatttn

SEQ ID NO: 101071 - DNA, 568 bp, Homo sapiens
ccttgtatgactttttagttatgagataagtccctaccaagtaggaccaggttcaaatgtttttgaattaatgaacaatctatataggtaaatatcatcccatttacagatatggaaactgaggttcatgggattaaataatgtgtttcaaaggggaagtagttatttttaatttcaaaatcagtttttaagtattcatggtaacagtagcttcctttcccccactgtatggttagaatgaaacaaaaaaaaattttttggagacagggttttacccagggctagagttcaatgggcattaattcgtagggtcacttgtttgactccaactcctgggggcttcaagctatcctcttggcctcagcctcccaaggtaactaggggcttacaggtatgtggcccaggatgcctaggctattttttttttcctatagcgatgggatctcactgtgttgcctaggctggtcttgaactccaggcctcaagtgatcctccctcagcctgtcaaagtgctgggattacaggtgtgggccattgtgcctgacacgtgaaatgaaaaaagttacca

SEQ ID NO: 101072 - DNA, 424 bp, Homo sapiens
  misc_feature (1)...(424): n = a,t,c or g
cccacgcgtncgatatatttcactttacatccaaacattactttggcttcgaagccgccgcctgatactggcattttgtagatgtggttagactatttctgtatgcctccatctattgatgagggtcttaaaaaaaaaaaaaaaagggcggccgttttagaggatccttgagggggcccaattttacgcgagcatgcaatggtttatctttttccttatagggagccttttataaaactaccttgggattttggaaaaggaacctcacttctgaggggggccattttgagtcagactacctccagagatttatggttttaaggaaaacactaactttttaagggtttaatgggtaaaattacttgccatatcttgctgtgagagagctttgcttactggctataagctatgaaactattagacn

SEQ ID NO: 101073 - DNA, 453 bp, Homo sapiens
  misc_feature (1)...(453): n = a,t,c or g
cccacgcgtccggtaaaatgagaaagtcctgtgcagtcctgagatgattactcttatttggtgtgctgaaaatttgagttgacaaaataaaattctgtggttttttaaaaaaaaaaaaaaaaaaaaaaaaaaaaaaaaaaaaaaaaaaaaaaaaaaaaaaagggaaaaaaaaaaaaccaaaaaagaaaagaaaaaaaaaattcccaaaaaagaaaaaaaaaaaaaaacaaaactgggaaatttgggggaagaaacaaaaatttgggggggggaaatattggaaaaatttcctaaaaaaattttaattttttagggaaaaaaaaaaaaatanaaaggtaaaaggggtaaaaaaagttaaattttttgggggtgggaaagtttccttacctcgcttcattttaaaaaaattttatccccagaactctatggggccncggggcccccccgcccccc

SEQ ID NO: 101074 - DNA, 425 bp, Homo sapiens
  misc_feature (1)...(425): n = a,t,c or g
ctaatcacataacctattcccccgagcaatctcaattacaatatatacaccaacaaacaatgttcaaccagtaactactactaatcaacgcccataatcatacaaagcccccgcaccaataggatcctcccgaatcaaccctgacccctctnaaaaaaaaaaaaaaaaaaaaaaaaaaaaaaaaaaaaaaaaaggggggggggccttttaaaaaaatcttggggggggccaaatttaacgggggggggaaaaaaaaatttttttttttttaggggggggaaaaaaaaccccccgggggatttttgggaaaaaaccttttttttgggggggggaattttgggcccccccccccccaaaaaattaaggctttgggggaaaaaaaaaatttttaagggggaaggggggaaaaccaccctccatggctg

SEQ ID NO: 101075 - DNA, 216 bp, Homo sapiens
  misc_feature (1)...(216): n = a,t,c or g
tagtannnnnnncncttcncttcnaancgaanagncctaatannaaaagaaccctccataaacctggagtgactatatggatgccccccaccctaccacacattcgaagaacccgtatacataaaatctactcaaaaaggaaggaatcgaaccccccaaagctggtttcaagccaaccccatggcctccatgactttcaaaaaaaaaaaaaaaaag

SEQ ID NO: 101076 - DNA, 406 bp, Homo sapiens
tagaaccccaggtgagacgaacagtctgtccaaggtactgttgcccctaatggtgtgcaggccccctgcactgatcctgagtggccacctagaccagggtgtccataggctcgactatagggttccttcttctccaccatggcacttcaggctcccttggcacttctcttttgggaaaataaattgcttctggattagacatctttctgttgctgttgcttgagacagggtctcactctgtcacccaggctggagtgcaatggcacaatcatgattcactgcagcctcgacttactggactcaagtgatcttcccgccgcagcccacgaggtagctgggactacagggtcttactctgtcacccaggctggagtgcagaggcataatcttggctcactgcagcccc

SEQ ID NO: 101077 - DNA, 433 bp, Homo sapiens
  misc_feature (1)...(433): n = a,t,c or g
attgggccactgcactccagcctgggcaacagagagagactcagtctcngaaaaaaaaaaaaaaaaaaaaaaaaaaaaaatggggggggcccccctttttttttttttttaaaaaaaaaaatttaaattcaaacccgggggaaaaaaaaaaaaaggggaaaattttttaaaaacccccaaaaaaaaaaaaaaaaatttttatggtccccccccccccccctaaaaaaaaaaaaaaaaaaaaaaaaaaaaaaaaaaaaaaaaaaaaaaaaaatatgggggggggcctttaaaaaaaaaaacggggggggcccatatccccggggggagaaaaaaaaaatttttttttcttaagggggggtataaaaaaccctgggggggttttttggaaaaaaaccttctttgtgggggggggaataggtggaaaaccaccaan

SEQ ID NO: 101078 - DNA, 229 bp, Homo sapiens
  misc_feature (1)...(229): n = a,t,c or g
aggcgtnnnnacctgatgtcgctagacgccntgaaannccgcgncgacccacgcgtccgccctgttcttatgaattcgaacagcatacccccgatttcgctacgaccaactcatacacctcctatgaaaaaacttcctaccactcaccctagcattacttatatgacatgtctccatacccattacaatctccagcattccccctcaaacctaaaaaaaaaaaaaaaag

SEQ ID NO: 101079 - DNA, 458 bp, Homo sapiens
  misc_feature (1)...(458): n = a,t,c or g
catgcacgctngtgaaccgctctcggaaacccgggtcgacccacgcgtccggtggggaaggagtggggacaggagtggggtgtgtgcggtgaactaaaccagtgggtcatgttgctcagctcacatccttgcttttaagccctgagcaggcatggccacatttattacaaagtccttatagtaatgccatacacacacacacacacacacacacacacacacacacacacattatatgtatatatacacacacatgcatacatatatattttaatagactatctaaatactgagtggtagggatcatttgagttgaatgtggtatattcaggttggtagatatcacgcatccattcaaaagtgtatagattttgtggcacccatgcagggctcctgacagaagcagggatgtaccagagaggcatgtctatcatggacactacggggaggcgccaaga

SEQ ID NO: 101080 - DNA, 405 bp, Homo sapiens
atttgagaagccttcgcttcgaagcgaaaagtcctaatagtagaagaaccctccataaacctggagtgactatatggatgccccccaccctaccacacattcgaagaacccgtatacataaaatctagacaaaaaaggaaggaatcgaaccccccaaagctggtttcaagccaaccccatggcctccatgactttttcaaaaaaaaaaaaaaaaaaaaaaaaaaaaaaaaaaaaaagggggggggccctttaaaaaaaccccggggggggccaaatttaacggggggggggaaaaaaaatttttttttttttagggggggggaaaaaaaacccccggggggattttggaaaaaaaccctttttttgggggggggaaaattggggaccccccccccacggagattt

SEQ ID NO: 101081 - DNA, 478 bp, Homo sapiens
  misc_feature (1)...(478): n = a,t,c or g
agcgcagaancccgtgactgaagatcctcgttaccggctcgacccacgcgtgcggtaatattaataattttcatgatttgagaagccttcgcttcgaagcgattagtcctaatagtagaagaaccctccataaacctggagtgactatatggatgccccccaccctaccacacattcgaagaacccgtatacataaaatcctatgtataaaaaaaaaaaaaaaaaaaaaaaaaaaaaaaaaaaaaaaaaaaaaaggggggggggccctttaaaaaatccctgggggggcccaatttttccggggggggggaaagattatttctttccctttagggggggcttttaaaaccccccggggggtttttgggaaaaaacctttttttggggggggggaattttggggccacccccccccaaaaatttaaccgctctgggggaaataaaaatttttaagggggaggggggggaaaccacgccg

SEQ ID NO: 101082 - DNA, 512 bp, Homo sapiens
caaacttccagagacagtaaaaaaaaaaaagaaaaaaaagttttactccttcagaagtattgtcatgctactgctgtacttattttcctaatctctctctttctttctgctatactccctccttttctttctttttcttttaagcttttatatttattccttcctttgttttcctctctgtaagacagctactactgagcactaattagtagaaagtcagagtggaggttatctgtgcatgtctttctgcaaacattactgttgaggccatctgaagagagggattgataggttaggctgttgcaccgtgaatgtcctgctttgcatttttaacctcagctccccaacatatatatcttgcagtttatatgccttttcatttaaccgaaacctcttttatttaatttttaacataacaacctacaattcttgtgtttttattatgctgtatttttctgtgtttcttattacatgtgattgctaaataaatcatatttgagggaaaaaaaaaa

SEQ ID NO: 101083 - DNA, 412 bp, Homo sapiens
  misc_feature (1)...(412): n = a,t,c or g
cacgaccctactactatctcgcacctgaaacaagctaacatgactaacacccttaattccatccaccctcctctccctaggaggcctgcccccgctaaccggcgnaaaaaaaaaaaaaaaaaaaaaaaaaaaaaaaaaaaaaaaaaaaaaaaaaaaaaaaaaaaaaaaaataaaaaaaaaaaaaaaaaaaaaaaaaaaaaaaaaaaaaaaaaaaaaaaaatgaaaggggggggggggggggataaaaaaaaaattggggggcgaacatcccgagggagagggaaaaaatgatttttttttttaagaggggaaaaataacatcacgcctggcttctttaaaaaaaaaaattactttgtggtgggggtggtgtcgagacaacaatcacagacacaaatgcttctgtgatgaaaa

SEQ ID NO: 101084 - DNA, 409 bp, Homo sapiens
taactgagcagatactctagtccccaggattcctcctcttaatgtgtcatctttttccccatgagttgggtcccacccccacagaagcaggccacactgaccactcatgccaacataatcacaataaggcactgcgtaaagccagagccagacttctctgaccacctcaacctgttgttaggtagggcagacatcacaggtgaggagatggcggcccagagaaggtgagtagcagattctggcctagaggcaggaagtgatcagcagggagccatgactcacgcctgtaaccccggcactttgggaagcccaggctagaagattgcttgaggccacgagtttgagaccagcctgggcaacataatgagaccccatctctacaaaaatttaaaaatgtagctgggtgtgg

SEQ ID NO: 101085 - DNA, 420 bp, Homo sapiens
  misc_feature (1)...(420): n = a,t,c or g
tatggaggcagctgtggcagaactgcttgaatcacagaggtccagcctcactctaccactcgctgattagaggttctcgtcctcctgtaagccccctgccttcaccattctttgcctcagttgcctcacctatgaaataggatcctaattagtgggtagtaattatgaagaatccctaatgggtagtaattgtgaagaatcgcttgaacccgggaggcagaggttgcagtgagccgagatcgcgccactgcactccaacctgggtgacagactctgtctccaaaacaaaacaaacaaacaaaaagattttattaaagatattttgttaactcnnnnnnnnnnnnnnnnnnnnntnnnnnnnnnnnnnnnnanntnaaaagggggggcccttttaaaaaactccctggggggcccccaatn

SEQ ID NO: 101086 - DNA, 415 bp, Homo sapiens
  misc_feature (1)...(415): n = a,t,c or g
tggaagtcggccgggaggagggaagaggacggcgaggagatggactcggccatggaggctgcgtggagcctgcttgggaaccgggatggcgtttgccttccaccatcaagttatttataaaatcaaaagtttcctccgaaaaaaaaaaaaaaaaaaaaaaaaaaaaaaaaaaaaaaaaaaaaaaaaaaaaaaaaaaaaaaaaaaaaaaaaaaaaaaaaaaaaaaaaaaaaaaaaaaaaaaaaaaannggggggggggggttttaataatttttttgggggggggaaaaaaatatgggggggggaaaaaattttttttttttttttatgggggggtttaaaaaaaagtgtgggtttttttaaaaaaaatattttttttggggggggggnaattttaaccacctcccctgggggttt

SEQ ID NO: 101087 - DNA, 411 bp, Homo sapiens
  misc_feature (1)...(411): n = a,t,c or g
cccacgcgtccggaccaactcatacacctcctatgaaaaaacttcctaccactcaccctagcattacttatatgacatgtctccatacccattacaatctccagcattccccctcanacctaaaaaaaaaaaaaaaaaaaaaaaaaaaaaaaaaaaaaaaaaaaaaaaaaaaaaaaaaaaaaaaaaaaaaggggggggggccttttaaaaaaaccccggggggggcccaaatttcccggggggggaaaaaaaaattttttttcttttaggggggggtaaaaaaaacccccgggggatttttggaaaaaaaaccttttttgggggggggggaatttgggcccaccccccccaaaaaaaataaacgcctgggggaaaaaaaaaaattttaaggggggaggggggcaaaccccc

SEQ ID NO: 101088 - DNA, 478 bp, Homo sapiens
  misc_feature (1)...(478): n = a,t,c or g
gggatagagcngttggannntcagatancgtcgaanccacgcgnncgtgaccacaaaaatacactttaataatgaaaatttgcatcatcccaccaggtaaagggtttagaccagttgaaatgctggctgggggcaatgaaaacacaagatgtttaatagaagaaagaagttataaatatcactacagccttataaaactaggactacaacaacaatgcatattttcttccttgttatataaatacaatatgatatactgcctgatgttatgttattatataggctatatttttatcttctatgatatgtattataggcaatatagtgttttatattataaattatataattatgttatgttaatataaatatatattttatatttatttatgtgtatataaaaatatatatactttatatttatgtaatataaatatatatttatatacttatatttatattaatataaatatatatn

SEQ ID NO: 101089 - DNA, 399 bp, Homo sapiens
actttacatccaaacatcactttggcttcgaagccgccgcctgatactggcattttgtagatgaggtttgactatttctgtatgtctccatctattgatgagggtcttaaaaaaaaaaaaaaaaagaaaaaaccaaaaaaaaaaaaaaaaaacggggccccccttaaaaaaaaccccttgggggccccaaatttaccaggttaaaaaaaaaaatattctttttcttaaaaggcgggtatttaaaaacaaaatgggaaatttgggaaaaaaacctttttttggggggggaaccaaatggcaaaaacccccaaaaaaaataaaaaccctcaaggaaaaaaaaaaattttaaaggggaaaagggggaaaaaaacctctatatccttggtgttaaaaaatttt

SEQ ID NO: 101090 - DNA, 436 bp, Homo sapiens
aattaataatattcagcacacattttaaaatccaagtataaaaagattgttttatttaaatatctttattcaaaaatttgatgtgttaattatagttaataactccccttcattcaatagctaactttaaattattgtgttaaaaattttgtgttaaatttgtgtaagctttttgttacaaagctacagtaatcaaaacaatatagtactgatataaacatagatatacagaacaatggagtagaacaaagaacccagatataaacccttacatatgtggtcaaatgattatatttttgcaactaaaaagcttacataaaatttaatgcaacacaaaatttactatcttaaccattttcgttgtacagttcagtggtacatcacattgtacattcacattgttatgcagccatcaccaccatccatctctaaaact

SEQ ID NO: 101091 - DNA, 407 bp, Homo sapiens
  misc_feature (1)...(407): n = a,t,c or g
cccacgcgtccgctagttctagatcgcgagcggccgcccttttttttttttttttttcaggggccagacctttaaaggtggggcccttcaaatcccggcccaaagaggactttaaccaaaaggcccccctgggtttccttgaccggcccctttttacggaaacccaggtttatttccccccatcagggggggctccccaaggacttcgtttggggagggacaataaaaaaaatcctaaaacccaaaagtttaatatttccccctaaaaacatccaggaaaaaatttgaccttaaaaaaaaggaaaaaccctaacccggcggcccggcctgaaatcccatcggaaatttaaggggaccaaaaaaaccctgaaggtttctaaggggggaaaaattattttaatttgggn

SEQ ID NO: 101092 - DNA, 402 bp, Homo sapiens
  misc_feature (1)...(402): n = a,t,c or g
acactactgcattccagcctgggtgacagagtgagactccacctcanaaaaaaaaaaaaaaaaaaaaaaaaaaaccccaaaaaaaaaaaaaaaaaaccgggaaaaacccccaaaaaaaaaaagggggacccggggggaaccttttaaaacaggggggggaaaagaaaaaaaaaaattttttaaaaaaaaaaaaaaaaaggggaaggggcccccttgaccccaactggttaaaagggggggccgggaaaaaaaaaaaaaaaacctttggaaaaaaaagggggccttttaaaaaaaggttgggggggtttttttttttaaaagggggccccaaaaaattttaaaaaaaacaaatggaaaaaggggggggggcccaaaaaaaacgggtttttgggttcttcttta

SEQ ID NO: 101093 - DNA, 433 bp, Homo sapiens
  misc_feature (1)...(433): n = a,t,c or g
agaggattatgatgcgactgtgagtgcgttcgtagtttgatgacttctagcaagcctcgctaacctcgccttaccccccactattaacctactgggagaactctctgtgctagtaaccacgttctcctgatcaaatatcactctcctacttacaggactcaacatactagtcacagccctatactccctctacatatttaccacaacacaatggggctcactcacccaccacattaacaacataaaaccctcattcacacgagaaaacaccctcatgttcatacacctatcccccattctcctcctatccctcaaccccgacatcattaccgggttttcctcttaaaaaaaaaaaaaaaaaaaaaaaaaaaaaaaannaaaaaaaaaaaaaaaaaaaaaaaaaaaggggggggcccttttaaaaccccccggg

SEQ ID NO: 101094 - DNA, 396 bp, Homo sapiens
  misc_feature (1)...(396): n = a,t,c or g
tgcaaaaccgtgagccatataaacctctttcctttataaattacccagcttcaggtattcctttatagcaacacaaatgactaacacaattaccaaaatttgaattgaacaaccaagtaaccaataaatcaaagaagaaatcacaagagagagtagaaaatattgtgcacaggccaggcgtgctggctcacacttgtaatcctagcactttgggaggctgaggcaggcagatcacttgtcaggaattcaagaccagcctggccaacatggtgaaaagcaaattaaatccccnnaaaaaaaaaaaaaaaaaaaaaaaaaaaaaaaaaaaaaaaaaaaaaaaaaaaaaaaaaaaaaaaaaanannnnnnnnnnggggggggggggggggtggtggggg

SEQ ID NO: 101095 - DNA, 391 bp, Homo sapiens
  misc_feature (1)...(391): n = a,t,c or g
atcgcgaattacccgggctcaagagattcttcctcctcagcctactgagtagctgggactagtggcgcatgccatcacacccggctactttttgtattttttgtagagatgaggttttaccatgttgcccagccggcctccttattttacttgtatggaatttaaaaaattgctgctgctaccaccaccaccgctactattactgctactgactaatgtttattgaatgaggttatgtgtcaaggatagttttaagcacgttatatgaaagcactaatttaaaccttaacatctctataaagtgggtgtgattattgtccacattttacagatgatgaaaaagacgaattagtaaatttaagtatctgccctaatttgcatttctgtgagn

SEQ ID NO: 101096 - DNA, 399 bp, Homo sapiens
gccatcacaaactctttttaggactgaaccctaagatttgtactacgattaaaaaaaaaaaaaaggggccgggcacaggggctcaggcttgaaaatttcaacattttggaaggctgatgcaggaggcccacttgacctcaggagtttgaaactaccctgggttatatggggagaccccttctctaccaaaataaaaaatcagccagggggagggggctgggcctatactcccacgtgaggcaggaggatcacctggccctgagacttgaggctgtagtgacccctgattgccctcatgctctccaaccagggtgacagagtgagaatctgtctcaaaacattactaattgcaccgcgctctttaattttaagaggctaacctttttttgtggcaatgag

SEQ ID NO: 101097 - DNA, 347 bp, Homo sapiens
tggctacatatgtgtttacatttgtcaaaactcggctaattatatacttccatctcactgtatataaggattacctttaaaaatcttggttagggccgggtgtggtggctcacgcctgtaatcccaaagctttgggaggccgaggtgggtgaatcacagggtcaggagttcaagaccaccctagtcaacatggcgaaaactcgcctaattatatacttccatctcactgtatataaggtttacctttaaaaatcttggttagggccgggtgtggtggctcacgcctgtaatcccaaagcttttggaggctgaggcgggtggattggctgaagtcaagaagtccgaaa

SEQ ID NO: 101098 - DNA, 369 bp, Homo sapiens
cggagtctcaactctgtcacccaggctggagtgcaaagcgacaccctgtctcaaaacaaacaaatatgagaccagaacacacgcacacaacacacacatttgtatctgagtggagacagtctgagagtctctttccctctggcctggcagttatgtggccaaacacactgggccacatgtaccccacccattgttctgtggcaacagcgagcattgtcttgtttaaaagagatccagggttgggttgggcacagtggctcatgcctgtaatccccgctgtttgggaggctgaggcaggcagattacttgaggctaagggttcgagaccagcctagccaacatggtgaaacccagtctctactaaaaata

SEQ ID NO: 101099 - DNA, 698 bp, Homo sapiens
  misc_feature (1)...(698): n = a,t,c or g
ttttttttttttaatgtttcagatctgtcacactaaaaagggctttaggccaggtgttgtggctcacacctgtaatcccagcactttgacaggtcaaggtgggaggattgctggaggccaggagtttgagaccagcctgagcaacatagtgagatctcagtctctactaaaaataaaaaaaattagccatgcctggtggcatgtgcctgtggtcccagctacttagtaggctgaggtgggaggattgcctgagcccagaagatagaaacagcagtgagccatgatcatgccactgcactctagcctgggtgacagagcaaaccttgtctcaaaaaataaagggtggggaagctttagcctaggcttttaattctcaattaccattataaatttattttaattattaactaattactttaattctcaattactatttttccatgaaaaggcttgatgttctaaacagtattataccaccaagttatctctactggaaaacccagatttcaagnnnnnnnnnntgtattttgaaaacaattatgtcttaaatatttaaaattcttttaaacatgtttttaaccatctttaaatttttttggtaagtaattttcattagattgttaaaatgtatagtggcacggtagggttgtatctcaagatatgaagcagtttcttttttttccccaaaaatttttttt

SEQ ID NO: 101100 - DNA, 415 bp, Homo sapiens
ggcacgagcggcacgagctggaagaataattaaagatctttcttttttggtgttttttttttggtgttttttttccccaaaaaaaagccttttttttttcctgccccacggggggggttaatttccccccgcgaaaaaaatttttccccccccgctttaaaggggaaattaaaaaccccccccccgggggcccgggggggggcaaatctcccccagaaaccactttttttttttttgggccccaggttttttttttttggaaaaaaatttttggggggggggggggattttttccccccccccttggggggtttatttttttaaaaaaatcttttgggggggggggggcccttccccctttttcttgaaggcccaaaaatcctttttggtggcccacccccacaggggggggcgg

SEQ ID NO: 101101 - DNA, 444 bp, Homo sapiens
  misc_feature (1)...(444): n = a,t,c or g
tcgcccacgcgtgcggcttaatactccaaagtgtgagctcctctgatctctcgatcccttacttctaatctcacgtttagtgtttaagagaaggagcctctcactctgcggcccaagctggactgcattggcatgatcatagctcattgcatccttgaaatcctgggctcaggggatcctcccgcctgaacctcctgagtatctgggactacagatgcgtgccaccaagcctggctaattttgagtcatgccttctgaaaattattttgggaagccccttccccaaaaacctttaggaaatctgatggtgctcaggaatctaactctccctaaaccatcctctttaactgcttctaaaatatctctgttggcctttcttagcctttttctgtttccattcagagtccaagcgctttttgtttttaanttgagtgcttagggttt

SEQ ID NO: 101102 - DNA, 428 bp, Homo sapiens
gggagggcatcaaacccgtgcaaggaggataagctgtgcttagtggtgatggatgcatattgagaagaattgatgtcaacacatcaactcttggcctccagggacttcttgcagggtaattctgcaagaattttctgaattttcaaagaaatctaggtgagtgtgcatgtgtgcatacacacgcatgtgtgtctgggtacctgtaaggcaagatcatacctttgcacacttgtggacctgtgtgtatttctttcctctttttttctctttttcttaatggagacagggtctccctgtgtttcccaggctggtctcaaactgggctcaagggatcctcctgccttggcttcccaaggtgctaggattataggcgtgggccaccacgcccagcccctgtgtgtattttttttaaattgaggcgaaatttt

SEQ ID NO: 101103 - DNA, 446 bp, Homo sapiens
cggacgcgtgggactagttctagatcgcgagcggccgccctttttttttttttttttaaagggcaataaattttttaggcccccccccaagggaaaagggccctgaggaccctggggtaactaaaccttgttttgtgggggggggggaccaggtttctaagtgggggcttaccctgcctgggcctttttgcaattttgaaaagaaccttaagaagaacccggccaaccccgtaatttgaagggacccgggtttccagggaaaaaaaacggtgggttggaaccacggggggctggctaattttttttattttaacccttccaaactgtggggccaggtcggggccaaggaggccccctgttacggacccttgggcggaaagtggaatttcaaaaaaccggcccctgaagtggggcccctttgggaacccaatcttatatttttcaaa

SEQ ID NO: 101104 - DNA, 676 bp, Homo sapiens
gatggcaagagatgttcacttgaagatcttgccctgattgaaggctttgcccacatgctggaaggccccctcccaggaaaagtactctcgaaccagcgtctgggtctcctcgctgccaggatccagtttccgccatgtgtatgactcgtagtccacctgccaatctggactcagcggaaaggcaagctcctggcctcggaagacccagactccagaaatggagctgctatgttgtgcaaccatcgacactatccatttctagaactttttcgtcatcccaaacagacgctctgtattcataaaaaaataacttcctacctgtctctccccctagtctttggtaacctttgttatactggtaaactttgttgtgctctctgtctgtgtgaatttgcctattctaggggcctcatataagtgtaatcatacagtatttgtctttttgggtctgtctgatttcacttagcgggttttcagggttcattcatgttgcagcatataacagtactgcgttcctttttctgggctgaataatattccactgtatgggataggaccccattttgtttattcacacatcatttgggacatttgggattattttctgggtttttgggctattatggaacaatgggtgctatggaacagttggcgtacaagtttttgtgtgaacatt

SEQ ID NO: 101105 - DNA, 416 bp, Homo sapiens
cggacgcgtgggcagcgtttcaccgtgttagccaggatagtcttgatctcctgacattgtgatctgcccgcctcggcctcccagagtgctgggattacaggtgtaagccactgcacccggccaggcctgagctttttatatacaccaactgccaaacattccacgtgaatttcctgaaacttctctttggaaagcttctgtttgtatgtataaggcaatgtgcatgccagcatgtcagttacagcaggagagagggaacaagccatgtgggaactgatggagccatgtcacatccagtgtcctctgcagccgctatggagtgccaggaggaatgaggggcaaatggtaagatctttatgacgtgagagaagccaggtgcggagcagggaacagtcaggtttaattggtgtgaagaa

SEQ ID NO: 101106 - DNA, 420 bp, Homo sapiens
cggacgcatggaagagatggggtctcactacgttgcctaggctggtcttgaatttctgggcgcaagtgatcttcctgcctgagccccccaaagggctaagattttgttgctgctggggggacataaaccaggtctcactatattgcccaggctgagctcaaactcctggcctcatgtgaaatggccacgctggcctctcaaagcgttgggattacgggggtgagccaccactcccagcctacactggggggcttacctataaacaacgttcttatggagtaatgtgtggggaaaagaaagatcaaattgttactgtgtctgtgtggaaggaagtatacacaggagactccattttattctgaactaacaaaaattcttgtgccttgagatgctgttaatctgtaaccttaccccgtgctt

SEQ ID NO: 101107 - DNA, 476 bp, Homo sapiens
  misc_feature (1)...(476): n = a,t,c or g
ctcgacgcctgtggttgaancctagttgacggnncgacccacgcgtccgcccacgcgtccgaaaattgtttcagatttttagtcattcctatacctcaccacttcccatactgaaaatttgagaaactacttagtactagttctaactgatctttggggaagtttgcggtatcattttctttttcttttttaaaatagagacgggctcttgctgtgttgcccaggctgtgctcgaactcctggccttaggcagtcctcctgccttggcttcccagagtcgggattgcaggcatgagctaccacacccagcctgactaccattttcaagctagagctgtagctgaaattctgggcttggtaagcactcagcattcctcagtaacaggactacctgtggagaattccttcagagctgggcatggtggcccacgcctgcaatcccagcactttgggaggctgagatgggcagattgctt

SEQ ID NO: 101108 - DNA, 429 bp, Homo sapiens
tttgctcttttaggctgggcgcagtggctcacatctgtaatgtcatcactttgggaggccgaggtgggagaattgcttgagctcaggagtttgagacctgcctggacaacatagcaagaccttgtctctactaaaaaaaaaaaaaaaaaggaatagttggctccttttcctatttactaacccaaaatgattaaccgtagttttttttttttgccgcatggacagttttggttcagccatgaaatcttgagtataaagacttctccaaaccaggcacgggggctcacacctgtggcctcggcctcccaaagggttgggattgcaggcatgacccaccgcacctggcttccatttttttaacagggaatatttattgcagcctgactgcatcatatatgggacactgtcagtctgtaaaaacaaatagcg

SEQ ID NO: 101109 - DNA, 425 bp, Homo sapiens
  misc_feature (1)...(425): n = a,t,c or g
agattcctgataggcaccctcaattcatggctttgggtttttatatacatacatacacacacacacacacacacacgtatatatgtatatataggtgtatatacacacacacatagagagtattaaatgtcagccattaactcaattacaatcaaacaaaaaagcaaacagaattgtttttagaactcaatttatgctgacatgttattttatgaggtaaatgtattttccagggaaattgaaaaaaaagtagaataaggaatgactagctctataaagctctaaaacatactatacatttacttttaaaaatgcatttgtaactgctttttttttaattaaatatgctagtaagacagagtctagaattagaaacagagttgagatttagtttcagtttttgtaagttgtattccaaactcatn

SEQ ID NO: 101110 - DNA, 408 bp, Homo sapiens
cggacgcgtgggtttttctttcctcaaatttatggaggaggtggttgctttagtgatatttacaagtatggtcattagttaagggttagaataagtgcccaaataaatatcatcatgtgtcgacaatttttaaagaaagcattcttgctagattttttttaacttttgtttttatttgtctttagagacaaggtctcactatgttgcctccactggtctagatctcctggcctcaagcaatcctccagctttggcctcccaaagagctaggattacaggcatgagccaccatgccccacccgttcttaccagatttaaaaaatctctattttaattgcatgaatattattcagagtagatcaaaaatgttaagaagagaaataagaatttccaacaaaaaggtgggaa

SEQ ID NO: 101111 - DNA, 406 bp, Homo sapiens
taattatattatttcttggatctcttgttctaatttaggttacccgagactccatctcaaaaaaaaaaaaaaaaaaaaaaaagggagggagagccccggggaaaaaaattttttaaaaaaatttttttttttttgaaaaaccttaaaaagggaatgggggggtttttaaaaaaaaggcgggggggaaaaggaaaaaccccctaaaaaatcccctttgggggggcgggctgggggggtttaaaaatgggggaaaatgtttggtttggggaaaaaaaaaaaaaagggggggggcaaatgggccccccccgggaaccccaaaaattggggggggggggggggggggaaaaccgggggggggggtttaaaaaacaaaggggccaaagggggaaaaccccgtttttaagaa

SEQ ID NO: 101112 - DNA, 407 bp, Homo sapiens
  misc_feature (1)...(407): n = a,t,c or g
ctcacccgcagggggaaggagggaggctgacaagccttgaataaaacacaagcctccgtttaaaaaaaaaaaaaaaaaaaaaaaaaaaaaggggggggccctttaaaaaaaacccttggggggcccaaatttaaccggggaagaaaaaaaaaaatttttttcttaaaaggggggcaaaaaaaaaccaccttggaaattttggaaaaaaaccttatttttgggggggaaaaaaattggcaaaaccccccaaaaaaaattaaacctttaagggaaaaaaaaaatttttaaggggaaaagggggaaaaaaaaccccaaaaccttggttgttaaaaatttttttttccgggttttatttaaaaaaaatttttcccccggggccttgatttnnnnnnnnnnnncnccncccg

SEQ ID NO: 101113 - DNA, 715 bp, Homo sapiens
aatgaaaatcttcttgtcacgcatgtcagcaaacaattttaggggccaggtgcagtggatcatgcctgtaatcccagcactttgggaggctaaggcaagaggatcatttgagctcaggactttgagaccagcctggatgacatagcaagcccccatccctacaaaaaaaataaaagttatttaggcatggtggctcatgcttgtagtcccacctattcctaagccaggaggatcgcttgagccaaggagttcaaggttgcagtgagctatgatcatgccactgcactccagcctaggtgacagagcaagaccttgtcccttaaaaaattttttttcaaagaatctaaaaggaaaaagggaagactactgagttcatgtacagctcaaagaagtggaatagggaagtttaaaagaaaagggaaaagaaaacacacacacaagaatagacactgttggcaaccctacagagtcagagtttgaaagtgagagttggaaacttgacctctgagtttgctggaggaagccagcaacatgatttagaaaggataatataatcataatggcaggaagtgagcacagtcttcttggctggagaatctcagttgcagtgtttggggcagactgactggaaatgatgctatgtcggggaccatgtttgaaagcctaaaatctgagttgacaaggagatgttccatggaggctctgggaaagaggg

SEQ ID NO: 101114 - DNA, 431 bp, Homo sapiens
  misc_feature (1)...(431): n = a,t,c or g
cccacgcgtccgctgggggtctaattcgatttttaagattctctcagttggaagaaatctaactaaaaatatacttaaaataattctttggtagtatattattttgaaatttggtccagaatcctatttgtttattcctgtagtatacatacatctgtagttacccagtagtctttgttgtctttgggccatctaaagtatatttgggctgggcatggggtctcacacctgtaatttcaacactttggaaggccaaggtgggaaaatcacttgaggccaggactttgagaccagcctcggcaacacagngagatcccatctttcctattttataaaaaaattacctgtaaggacatgtgtcacccgctgcctagcacttgaaaggcttaattgggaggatgagttgacttcccaattgtaaggctgcatgt

SEQ ID NO: 101115 - DNA, 440 bp, Homo sapiens
cccacgcgtccggtaggcacactgatgcagatctttggtgtttagcctccccaagccaggcctgaggtttgtctccatcctacacatacaggttttctcacattttgattttttctttttgactggcaatacacaaaaatagaggaagtaaactccttttatttttcctgcttagctatttaaaactccagctcctaagccaggcatggtggcacacacctgtagtcccagctattcgggaggcttagatgggagaatagcttgagcccaggagttcaggaccagcctgggcaacaaaacaaacccatctttagagggggggaggaaaaaaaaaaaaccctccggctcctgagggggaaaaatcatcaaagaaaacggggcttctttttccattggaactttctattttttctttggaaagaattttggacagcccttta

SEQ ID NO: 101116 - DNA, 437 bp, Homo sapiens
cttaacctacacatagtctatacatagatgcatattttacccccagctggctagagatttatttgttgtaaatgctgtatagatttggttttcctttctttacttaccctggtttggattttttttttttttttgaagggattaatgcggcctaaacaataggacaataatcctttggggctggggctaccccccccctgctgaaactaacggaaccggggctgtcactgggcatagaacaggggaatcaggggggctttcccatgggactcaggccccccccggagggtttttgtttttttggggggttttttggggttggttggttcgctttttttccaaaggggggaaggcctaccgggcaaaagggcttgaaccccccccctgatttgaaaaatctaccccctgcggggggccggtggatttttgaaagttgg

SEQ ID NO: 101117 - DNA, 358 bp, Homo sapiens
ctttttattatttgtaaagacgaggtttccctgtgttgcccaggctggtcttgaactcttggctccaagtgatacttctgccttggcctcccaaagtgctgaattaagcagctcaccatccacacggctgacctcatacatcaagccaataccgtgtggcccaagacccccaccataaatcacatcattagcatgaaccacccagagtggcccaagactcccagatcagctaccaggcaggatattccaagggcttagagatgaatgcccacgagctgaggataaagggcccgatctttctttgggcaagggtaagcctttactgcatagcataccacacagaagggtggggcccaca

SEQ ID NO: 101118 - DNA, 660 bp, Homo sapiens
ttttttttttttgccgggggttgtaaacagagttttattgatggggagggggctgggggaggcaaactccagagagggcagaggacccagccagccacgtggcatgcatggtcagctggaggtcagaggggggaggtcacaaggggacgggtggcatgggactctctcaccaccctggggccgtatttacagaggggccccacccaccttcgccgccccccaggcccccaagccctttagacagctgctgccgatgtgacttccgggcaggccctcctcgtgtctcctgcctgaaaccccggcattgtccccgcttccctctgcagagtggggggggttcaaactcctaaccggcacctcggagacccccgggccttctggaagccccagcgtcggctcagccaacgcccaggccgctggggccaccacgatcgtcgctcgtggacacacaccctgcacgcgtggcccacttgacacacacgcccacagcagccttcgctggcacgcacacacacgcccacctccccggccccttgcacacgaacacggcacgcacacgcacgcacacccacacacgccaggggcctgggttggggagggacctttccaggggtgggggagggcttaggtctgcagctgaggccgcgaattcttccagcc

SEQ ID NO: 101119 - DNA, 320 bp, Homo sapiens
  misc_feature (1)...(320): n = a,t,c or g
cgacgtgcccagaaaannccactgttgcctagaatgnggctacgnaaancncnnnaatnnngggacgacccacgcgtccgcggacgcgtggggtaaaaattttatgacagtttgaacatacaaaacccaccccaggcctccccacgctcatcgcccttaccacgctactcctacctatctccccttttatactaataatcttataaaaaaaaaaaaaaaagggggggccgcttaaaaggatccctgggggggcccaagttaacccgggcaggcaaggtaaaagttttttccttatggggggccgaaaaaaaagctacttg

SEQ ID NO: 101120 - DNA, 389 bp, Homo sapiens
  misc_feature (1)...(389): n = a,t,c or g
gctgaatagaagataggccaaacacttcgatttttagctatcatttaatgctttaagcaatatacaaagagtaaattaaataactctgttgcatatgggattccttggctgggtgtggtggctcccgcttataatcccagcactttaggagactgaggcagggggatcactggcatggtggtgcacacctgtagtctcaattactcaaaaggctgaggcaggaggatcccttgagtcaaagaggctgaggttgcagggagctttgatggtgccactgcactccaggctgagcagaagagcgagaccctgtctcaaaaaacagcagcaaaaacaacaaaacagactttgcctcggtaaaagcaataagattaaaaaaaaaaaatgtcttn

SEQ ID NO: 101121 - DNA, 544 bp, Homo sapiens
  misc_feature (1)...(544): n = a,t,c or g
gtttaaaagaatacattagctgngtatggtggcacatgcctgcagtcttagctattcagcaggttgaggtgggaggatcacttgagcccaggtgttcaaggttgcaatgaactacagttgcaacactgctctccagcctgggcaacagagtgagaccctgtcttcaaaggagaaaaaaaagaaagagttcttgttaaggttttttcatgaaaaacttgatcgcaatacagctgattgcaaatgcttttggagaagaatttaaaacaataactgtggatgacagaaacttatcatagtcatggttaaaatctgatgaaagccccaaagtgataagggaaatttagttatttctgttacatgcagcattttaagatatcacctagaatcatgactgacagcatcatatcaggaccatcagacttttatcaattttatgtaattnttagaaatgctgacatcaataacatatccatacaaatataactntanagaagatttaacatagccaaaattatgactgataacatattttgattctatgaan

SEQ ID NO: 101122 - DNA, 382 bp, Homo sapiens
agtggtgtgatcatggctcactggagcctcgatctcctggactcaagcagtcttcctgcctcagcctccctagtaactgggaccacagtagtgagccactgcacacaacttcaatgtggaatttttaaatttttgaatcttaaataattaagtaatgacaacctgtggggaaaagcaagagagatcagattgttactgtgtctgtgtagaaagaagtagacataggagactccattttgttctgtactaagaaaaattcttctgccttgagattctgttaatctataaccttacccccaaccccgtgctctctgaaacatgtgctgtgtcacagagttgaatggaataagggcggtgccagatgtgctttgtgtaacacaaa

SEQ ID NO: 101123 - DNA, 386 bp, Homo sapiens
ttaccttagtgctttctatgaggagacgcctgagattgacttgtcccatcagtgacgacttttgtcatgcggtgaggagtatgccaggcttctttgctgtaaagttaattaatccgtatgttttgttgttgaatagtaagtaataagtattttctgaggagacattttgagcctgtgtgtgtgtgtgtgtgtgtgtgtgtgtgtgtgtgtacacatgtatgtcttatttgcgctctttcagactttttcatgcaggcattcagtgctgtaaactttgctcttagcaccactttttctgtatcccagaggttttgataaggtgtgtcactattatcattcagcacacattcttaaatttccattgtgatttcatcggtgacccaact

SEQ ID NO: 101124 - DNA, 397 bp, Homo sapiens
ggcacgaggctgactttcccaaaacacactacttttggtgataggatttttttggtggtgatataattttattgcctgtattgattttttttttttttttaaaaagcaaagttttaactgctttgccaggattgggtatgaaatccttattttaaaaaaaaaaaaaaagggccgggggcgggggctcccccctgaaatcctacccttttgggggggtgggggggccaaaacccctgggggcaggaattaaaaaccaccctgcccaacggggggaaactcttttttcccaaaaaaaaaaaatttacccccccgggggggggcccccctataatcccacctcctgggggggctggggctggaaaaacacttaaccctggggggcaaaggttgcagggac

SEQ ID NO: 101125 - DNA, 403 bp, Homo sapiens
gcattcaaaatgtgttcctgcagaagtagttactatggcatattacattaggtatctcagtatcagttctctactgcatattttagaaaatatagttcactttttttttcactttctttattaggggccgaataatttatttttcttctattttgctggtactagactgatccaaagatcctggaagtagcctatgatcatttgataggttcatgtacaaatcaaaagggaaggtcaaatatttaacaaatagattttctgtatgataggccgaggtgggtgaatcacctgtggtcaggagtttgagaccagcctggtcaacatggtgaaaccctgtctctactaaaaaaatacaaaaacttcaccaggtgggatggacatgcctctagtcctagctactcag

SEQ ID NO: 101126 - DNA, 421 bp, Homo sapiens
ggcacgagatcagagctgaaacagagcccttatgtcccgtgaagccaattttctctctggacctttacagaaaaagtgctgaccccagagataaggtaaccttataaattgttgattacacacacacacacacacacacacacacacacacacacacacacacacacaatttaacaaactaccctgactttttataccttgtggacacattcccaggagatattgagattcaagagagcgcattttttttttttaataactctccaaagctctgtggtctaagagcaacaatagggaatgcatagagagttgacacgggtgattttgttgataagtgtgggatatttaagtgtgagtgagaatttacgtgtgtggcaatacagaacctgcaaaaaacactattttcccttctatgatgttt

SEQ ID NO: 101127 - DNA, 398 bp, Homo sapiens
tggcacgagcgcactcacagtcgcatcataatcctctttcaaggacttgaaactctacttccactaatagctttttgatgacttctagcaagcctcgctaaccttgtcttaccccccactattaacctactgggagaactctttgtgctagtaaccacgttctcctgatcaaatatcactcttctacttacaggactcaacatactagtcacagccctatactccctctacatatttaccacaacacaatgaggctcactcacccaccacattaacaacataaaacccttatttacacgagaaaacaccctcatgttcatacacctatcccccattctcctgctatccctcaaccccgacatcattaccgggttttcctcttaaaaaaaaaaaaaaaa

SEQ ID NO: 101128 - DNA, 482 bp, Homo sapiens
  misc_feature (1)...(482): n = a,t,c or g
ggcacgagcggcacgagtgcaaacaagtaagataattatttatccagttattctagttcagggtcttggatgagagagcttatcctagcatctcagggcataaggtgggaacccattgtggacaggacaccatcccatcacaggacacacacacacacacacacacacacacacacacacacacacacacacacagtcttattcagactgggaccgtggacacatgccagggaacctaggggacatatctgtgggaactgaataagaaaccagagtccctgaaaaaacccacgcacacgtgggaagaacttgcggactccacacggatggtgaccctgaccaagaaccaattttttttcttatgtgtgttatcacaacacaaagttgaattacacagtgttattcaggggccttgtgtgtgcatatgaagtgaaataattcaccccccgagcagaatttggtctcagaatgtggggtgcacn

SEQ ID NO: 101129 - DNA, 200 bp, Homo sapiens
  misc_feature (1)...(200): n = a,t,c or g
agtggccggnnnnnnnnncctgacctgctgaccgacnctacttnnccggccgacccacgcgtccgaacaacgtanaaataaaatgacagtttgaacatacaaaacccaccccattcctccccacactcatcgcccttaccacgctactcctacctatctccccttttatactaataatcttataaaaaaaaaaaaaaagg

SEQ ID NO: 101130 - DNA, 403 bp, Homo sapiens
tttcttgttatgcctttaatttttgtatttatgagcttgttcatttgaaaatcaaagatacatattgccatattttcaaattgaatttatacagagacaagcctacagtgaaagaaaaacagtatttttcagataaaaattaattcaaatgaatgtaacttaaatgaaaaaataaaactataaaatcttaggaaaaaaataaaagaaaatcttcaggatccaggggtcagcaaagagttcttagtcatgacaccgaaagtacaatctggaatcccagctactcaggaggctgaagcaggagaatcgcttgaacccaggtggcagaggttgcactgagccgagatcgtgccactgaactccagcctgggcaacagagtaagactccattcagtggaggtttttt

SEQ ID NO: 101131 - DNA, 442 bp, Homo sapiens
agaccacccacggagggcacttcgtgaagagcgaggattggctctgaccagtgcttatcagcaggcacacaggtagttgaaaacaaatcccagatatcaggtgacttcatgtggaatgacttcaggtcttgatctgtcacccgggttggagtgcggtggcgcaatcacggctcactgtagccttggattcctgggctcaggtgatcatctggcttcggcctcccaaactgctgggactacagagatagaaatgaggtgtggggaggtaaaaaggaagtgacctgtcccacagtgaatctgcagaaaagccagtgaagaccaggtggatgaaaatgaggctggggccatgcccatggggagatgttggacgatgcttgagtgcaagatggcagcaggcccggagaggcccaaaagagaattcccacgccggggggtgagtagg

SEQ ID NO: 101132 - DNA, 491 bp, Homo sapiens
agaaaaagaattccaagaacccgggctttctggatccaaagctctttcatggggacgtcctcttcccctcttggcttgggccagactttttctttttctttttttttttttgggaaagggattccccccccccctaggaaacaaagggaaacccccttctaaaaaaaaaggttattaaattaaattaaaaaaaaaactggcccggggaccaggggttaaccccggaaaccccaccctttgggaaggccaagggggcccaaccccctgacctaagaaattcaaaaccacccggcccaaaaaaaaaaaccttggtttttcttacgggaaaaaaaaataacttggcctgggggaaccttccctccctccccacctcctgggaaacctgaggcagaaaaattgtttaacccgggaggggggaggtggcagggagcaaaaaccaaccccctggcctccatctctggggacaagccaggacccacggaaaccccccc

SEQ ID NO: 101133 - DNA, 429 bp, Homo sapiens
  misc_feature (1)...(429): n = a,t,c or g
cggtggctcacgcctgtaatcccagctctcagggaggctaaaaggcgggaggatagcttgagcccaggagttcgagacctgcctgggcaatatagcgagaccccgttctccagaaaaaggaaaaaaaaaaaaaaaaaaaccaaaaaacaaaaaaaaaattgggggaattttccttaaaagaaaaacccccccccaaagggaagggcaaatttttcgggttggcccgggaattttaaaaaaattttttggtaaaaaaaagaaaaaaaaaacccccctggggggggggctaaaaaaaaaaaaaaaaaaaaaaaaaaaaaaaaaaaaaaaaaaaaaaaaaaaaaaaaaaaaaaaaaaaaaaaaaaaaataaantntaaaaanttataaaaaatttttaaaatntttttttcggggcgggctcctcttgtttg

SEQ ID NO: 101134 - DNA, 417 bp, Homo sapiens
cccgacattactcggactaccccgacggatactccacatgaaacattctatcatctgaagactcactcatttctctaacagcagccctgttaatggttttcatgatttgagaagccttcgcttataggcgaacaggcctaatagcataagaaccctccatgaacctggagtgactatatggatgccccccaccctaccacacattcgaagaacccggatacataaaatctagactgaaaaggaaggagtccaacccccccaagctggtttcaagccaaccccatggcctccatgactttttcaaaaaaaaaaaaaataggggggggcctttttagagaatccatgggggggccaaaattaacccgggaaggcaagagaaaagatttttccttataggggagcgagttacaacgtagg

SEQ ID NO: 101135 - DNA, 423 bp, Homo sapiens
ttttatcttggattaacttagataaaaactgtgtctagagtttaaatacattgaaatagaaaaaaaaatagaaattagaaaatagtcttcaagttctgaaaatctagaagactattttctaatttctatttttttttctatttcaagggatttaaaaaaaaaaaaaaaaaaaaaaaaaaaaaaaaaaaaaaaaaaaaaaaaggggggggcccttttaaaagacccccggggggggcccaatttcccggggggggggaagaaatattttttttctttttggggggggttttaaaagcggggcccgggggcccgttttaacccggggggggggggaaaaccttctcccggggtatttttggaaggacccctctttttgggggggggccttgtggggcacccccccccacgaattttactcttctg

SEQ ID NO: 101136 - DNA, 425 bp, Homo sapiens
gttttgccatgttgctcagtctggtctcaaactcctggcctcaagtgatccgcccaccttggcctcacagagtgctcggattacaggcatgagccaccatggcggccttaagtgaggtgagtttcttggcccatcatcaaataagggtgctcttttactttgggaagctacatggctacagagcttcatgaagagtgcttccttatttgtgaagcccaggcctacttttgtttattttgtttttgcttttgttggatatcgggatatctattttacagctagctctttgataaaagtgattcaggagggactaaagtatactatgaaatgtgcgcctctaaccctctagacctctttaatctcagatttttgctctgggagaagctgatgtgaagcaccaatgccttcacttgctcatcatgctt

SEQ ID NO: 101137 - DNA, 438 bp, Homo sapiens
aagaaaacaggcatacacgcacacaaacacacacacacacacacacacacacacacattgaaagctgaaaagcaaatagaggggggcaaatgacatagcttacttaaaaaagccaaatcttaacttggctataaagaaggctaaaaatgaagctgacctttaccacagaatctttaaatacctcaggaattgagccagacatatgtggaagcagaaccccagggctcctcctcttccccattccactgaacaactgttcttcctacctatacctcccccttagtataagactccaagtatactctttggagggaaaaaaaaaagcccaagtatttttggatggggagatactaggcaaaattgagaacagggctttttaccccatatgagggaattaggtgaatatgggcccccctaatgaagggaccccctcccctt

SEQ ID NO: 101138 - DNA, 497 bp, Homo sapiens
  misc_feature (1)...(497): n = a,t,c or g
atctgataccgtatgaaccctangatacagtctngaacgacgcctataaaaaactggagtggctgaatataaaaacagtttaaatgtagtccatcatccttttttcttgagttacgctgtttcctttttgctacagggatggagtttcgccatgttgtccaagctgggctcaaactcctgagttcaagcgagatgcctgcctcagtctcccaaagtgctgggattaaaggaaagcccacaagaaaggacagttaatgtgagctctattcggggaaagaaatggagctggtatttggactatttattttcacaggggttacaaggcttgaaactttttataagaaagagtgttcatcattcttccattcccagagcagagggcataaactgcaaccatcaatattaaatgaatggtggcatatacggaacccactgggcttaactcacttcttattgctagagcaaagtggctcatcttgagttcccattttcatttg

SEQ ID NO: 101139 - DNA, 427 bp, Homo sapiens
  misc_feature (1)...(427): n = a,t,c or g
aattttaataatgaacaccctcctagccttactactaataatcatcacattttgactaccacaactcaacggatacgtagaaaaatccaccccttacgagtgcgggttcgaccctatatcccccgcccgcgtccctttatgcataaaattcttcttagcagctattaccttcttattatatgaactagaaattgccctccttttacccctaccatgagccctacaaacaactaacctgccactaataggtatgtcatccctcttattaatcatcatcctagccctaagtctggcctatgagtgactacagaaaggattagactgagccgaattgaaggaggaacaaaaaacgctccaatgctaatgaagaaggggggggcgttaaaaagaggaacttgggggggccccttgtccggggggaagcaan

SEQ ID NO: 101140 - DNA, 317 bp, Homo sapiens
accacatttgataattctgctctgctctttttttgggatgggggggagatagagtttcactctgtctcccaggctggagtgcagtggcacaatctttgctcactgtaacctcagcctcctgggttcaagcaaaaactcattttgcctcaaatagtaaaagagaatgtgtccaaaatcagttcgcaattactgttttcaagagtcaatataaatatttccccttcagaacaatgtattacaccaccaagcctacagcttgccagaattggcatcttttatgcagcaaagatacatttaacaaaaggcctacgcggtcg

SEQ ID NO: 101141 - DNA, 477 bp, Homo sapiens
ggtttttttgcaggttctcatgttttattgtaaagcaacaagaaactcttatgtacactgtccgtcttggggcgcctccatcctgtgccatcttctctaccaggccaggcaggcatgggtggggcgctcagagtcctctgccctgtccctgcccggccaggaccccgcagacctcatgctagacgatgaccgtctgcacctccagctggccctccggcgaggcgatgaccagctcgcctgcatgctccaggatctcgatgtgctctgatgacaccatggactcagcggcctgttcagagcctcttgatgctgtacggacggatggcacagtgccatcgctgacggcagaggccaacggcatggtcacctgctctgtcatgctctagagggtggaactgacgatgatgtcgccgaccgtcggacctgtacaagcgccattgctatgtgaagcggtcgtatggacgtgaaacaagtacg

SEQ ID NO: 101142 - DNA, 452 bp, Homo sapiens
ttgcacagttctctagtacctttataccacacattcatgtgccacatagcgaacctttggtcagggacagacagcatatacgatgggggtcccttaagattataatacttgtctttttttttttttttggagagggggtttcctttttgtgccccaggcgggggggcagggggggaatttgggttaacggaaccttttttttccagggtaaagggaattttctggcttaacccccccgggaggttgggataacgggggatcccaaagaaggaggggggttgtttttaaaaagggggaaaggggggttaccccggtccccagaacccttcccactggaaagacaaatcactttttggggggagaacccctcacagggttctaaaatcttgggggggggaccttccgccctggaaagagagggggtctaattttgttcccccagggtggttttg

SEQ ID NO: 101143 - DNA, 454 bp, Homo sapiens
  misc_feature (1)...(454): n = a,t,c or g
ccctttcctctccctcagaatttgggtttgctgcctctatcttgttttttgttttttcttctggggggggtctaaaacagtgcctggcacatagtaggcgctcaataaatacttgtttgttgaaaaaaaaaaaaaaaaaaaaaaaaaaaaaaaaaaaaaaaaaaaaaaaaaaaaaaaaaaaaaaaaaaaaaaaaaaaaaaaaaaaaaaaaaaaaaaaaaaaaaaaaaaaaaaaaaaaaaaaaaaacaacaaaaaattaaaaanatcgggggggggccgaatatatatatttgcggagggcgctttccaaaatgggccgtcagaaaataaaattttcttacttaataaggggcgaaaaaaaaaacaaacttctttaatataaaaaaaaaaattttattttgtggggggggactatctttcctaacacaccgtttaagtaattattgatttaaaat

SEQ ID NO: 101144 - DNA, 452 bp, Homo sapiens
  misc_feature (1)...(452): n = a,t,c or g
tgattgtctggtttcctttaggcagaatcccttcactttaagaccacaggacaggggcaagtttagcctctggtactaatttaaattaaaataattttagagcctgttaacaacacatccaactcaatgtatactgagtacctatgataaacatgctaaatcagttaaaagtatgaaaatacaaagataaatagaagagggctcctaactaaataagcttatcacctgaaaaaaaaaaaaaaaaaaaaaaaaaaaaaaaaaaaaaaaaaaaaaaaaaaaaaaaaaaaaaaaaaaaaaaaaaaaaaaaaaaaaaaaaaaaaaaanannnnggggggggggggggcatataaaaatattccgggggccccaatattttagggggggtaagaaaattttttttctttttatgaggggtgttctttaataccggggtgggattttttaaaaaaaaa

SEQ ID NO: 101145 - DNA, 423 bp, Homo sapiens
  misc_feature (1)...(423): n = a,t,c or g
gttaacaaggacctacttttcagtcaggcattactgaggcttagagaatacctccctggagccaagggcaaaagccagaccaattcagtagtaacaagtatacctaatgctcagatcttggtttctaatattattcttcagtaagagtaaccaggactccttggagaaatggctgattccagggatagggtagaaaatgtacagaaccagcctggggcatcttgtagaggcaaaaaaaaaaaaaaaaaaaaaaaaaaaaaaaaaaaaaaaaaaaaaaaaaaaaaaaaaaaaaaaaaaaaaaaaaaaaaaaaaaaaaaaaaannnnngggggggggttgtttaaaaaaaatttggggggggccacaatactcggggtgtgaaaataattttttttttttctttgggggggtaataataatagcg

SEQ ID NO: 101146 - DNA, 427 bp, Homo sapiens
cccacgcgtccgcaaagccagatttgtgcagcctggatgacagagcaagactctgcctcaaaaaaacaaaacaaaacaaaacaaaaaaaaaaccttaaacaacatatggggaactttttttaaagacactagcataaggaattcatgtactcatcaccaacttgaacaattataaatattcagcctcttccattaataccccgcccatttgttttttaaaaaaaaaaaaaaaaaaaaaaaaaaaaaaaaaaaaggggggggggcgtctgaaaaaaaaaaaaagggggccccccttgggggttttttggaggggggggttttctcccctatgggaacccctttaaaaaaatggggggggggcaaagaaaaaattaaaaaaccggggggggaaacaattttttaaaccccttttaaaaaaataagggtg

SEQ ID NO: 101147 - DNA, 441 bp, Homo sapiens
  misc_feature (1)...(441): n = a,t,c or g
gaatatgtagatccaatcactttacctatacaaaatgactgctatggggggaacacaataaacaccagttttgacttttaaaaaaaaaaaaaaaaaaaaaaaaaaaaaaaaaaaaaaaaaaaaaaaaaaaaaaaaaaaaaaaaaaaaaaaaaaggaaaaaaaaaaaaaaaaaaggggggggggcaaaaaaaaaatctcagaaaaaaaaaaaatttatttccttaaagagggggaaaatttaaccctcaggggtacctttggggggtggccttttttggggggggggggacagtatttgaattaagtggtaaaaaaaaaaaaaaactcttctggaaaaaaaaaattttccccaaaaaaccccccccacatgcgtttatttttctaaaagtcgcattttttttcgcgggagaagaatcccncncaaacccccctccgctttca

SEQ ID NO: 101148 - DNA, 385 bp, Homo sapiens
aatacactgaaaatgtttagacgggctcacatcaccccataaacaaataggtttggtcctagcctttctataaaaaaaaaaaaaaaaaaaaaaaaaaaaaaaaaaaaaaaaaaaaaggggggggccctttaaaaaaaacccggggggggcccaaatttacggggggggggaaaaaaaaaatttttcccttaagggggggggaaaaaaaaccccccgggggattttgggaaaaaaaccctttttggggggggggaaaaagggggcccccccccccaaaaaaaataaaggcctgaggggaaaaaaaaaattttaaaggggaaaggggggaaaaaaacccgaaatgcccggggggggaaaaatttccccaaaagaaaaaaaaaaaaaa

SEQ ID NO: 101149 - DNA, 399 bp, Homo sapiens
  misc_feature (1)...(399): n = a,t,c or g
aaaatttgtcacagaattttgagacccattaaaaaagttaaatgagaaaaaaaaaaaaaaaaaaaaaaaaaaaaaaaaaaaaaaaaaaaaaaaaaaaaaaaaaaaaaaaaaaaaaaaaaaaaaaaaaaaggggggggggcctctttaaaaattccctcggggggcccccaattaccccgggggggggaaaaaaatccccccccctttttggggggggaaaaaaaaccccccggggtttttttaaaaaaacacctttttttggggggggggcattttggcccccccccccccaaaaaaaattcgccctggggggaaaaaaaaaatttttggggggggggggggaaaaaaaaacaaaatatccccggggggaaaaaaattccctcccacaaaaaaaaaaan

SEQ ID NO: 101150 - DNA, 420 bp, Homo sapiens
aattatgtgtttaaagaatttagcgacaagttgggtgcggtggcttatacctgtaaccctagcactttgggaggctgaggactgtggatcacttgaggtcaggaattcgagaccagcctaggcaatatggtgaaaccctatctctaccaaaaataccaaaaaaaaaaaaaaaaaaaaaaaaaaaaaaaaaaaaaagggggggggccctttaaaaaaacccttgggggggcccaatttaacggggggggggaaaaaaaattttttttttttttggggggggttaaaaaacccccccggggatttttgggaaaaaacccttttttggggggggggaaaatgggggcccccccccccccaaaaattaaagccttgggggaaaaaaaaaatttttaagggggaaggggggaaaacacccccggt

SEQ ID NO: 101151 - DNA, 411 bp, Homo sapiens
  misc_feature (1)...(411): n = a,t,c or g
aggggaagcccacccctgcatgcttctggctggagcacctccctggggagtcgggggattgggttgtgggcagtccccatggccgcctggagaagccgctggggcccgggggtgtggggcggtgtggcggccgcacactgtatgtacctataataaaccctttggctttgacggtccnaaaaaaaaaaaaaaaaaaaaaaaaaaaaaaaaaaaaaaaaaaaaaaaaaaaaaaaaaaaaaaaaaaaaaaaaaaaaaaaaaaaaaaaaaaaaaaaaacacacaaaaaaaaaaaaaaaaaaaaaaaanannnnnnanaaaaaaaaaaaaaannnnnttgtttaaaaaannannanaaanaaaaanaannnnnnnaaaaaannnnnnnnaaaaaaaaaaaaaaacacaaataaaa

SEQ ID NO: 101152 - DNA, 412 bp, Homo sapiens
atttcactttacatccaaacatcactttggcttcgaagccgccgcctgatactggcattttgtagatgtggtttgactatttctgtatgtctccatctattgatgagggtcttaaaaaaaaaaaaaaaaaaaaaaaaaaaaaaaaaaaaaaaaaaaaaaaaaaaaaaaaaaaaaaaaagggggggggccctttaaaaaaaatcccgggggggcccaaaattacccggggctgaaaaaaaaattttttttttttttagggggggaaaaaaaaaacccccgggggtttttttgaaaaaaactttttttttgggggggggaattttgggcccccccccccccaaaaaattaaagcctttggggaaaaaaaaaattttttagggggaggggggggaaaccccccttcacacccctg

SEQ ID NO: 101153 - DNA, 457 bp, Homo sapiens
aaggaatgtcacaaggtcaattgatcagttagggtggggcaggaacaaatcacagtggtggaatgtcatcagttaaggcaggaactgactaatttcacttattttgtggttcttcagttgcttcaggccatctgtttatatatgtgcaggtcacagggggtatgatgggttagcttgggctctgaggacagtacgtcaggcttttttcaaggtgagggtcatggtgataggtgtgggggtggctgcaaaaggattttgcaataagggagaaagattgggctgaatttctaatgtagcatgggtaagtgggacttcatagccaaggaacagagtcgggtgggtagacaggaaacatcaaagataaaggtgggaggtgggggcagggagtgtgcaaattctggttaaagtgacctaacaagattctcgctgaggacaggggcaggtgatcagacatcac

SEQ ID NO: 101154 - DNA, 469 bp, Homo sapiens
cggacgcgtgggtttttgtagccacaggcttccacggacttcacgtcattattggctcaactttcctcactatctgcttcatccgccaactaatatttcactttacatccaaacatcactttggcttcgaagccgccgcctgatactggcattttgtagatggggtttgactatttctgtatgtctccatctattgatgagggtcttaaaaaaaaaaaaaaaaaaaaaaaaaaaaaaaaaaaaataggggggggcccttttaaaagaccccttggggggcccaaattttccgggggggggaaaagattttttttttttcttaagggggggcttttaaaaactccttggggatttttggaaagaaacctttttttggggggggggataatgggggccaccccctcccaaaaaattaagggcccaggggaaaataaatatttttaagggggaaagggggaaaaccccccgg

SEQ ID NO: 101155 - DNA, 433 bp, Homo sapiens
ttcatccgccaactaatatttcactttacatccaaacatcactttggcttcgaagccgccgcctgatactggcattttgtagatgtggtttgactatttctgtatgtctccatctattgatgagggtcttaaaaaaaaaaaaaaaaaaaaaaaaaaaaaaaaaaaaaaaaaaaaaaaaaaaaaaaaaaaaaaaaaaaaaaaaaaaaaaaaaagggggggggcctttaaaaaaaaacacggggggggcccaaaattacccgggggggaaaaaaaaattttttttttttttggggggggaaaaaaaaaacccctcttgtttttttaaaaaaaaaatttttttttgggggggggctttttgccccccccccccccaaaaaattttggcgtcgggggaaaaaaaaaaaattttggggggggggggggggcacacgcg

SEQ ID NO: 101156 - DNA, 434 bp, Homo sapiens
cccacgcgtccgcggggtttcaccttgttggccaggatggtctcgatctcctgacctcatgatccacccgcctcggcctcccaaagtgctgggattgcgggcgtgagccaccgcgcccggccgagggtatcgtttttattggttgacaggaaaattcaagattgtctttgattagtgcttagttttcttagcactttgcagagagtcacataattctaatgtttttcttttatatcgaaagaatgttctgaagtcttaattttgtgggggaaaataatgcatgtcctagtttttctttacctttctcttcttggcaaactatttgtgtcttggattgagtacatctcgtttcttaggttttttcctactatgtgacatttgtaaggttctttcttttttctatgtgggaaaaaaataaccttatttaggtcagg

SEQ ID NO: 101157 - DNA, 440 bp, Homo sapiens
tggggacaggtggcattttcatctctgggtccctgtgccaggctcggaatccaccacacagcatgagcttggagaatgtcgcctaataaagacagacgaacattaaaaaaaaaaaaaaaaaaaaaaaaaaaaaaaaaaaaaaaaaaaaaaaaaaaaaaaaaaaaaaaaaaaaaaaaaaaaaaaaaaaaaaagggggggggggggtttaaaaaaaacttggggggggcccaattttttggggggggggaaaaaaatttttttttttttttggggggggaaaaaaaaaccctcgggggggttttggaaaaaaaacttttttttgggggggggggcttggggggcccccccccccaaaaaaattggggggggggggaaaaaaaaaaatttttagggggggggggggaacaaactcccctcctttttctctgaaagaaaaattg

SEQ ID NO: 101158 - DNA, 155 bp, Homo sapiens
cccacgcgtccggatttgagaagccttcgcttcgaagcgaaaagtcctaatagtagaagaaccctccataaacctggagtgactatatgattacgggttcttctactacaaaatcaaagaacccgtttacttttattctaaccaaaaaaaagaag

SEQ ID NO: 101159 - DNA, 435 bp, Homo sapiens
  misc_feature (1)...(435): n = a,t,c or g
cgcgccactgcactccagcctgggcaacagagtgtgactctgtctcaaaaaaaaaaaaaaaaaaaaaaaaaaaaaaaaaaaaaaaaaaaaaggggggggcccctttaaaaaaacccccggggggcccccatttttcccggggggggaaaattttttttttttttttttagggggggtattaaaaaccccctgggggttttttggaaaaacccctttttttgggggggggcaatttgggcccccccccccccccaaaatttaccccctggggggaaaaaaaaatttttttggggtaaggggggaaaaaaaaatgtttttttttttttttgggggagtttttctccccgggttttttttaaaaaaatttttccccccggcctctgtgnnnnnnnnnnnnnccnccntcccaaaataaatctaaaattctccgttcct

SEQ ID NO: 101160 - DNA, 494 bp, Homo sapiens
  misc_feature (1)...(494): n = a,t,c or g
cccacgcgtccgtgaagaagatggaactttcaaaatgggattattgccctcataaaaagagacaccagagagcttgagctctctctctctccccctacatgcacacactgaggaataaccatgtgagaacacaatgagaaggtgaatgaatgaatgaataggaaatcaatggaaaaactcaatgaaaacgaaagctaggaaaacaagctaggaagtgagacctcaccaggaaccaaatctgctggcaccttgatcttagacttcctagccttcacagctgtgagaaatgaatgtctattatttaagccactcactatatggcattttgttatagcaacctgaactaagacatagagaactctttatacttaataaagaacatctacaaaatctacagctaacatcataagggtaagaaactagatgcttccctgcaaagatcaggaacaatccaagganggcccttctcactaatcctattcaacatagtactg

SEQ ID NO: 101161 - DNA, 368 bp, Homo sapiens
aagggattaaccattttagatgccattaagaacatttgcgattcatgaaagggggtcaagatattgatattctcagaagtttggaagaagttggttccaaccctcacaaatgactttgaaaggtttaacacttcagtggaagaagtcaccgcacatgtggtggaaacagcaagagaactagaattagaagtggtgcctcaagatgtgactgaattgccgcaatctcatgatcaaacttgaatggatgaggagttgcttcttatggatgagcaaagaaaatgccttcttgaaatggattctactcctggtggaaaaagcttgggaaccgttgctgaaatgaacaaccaagggccttataaatatttcct

SEQ ID NO: 101162 - DNA, 390 bp, Homo sapiens
ccccattcccagtcagatagttgcctttttcacagggaaccaatgctactttttttctgtggttttacaggaacattttttgaatatacaagcaaatgcatggtgcatctctgctccacccccctcaacttttttttttttttaaaaaagggaacccatacccgggggcaagggctgacccctgaaaccccacccttttgggaggccgggggggccacctaacttggggaggggagttcaaaaccagggggaccaacagggaaaacccccttgtttactaaaaaaacaaaataaccggggggggggggcccggccctgaaaccccagttatttggaaggttgaggcagaaaaatcctttgaccccggggggggagggttgggggaaaaat

SEQ ID NO: 101163 - DNA, 383 bp, Homo sapiens
cccacgcgtccgctcaaccgccttttcatcaatcgcccacatcactcgagacgtaaattatggctgaatcatccgctaccttcacgccaatggcgccaaaaaaaaaaaaaaaaaaaaaaaaaaaaaaaaaaaaaaaaaaagggggggggccttaaaaaaaaaacccggggggggccaaaaaaaaggggggggagaaaaaaaaaattttttttttaaagggggggaaaaaaaaaaacccggggggatttttgaaaaaaaaaccttttttggggggggggaaaatggggcccaccccccccaaaaaaaaaaaacccccgggggaaaaaaaaaaattttgagggggaaggggggaaaaaaacccctttatccgtggggggaaaaaa

SEQ ID NO: 101164 - DNA, 400 bp, Homo sapiens
cggacgcgtgggcgaacccatccctgataatccaaaattctccgtgccacctatcacaccccatcctaaaaaaaaaaaaaaaaaaaaaaaaaaaaaaaaaaaaaaaaaaaaaaaaaaaaaggggggggggcctttaaaaagaccccggggggggccaaaaaaatccggggagggaaaagatatatttttttcttaaaaggggggcttaaaaaaagcccggggggaattttttgaaaaaaccctttttttgggggggggcctaaatgggaacaaccccccaaaaaaaaatacggccccgggagaaaaaaaaaattttaagggggaaaggggggaaaaaaacccctatatgttggggggtgagaaattttccataatggggaatttttaaaaaaaattttcc

SEQ ID NO: 101165 - DNA, 392 bp, Homo sapiens
ctaatatttcactttacatccaaacatcactttggcttcgaagccgccgcctgatactggcattttgtaaatgtggtttgactatttctgtatgtctccatctattgatgagggtcttaaaaaaaaaaaaaaaaaaaaaaaaaaaaaaaaaaaaaaaaaaaaaaaaaaaaaagggggggcgccccttaaaaaaaaccccgggggggccaaatataacccgggaaacaaaaaaaaaaatttttttcttttaggggggctaaaaaaaacccccttggggttttttgaaaaaaaactcttttttgggggggtaaaaaattggccacaacccccccaaaaaaaataacccttcaaaaaaaaaaaaaaatttctaaaggcaaagggggcaaaccccc

SEQ ID NO: 101166 - DNA, 451 bp, Homo sapiens
  misc_feature (1)...(451): n = a,t,c or g
ctcgtacagtgcggtggaattccttaataacagaacaggtacaggtttacatataatatgtaaatctacctgacatatagatctccacacactttaagagttgcataatactccactaaatgaatatacaatcatgtatttaaccagccctctgtggttggacacttaggaagtttccagaatttttttattgcagtgtttgcactaatatcatttcaaggttgtatgtgtaggatacatttctgcaaagaatttcctgtttaatagttgannnnnnnnnnnnnnnnnnnnnnnnnnnnnnnnnnnnnnnnnnnnnnnnnnnnnnnnnnnnnnnnnnnnnnnnnnnnnnnnnnnnnnnnnnnnnnnnnnnnnnnnnnnnnnnnnnnnnnnttataggcatgcaccaccatgcttggccaggtttatgcatttaaaatgctgatagatgatg

SEQ ID NO: 101167 - DNA, 387 bp, Homo sapiens
  misc_feature (1)...(387): n = a,t,c or g
cccacgcgtccgcacaactgaacggctacatagaaaaatccaccccttacgagcgcggcttcgaccctatatcccccgcccgcgtcccttttttcataaaattcttgttagtagctattaccttcttattattggagctagaaattgccctgcttttacccctaccatgagccctacaaacaactaacctgccactaatagtgatgccatccctcttattaagcatcatcctagccctaaggctggcctatgagtgactacaaaaaggattagagtgagccgaataaaaaaaaaaaaaaaagggggggccgttctagagggacccatgggggccccgggcttagggggggcggggaggatttacctgtttggctagggggagccgan

SEQ ID NO: 101168 - DNA, 389 bp, Homo sapiens
ctaacatgagccctacaaacaactaatctgccactagtagttatgtcatccctcttattaatcatcatcctaaccctaattctggcctatgagggactacaaaaaggattaaactgagccgaataaaaaaaaaaaaaaaggggcggccgttttaaagaatccttagggggccccaagtttacccgggctttgaaggtaaaaattttttcctaatagggggccgtattaaaagcaccctggaaatttggggaaggaaactttattttgggggggggcaataatgggacaatttacctcaagaaatacagggctcaaggggaaatgaaaaattttaacgggtataatgggtaaactaacctgcatatgctggcggcttgaaaatttggaac

SEQ ID NO: 101169 - DNA, 390 bp, Homo sapiens
cggacgcgtgggtgcgactccttgactttgacttttgagtagaactcccgactgaagcgcgcattcgtataataattacatcacaagacgtcttgcactcatgagctgaccccacattaggcttaaaaacagatgcaattcccggacgtctaaaccaaaccactttcaccgctacgcgaccgggggtatactacggtcaatgctctgaaatctgtggagcaaaccacagtttcatgcccatcgccctagaattagttcccctaaaaatctttgaaatagggcccgtatttaccctatagcaccccctctaccccctctagagcggaccagtcacagggcctattacacctaaaatttaaacaatgttgggggggtcgccttcaaaaagcg

SEQ ID NO: 101170 - DNA, 138 bp, Homo sapiens
aagcgttcgcttccaagcgaacaggcctaggagtggaagaaccctccttaaccctggagtgactaggtggaggccccccaccctagcacacgttggaagaacccgtgaacatatgaagggaccaggatgggcgggagt

SEQ ID NO: 101171 - DNA, 397 bp, Homo sapiens
ccataagatgggaccaaatgaccaaaaatcaggatgaaaaaagaccataaaaataaacaaatgggtgacctaaacattgaagttagcagggctttaaaataactatgactacatgttaaaaaaaaaaaaaaaaccaaaaaaaaacaaaaggctgagaaaaaaaaaaaaattttcaacaaaattttaatctgtaaaaaaaaaaaaaaaaaccaagggaattttttcccccggaaagggtaaccggaataaaaaagcaaaaaaggggttaaatttaaaattgccaaaccaaaaaacaaaatgggggaagggggtaaaaaaaaatttccaaggggacccccaaaaaaaaaaaaggggagggaaaatttgtaaggaattttttggggctggaaaaacccgg

SEQ ID NO: 101172 - DNA, 403 bp, Homo sapiens
  misc_feature (1)...(403): n = a,t,c or g
atctactaaaaataaacaaaattagccgggtgtggtggtgcacgtcagtagtcccagctactttggatgctgaggtgggaggatcacttgagcccaggaggtgagctgagatcgtgccactgtactccagcctggatgacagagcgggaccttgtctcaaaaaaaaaaaaaaaaggcccaaccccccttggggaaaaaaaaaggtgggggaaaaggggggaaccgtttccatggttattaaccttataggggaaggaatttttttccaaatttttacttcccctttaaaatttaaaaaaaaagaaaaaggggaatttttccttggccctcccccaggccctcaatggtttagtttttggatccacagggggcgcatttttacctggcaaagcacggattatan

SEQ ID NO: 101173 - DNA, 400 bp, Homo sapiens
agagatggaggtttcactatgttgcccaggccaatccttctcactggactcaagcaatcctcctgcattagcctcccaaagtagtgggattacaggtgtgaaccactacacctggcctcttgctaagtcaaggctgttcttatttgaaagataagaacaccctagtgtagagagggatttagctaaagtcacgcagcctttagtgacctaactggaattttatcccaactctgtaagactccaataccgtaatcgccactgtctacttccttgtgtctgagaatgaccaggggaccggcagacagatgcttgctctgggtgtgcctgtacactgtgcttcctgcctggtgcatgcctgagcctgcagggctggtggggctggaggcctgtggggtccctg

SEQ ID NO: 101174 - DNA, 366 bp, Homo sapiens
ccagttcttaaactttgcaccttcagacaaggttctactaaactggaaatggattttggcagggggtaggtgtcattctattctactgaagggagtggaaatgctgccttttttccttttttttttttttttttttttagaaaaaggaagttccttttttttgccccagctggaaggaaagggggcgggtttggtttaattaaacccccccttccggggttaaagagaatctcctcccccaaccctcggaagggggggaaataaaggggggggcccccccccccggggaattttttttttttttggggaaacagagatcccattgtggcccgggtgggtctaaaactccgaccttcagggagcccc

SEQ ID NO: 101175 - DNA, 414 bp, Homo sapiens
ctaggttgaacaaactacctttggtgaatgtgcatgaaattcgcgctaaacaatacaggcataaccttatcaaactcacctttaagatgactgtaattaaccaatgccttgctggacgctaagaggcgctaaaccatctggcacttctgaataactagacgtgctatgctaaaagacacggatgatacgggacattaactatgatctatctctctctctctctctctctcacacacacacacacacacacacacacacacacacactctctcacaccccagatgtgtgcctcagccaattggcctgcccatttccaagtgggccaaagtgaaagaattgattacctagagagaatttatatgccagcatttaataagaccagatttgcctcacctagggaatccctattgtgtg

SEQ ID NO: 101176 - DNA, 353 bp, Homo sapiens
gtagaaatcacatgaattttggaagcaaatggtaccgtaagtaccacagcaaattccttctggtcattatacaggcgtacctcagagatactacaggttaggtttcagaccacatcaaaaaagcaactattgcaaatagagtgagtcacatctagtttttggtttcccagtgcctataaaacttgtgtttatactacagtcttaaatttctaaaaaatgtacataccttaagaatactttattgctaaaaaatgctaacaatcatctgagccttcagcgagtcataatctttttgctggtggagggtcttgatactgctggctggtgactaaggtggttactgaagggtgggg

SEQ ID NO: 101177 - DNA, 387 bp, Homo sapiens
cttgtatgctgggactttgcaccaggcatttgtcagttctttggcagccatgtcaactgcagataaagacagtttatttcttcctttcccatctgtatatgttttatttcccttaaaaaaatttattttgtagaattggtacatttcatctatattaacaaatttgtaggcatagagttgttcatattaacttcttaatgtccatgggatcaataatgataactccaccttcatttctttttttaaattttttgtagagctatgttgcccaggctggtctcaaacacctgagccaaagcgatcctccagcctcagcctcccaaagtgctgagattagaggtatgagccacaacgcttggcctcatttctgatattgttaatttgtcg

SEQ ID NO: 101178 - DNA, 268 bp, Homo sapiens
cctgtgtttattgcatcggtgttcacaatagcaaacgtatggaatcaacataaatatccataaacaggtgaataaagaaaaaaacctgaacctgaaaagacttgctttgacaacatcactgggaacacttacccatgcttgagcacttatgagcatgattctgactgatattatgttaaccgaacctagttatgcgcagaaagataaatacttcatcttctcactcaaatgcagggacttataaaatgagctcatgtcgacgcggccg

SEQ ID NO: 101179 - DNA, 367 bp, Homo sapiens
ttttttgtatttgttttagtagaaacagggttttgccatgttggccaggctggtctcggactcctgacctcaagtgacccacccgcctcggcctcccaaggtgctgggattgcagggtgaagccaccgtgcccagcctgagactactttttgatggagcccactcaaggggatgaggaggtttaagccacaagtggctggctaaataaaggcttagtcagagctgggcacggtggctcgcacctgtggtcccagctgcttgggaggctgaggcatgagaattgctcgtacctgggaggcaagggttgcagagagctggggtcgagccattgcactccatcctgggtgacgggcgagactccatccca

SEQ ID NO: 101180 - DNA, 386 bp, Homo sapiens
gttggctcacatctgtaatcctaacactttgggaggccaaggcaggaggattatatgaagccaggaatttgagacaagcctgagcatcaaagtgagaccctttctctaaataaataaataataataataatctatctgctatcttaattcctctttgccatttaacatgacatattcagagtttctggggattagaatgtggacctcttgatgagaaaggacattattctaccatattgccacagttttgactcaattatttctccaaggattgctgtttccttttattggagaattgtctctgcaatcaagatttgggcactgggtgtgcccattggtattggggtatagtttcttttaggccctctcaaatgaaaaagaaaata

SEQ ID NO: 101181 - DNA, 392 bp, Homo sapiens
ccaaataattgaagcgctgcttattacaattttactgggtcactattttaccctcctacaagcctgagagtactccaaggctcccttcaccatttccgacgggatctacggctcaacattttttgtaaccacaggcttccacggactccacggcattattggctcaacgttcctcactatctgctacaacccccaactaatatttcactttacctccgaacataagtttggcttgcaagccgccccctgatactggctttttgtagacgtggctagactatttgtgcctgcctccatctattgatgagggcctcttagacaagcctttgggagggccataagcattggggacaaataaagcgagcgccggctgtctatgaaaatcctggctg

SEQ ID NO: 101182 - DNA, 389 bp, Homo sapiens
cacgcgtacggcaacaccctcgtagcgtaacttgttgtaaccatgacattttgactaccactagtcgacggttacataaaaaaattcaccccttacgagggcggctttgagcctaaatccgccgcccgcgtccttttctccataaaagttttcttagttgctattaccttcttattatctgatctacaaagtgccctccttttacccctaccatgagccgtacaaacaactaacctgccactaatagttatggcagcgctcttattagacatcatcctagccctaagtctggcctatgcttgactactaaaaggattagagtgaccctgctccgtcaatgatgggataaattcaaaggggggcgctggttttaaaattcctcagagaat

SEQ ID NO: 101183 - DNA, 392 bp, Homo sapiens
cgcgcgtgtgtgtgtgtgtgtggtgtgtgtgtgtgtgttttgtgcctgttaaaaatgtgtgtgtgtgtgtgtgtggtatgtgtgtgtgtgttttgtgcctgttaaaaataaccaaaacaggtgtttcaactacaactttgtgaaactcaaacaaacaagtataggcaagtacgtaaacaagcaaaacttcttttaagtcatactcaaaaatgacatgggggatttaaaacgttctctgttttatcatggtattactgaattagctaataatacagatttattaagtggtttctttagtctacttaatatttattaacagaagtcaaagactagcttaaattatatgaatgtaccttatttttttatataaaaaagactctctataggtttat

SEQ ID NO: 101184 - DNA, 389 bp, Homo sapiens
  misc_feature (1)...(389): n = a,t,c or g
tgtattttttatcagtcgactgaagatgaataatattcaggctacaagtttatcaaagagttaataggaattttctggatttggaaagaggcgtcagtttcaacctgacctttcaatacagcttctgcagcttgaacgcacatgcaccacttgggctgatgtcttccaagaaggtgtggactctgagcaatagtctggctatgggaagagatggagtccatgttgcctcgcctggtcttggactattggcctcaagcgatcatcctacctcagcctctcaaagtgctagcattcaaggtatgagccactgtacccagccccagactttctatagttgtctgtgaccaggccacatgctcacaaagagtttcagatatgaacacctaaan

SEQ ID NO: 101185 - DNA, 385 bp, Homo sapiens
ctggcccccaacaggcataaccccgctaaatcccctagaggggccactcctaaacacaggcggattactcgcatgaggagtatcaatgacctgagctcaccatagtctaggagaaaacaaccgaaaccaggtaattcaggcactggttattacaattttactgggactctattttaccctcctacgagcctcagagtacttcgagtctcccttcaccatttccgacggggtcgacaggtcaacattttttgtaaccacaggcttccacggacttcacgttattattggctcaactttactaagtatctggttcatccgccaactaatatgtaactttacatccaaacatcactttgggttcaaagccgtcgcctgatactggctt

SEQ ID NO: 101186 - DNA, 383 bp, Homo sapiens
tgggtgtgagggctcatgtttataatcccagcacttcgggagactgaagcaggaggactgcttgagcctaggagttggagaacagcctaggcaacatggcaagaccccatctctactaaaaaaaaaaaatgaaaaaatgggggggcctcttttaaaaaaaccatcggggggccaaattttttggggtatgtgaacaaaaatgttttttcctataaggggggggaatttaaaaccacgggggtgattttggggggaaacctttttttggggggggaaaataatgggaaaaacccccaagaaaaatttaggccttcaagggaaaaaaaaaaattttaaggggaaagggtggtaaaagaaacctatattgcttggtcttgaaaagt

SEQ ID NO: 101187 - DNA, 401 bp, Homo sapiens
gctaggcctctaccctggagtttcttatgacaatgttagcattcccagagggagacttggaaataggaggacacattttgaatgccataatgactgaaggtcctgagttgctaacttttaaagggccaggattccagacatcctgcaaagcaggtgacacatcctacatatcaagaaaaatggcctacaggagactaaggcaggagggtcacttatggccaggagttcaagaccaaactaggcaacatagcaagaccttgtctcaaaaaataaacaaataaataaaaccttatcaggcatggtggctcacgcctgtaatcccagcactttcagaggccaaggcaggtgggacacttgagcccaggagttcaagaccagcctgcgaaacatggcagaactct

SEQ ID NO: 101188 - DNA, 368 bp, Homo sapiens
tctggatttcactgattttcttgcttaataagttttttaaaaccacgatgctgcaattttttccctctcaagcttcttgaaaatgtgtgatttacccttttttatctattactctaggcaaagctaaatatgatttttttttttttttagaaaaggagttggctttttttccccagggtgaaatgcagggggggaatctcggttaattgaaacccccccctctaaggtaaagggatttttcttgcctggccctcccaaggggtgggaatggcaggggggcccccccctccccaactaattttggttttttggggggaaacggggtttaccccagtgggccaggggggtttgaaactccggacctaaaa

SEQ ID NO: 101189 - DNA, 393 bp, Homo sapiens
tgatggtgtctgctggaaaggtcagagcttccaaagtaaacagcgcgagaacctcatggacaggaagctcttagaccctatgtccagacaaaagatcaccatgttggccaggctggtctcaaactcatggcgtcatgtgatccacgccgccttatcctccaaagggcagggattacaggtgcgagccaacacacccaacctttcttctacaatgttgttttaataatggctacaaaatagtcttagttgtggatgttccacagcttatgaacatttaggttgctttccgatttttctggacagcactgaaatgaacattttttgcagctacacttctagtggtggtgttttcttctttaaagacaagtggcccaactgccaggtttggggcct

SEQ ID NO: 101190 - DNA, 349 bp, Homo sapiens
tgggaacccagtttagtgggagagactaatgtaaacagctttaatcaaaagtatatcaattggccgggtgctgtggctcacacctataatgccggcactttgggaggccaaggtgggtggatcacttgagggcaagaattagaaatcaccctgtccaaaaaggtgaaaccctctacctattttactaacacaaggtaaggtttatccatgtatggttatcaactaagtattttttttattacgaataaaggtactggatgacgatcaaactctatataaagggtttctttgacaggacccccaccgggagctatttttttgcatgacggaactaccacatgtggctgga

SEQ ID NO: 101191 - DNA, 340 bp, Homo sapiens
ctttagaccaaactcccttagcccccggcaaccactaatctactttcacactttattgacttgcctatcattgaaatttcatataaatgaaatcatacaacctgtggccttttgtgactgctttatttcacttagtataatgttttcaagtttcacccacattgtagcatgtatcactgcttttctttttattgctgaaatatgtttcattgtatggacataccacactctgcttatccaattatcagtcaatggacatataagtttgaattttttggctgttatgaataatgctatgaaaacctgtgtacatgttgtatttattcttatacatggtaca

SEQ ID NO: 101192 - DNA, 346 bp, Homo sapiens
caagatcaggagagtcacccaacccacagatgactgccgacacatgagtaagcccagccaaagcagaagaaccctccagctgactctaagacttagaagcaataataaatgtttattatcttaaaaaaaaaaaaaaaaaaaaaaaaaaaaaaaaaaaaaaaaaaaaaaaaaaaaaaaaaaaacgaaaaaaccaaaaactataaaaagaaaatactgaaaaaaccccaaaaggtgggtggggcggggcggcgagcaccaaaataaatttctttcatttatacatccccccggcgtttttttttgggggggggccgccctccgtttttatttttggttatgtaacggg

SEQ ID NO: 101193 - DNA, 337 bp, Homo sapiens
  misc_feature (1)...(337): n = a,t,c or g
ccgatgcatacaccacatgaaacatcctatcatctgtaggctcattcatttctctaacagcagtaatattaataattttcatgatttgagaagnccnnnnnnnnnnnnnnnnnnccccggggggcntccgcccccgggccttcccggtgcggcccccgggggcgggcctcgtgttttaggtttctgttccccctgatttgccccagtgctctcttgctgggcttcaagtcttgagattcatggaattggcccgacttgctccccacataaggtggattattcaataaattactatgtagccgggccactttgattttttgccacagaccttttcggc

SEQ ID NO: 101194 - DNA, 352 bp, Homo sapiens
aggacgagtatactcccacctaactctttctataactgggacagttccgccccacctcgttcatttttaaatgtgtttgtagagattggcttcaccatgttacctttggtccccaacttctggctggtcctaaactcctaggctcaagtgaacctactgcctctgcctcatcctccttttgtgctgagattattggcatgagacactgcacccagccataattgatttttttttttttttttttttgagaaagaaaattttttttttttccctagctggggggcaaagaaaattcctagcaagtggaaccttggcctctgggggacacgggtatatctcgctctgccctccc

SEQ ID NO: 101195 - DNA, 475 bp, Homo sapiens
aatactcatagaaatttaatatataataaaggtaacatcacaaatcagcagagagaaacataactgcccaaatagtgttggcaaaattaactgcttggggaaaaagagttgttctcagcaccaggaagagcttccaaagcattttaaaaacagacatcacacatacacacacaaaatacctctgggcatcaaaaatcgccacaaaaggtgcctataatcccagctacttgggaggctttggcagggagaactgtttgaacctaggaggcagaggctgcagtaagaccacaccactgcactccagcctggaccacagagcaagactctgtctcaaaaaaaaaaaatcaccacaaacaaggctgggggtaaaattatttgcaacaaatgagaaacaagatattaatattctgaatatgtttttaaaaactctggccaggcacaatggctcatgcctataataccagcactttgggag

SEQ ID NO: 101196 - DNA, 353 bp, Homo sapiens
atcgtgtcactgcactgcagcctgggtaacagagaaagaccctatctcaaaaaaaaaaaacccaaccaaaaccaaggctggaaaaccccactgacttttccaaagcctccaggaaaacactccctcctcctcccaggggggggggttccccattggacagccacactcccaggtaaacaaaaaaggcctccctgagtaaaaacctcctcctccagggctccagggattttttaagctaagcctcctgagtagcggggaccaccatgcaccaccaggccgggtaaactttttttggaactttttgggaaaagggggtttgtccatgttgcccagccgggtcttgagctcctgac

SEQ ID NO: 101197 - DNA, 370 bp, Homo sapiens
ggcacgaggagagagctacaccatgcctcaataccctgacactgctttatcaactaagttgatgtaatattctaaatcctttgttgtcatttcaccaatgttcacagcatcttcaccaccttctttgctcatccataagtaataacccctcatctgttgaagtttgatcatgagattgcaaaaattcaatcacattttcaggctccacttctaattctcctgttatttataccacatcttcagttggttcctccactaaagtcttgaacccctccaagtcatccatgagggttgccggaatcaacttcttccaaactcctgtaaatcttggtattttgacttcccatgaattacaaatgttcttaatggt

SEQ ID NO: 101198 - DNA, 362 bp, Homo sapiens
ggcacgaggtctttaaatcccccattagcgcccaaagctaagaggctaacttaaaatattctgtgttcttttatggggaaacagatttgggtaccatccaaatattgacccagaaatgaacaaccgctgtgtatttgggacattactgtcagtcaccatgaatattgaacgggaccgttaatacttgaccacctgtagtgcataaagacccaatcctcttcttaacccccttcccatgctttcatgcaagttcggcaatgaaccttcaactatcacacatcagctgcaactccaaagccacccctcatccactaggataccaacaaacctatccgcccttaacagtacatatgacatgaaac

SEQ ID NO: 101199 - DNA, 369 bp, Homo sapiens
  misc_feature (1)...(369): n = a,t,c or g
ggcacgagtgagcttcaataccctaaaatacacacacacacacacacacacacacacacacacacacacacacgcatttttataaagaagaaaatctatcacacctttggaatatctcttgtattttcttaggggcacataaagggaaaaaaaaaatgaattgaaatagattgaatacctcattaagactatttgaaacagggtcacttaggggaaaaggggtactggaaatatataaaaaggtcctccttgatggggggagaaaaaagatcatctctattcagtgattctcagagaagcgcgggaccctcattataggaaataattgtgaaccaccatctgaagtggccacatttttctaccccaagn

SEQ ID NO: 101200 - DNA, 345 bp, Homo sapiens
ggcacgagcaggtacccgcagggcctagcaagagacttaaatgactgataagaaccgggagaaacatgttgcttccaggcttgatttcgatttttcgcttttttttttttttgaaaaaaaatttctttttgcccccaggctggagggcaggggggaattttaccctctttggaccctccccctccggggttaaagaaattttctggcctaacccccccaagaagttggaattaagggccttgccccccccccgggttaattggggtttttttaaaaaaaagggggtttccccttgtgggccgggaggggcccaatctttggacctaagaatttggccccctgggc

SEQ ID NO: 101201 - DNA, 378 bp, Homo sapiens
ggcacgagagaatgtcaaattttgtcatataaagcaccatcttatggatataaagggaagtaactttaataaaatagaaaaaagaaacactgctgatcaaagagctaaaagaatggaattatcaaaataaaaagcagttaatttttgtttttgttttttttttttttggaaagggaggctcactttgccccccaggctggagggcaggggcccaattttggttgactgcaccctccacctccggggttaaagcagttttccaaaaatcagtaaattatccatctgaattatttggctgggcccattttaacaatcagttcccaaaacccaccaaactctatgggatattcttggtccgtgggtttttaacctttaaaa

SEQ ID NO: 101202 - DNA, 368 bp, Homo sapiens
ggcacgaggttattgacagtttcagtttgggaagatggaagcattctggacatgggtggagatgtttgctcaacaatgtgaaggtgcttgatacccctgagctgtacccttaacaatggttaaaatacatgcattatggaaaagagtatggaggttccacaacaaatcaaaactataactaccgtgtgatccagcaatctcattggtgagtatgtatcccaaggaaatgaaatctgtgtgtctaaaagacgtctgttctcccaggctcatcacgggaccactcacaatagccgggatgtggaacccacctaatcgctcgtcgatggattatagtggataaagaaaacatcgtgaattactgagatact

SEQ ID NO: 101203 - DNA, 366 bp, Homo sapiens
  misc_feature (1)...(366): n = a,t,c or g
ggcacgagcatttactcangaggttgaagcgggaggatcactggggtccaggaatttgaggctgcggtgagctatgaatgcatcactgtgctccaacctgggccacatagcgactctcactcatgaaaaaaaccaaaaatatcttcaaagatctctaaaactggtttaattttgtggtttgacaggcattaagattaaggttaactaaaggccattgagaacccgcagaaacaggaaaacctggttgcctcccccattaactgcctaaaaaaataaagtgcctggcctggcgcgatgacttatgcctgtaatcccagcactttgggaagccgaggcaggcagatcacctgaggtcaggagttctag

SEQ ID NO: 101204 - DNA, 374 bp, Homo sapiens
ggcacgagcagagctaagactttaattgaaactattgtctggactttcatggggaaacagaattgggtaccacccattttttgactcacccatcaaccagggctatggttttcgaaccttactgccaagccctatgaatattgtagggtgtcataaatacttgaccaacagtattacatagaaaccgaagccatatcaaagccgcctgcctatgcttacaagcaaggacagtagtcaaccttcaaatatcacacattaactggaaatactaaaccacccctcatccactatgataccaacaaacctatccggccttagagtacatatgacataaaacgatttaccgtacatagcacattacagtccaagccctg

SEQ ID NO: 101205 - DNA, 355 bp, Homo sapiens
  misc_feature (1)...(355): n = a,t,c or g
ggcacgaggtcttgctatgttgtttggcctggtcttgaactcctggactcaagcaatttttccacctcggccttccaaggtgctgggattacaggcatgagccaccacgtccgtgcccaaatatgtatttaatttaaatttcattttaatgtgtttaagggatgaaagtaaatacatgcttgttacaagccattcaaatgtagaagtaggaaggtggctgcccggcctcccctctcctgggaggatctgtggtgagcaatcggatgtgcatccttctgagcttttttgtattaacgactctttgctggatttgctgttactatgctttcgcagcaaacgtgggattgttgtggan

SEQ ID NO: 101206 - DNA, 353 bp, Homo sapiens
cttccatctcgcccaatactgaatatagagcatgagcagccagatcatataaaagtcattacatggccgagaaaaatgtgaaattggtctcagtgccaaacattttggtagtaaaacatcttaaggaaataatacaaaaatgttttaacagccaggtgcagtgacgtgcacctgtggtcccagctccttgggaggtggaagcaggaggattgtttgagcccaggagttcaagtccagcctgggcaacatagggaggccatgtctctaaaaaatattaaaaatgacatcttttaacagcctgattgaccattagtagtggtgatgtatgtacagtaaggctcatctcacctcaa

SEQ ID NO: 101207 - DNA, 366 bp, Homo sapiens
gacattgacaaatggattctaaaaggccagacataaacccagcaggagttggtttatatatatagatatatagatacacacacacacacacacactcacacacacacacacacacactcacacacacattattggatttatacctggaaacacacactaaaagggccaaaacttttttgagaaaaaacaaaaatggggagcactcctattatctcatggaaagaaagactatcactctaccgtagttagcgctatattgacaaagggctacccacatttctattaaacataaacacgttgagagacacacctataaaaatatggtaaagagatacttgacatgtccaaaaacagtgagtgcaaaag

SEQ ID NO: 101208 - DNA, 369 bp, Homo sapiens
tcagtagggggctctaatgtaaatccctccccagccttgcccctttctcctttccctgttttgtacataaattgacatgagctgcaacatgtgtgcgtgtgtgtgcgtgtgtgtgtgtgtgtatgtgtgtgtgatctgtgacatggttttgttacctttttgtttttgtaaacttgaatgttcaaaataaacatgctgtttactctgaagaaaaaaaaaagaaaatttgggggggggcttttttaataatttttttgggggccccaatttttgcggggcagaaaaaagtttatttttttttttaggggggtgaatataatggaaagggctctggcggtgttttaaaaactttggacggggaaatttggt

SEQ ID NO: 101209 - DNA, 366 bp, Homo sapiens
  misc_feature (1)...(366): n = a,t,c or g
cgaccagcccccaaatgtcgaaaaattttcttcttgccaattttgttgtttaaaaaaaaaaattgggggaaaattaaaaacctggaactccaaaaaaaaaaaaaaaaaaaaaaaaaaaaaaaaaaaaaaaaagggggggggcctttaaaaaaaaccctggggggggcccaattttccgggggggggaaaaaaaaattttttttttttaagggggggttttaaaaaaggggggggggggggggttttaaaaaaccggggagggggaaaaacccccccgggggaattttggaaaaaaaacttttttttggggggggaaaaatggggccccccccccccaaaaaaattaaagcttttggggaaaaaaan

SEQ ID NO: 101210 - DNA, 361 bp, Homo sapiens
  misc_feature (1)...(361): n = a,t,c or g
cctgatctgttatactacaatccataatcatttttattgccacaactaacctcctcggactcctgcctcactcattaacaccaaccacccaactatctataaacctagccatggccatccccttatgagcgggcgcagagattataggctttcgctctaagattaaaaatgccctagcccacttcttaccacaaggcacacctacgccccttatccccatactagttattatcgaaaccatcagcctactcattcaaccaatagccctggccgaacgcctaaccgctaacattactgcaggccacctactcatgcacctaattggaagcaccaccctagcaatatcaaccatttaacttcn

SEQ ID NO: 101211 - DNA, 383 bp, Homo sapiens
tgacctatagagtttctgagcatgtggatttttatatcacaatatccccatgacgtttttgcccatcaccctttgttgtgtgtatttattgtaaatggcattggagacttatgggacagattcaggtcccctgtccccccaatttgaaaaaaaaaaaaaaaaccccccaaacccccttgttgcccaggcggatcccctgaggtcaggatttaaaaaccacccgggccaacatggaaaaattttgtttttacaaaaaaaaaaaaaaaaaaaatttttccccttgggggggggccccggttttttccccattttttgggggggggggggcaaaaaaatcttttaaaccccggagggaaaggtttttttcctgggtttaaaaaagc

SEQ ID NO: 101212 - DNA, 371 bp, Homo sapiens
aatttgctagattaaaattaagatctctcgtttattgaaagacaccattaggccaggtgcttatgccaggaatcccagcactttgggagaccgaggtgggcagattgccagagcccgggagttccagaccagccagggcaacgtggggaaatcctgtctctatgaaaaaaaaaaaaaaaaaaaaaggaaattttttcccgggtgggggggggcccccttgggggccccggttttaaaaaggggggggggggggggaaaccctgggtcccttggggcaagggtttttggggcccaaattaccccccgtggacttaaaagggaacccttgtttaaaaaaaaaaaaaaaaaaaaccccccaaaaacccccggtg

SEQ ID NO: 101213 - DNA, 399 bp, Homo sapiens
ctcaaaacccaataattagcaaacaaccaatgccattataaaatgggcagaaggccaggtatagtggctcgcgcctgtgagcccagcgctttgggaggctgaggcaggtggtcttgaactcctgacctccagggatccacctgtctcggcctcccagggtgctgggattacaggcatgagccactgctactggctgatacaaccactttcaaacacagggtggcagtttcttaaaaaatagacatatatttatcatatgatctacccattctaccccagacagttacccaagataaatgaaagcataagtctataccaagaattttacatgaaagtttccagtagctttatctgtaatagccaaacactgggaataactcagtgccatccttatacata

SEQ ID NO: 101214 - DNA, 381 bp, Homo sapiens
attttcaacataacacgcaatgtggatgtcgagtagtgttaagaatggtgctgctcctgacaagtgtatgttaactgtttacattttctatctgtagaattatttctctattactgaacttttcctaagtgaaaaaaaaaaaaaaaaaaaaaaagggggggccctttttaaagaacccctggggggcccaaattttcccgggggttggaaggttatatttttttccttttggggggccttttttaaaactaggcctggcccgctttttaaaaccgggggaaggggaaaactggttccttgggaattttggaaaaaaaccctttttttgggggggggcctttttgggccaacccccccccaaaattttaagccttaagggaa

SEQ ID NO: 101215 - DNA, 385 bp, Homo sapiens
cctactgggagaactctctgtgctagtatgttgattccccccaaaacataccacttttttacttactggactttccatactattcacaggcctatactccctctacatacttaccacaactcaatggggctcactcacccaccacattatcaacttaaaacccttattcacaccaaaaaacaccctcatgttcatacacctataccccattctcctcctatccctaaaccccgacatcataaaaaaaaaaaaaaaagggggggccttttaaaaaaacccttcggggggcccaagttaacggggacttgcgactactaatttttttcctttaaaaaagttgattttaaaagctgggcactggccgccttttaaaacgcggaaaagg

SEQ ID NO: 101216 - DNA, 396 bp, Homo sapiens
attattacaatgcctaatcatgaaataattaaaattaacaaaagcattaaatactgtggccaaataccacacaagtatacaaaaatcaaaaatttttctttataaaagtaataatcagttagcattcctaaataattcaagtcttaagaaataccaagtaactatttgaaaaaaaaaaaaaaaaaaaaaaaaaaaaaaaaaaaaaaaaaaaggggggggggcttttaaaagatccctggggggggccaaatttaaggggggggggaaaaaaaaaattttttttttttaggggggggtaaaaaaaagggggggggggggggggtttaaaaaacccgggggggggaaaatttttttttggggtttttttgaaaaaaaactttttttgggggggggaaa

SEQ ID NO: 101217 - DNA, 387 bp, Homo sapiens
ccgacgggatgaacgtttcaacattatatggagccacaggctcccacgggcttcacgacattatgggctcagcgttgctcactatctggtacatccgccaactaatattgcactttacatccaaacatcactttggcttcgaagccgccgcctgatactggcattttgtagatgtggattgactatttctgtgtggctccatctattgatgagggtcttaaaaaaaaaaaaacaaaaagggggggccgttaaagaggatccccggggggcccaaaatttagccggggtggaaagggcatagctgtcccccattggggggacgattaataagagaggcacgggccttattataacaaagtgtgaactgacaaacatattctgtgggat

SEQ ID NO: 101218 - DNA, 407 bp, Homo sapiens
ctctgggctgggaaccacgttatcatgaaaaaatattagtgtcctacttacgggactcaagatactagtcacaggcctatactccgtgtacatatttaccgcaacgcaatggggctcactcacccaccacattaacaaaataaaaccctgattaacacgagaaaacaccctcatgttcatacacctatgccccattctactactatccctcaaccccgacatcagttacccgggctttacctcttaaaaaagaagagagccccttaggctccttgcataccatccctaacccttgcctgggggggggcggttatatgaagcacagggggggccctcacctatctggcgaccccattttctacctcctttgtgtgggaggccaagcaccccagagatatgggcaccct

SEQ ID NO: 101219 - DNA, 446 bp, Homo sapiens
  misc_feature (1)...(446): n = a,t,c or g
naactgaaactgttgtgaccatcanactgatcaaccttggcacgagggtgaaacgattctgtataaaaagggatagttttaaaatatttaataagaactggttgtgcctaactcatttctggaaaaggacagtggactcaaatgagacttcctgttcttgtcactttgtttacagatagtttctcaaaatgaaagaatcccagcactttaggagagcagtgtgggaggatcacttgaggtcaggagttggagactagcctgggcaacatagtgagacctcatctctactaaaagtttaaaataaattagctgagtgtggnggcnngnncctntnnncccnnctnctccnnangctnanctgnantgcantntttccatctcanctcactggcccctccncctcccgggtttagtgaatattgtgcttcagccttctgaagacccgt

SEQ ID NO: 101220 - DNA, 406 bp, Homo sapiens
ggggcgcgtgcctgtagtccctgctagtcaagagggtgaggcaggagaatcgcttggacctgggaagccgaagtagcagtgagccgagatcgcgccactgcactccagcctgggtgatagagctggagggaaaccctgataccacttctgggtccagatggctgtggctggaatgcggccacagccaggaacagcgtggtacggataccagtggggctctggtcttttcccagaggctggcacctttcatgccgagttgggcctcgggtctcggggctctaggccctgctgtgccagtggcctgatgtgtggccttatatgccagtcacaccctgctccagacctcggtttcctcatccacaaaatgggaaagctgggctagaaaatctctcaggaagggtaggtt

SEQ ID NO: 101221 - DNA, 425 bp, Homo sapiens
ggctgacctacagccatctatgactcctactgtatcttccatgccatgagtaagggtgaggatacctggcggtaataaaaataataacctgagagtctaatggcttattttttgtagagatggggtctcactgtgttgtttaggctggtcttgaacttctgggctcaagtgatcctcccacctcagcctcctgagtagctgggattataggcgtgcactaccatgcatatatatatatatttttttttttttttaaaaaaaaaaaaaaaaaagggactcttgttttgtggttaaggctggtttaaaactcctggcctaaagcattcctgcgggttgggcctttcaagggcgggaattgcgggcttaaaacattggccccagccctaaaagcttattttaaaggttatttcaaaaggccgtgcccg

SEQ ID NO: 101222 - DNA, 438 bp, Homo sapiens
ggagaccagcctaagtaacatggtgaaactccatctctacagaaaaaaataaaaaaatccttaaatgaccttttggcgggggcgtgcatgcttgtggtcccaattaccaaaaaggctggggtgggaggatcacttgcccctaaaaaatctatgttggaatgagctggtatcccacccctgttcttcatgctgggaaaaaaagggaaaccctgtctttaaaaaaattaacaaaaaccccaggctggccccctggaccaatgtttggaatccccccattttgggaggcttaggctagccaaatactctgggccaggagttaataaccaccctatccgaaatggggaaacccctgtttttactaaaaatacaaaaattggccaggcccgggggctcatgcctggaatcccaacactttgggaggccgaggcaggcatatta

SEQ ID NO: 101223 - DNA, 410 bp, Homo sapiens
aatgcttacagaatagtgattttgtgtcagaaactatttccactattaagtggcaaaatgaactttaaaaagactagatgctggctgggtatggtggctcatgcctgtagtcctagcactttgggaggctgaggtgggaggattgcttgagctcaggagtttgggaccagtctgggtagcatactgagaccctgtcactgcaaaaaataataataataataataaggaaagaatagatgttgaattttgttgaatgccttttttgaatctatttttgattcctacctcatgttactgctgtgaagaattaagatatataatgcgaataagataggtatatgaaagtgctttgtaagccacagtgggaaagctagatattatcatcacgtctaattaatgtatctgagata

SEQ ID NO: 101224 - DNA, 610 bp, Homo sapiens
ttttttttttttccagagccctttaatgaactgttcataggtaatcaataaatcacttggaaacagtgtactcccaggaaatggcaaattcttccttaaagtactcaaacaaataatctacatcttttattgataaggttcagctgaggcattcttttcttttcttttctcttttttttgaaacgaagtcttgctctctcacccagactggagtgcaatggcatgattttggctcactgtaacctccacctcccaggttcaagtgattctcccaccttggccccttgagtagctgggattacaggcatgcaccaccacgcccagctagtttttttgtatttttagtagagatgaggtttcaccatgttggccaggctggtctggaactcctgacctcaggtgatccacccgcctcggcctcccaaagtgctgggattacaggcatgagccaccacgccctggctcatttgtacttttcatcagggaaatcataaaccctttatgaaaaggaaggggttgacttatgacaaaactatagagattgagaagagattagtggtagtcaacagacacagatggcgatgagggtgcacctataagaaggctagca

SEQ ID NO: 101225 - DNA, 385 bp, Homo sapiens
ctcccgggttcaagtgattctcctacctcagcctcccaagtagctgggattacaggcatgtgccaccatgcccagctatttttttttttggcattttaattaatttttaatttttaatttttttttggaaacagtttcttttttgtcccccaggctggagggcattggggcattgggggttaattgaaccctccgcctccggggttaaagcgattttcctgcctcaccctttggggaggctgaaccaggaggatcgtttgaccccaggagtttgaaaccaccttgaacaggataaacccccatttttacaaaaaaggtttaaaattatcgggggggggggacgggccccgtgaaccccaccttttcaggaggttgactttgaagg

SEQ ID NO: 101226 - DNA, 378 bp, Homo sapiens
gggaggctgaggcaggagaatcacttgaacctggggacagaggctgcagtaagctgagatcgtgccactatactccagcctggcaacagagtgtgactcttgtctcaaaaaaagaaacgaaaaacactaaaacatcagaggtgccttttggagtactaaacttactctataaggtaagcattaacatactcatttttaaagaaatattttatcaagcacccctaatactagtctgagataacccagactccagcaccctctcctctgcactccagcctgggcaacagagtaagactgtctcaaacaaaacaaaacaaaaaacagtatcttaacctgtacattatgtttctttatctagatataaacaacatcagccta

SEQ ID NO: 101227 - DNA, 477 bp, Homo sapiens
  misc_feature (1)...(477): n = a,t,c or g
cagcccccngnnnnnnaggagatgcatactttaggccagngcggnggaattccacatatccagccttccaagtcagtctttaataatgtgcacggaccaggcacagtggctcacacccgtaatcccaacactttggaatattagggagggagcatcacttgaggccacgaatttgagaccagcctgggcaacatagtgagactgccccccccatctctacaaagtatataaatcaaaaataatactgtgggcaaactttacttagattttattcagagtagtgcctgtgtatttttcatctgtgctacctgtgccggcattccatatgcatttgatttagactttatagtacccgggtaaaatacgtcttttgtctgcatttttcacatgggaagactgaggttttgtttattcattcttatttatttattttatgagacggagtctcgctctgatgcctatgctggagcgcgacgg

SEQ ID NO: 101228 - DNA, 1210 bp, Homo sapiens
gtggaggttcatttctattatctgccagctaaaagcctcctggtataagtgctttgtgttatccttccaattattctacatttcaccatcactttcaaagcagtaatattatacatttctaatttgcataacttactacagttttcaatttttttaccctagttaacacaaagtccttgaagtgaatatcatctttatcattattttattttagtaataagaaactggggctcagaaagtttaggtaacacagtaggaaatgatgaaactgaaacaagaaatcatgtctatttgattgcttttttcctgtaaagacagtcattaatgctcttcaccaaatgttttcatttcttctgacacatgccaagatcgcacttccccatccttttgaagttacttgcagccatgataattgccctggcccaatgcaatgtgaacaggtaaaagacatattttacttctgggccaaagcttcaagaaccagtgcatattttgttgtcttctctctctctaatgcagataacagaagtcccataagcctgggtcccacaaagagacatggagtgtagcatccagcaatgtcgttataaacttgtagtgggaattaacaatacacatttgttgttataaactaagatttgggttataaaccactaagcataacctagccactgctgactgattaattcacaaagtggctatatcactttgtgtttttaagtggcaataatttaactcagttctctattagatacctcaattccaaatatttttttttctgagaaatgcatgtaaattttattcagaaatagtaaagttttaaaagtgttatttcgatagtttctgtggaacaggtggtttttggttacatggggaagttccttcagtggtgagttctgagattttggtgcactcatcacccaagcagtgcacactgtacccaatgtgtagtctcatccttcaacccttgagtcctcaaagtccactatatcattcttatgcctttgcatcttcgcagcttagctcccacttacgagtgagaacatacaatatttggttttccattcttgagttacttcacttagaataatggtctccaacttcatctaggttgctgcaaatgccattatttcattccttcttatggcttagtattccatagtgcatatatatcacattttctttatccactcgttggaatgattttttt

SEQ ID NO: 101229 - DNA, 480 bp, Homo sapiens
  misc_feature (1)...(480): n = a,t,c or g
nggagtcgcttcctnnnnnnnnnactgaaactagcanctaaggacangncgnggaattcttgaatctgggagatggaggttgcagtgagccaagatagcaccattgcactccagcctgggcaacaagagcaaaattccatctcaaaagaaaaaaaaagtaagagttgtttaaaaaaaaataataagtgcatgttcactacagaaaaatcagagaagcccaagattcacccctcagagtgcacacagagacgggcacgcttagcagggtggagggggggctgtcagtggggttgtggtagggaaggaggtgcaagtgaatgatgttaaaatgcttaggcaaacaggaagaggagtactctgggggagaaagacaatgaccatagctttgatttgttttgaggctctccatctatgtggagataagattttaattaatttaattaattaattttttatttatagatgtagatgtagagatgg

SEQ ID NO: 101230 - DNA, 470 bp, Homo sapiens
  misc_feature (1)...(470): n = a,t,c or g
cattgagtaccantacccangncggggaattcggacgacaagagtgaaactctgtttcacaaaaagaaaagaaaaagacaagacatacaacattttcatcaccccaaaacattcccctgtgcttcttagtaatccatcctcttcctggaaccccaaacctgggcaacaactcatgcgttctctgtgcttggagttttgcctttcccagaatgccatggaatcatacggtgtgcagcggctcgtgtctggcttctccagctcggcgcgatgctcctgagatccgagttgttgtgcgtgtcagtcggctgctcctcttcgctgctgtgtagcaccgctgttgtgtgaatgcaccgcagtttgttcatcgcttcctctgacgatggacatttaggttgttaccagtttttagcaattaaaaagaaagccaccataaacactgggtactggttttcacgtggacgtatgtttct

SEQ ID NO: 101231 - DNA, 431 bp, Homo sapiens
ggcgggcgcccctcccccagcctggctgccgccttgcaggttgatctcagactgctgagctagcaatcaacgagactccgtgggcgtaggaccctccgagccatacgctaccgtgagaaaatatcttgaacttctactctgccagatgcaccatgatatgtgcacgtacaggttcagcatacgcattgtgcttaacctgtgaattgaagcagtaccaattttgaaaaaacatttgctattctatctttaaataggttcttctgtgcaattttacttcaacttcttgagcttcaatgactatgtttcatattaggattcaatttcatactcaagatcttgattttatagcatccctcttattctcgcctggctcattttcttttatttactctttgagatggtttggatgtggtgtgcagtctgatttcgcg

SEQ ID NO: 101232 - DNA, 522 bp, Homo sapiens
  misc_feature (1)...(522): n = a,t,c or g
agagtccnagggagggcnnnnccttgaaaccnattgatacacctctcagagnggcggaattccctacacggaccttaccggccaccatccttctcagggaagaattcaggaagcacccaagctcacccacctgtgatagtgggcttggggctacgcgccaggagagtctccccccacccaccttttttctttggttgcttttttttttttttttttaagggtcttccggccctttccttccttcctttttttttttccccgccccgcactccgtttcccggtttcccccctggtgggaagggcgtttttatagtttatgggacgaaccaatcttggtggctggaagggctgtatcaaaccgaaattaatcttttcctgctcctaaataggccactggccctgccccctttaccttttccattttttgaccaaaaacagggtatatgaacaaattttttagccgagttttcaaggggaatttgttcttactttatggctcccgaggggaagcgattacttttt

SEQ ID NO: 101233 - DNA, 401 bp, Homo sapiens
tagatttgatgtgtgcccaatttgaacaagggttgattgacacctgtaaaatttgttgaaacgttcctcttaaaaggaaatatagtaatcttatgtaaaaaaaaaaaaaaaaaaaaaaaaaaaaaaaaaaaaaaaaaaaaaaaaaaaaaaaaaaaaaaaaaaaaaaaaaaaaaaaaaaaaaaaaaaggcgcccccccaaaaaaaaacaacaacaaacaccacaaaataatgaggggtaaaaaaaaaaaaatcttctcccttagggggaaatttttttatgcggggggttgtttttttccccccccccccctttttagggactaagtcttaagaaaaaaaattcctccatattttttttctgggtaaaaacaacacctcctctctcgggggggggagggaaa

SEQ ID NO: 101234 - DNA, 367 bp, Homo sapiens
atggggctatattgaatctctgtatgcactgagaactgagctatgaagaggatcttattaaactgctggtctgactttatggattgacactgttcctttcttttattgggaaaaaaaaaaaaaaaaaaaaaaaaaaaaaaaaaaaaaaaaaaaaaaaaaaaaaaaaaaaaaaaaaaaaaaaaaacaaaaaagaatgaatacaaaaacttgttggggggggcgcccccataaaaacccccctctggggccctctataaataccgaagggaaaactttattcctttctcttttgagagggtttctaaataccctcctcgggacctttgcaaaaaaaaccttttttggggggggctgaatataccctctt

SEQ ID NO: 101235 - DNA, 382 bp, Homo sapiens
  misc_feature (1)...(382): n = a,t,c or g
cccacgcgtccgcccacgcgtccgcttttatcaataaagcactattgtttagatattaaaaaaaaaaaaaaaaaaaaaaaaaaaaaaaaaaaaaaaaaaaaaaaaaaaaaaaaaaaaaaaaaaaaaaaaaaaaaaaaaaaaaaaaaaaaaaaaaaaaaaaaaaaaaaaaaaaaaaaaaaaaaaaaaaaaaaaaaaaaaaaaaaaaaaaaaaaaaaaaaaaaaaaaaaaaaaaaggggggggggggggggggggnnnaaaagagggaggggggggagggaaaaaaaagaagnngaaaaaaaggggnnnanaaaaaaaanaaaaagaaaaaaaaaaangggggggggggagaaaaagaaaaaaaannagggaaaaaagaaaaaa

SEQ ID NO: 101236 - DNA, 440 bp, Homo sapiens
  misc_feature (1)...(440): n = a,t,c or g
natgagacccttaggatagtctgcagaaacncgaccggaattcccggggtaatatcagcaattttcatgatttgagaagcctttgtttcgaagcgaaaagtcctaataggaaaaaaaccctccataaacctggagtgactatatggatgccccccaccctaccacacattcgaagaacccgtatacataaaatctacacaaaaaaggaaggaatcgaaccccccaaagctgggttcaagccaaccccatggcctacatgactttttcaaagaaaaaaaaaaaataataaaataaaaaaaaaaaaagaggggggggctcttttagatggttcagaggggggcccactatgcacgggtggaggaaaaaaaaattccttttttatagggggggaaaataaaaagcctctggggctttttgtggggaggaatatttattggggg

SEQ ID NO: 101237 - DNA, 385 bp, Homo sapiens
  misc_feature (1)...(385): n = a,t,c or g
cggacgcgtgggctcctatgaaaaaacttcctaccactcaccctaacattacttatatgatatggctccatacccattacaatctccagcattccccctcaaacctaataaataaaaaaatagaaaaaaaaaaaaaagaaggggggggggcttaaaaaaaaaatacgggggcgcaaggctttgactgaagtggaaaaataaaacttttttctatggggaaggatggaacaaacacccttgggtatttttgggaaaaaaattattttttggggggggtacatttttgaaactacctatctcgaaaaaaaaatgttttgggggagaaaaaattgtttaatccctaaagggggaaaaacaccacggttgcctgtggtctgaaaaaatn

SEQ ID NO: 101238 - DNA, 369 bp, Homo sapiens
  misc_feature (1)...(369): n = a,t,c or g
tttgacagaaccatcagtaaagacataagcaaataaatggtcttggtgccnaaaaaaaaaaaaaaaaaanaaaaaaaaaaaaaaaaaaaaaaaaaaaaaaaaaaaaaaaaaaaaaaaaaagggggggggccctttaaaaaaacccccgggggggccccaaaaaaccccggggaagaaaaaattatttttttttttttagggggggggaaaaaaaacacctgggggtttttttgaaaaaacccctttttttgggggggggcaatttgcccccccccccccccaaaaaaaaaaccccctgaggaaaaaaaaaaattttttagggggggggggggaaaaaaacccccaatgtgcgcccaggaaaaaaattta

SEQ ID NO: 101239 - DNA, 376 bp, Homo sapiens
ttttaagtgcttttaatggggaactgtttcactcatgccatatacctgttttgtttttctaaaaaattaatactgtaagttgtgagcaggtgtcttgtatcactgcgaaacccatgcataataaaaacttgttcttgagctaaaaaaaaaaaaaaaaaaaaaaaaaaaaaaaaaaaaaaaaaaaaaaaaaaaaaatgggggggggcctttttaaaaattccttgggggggcccaatttttccgggggggggaaaattttttttttttttttttggggggggttattaaaacccccggggggttttttggaaaaaaccttttttttgggggggggaatttttgggccccccccccccaaaaatttttaggctttggg

SEQ ID NO: 101240 - DNA, 375 bp, Homo sapiens
ctcgaggcatgaaggcagtgggattgattcctgaaggtcaagagtggtgaggctgatcagggaagagtgagtttcatagggtaccccaatggccgggcacaggggctgatgcctgtaatcccagcactttgggaggccgaggcaggtggatcacttaaggccaggagttcgagaccagtccacagggagaccccatctctacaaaaaaaaaaaaaaaaaaaaggggggcccttttaaaagattccttggggggcccaaatttaccggggtttggaaacttaaaagttttttcttttaggggggggattttaaaaccaacttgggaattttgggaaggaacctttattttggggggggaaaaaattggaccaaatc

SEQ ID NO: 101241 - DNA, 388 bp, Homo sapiens
tcctagcctttctattagctcttagtaagattacacatgcaagcatccccattccagtgagttcaccctctaaatcaccacgatcaaaagggacaaaaaaaaaaaaaaaaaaaaaaaaaaaaaaaaaaaaaaggggggggcctttaaaaaaaaccctgggggggcccaaaattaacggggggaaaaaaaaaaaaatttttttttttaaggggggggaaaaaaaaaccccggggggaattttggaaaaaaaactttttttgggggggggaaaaatggggccaaacccccccaaaaaaattaaacccttgggggaaaaaaaaaatttttaaggggaaaagggggaaaaaaaaccttaattttttggggggaaaaaaattttttaaaaaaa

SEQ ID NO: 101242 - DNA, 392 bp, Homo sapiens
cccacgcgtccgaaaaaaaaaaagggcggccgttcgcgatcggccgccctttttttttttttttcaaaagggacccaacccttctttttggaaataaaaagcccgggtttaaatgggggcctttaatttggggccctttcttttaatggggggggggaacccttcgggaccaaatggccattgggttttgggggccgggagttatcttgggcccggaaaaaccccccccaaaaaaagccaaaaaggggggccccccccagatctctagggtcgggggggccaatgctcccccggcacaaagccggggggggggggggaaaaaaccggattggcgcccccttttactaaaagcccccttggttttctccaaaaaaaatagggaaccccaaact

SEQ ID NO: 101243 - DNA, 396 bp, Homo sapiens
  misc_feature (1)...(396): n = a,t,c or g
aatctagcaaattcaagaaccaaggggaaatgttgtgagataacatttacattgtcaacctttattgactttgtttttacaataaaaaatattttacaacttatnaaaaaaaaaaaaaaaaaaaaaaaaaaaaaaaaaaaaangggggggggcctttaaaaaaaaccctggggggggcaaaatttaacgggggagggaaaaaaaaaattttttcctaaaaagggggggaaaaaaaaacaaccgggggaattttggaaaaaaaactttttttgggggggggaaaaattgggcaaaaccccccaaaaaaaataaaaggcttgagggaaaaaaaaaaattttaaagggaaaagggggaaaaaaaaccgaaaattcttgggggttaaaaaatttgttaat

SEQ ID NO: 101244 - DNA, 396 bp, Homo sapiens
  misc_feature (1)...(396): n = a,t,c or g
tccccctgagactcggagcggggctgactggaaacaacacgaatcactcacttttcccccnaaaaaaaaaaaaaaaaaaaaaaaaaaaaaaaaaaaaaaagggggggccccttttaaaaaattccttggggggcccaaatttacccgggggagaaaaaaaaaatttttttttttttaaggggggcaaaaaaaaaccccctggggattttttaaaaaaaaacctttttttggggggggaaattttgggccccacccccccaaaaaaattaaacctctaagggaaaaaaaaaatttttaaagggataagggggaaaaaaacccccctttccctcggctgaaaaaaattttccttccggggttttttttaaaaaaattttcccccccggggcctgggtg

SEQ ID NO: 101245 - DNA, 368 bp, Homo sapiens
agagagtaaaggatacacacacactcacacacacacacatatatacacacacatatacacacacacatatacaccacgtgaacactaacccaaaaaagctgatgtagctatgctaatattaaacaaactgttttttaagccaagatgcgttgctttattataaagatgttctttttattataaaaagtacctatcttacaaatatcacagtactaaatctgtatgctcttaccaacagcttcaaaatatataaaacaaaaaattgaagaaccaaggccgggcacggtcgttcacgcctgtgatcccagcactttgggaggccgaggtgggcagagttcaggagttcgggaccagcttggccaacatgg

SEQ ID NO: 101246 - DNA, 366 bp, Homo sapiens
  misc_feature (1)...(366): n = a,t,c or g
atttccagtacacgtcacattattttaccggtgagatgagaatgtcacaaacattaaaagccttatgtgctctaaaaaaaaaaaaaaaaaaaaaaaaaaaaaaaaaaaaaaaaaaaaaaaaaaaaaaaaaaaaaaaaaaaaaaaaaaaaaaaaaaaaaaaaaaaaaaagaaaaagcccaaaccaaaaataaaaaaaaaaaaaaaaagaaaaatatcaaataaaaaaaactttcatacggccttttttagggggggggggggtctttctggtccccacacccgtcaagagaaaaaaagaaaataggaaaaaaaaaaattaaaaaaaaattccaatcngtgtgatcttcctcttttttttgtagagtg

SEQ ID NO: 101247 - DNA, 347 bp, Homo sapiens
cactccagcctgggtgatagagtaagaccctgtctgaaaaagaaaaagaaaaaaaaagagaaaaaaaaaaaaaaaaaaaaaaaaaaaaaaaaaaaaaaaaaaaaaaaaaaaaaaaaaaaaggggggggtcttttttaagaattcctggggggcccccatttttccttttttttaaaattttttttttttttttttttgggggttttttttaaaccctttggtttttttttggaaaaaattttttttttttggggggccttttttgggccaacctctcaaaaaaataaaacccttctggggaaaaataaaattttttggtgttttggtgggttcacctcctctttttc

SEQ ID NO: 101248 - DNA, 347 bp, Homo sapiens
ctttgtttttggggtttggcaaaaatgtgtttaagtgctgtggccaaaaccggggggagggggggggtttggtgaaaatttttttaaaaaaaaaaaaaaaaaaaaaaaaaaaaaaaaaaaaaaaaaaaaaaaaaaaaaaataaaatctttaatcttttaaaataaaaaaatgttaaaaaaaattaaaactaaataaatataaattaaaaatataaaaattttattaaaaatattatttatttttttattttttatttattttattatttaaaattttttatttatataaaaacatttctattcttaaaaatataaattacttattataaatttaataaaatatgata

SEQ ID NO: 101249 - DNA, 366 bp, Homo sapiens
cccacgcgtccgttctgatttagaccatggattcttaagagaggagaacttgagtgttctgttcatgttgtttttaaaatataggctaattaaaaagtctcaaatccccttaagaattaagttgctgccagggatttccaaaaaaaaaaaaaaaaaaaaaaaaaaaaaaaaaaaaaaaaaaaaaaaaaaaaaaaaaaaaaaaaaaaaaaaagaaaaaaaaaaaaaaaaaaaatataaaaagagacaaaaaaaaaaaaaaaaacaaaaaaaaaaaaccaaaatattttggggggggctttttacattatttttgggggtcgctgcccactgaccttgatttggatcaatttttcatttttcataacg

SEQ ID NO: 101250 - DNA, 354 bp, Homo sapiens
aactcctcacacccaattggaccaatctatcaccctatagaagaactaatggtagtataagtaacatgaaaacattctcctccgcataagcctgcgtcagattaaaacactgaactgacaattaaaaaaaaaaaaaaaaaaaaaaaaaaaaaaaaaaaaaaaaaaaaaaaaaaaaaaaaaaaaaaaggggggggggcccttataaaaaacccttgggggggcccaattcaccgggggggggaaaaattttttttttcttttttaaggagggattaaaaaaaacccgggggggttttttaaaaaaaaaccttttttggggggggggctttttgggaccaacccccccaaaaaaat

SEQ ID NO: 101251 - DNA, 353 bp, Homo sapiens
attttaataatcaacaccctcctagccttactactaataattattacctttggactaccacaactcagcgggtgcctacaaaaatccaccccttacgagggcggatccgaccctatatcccccgcccgcggccgtttttccttaaaaggccccttacaagctatgaccttcttattataagaactagaaattgcccttctttgacccctaccatgagccctacaaacaactaacctgccactaatagatatgggatgcctcttattaaacataatcctatgcctaagtctggcctatgagtgactaccataaggattagactgctcgcgataccattctcaacgcattcaaag

SEQ ID NO: 101252 - DNA, 365 bp, Homo sapiens
  misc_feature (1)...(365): n = a,t,c or g
ttcatccgccaactaatatttcactttacatccaaacatcactttggcttcgaagccgccgcctgatactggcattttgtagatgtggcctgactatttctgtatgtctccatctattgatgagggtcttaaaaaaaaaaaaaaaaaaaaaaaaaaaaaaaaaaaaaaaaaaaaagggggggccctttttaaaaaattcttggggggccccaattttaccgggggggggaaaaaaaatttttttttttttaagggggggtttaaaaaaccccggggggtttttttggaaaaaaccctttttttgggggggggcctattggggcccccccccccccaaaaatttaagcctttaggggaaaaaaaan

SEQ ID NO: 101253 - DNA, 377 bp, Homo sapiens
cccactaagccaatcactttattgactcctagccgcagacctcctcattctaacctgaatcggaggacaaccagtaagctacccttttaccatcattggacaagtagcatccgtactatacttcacaacaatcctaatcctaataccaactatttccctaattgaaaacaaaatactcaaatgggcctactaaaaaaaaaaaaaaaaaaaaaaaaggggggggggcgtttaaaggtaaccttgggggggccaaatttaaacgggggggggaacaccaaatttttttcctttaaggggggagtttaaaagccctcggggggattttgaagaaaaacccatttttggggggggggacaatttgggcaacccccctaacg

SEQ ID NO: 101254 - DNA, 355 bp, Homo sapiens
ggccgctctttttttggtcttttttacctgcttctcccaacgcggggaagagaaactcttttttggcagccccaagggccgaacatggggccgggggggcggcatcctgaggggcggcacaacgtccttgggggaggttacagggctctggggcccagggggggggaaaaaggggggcttttttcaaaacaaaaaaaaaaaggggtaccccccccaaaaaaaattttttggaaaaagggccccccggcgggaaaaaaggggcaaaccccccccccaagggggggggtttttcttaggacgcgctggggtgggggatccgcaagaaccccctggagatgacaaaaaaaaaaatgtg

SEQ ID NO: 101255 - DNA, 313 bp, Homo sapiens
  misc_feature (1)...(313): n = a,t,c or g
gtgagccgagatcacaccattgcactccagcctgggcagcaagagcaaaactctgtctcanaaaaaaaaaaaaaaaaaaaaaaaaaaaaaaaaaaaccccttttgttgggccttaaggaaaggcccttgaatcccaacctccccacttcttggaagggtaaaagggggaaaaacggttgaaccccagaaggaaaaggttgcgggaggccaaaataaaaaccttgttttcaaccggggcaaaaaaacaaaaactttgcctaaaaaataaatttaaaaaaaaaaaaaaaagacccccaaaaaggggtctaaaaaa

SEQ ID NO: 101256 - DNA, 323 bp, Homo sapiens
ttctggctaagttcaaatgccgaatttgattcagcaaatagttgtgagtgccttgaagtgcaaagaatgatccaggatcaggactccttccctacatatcattattttgatatgtatgtatgtatatatgtttagtgacggagtcttgctgtatcacccgggctggtctcaaattcctggcctcaagccatcctccaacctcagcctcctcagtcgttggggttacaggagtgagatagtttgccaggctctatatcattctttttagcatgacctctgataggaggctggcaggacagttcaggacttatcagaagcccaaa

SEQ ID NO: 101257 - DNA, 1007 bp, Homo sapiens
gccccgtttttttcccactgtccaggaatcgatttaatttttacagttgtttactttctcacatttttactaagtccagaatatcatcaaactcacaaaaccactggtcaaaaaaacccaaatggccactaattaggcaatacagcacctgcctcaaatttgggttcatatagatttttttcctccctttttgtggagaacatagtcttgctgtgttgcccaggctagtcttgaactcctggactcaagcaatcctcccgcctctgcctccctaaattctgggattacaggcgtgacgtgcctgtgcccagctcatccagattcttgctggttctctttctcagcctaaatgtcttgtttgcgtggagaaattatcaaatgaagcaggagtgccaaacaagcctcataggctcttcaccctacaacatctatgttaggtagaaaagtatgtggatttttaaaaatcatctggtataaagagtttttaagaactatcttcatcatcttagtatcagattgtgcttgagaagttaggtacaatgtaatgtgattcattgctaaaaacaaaatgcctcccacaattgcagactcactcattttaccaaactatggaatttgtcaacaccttttcttgggaccaaggaagcaaagtcagtggataccgtgtcctgtagacatgtcacttgtgataaggcacggacaacatgaactggcaaaaacattggcatttggtcaaatgcttatgagctaaggatagaagggaaaaaatagttgtgtgaatgattttacctcttagttcttacgaaggatggttatcgggctggaaaaatgtttattggactgatgctttggagcctctcaatgaatgtaataaaaaaaatgtgtagtgagcacaaatgtatggatttgcagcacaatccaactttgaaaatgtgaaaataagtgagttagtgatatgtttggttggtgttaatttgagtcctaaataaaatcgagaactggtaaaa

SEQ ID NO: 101258 - DNA, 349 bp, Homo sapiens
cgatctcctgaccttgtgatctgcccacctcggcctcccaaagtgctggggttacaggcgtgagccaccgcgcccagcctaataaattcttgtttattcataatgacaaaaacttacgtaacggttttataaatttaagtattaaataagtctagcaaaagacataaaaagataactaataaaacaagtttaaactttattggagcccagtagcaatggctcacgcctgtaatcccaggacccaccgaggcgggtggatcacctgatgtgaggagttcgagaccacgctggccaacatggtgaacatggtgaaaccttgtctctactaaaaatacaaaaaattggccgg

SEQ ID NO: 101259 - DNA, 323 bp, Homo sapiens
  misc_feature (1)...(323): n = a,t,c or g
gcacgagcaacaccctcctagccttactactaataattattacattttgactaccacaactcaacggctacatagaaaaatccaccccttacgagagcggcttcgaccctatatcccccgcccgcgtccctttctacataaaattcttcttagtagctattaccttcttattatttgatctagaaattgccctccttttacccctaccatgagccgtacaaacaactaacctgccactaatagttatgtcatccctcttattaatcatcatcctacccctaacnctggcctatgagtgactacaaaaaggattagactgaccc

SEQ ID NO: 101260 - DNA, 335 bp, Homo sapiens
gcacgaggagagagagagagagagagagagagagagagagagagagagagagagagagagagtctgggggggggggcccgacccaaacagactgtaagggggggagaaatacatagcgagggcgcgagatatacagagagagtgagtgagacgacagacccccctttctaccgacatatagggttaacctccaacgacccgtgggactgcgcagattgaagggggccggagacaaaaccttttgccttatcttgaccctagctagagactacgtctggcctgattatagaatgaagagagcggaccacatgtaaccacgaaccatttgaccagct

SEQ ID NO: 101261 - DNA, 332 bp, Homo sapiens
gcacgaggagagagagagagagagatagatagagagagagagagagagagagagagagagagatttttagggagaaaaattcccaaagttagtgtcccccagagggaaaaaaaaaaatttagaggttgattttcattaacgggagagggagcagccaaacttcacttgttcaaaacacacattttaaataaactgaatttttaggataaattaaaataagagccattttcaaaaaacaaaaatcaaaactttagggatccctgaaatttttttaaaccctaaggaaatttccctggactaaaggctttttgaagggaaaaattcacaatagg

SEQ ID NO: 101262 - DNA, 301 bp, Homo sapiens
  misc_feature (1)...(301): n = a,t,c or g
gacgagctggctaatctttttattatttgaaaggcaggtttccctgtgttgcccaggctggtcttgaactcttggctccaagtgatacttctgccttggcctccaaggctgaattaacagctaccatccacacggtgacctcatacataagccaataccggtggccaagacccccaccataatacatattagcatgaaccacccagagggccaagactccaatactaccagcggaattncaggcttaagatgaagccagactgggataaggccgactttttggcaggtaacctttatgctg

SEQ ID NO: 101263 - DNA, 302 bp, Homo sapiens
gcacgaggagagagagagagagagagagagagagagagagagagagagagagagagagagagagagagagagagagagagagagagagatacagagagtgagacagagagagagagagagagagagagagagattgcgtgtggggggggggggtgatctctctttctcgggctgtggctctcagtggggcccccgcggtggggagacagacacgtgaaagaatatcgcgctgaccgttgttctcttctctttgtggccctcggcgtctcattgtccacacgtctcatagagagcctaccaaa

SEQ ID NO: 101264 - DNA, 270 bp, Homo sapiens
gcacgaggagagagagagagagagagagagagagagagagagagagagagagagagagagagagagagagagatagagagagagagagagcgtttgacacagagagagagggagagagagagagggcggggggtgtggcacgcccccctcgctatagagagggggtaaaaaccccagggtgggttttggtggaaagaagagagggtgaaaaaggaacccttgggaaagctattatgatgtatctagcttccgggccaagacagcttatgg

SEQ ID NO: 101265 - DNA, 262 bp, Homo sapiens
gcacgaggagagagagagagagagagagagagagagagagagagagagagagagagagagagagagagagagagagagagagagagagagcgcgcgccccacaaaatctgtgagagagatgggcacacacacccccggccccgggggtgtctctctcttggagagaacacacccgtgggggtcccccgtggggaaaaaaagagggggggtgggggcgcttggggcacccccccccctctatattgcgagcgaaagggggggg

SEQ ID NO: 101266 - DNA, 366 bp, Homo sapiens
ggcacgagggccaaagaggttgtgggaaggccctggagggcaagagtcacattccgtctccagatgtgcagccctgcacagggtggggggggcccatagtcccaactactcaggaggctgaggcaggagaatcacttgaacctgggaggcatactttgcagtgagcaaagatcaggccacttcactccagcctgggctacagaggcttgctgtcacttacgctggagtgcaccgatgtgatcacggctcactgcaatatccaatttctggcctcctcaaagatcctcccaccttagccgcccaaggagctgggactacagagcaccacatcatgcgcagctgattctattttttgcagagatggag

SEQ ID NO: 101267 - DNA, 362 bp, Homo sapiens
ggcacgagcggcacgagctggaagaattaataaagaccttgttttttttttttttttttaggaaaaaaaaccatttgtgcaaacccggggggaaaaaaaggggcccaatttggtttttgaaaaaatttttctcccccccccaaaaaaaacccccccccccccccccctttttgcgggaaataggagccatggccccccagccgggggggggtttgttaatttaaaacaaaaccccctttcgcccaaggggccaaggggggcccaaacccccaacccccgggaagcccaacccccccccccccccaaaaggtaattttcccctttgagggccaccaggcctaaccttgggggaaccctttaaa

SEQ ID NO: 101268 - DNA, 378 bp, Homo sapiens
ggcacgagaatcaacaccctcctagccttactactaataattattacattttgactaccacaactcaccgggtacataaaaaaatccaccccttacgagtgcgggttcgaccctatatcccccgcccgcgtccctttctccataaaattcttcttagtagctattaccttcttattattggatctagaaattgccctccttttacccctaccatgagccctacaaacaactaacctgccactaatagatatgtcatccctcttattaatcatcatcctaaccctaagtctggcctatgagtgactacaaaaaggattagactgaaccgacttttactctgtggggggggaagccaactagaaaacacagtgggggtgt

SEQ ID NO: 101269 - DNA, 366 bp, Homo sapiens
  misc_feature (1)...(366): n = a,t,c or g
ggcacgagccgccccccaaccctgaacgcccctgggaaccacgggtctaccctctggttctgcgttcaacatccttagattccacatgcaggagaccgtgtggtatttgtctttctgcgcctggcttattcgactcggcacagtgtcctccaggctcatccatgttgccacagatggcaggatttccttctttatggctgaaggatgttccattcggggtatctactgcatcttctttattctcgcatctactggtggacacttgggttggatccatatcttggctgttgtcagtaatgctttgatgagcaggtttaagagcctgttactctgtccattggtgcagtgtcactgggaagcatctgn

SEQ ID NO: 101270 - DNA, 385 bp, Homo sapiens
  misc_feature (1)...(385): n = a,t,c or g
ggcacgagcagcctgggcgacagagtgagactctgtctcaaaaaaaaaaaaaaaaaaaaaaaaaggcctttgggggggggccccccgggtttccccctttggggggggggggggggttcaccctttttgcccccccttttcggggggttgaggggggaaaacccaagggnccagantttcgaccccccccggcccatggggggaaacccttttttttacaaaaaccccaaaatttccccgccctggggggggcccccctttttcccccttttttgggggggtgggggcggaaaatttttttacccccgggggccaaggtttccagggccccaattttatttttttgctttctttctggggcaaaattcctttttaaaaaaaaaat

SEQ ID NO: 101271 - DNA, 370 bp, Homo sapiens
ggcacgaggggcattgtggcaaacctggggatttaggagaacctagtttggaattctatgaggattcaatgaaagaatgtgtgtagaggggcccagcacatagtaagagctcaataaacggtgggggctaggggcggtggctcatgcctgtaatcccagcactttgggaggctgaggcaggtggatcacttgagccctggagttcaagatcaacctggacaacaaagcaagatcccatctcaaaattaaaaaacaacaccaacaacaaaaaaacagtggcttagatgcctgatcattagggtaagtcgtgtcctcaaccccttcacatctgctctgaaggtcaccatatccggaagccttccctggcctc

SEQ ID NO: 101272 - DNA, 372 bp, Homo sapiens
ggcacgagagagaggaaaccaacatggctgtggtaccatagggaaagaggtatggagagagactgttcttgtgttccaggcagctcaggtatttcagaaagcagggtatgggtccaagttgggatggaggtctaccctgctatcatatacttgtgtctagaacccaagtatcttgtcatctcagaattctcccctgcctttagaatatggttcctgggcctgagtgtggtggctcatacctgtaatcccagcaatttgggaggccaaggtgggaggattacttgaagccaggagttcaagaccaacctggctaacatagtgagaccccatctctttttttttcttttttgagacggagttttgctcttgtgg

SEQ ID NO: 101273 - DNA, 363 bp, Homo sapiens
ggcacgaggttcaatatagagtcttttttgaacaaacgtgaaatagatgtcttttttttttttggaaagggggtttacaccccacccggggcaacaggaaaaaacccccctcccaaaaaaaaaaaggggaaaaagcccggggcccctaaaaaaaaattggggggccggggctaaccgggggcccaaaaaggggggggggggggcaaaacccccgggggcaggggggggaaaacccccgggggaaaaaaaaccccctttttcacaaaaaaattgaaaaaagaaaaattaccccgggggaggggggggcccccggggccccccccccccaaaagggcaaggcggggaaaaatgcttggcccccca

SEQ ID NO: 101274 - DNA, 378 bp, Homo sapiens
ggcacgaggaaacaatcatccaagtgaagagagaacctgtggaatagaagaaaatatttgcaaaccctacatttaataagggattaacatctgaaatatacaagaaacaactcaataggaagaaaccaaacaatccaatttaaaaatgagcaaaaaaatttgaatagacatttctcaaaagaagaccatgtatatctgaggtccaaagacatataatttagagaaatctaaagaaggctatgatctaaagtaatctggtagatagcttaagaaaacttgcctttcaagtaagacagtaacagggctctggttcccaagcagacaatgccaggcaaagcatgcaggtggatgctgaaaggaattcatggctgtgacaaa

SEQ ID NO: 101275 - DNA, 371 bp, Homo sapiens
ggcacgagaccaggtatgcctgggacatactccaactatcctgatacatataccgcatgaaaaattatctcatccataggctcatttatctcaaaaacagcattccagcctgggccatgggagtgagaccctgtgttggaaaaaaaaaaaaaaaaaaaaaattggcccaaggggggggcttgggtaaagggaaatttttgccccagtttgggggcccaccccctgaattggggcaccttttgggaaaacgggggggggcaaatatttgggggccgggatttaaaaaccgccggggcaaaaaaaggaaacccctgtttttccggaaaaaccaaaaataaccccggggggggggggctgccctgtaatccccc

SEQ ID NO: 101276 - DNA, 459 bp, Homo sapiens
tggatacagtgcccgccaccatgcccagctaatttttgcattttttagtagagatggtttcacccagtctggtctcaaactcctgacttaagtgatccgcctccctcagcctcccaaagtgctgggatcacaggcatgagccaccgtgcccagccctctttcagtctttttatatacactcaaagatacatatacacacccacacacattttttttttaaacaaaatcaggctcatactctgcactaagtttagccatttaccaaatgaagaatgttggaccaggcatggtagctcacacctgtaatcctagcactttggaaggccaaggcaggagcatcacttgagcccaggacttggagaccagcctgggcaacaaggcaaggccctgtctctacaaaaaaaaactagctgggtgtggtagtgcacacatgtggttccagctacttgggagactgag

SEQ ID NO: 101277 - DNA, 379 bp, Homo sapiens
ggcacgagaagctttttaatcacctgggtgccatcgggctgaggcctaaaagagagtcatcaaagggagataggggtggggccgctttattggatttgggttggtagtggaaaattactggcaaaggggttggtctctggtggctcgggcgggggttaccatgggctcaatgggggagctgctgagccacgagaaggaatttcacaagggagtgtcatcatttaacgcaggaaccacccattttcacttcttttgcgatccttcacttgcttaaggccatctggatctatatgtgcaggtcacatgggatatgatgggataccttgggctcagaggcctgacgatcacttcatgtacattgtgatggggaaactattgg

SEQ ID NO: 101278 - DNA, 374 bp, Homo sapiens
  misc_feature (1)...(374): n = a,t,c or g
ggcacgaggaatagcctgaaatatttctcttttgggcaggattatttgacccttttaaaagtagcacattaaataaaattcaaacctcaactatacacagaagcagacacccaaaactaaatttcagatctaaatacagtatttaggccaggcgcgggggctcacgcctgtaatcccagcactttgggaggccaagccgggctggtatcgatctcctggcctcaagtgatccatccgcctcgtcctcgcaaagtgctgagattacaggtgtgagccaccgtgccnggcctttanaccggcattataaaaacggggttgtccactgagaacgggaaaaggaggtatatgtgatggaagcgtccttcggactcttt

SEQ ID NO: 101279 - DNA, 356 bp, Homo sapiens
ggcacgagaaaataccgatgacagaaatcaaagtgctaaatttgtggccaacatgccgtgttcaacatgtccatgtctataaaaagtggactatgtgtctataaaaagtgaatttttcccaaattgatgtataggtttaatgtaattcatatcaaaatcgtagcaagactttgtgtaggtacagaaaagattgttctagttgggagtggtagcacgtgcctgtagtcccagctacttgggaccgtggggcaggtggattgcttgattccaggatttggggttgtagtgagctatgatcgtgctacagtgccctagcttgggtgatagagcgagaccctgtctcaaaaaaacccaaa

SEQ ID NO: 101280 - DNA, 416 bp, Homo sapiens
ggcacgagcgtttagacccagctgatttttcttttaattttttttctgtagatgtgggtcttgctatgtttcccaggctggtcttgaactcgtagcatcaagtgatcctcctgctttggcctctcacagtgctggattataggcatgagctactgcgccccgcctggggcttttattatcttaattttacataggagaaaaagggcacagagaggttcagtcatttgcccaatgctacacagctgatgcaggcttgatccctgggatggtctattgagcttatggtgcccattgcacaccaattgaaggccatctaccctgccaagggcttcacgctcccataagccaggtttgacaacccaaacccattttgcagatgagaaggtcaaggcccagagaggttaaaccatgagccc

SEQ ID NO: 101281 - DNA, 394 bp, Homo sapiens
aattttaaatcttttttcccataattattttacctatatcatttattattttttgggtttggtctttttctctttttcttgatcaaattaggtagtagtttatttattaacttttccaaaaaatcagtactttgatttactaattggatctatttttctgttctctacttcactgatttctgcttcatatttattatttccttctttgggttttctttgatttactttattattgctgttttcccattaaaatttattggttttattctttcatttatatagataacagtgttttatggacaggcacagtggctcacacctgtaatcccaatactttgggtggctgaggtgagaggatcactttgagcccaagagtcggagaccagcctgggca

SEQ ID NO: 101282 - DNA, 385 bp, Homo sapiens
tcatcataaaatattcagtcagaattgacaagtacaaagatgaaagcaagtcacaattttaccactcagaaatagccaaattcactgtttggtgaatgtgtttccagatatgtctctgaatattaagaatgaccagagagaaataattttatctcagccagatgtggtgtctcaacacctgtaatcccagcactttgggaggctgaggtgggaggatcccttggggccaggggtttaagactagcctgggcaacatagtgaaaccgcacctctactttaaaaaaaaaaaaaaaaaaaaagggggggccgttttaaagaatccttgggggggccaaagtttacccgggcttgcaacggaatacttttttccttatagggagccgat

SEQ ID NO: 101283 - DNA, 398 bp, Homo sapiens
  misc_feature (1)...(398): n = a,t,c or g
tatggcccggctacaccctaaaccaagcctacgccaaaatccatttcactatcatattcatcggggcaaatctaactttcttcccacaacactttcttggcctatccggaatgccccgacgttactcggactaccccgatgcatacaccacatgaaacatcctatcatctgcaggctcattcatttctataacagccgtaatattaataattttcatgatttgagaagccttcgcttcgaagcgaaaagtcctaatagtagaagaaccctcccaaagtgctgggattacaggcgtgagccactgcgccagggctgagtatttatttattgaccggagagacgggctctcactgtgttggccagggtggacttgaactcctggcctcgagcaatacttn

SEQ ID NO: 101284 - DNA, 422 bp, Homo sapiens
gaatgtaaactagtacaattactatggaatacagtgtggagattccttaaagaagtaaaagtagaactaccattacaatctccagcattccccctcaaacctaaaaaaaaaaaaaaaaaaaaaaaaaaaaaaaaaaaaaaaaaaaaaaaaaaaaaaaaaaaaaaaaaaaaaaaaaaaaaaaaaaaaaaaaaaaaaaaaaaaaaaaaaaaaaaaaatgggggggggcggtataaaaaaaaaataggggggggaaaaaagaactttgagggaggaaaaaaatttttcttttttgggggggggggtcttaattcccggggcgatatatttgaaaagaaacccttttatgggggggagaaaaaaaaataaacacgcctccaaaagaaaagttggggtgggggggaataaaaattttttctagaaga

SEQ ID NO: 101285 - DNA, 399 bp, Homo sapiens
aattttaataaacaacacctttctagccttactactattaattattacattttgggtaccacaactcaaggggtacataaaaaaatccaccccttacgagtgcgggttcgaccctatatcccccgcccgcgtccctttctccataaaattcttcttagcagctattaccttcttattatttgatctagaaattgccctccttttacccctaccatgagccctacaaacaactaacctgccactaatagttatggcatccctcttattaatcatcatcctagccctaagtctggcctatgagtgactacaaaaaggattagactgagccgaataaaaaaaaaaaaaaaaaaagggggggccgttttaagggatccttcggggggccaaagcttactgggg

SEQ ID NO: 101286 - DNA, 421 bp, Homo sapiens
tcttaatttaactatttatattatcctaactactaccgcattcctactactcaacttaaactccagcaccacgaccctactactatctcgcacctgaaacaagctaacatgactaacaaaaaaaaaaaaaaaaaaaaaaaaaaaaaaaaaaaaaaaaggggggggggccctaaaaaaaaaccccgggggggccaaaaataaacgggggggggaaaaaaaaaattttttccttaaaggggggggaaaaaaaaaccccggggggaattttggaaaaaaacccttttttggggggggggaaaaggggggaccccccccccaaaaaaataaagggcttgggggaaaaaaaaaatttttaaggggagaaggggggaaaaaccacccccactcccccgggggaaaaaaattttcaaaaagaaaaaaa

SEQ ID NO: 101287 - DNA, 422 bp, Homo sapiens
  misc_feature (1)...(422): n = a,t,c or g
gaatactgagcatataatttatgtgataaaaatgagcatccgtgttcataaggtatcttgatatcattatcacctattttttgtttgctaaatgggcaagtaaaacctactcttcaaaccagaagatatataaccttgaagagataggaacaaagaggaatgatttcatactgatgaatattacgtgagcataagtaggttttattctaattattttgctagagttttgcattagggatgtttgtcatttttgaaatgacattttacttgagaaactgcttatacttttaaaaaaaactagttatacagtatgtgttgtgtctcacgcctgtgatcccagcactttgagaggccaaggcaagagaataacttgagactaggagtttgagaccagcctgggtaacatagtgagacactgtctn

SEQ ID NO: 101288 - DNA, 399 bp, Homo sapiens
cggacgcgtgggcggacgcgtgggggactttaataaaagggaaatgagtttgaactgaaaaaaaaaaaaaaaaaaaaaaaaaaaaaaaaaaaaaaaaaaaaaaaaaaaaaaaaaaaaaaaaaaaaaaaaaaaaaaaaaaaaaaaaaaaaaaaaaggggggggggctataaaaaaaaaattacaagggggaaaaaaaaatattagggaaaaaaaaaaatattttttttttaaagaaaggggaaaaaaaatctttccggggtgaataataaaaaaaaaaattttttttttgggggttgtttttttaacactcccacataaaaattttatcggtgggggaaaaaaaaaaaaaattggggttggttgggagaaaaaaaataactttcatattctttgtgaaag

SEQ ID NO: 101289 - DNA, 421 bp, Homo sapiens
cttgtttggcaataaaggagagtctcgtattgatgtctacctatgggatggggcagggctcaaattctttggttgattatatattgcagcaccttcccattaaaaaatgagggaagtttgatagtttattaactttagtagcacttttgttgtaaaaccaactacatgcaacatgcagaaacatacgccaatagctagaactaaagacctctgcatcactatcttttttttttttttggaaaaaaattttctttttgttccccaggtgggggggcaggggggaattttgggttaattgaaaattttgcttcgggggtaaaagcaattttcttgctttaccctcccagggaggtggactaacgggggtatccccccccccccaaaaaattttttaaaaaaatttttttagaaaaacaggggg

SEQ ID NO: 101290 - DNA, 413 bp, Homo sapiens
cccacgcgttcggccacaccagagcttactagctaaatgtcatccttgaccatggaacatggttaaaatgagctgctggctgggcaaggtagctcatgtctgtaatcccagcactttgggaggtcgaggcaggaggatcgcttgagcccaggagtttgagaccagctaggtaacacagtgagatcccgtctctgttattaaaaaaagaaaaaaaaatttcaagtaaaaaatgaaaatgatctgctattagaataagagcaaagagcataacttttcccatcctaaatttaaattgaatatgtatttttatgttatagtggaaagaagatgaacggggagtcagacagcttcatattaaaattctggtcctacctcttactcacttataaaatatgggcagtcttccttaggcg

SEQ ID NO: 101291 - DNA, 256 bp, Homo sapiens
agaaattgccctccttttacccctaccatgagccctacaaacaactaacctgccactaatagttatgtcatccctcttattaatcatcatcctagccctaagtctggcctatgagtgactacaaaaaggattagactgagccgaataaaaaaaaaaaaaaaaagggggggccgttttaaaggatccctgggggggcccaagtttacgcgggcatgcaaggaaatagttttttccttatagggggccgtattataac

SEQ ID NO: 101292 - DNA, 420 bp, Homo sapiens
attttaataatcaacaccctgctagccttactacttttaattatgacaatgggactaccacaacccaagggctacataaaaaaatccaccccgtaggagtgcggcttcgaccctatattccccgcccgcgtccctttctccataaaaatcttcttaatagctattaccttcttattatttgatctagaaactgccctccttttacccctaccatgagccctacaaacaactaacctgccactaatagttatggcatccctcttattaatcatcatcctatccctaagtctggcctatgagtgactacaaaaaggattagactgagccggatagcttaaacagaaacaaaaaaaacagaccccccccccttaaacaggaatttggggggggctgtatttaaaatatccccggggggccccc

SEQ ID NO: 101293 - DNA, 429 bp, Homo sapiens
  misc_feature (1)...(429): n = a,t,c or g
cggacgcgtgggcaaacatcactttggcttcgaagccgccgcctgatactggcattttgtagatgtgggctgactatttctgtatgtctccatctattgatgagggtcttaaaaaaaaaaaaaaaaaaaaaaaaaaaaaaaaaaaaaaaaaaaaaaaaanggggggggcccctttaaaaaaatcccggggggggccaaaattaaacggggaaaaaaaaaataattttttttttaaaaagggggggaaaaaaaaacccccctgggaatttttaaaaaaaaacctttttttgggggggggcaatttgggcccaacccccccaaaaaaattaaaggccctaaagaaaaaaaaaaatttttaagggaaaaagggggaaaaaaagccttttttccctgggggaaaaaaaattttcccaaaaaaaaaaaaaaaaa

SEQ ID NO: 101294 - DNA, 406 bp, Homo sapiens
acagctgggcagtttctcccaaaactaagcatactcttatcatacaatccagcaatcacattcctcggcatttacccaaagatattgaaaacttatgtctacatgaaaacctgcacatggatgtttatagcagctttattcatagttgtccaaacttggaagcaacaaagtaaactgtggtacatccagacaataaaatattattcagtgctaaaatgaaatgagctatcaagctatgaaaacacatcgaagaaacttagatgcatattactaagggaaagaagccagtacaaaaagcctccatactttttaattccaactatgtgacattctaaaaacgacaaaattatgaaaacagtaaaaagatcagtgttggccaggggttagaaaggagaaacggatgaat

SEQ ID NO: 101295 - DNA, 186 bp, Homo sapiens
ttctagatcgcgagcgggcaccctagcaatatgaaccattaaccttccctgtacacttatgatattcacaattctaattgtactgactatcctagaaatcgctggcgccttaatccaagcctacgttttcacacttgtagtaagcctttacctgcacgacagcacataagaaaaaaaaaaaggggg

SEQ ID NO: 101296 - DNA, 464 bp, Homo sapiens
  misc_feature (1)...(464): n = a,t,c or g
tcttgatcgccnttcaggtaccgtcgacggaccttccgggtcgacccacgcgtccgataacttatctccacatgagcagtatagactagcgctttcttttctgaagcttacgctttgaggcaagagaatcacttgaatcctgtagggggaggttgcatagagaagagattgatccattgcactccaccctggtcaacagagggggactccttgctcaaaatcactccaacaaacaaaagacctaatggcacattgatgagcattcattgattgagtctttagctattttatgttctctaaagaatttttaagattgatagaagcatgtgctatttatttgtaggaaaccctcgaacaagggacaaataaaaaataaaaattatccataattaataccagagattataattgttaattattatggggttttctttgctagtatttaagatcattattaagatcat

SEQ ID NO: 101297 - DNA, 409 bp, Homo sapiens
ctacattccagcctgggtgacagagtaagactccgtctcacaaacaaaaaaaaaaaggacggggttttgccactttgcccaccctggtttcaaactcctgggttaaggggattcccccacctcaccctccgggagggtgggaattacaggtgttgggcaccgggcccagcctattttttacctactaatcgggctcagaagggaaaacaaaaaaaattgttacttattttggaccaaaactcagggagccattggtggtatagaattatttgtttgccaggcaagggggttaacccctgtaatcttaccattttgggaggccgaggggggcggattgcctgacctaaggagtttgaaaccagcctggccaacatggaaaaacccctgcctttactaaaaaaacaaaaat

SEQ ID NO: 101298 - DNA, 460 bp, Homo sapiens
  misc_feature (1)...(460): n = a,t,c or g
nattgatacgtctgcggtaccgcatcgaaacccctcgggtcgactcacgcgtccgatgactcctaaatttgtgtcttaacttagagctctcccttgaagtcagactcctatattgaactgcagtaatcaacatgcagtgaaggtacataaatgttttttggccaggcgngnnnncncatgcctttaancccaccactttgggaggccgaggcgggaggattgcttgagctcatgagttcaagactagcctgggcaacatagtgagacccccatctgacacctgtaatcccaaagtactgggattactggcgtgagccaccgcgcctgtcctcacaatacttctacgctcatgttgaccgacactctttcatctatcttggtaccgttctccgcacctgagtcccccctccactcttctttccatagcttcgcgacctccccggctcgtttattttttgtg

SEQ ID NO: 101299 - DNA, 196 bp, Homo sapiens
aaacttcctaccactcaccctagcattacttatatgatacgtctccatacccattacaatctccagcattccccctcaaacctaaaaaaaaaaaaaaaaaaaggggggggccgttttaaaggatccctgggggggcccaagtttacccgggcaggcaaagtaaaaattttttccttatagggaggcgaattaaaac

SEQ ID NO: 101300 - DNA, 406 bp, Homo sapiens
cccacgcgtccgatttgaaaatatgtccatacaaaagcctgcacataaatgtttatatcatctttattcataatcaccaaaaactggaagcaaccaatattttcttctataggtgaatgagtaaacaaaacgtagtacatacacacaatggaatatttgttatttagaaataaaaggaaatgagctttcaattcataaaaagatgtagataaatcttaaatacacattgctaagtgaaaggagctaggctgtaaatgttatatattggatattacatgacatctgagagagacaaaacattagagatggttaacagattagtggtttccaggatggtatggagagtgacaagagagtctaatcatgttatgaatgtgggaaagaatctccctgaaggcgggggggg

SEQ ID NO: 101301 - DNA, 392 bp, Homo sapiens
ggtaaaatagcttccagcagtgacttaaaagctaattgagatgttaattaacatgggaattttaaacacttggaaaagaaggaaaattaaaaataaaataaaatgaaaaataaattaaaaataaaattaaaaataaattaaaaataaaattaaaaataaaaatatgagaaaaaataggagaataaaaagaaagaaaatatgaaaagaaaaaaatctaaccagaaagaggaaacaggatgtaagaagcaatggaaagcatgatcaatttatgggtagctataaataaactctaagaataattataaaaatgacaaatatctgttataagctagataggattaaaatacagagcatcagtaatgggagaaaatatctgagttaaaaatgtcaga

SEQ ID NO: 101302 - DNA, 334 bp, Homo sapiens
  misc_feature (1)...(334): n = a,t,c or g
acagggaatcctacagtatgtagccttttgggcctggctcttacttagcttgatatatttaaaattcctccatgttgtggtttttcnnnnnnnnnnnnnnnnnnnnnnnnnnnnnnnnnnnnnnnnnnnnnnnnnnnnnnnnnnnggactctatattcaagttaaaataagaagtgtaacagaatcatggggtcttttttgctttttaaattttgatgtggctcacacctgtaaatcccagaactttgggaggccaggggaggaggattgctggagcctgggggttcaagaccagcctgggcaaagtggttaggacccattctcaaaaaaaaaa

SEQ ID NO: 101303 - DNA, 408 bp, Homo sapiens
atggaatggaatggaatggaatggactcaaatggaatagactcgaaaggtatggaatgcaatggaatggactcgaatggaatagaacagaatagactagaatggtatggaatgcaatggaatggacaagaattgaattgaatggactggaatggaatggaatggaatgcaatggaatgcacttgaacggattggaatggaatggaatggaacggaacggaacggacccggaatggaacggaacggacccggaatggaacggaacggacccggaatggaacggaacggaatggaatggaatggaatggaatgaagtggactctaatggaatggaatggaatggaatagactcgaatgaaatgggatggactcgaatggaatggaacggaatggaatcgactcgagtgga

SEQ ID NO: 101304 - DNA, 431 bp, Homo sapiens
cccacgcgtccgtgtaaacagaactgaagacatgaatgtttgtgctgtgcttttatatgactggcagcacaggtttgtttagaccagttaccaccaccaacacaagtaacgtgtgcttcagcatctctaggcagtagaaatttttcagcttcgttacaggctcatgagaccaccattgtacacggacccatccttgaccaaagcatcgctatcctgggacctcagggatgctgatgtttaaatttttttttaaagatggcgtcttgccatgttgcccaggctggttttgaactcctgggctcaagctatcctcccacctcagcctcccaaagtgttggaattataggcatgaaccaccacacctagcctacaaaaacatttttttttttatttatccgggtgtaggggtgtgcgcctgtggtcccaactac

SEQ ID NO: 101305 - DNA, 406 bp, Homo sapiens
cttaattgtaataatcaacaccctcctagccttactactaataattattacattttgactaccacaactcaacggctacatagaaaaatccaccccttacgagtgcggattcgaccctatatcccccgcccgcgtccctttctccataaaaatcttcttagtagctattaccttcttattatttgatctagaaattgccctccttttacccctaccatgagccctacaaacaactaacctgccactaatagctatgtcatccctcttattaatcatcatcctagccctaagtctggcctatgagtgactacaaaaaggattagactgagccgaataaaaaaaaaaaaaaaagggggggccgctttaaaggatccataggggggccaaaattaacccgggcatgaga

SEQ ID NO: 101306 - DNA, 409 bp, Homo sapiens
aagtattacattgtgactaccacaactcaacgggtacatagaaaaaaccaccccttacgagtgcggtttcgagcctatatgccccgcccgcgtccctttgtccataaaattcttcttagaagctattaccttcttattatttgacctagaaattgccctccttttacccctaccatgagccctacaaacagatgacctgccactaatagttatgacatccctcttattaatcatcatcctaaccctaagtctggcctatgagtgactacaaaaaggatcagactgagccggatagccaagacccttgggaaactgggtggggggccacttgtaaagctccttaagggggcccggctttacaccacactcgagcggaatctatcttttggaaaacggatgcggacacacc

SEQ ID NO: 101307 - DNA, 405 bp, Homo sapiens
  misc_feature (1)...(405): n = a,t,c or g
actagttcttcgaagccgccgcctgatactggcattttgtaaatgtggtctgactatttctgtatgtctccatctattgatgagggtcttaaaaaaaaaaaaaaaaaaaaaaaaaaaaaaaaaaaaaaaaaaaaaaaaaaaaaanggggggggcccttttaaaaaaatccttggggggcccaaaattaacccggggaggaaaaaaaaattttttttttttaaaggggggaaaaaaaaaaacccctggggaattttgaaaaaaaaacctttttttgggggggggaaatttgggcccccccccccccaaaaaaataaaccgtttaaaaaaaaaaaaaaattttaaaggggaagggggggaaaaaaaggggtaattttgtggggagaaaaaatttttcctaaaaaaaa

SEQ ID NO: 101308 - DNA, 416 bp, Homo sapiens
agcaaatagataacttcaaaaagaaaaataatttgtataaaagaaccaaataagaattctgaagatgaaaataaaataagcaaaatgaaaaataaactagaggggctcaagagcatatttgagctagcagaagaaagaattaccaaatttgagtatagattcatagaggtaatgcagttttaaaaaaataaaaaaaaataaaaaaaaaaaaaaaaaaaaaaaaaaaaaaaaaaggggggggggggttttaaaagaatcctggggggggcaaaattttagggggggggggaaaataatttttttttttttagggggggggaaaaaaaaaccagcggggggattttgggggggaacctttttttggggggggggcaatttggggcaaacctctccccgagattaaaggttctaggggg

SEQ ID NO: 101309 - DNA, 401 bp, Homo sapiens
cgaaagtggctttaacatatctgaacacacaatagctaagacccaaactgggattagataccccactatgcttagccctaaacctcaacagttaaaaaaaaaaaaaaaaaaaaaaaaaaaaaaaaaaaaaaaaaaaaaaaaaaaaaaaaggggggggggcttataaaaaaattccggggggggccaaaatatacggggggaggaaaaattattttttttttttttatggggggaaaaaaaaaacccttgggggattttttgaaaaaaaacttttttttgggggggggaaatttgggcaaacaccccccaaaaaaattaagcctccaaaaaaaaaaaaaaaattttaaagggagaggggggaaaaaaacccccctatgccggcggggaaaaaaattttcaat

SEQ ID NO: 101310 - DNA, 387 bp, Homo sapiens
actgatagactaaacagactaagctgatagacttgctcaatgtaggggtgccaaaaatcttcaatttgtggaaaaaaaaaaaaaaaaggaaaaaagaaaaaaatttctgggaagggcaataaagcaaagttcagtaaaaaaaactttgcctgtaaggaaaagttgagcctaatgataaaggcgacaaaaaaaaaaaacatgtaaaaacatttttctaaaaaagggttaattcccttttctaaactacaaataaaaaccctcaatattttttttaaaaaatttgaaatccaaaaaactttggaattttatttgaaggaaaaccccacccccaaaaaaaaataaaagaaaaaaataaaaaaaaaaaaataaaaaaaaaaggggggggcg

SEQ ID NO: 101311 - DNA, 388 bp, Homo sapiens
aagaagggccccaatgccaactcttaagtcttttgtaattctggctttctctaataaaaaagccacttagttcaaaaaaaaaaaaaaaaaaaaaaaaaaaaaaaaaaaaaaaaaaaaaaaaaaaaaaaaaaaaaaaaaatttgggggggggggcttaaaaaaaaaacccggggggggcaaaaaaaaacggggggaaaaaaaaaaaaatttttttttttaaggggggggtaaaaaaaaacccgggggggtttttaaaaaaaaaaacttttttgggggggggggcttttgggcccaacccccccaaaaaaaaaaaacccttgaaaaaaaaaaaaaaattttaaaggggggggggggaaaaaacacctgtttttggtgggggagaaaaaaa

SEQ ID NO: 101312 - DNA, 384 bp, Homo sapiens
  misc_feature (1)...(384): n = a,t,c or g
attcaacttttttttcttcaaaacttaaatatcatatacgaatgatcaaaatgccccgtatgcgaatgcttcataaacaccaagaagaggctgggcatattggctcatgcctgcatacccggcaattttggaggcctaggcgggcggattacttgagcccaagagtttgagatcaacctggccaacatggcgaaactccatctcacctaagagaaaataaaagaaagaccgtgagaagaagatcatgtactgggggtaccacaatgccatgcatttaacaacctattatttgacccggtcattctcttctttgtaagagtttaaagcatcctatctattacccttttgtaaaacactgttggctcaaccacaagacaatctgan

SEQ ID NO: 101313 - DNA, 369 bp, Homo sapiens
  misc_feature (1)...(369): n = a,t,c or g
ctcaataatatttaaatttcctcttttgtttttaagagacggagtttcgctatgtttcccagactggttttgaactcctggcctagagtggtcctcccgcctcggcctcctgagtagctgggattacaggcatgcaccaccactttcagctttaacttttttgacggtatttttctgagacccttaaaagaagacgtaactgcaagagaccaaagagaaattctgtatgtgtttgctctcttttattatggaggagcttgaagtcttaactcaagatttctgatgaggaagtttgtatcagagtctctaagagaaactcattatttgaaaaagcacattcagtgttaaaattttatacttgagaaaacn

SEQ ID NO: 101314 - DNA, 351 bp, Homo sapiens
aaatctttgatcaattgaaaattgttttcaatgttattactttgaaagacagcacagacttgcacatattctaacttctttaaaatatttttagtctgagtctgagtcaggaagactgcttgagcccagggatttgagaccagccttggcaacatagtgagaccccctctctaatgaaaaaaaaaaaaaaaaaaaagggcgggcgggggggctaacccctgccctcccactttttcgaagggctgaagggaaaggaccatttgtttccaggggggaaaggcttcagggacctggaattggccccctgccctcctgccttgaaaacaaagcgaggccctgccccaaaaattt

SEQ ID NO: 101315 - DNA, 367 bp, Homo sapiens
aatgagcatgggccatacccgactcagctctgcctggacaggaaagcccccactctctgtggaggatgattttgagaaactaatatgggagatttcaggaggcaaattggaagctgagattgacctggatcctggtaaagatgaagatgaccttctgcttgagctatcataaatgattgatacctgaaggtggttgtggggacactttaaaaaaaaaatcgccaaaaaactggacttaattacatctattgtcacatttacctgagatgaccatttctttagtctagaatttgccccaaatcagacgaatacctctgaaatatctgtatgtgtcccggattccttgggtcagatttttaaagttact

SEQ ID NO: 101316 - DNA, 411 bp, Homo sapiens
  misc_feature (1)...(411): n = a,t,c or g
cctgtttctgttcttttatttgtgatccaagataaggtgtctttttaatttttttttgggattgggtctcgtctgtcacccagactggactgcagtggcatgattatggttcactgcagccttgaccttctgggctcaggttatcctcccacctcagcctcccagctgctggggagggtgaggcgggagggttgctggaatctgggaggcaaaggttgcagtgagctgagatggcgccactgcactctatcctgggtgacagaatgagattccatctcaaaaaataaaaattaatataataataatagtaatagaaaactttccaggtacaagaaagcctgagatcactaaacagattcaacccaaataagatatcccaagggatatagtaaactctcaaagatcaaagan

SEQ ID NO: 101317 - DNA, 410 bp, Homo sapiens
ctcacccactttttagaatgtattatgtctttaatatttacctactgtgggatctttgatagtttacaatttcatactcatcaagctgtaattactgactgaacatttctaaagaatcatcttgaaaccctgtttatccatatttgtgactgaatatcagtgtttataacaaaacagagtcctgggtctactgtagtagcctaaatatagtacttactcaaatattaatataacaattaggtaaatagtatatatttggctttctgggaatcaaatacaacttagctaaattttttaatatctctgctaaaaatgcaaaaattagctgggtgtggtggcgtgcacctgggatcccagctattcaggaggctgaggcaggagaatagcttgaacctgggggacggaggttg

SEQ ID NO: 101318 - DNA, 365 bp, Homo sapiens
  misc_feature (1)...(365): n = a,t,c or g
cgcggccgcgtcgacaaacatgcttttatttttcttgggtagacacctagtagtggaatggctgggtcacatggtaggtctaattttcacttttaagaaactaccaaaccaggctgggcgcagaggctcacatctgtaattccagcactttgggagacagaggtgggaggatcacctgaggtcacgagttcaagaccatcctgagcagcatagcaagaccccatcatctttacaaaaaaataaaatgtctattgaatcaaatttacttaatattcacaaacttttctccaccggaaggatgtgaagaaggggagacagagactgttaaagctataggcagtctgcaggtgatttttttttttttn

SEQ ID NO: 101319 - DNA, 347 bp, Homo sapiens
agtttttctattatgctggttccatttttctgactttgaagagccttttgtggaaacgaagcctaaagtatatgtgagtactgctttgtttcgtcagtttttgttttaaagagacttttcagtgtaatgcaagcattttcccttgaaggctgtgtttcctgtcaatcctaagctttcctccagcattacctttttaaaaaactttattttctatattgatggggtctcacaatgttgtccaggctggtgttgaacacctggcctcaagtgatccacttgccttggcctcccaaggtactgggattataggcatcagccaccgcacccagcctgtttttcaaagggcg

SEQ ID NO: 101320 - DNA, 354 bp, Homo sapiens
aaacataccagtaatttgtacctggtgagtataaagagaaccaaggattcagatgactttacaaccaagggagtacacagggcaacaacaaattataggaccaaaaaattcacattttctacaaaaaaaaaaaattacagatctcacatggtcttcaaagacaaaaaaaaattcaaagcccttaaaaggggggcaaagaaaaaatctgaaatggaactctaaatataaaaagttttacttcacaagaccaattttcttggcttcgtggacatatatcaataatcgccacattttgactataaaaacttctgcttgttaatcaagtaccatggcaacatcatctaaaatgctctg

SEQ ID NO: 101321 - DNA, 352 bp, Homo sapiens
ccacacctagctaattttttaactttttgtagagaggggcacttgctgtgttgtccaggctgatcttaactcctggcctcaaggagtcctcctgcctagacctccctaagggctgggattataggtgggagccaccgcggccaggctgtttcttttaactaatggtcttggtcttaagtttctaaggtggatcattattttccattatctgaagtagaactaaaatttatgggatactgatgcttgcccaggacaaggaagggtggatttgcaagagatcggtagtgcttgtttttcttacatcatatgtcttgattctggctttgtatcttccccagtatccagttcttgg

SEQ ID NO: 101322 - DNA, 286 bp, Homo sapiens
gtaaatgctggtgcggattgttcatccattggaggggttccatttttgcagcataaaaaatgtcatggtaaagactacgaacccagaggcattaccactctggagaggtcttacgtggaagaaactacagagcacttggtttcaaagagcaaatgacctttgcgagcccagatcaacctttaattcacttgggggttggcaattttatttttaaagagaacttaagaatggaacctgataccccataacttgagccttgtgtatagattataagtcgacgcgggcg

SEQ ID NO: 101323 - DNA, 335 bp, Homo sapiens
  misc_feature (1)...(335): n = a,t,c or g
gggaagtggaggttgcagtgagccgagatagcgccattgcactccagcctgggcaacaagagtgaaactctgcctcanaaaaaaaaaaaaaaaaaaaaaacccttttttttttgggggggggggggaaaaacggggtttttaagaatttttcccaaaattttaaggggcaaaattttccccccggaaacgggggattttaaaaattttcccaaaaaaaaaacttaaaatgggggaaaaggcctttttaaaaaaaaatttaggggggccggggccgaattccaaatttttaaatgggaaaaccggaaaaacccccgggggttcttttaatttgtgt

SEQ ID NO: 101324 - DNA, 336 bp, Homo sapiens
cacccccgtgtccaccgggacccctgtccccacactgacctgagtgccctccccgatcatctttcctgtttcagagaagtgggctggatgtctccatctctgcctcaactttacgtgtactgagctgcgacttcttacttccctactgaccataagaagctgagtataaacttgttttctcaaatatttgctatgagaggttgatggattaattaaataagtcaattcctggaagttgagagagcaaataaagacctgagaaccttctaacaaaataaaaaaaaaaaaaaagtgtcccggggcggaattcccaaatttaagagcggaaaacgctag

SEQ ID NO: 101325 - DNA, 331 bp, Homo sapiens
  misc_feature (1)...(331): n = a,t,c or g
tttgaagtccccccaactccaccccgcataaggcgtgctgcatcatcacagggagaaacgggcaatgaccttggagcacagcttaaaaagcacctagcgtttgcctcttttcggcattgttgatgctcttgagaatgtcagccaggacatccgtgtgcactgtcaggcctctgagcccaagttaagccgtcatatcccctgtgacctgcacatatacatccagatggcctgaagcaactgaagattcacaaaagtgaaaatagccagttcctgccttaactgatgccattccaccattgtgatttgttcctgccccaccctgactgatcan

SEQ ID NO: 101326 - DNA, 332 bp, Homo sapiens
ctcgattctaaagggatttatatgactctgcagccttcaaagctcgaaccaaagctagaagcaaatgtcgagataagagagcacatgttggagaattcttctagattttcagaacttgaagactatttgctaacttctatttttttttctatttcaatggatttaaactctagacacacgttttatcttggattaacttatataacttttgtagcagagggtatattgcttataatttaatgtacaatactattgaaactggggagttctgattattaaatattctctgtaaatcagtaaacatgtataaagtatttgtaatggttggtcat

SEQ ID NO: 101327 - DNA, 349 bp, Homo sapiens
  misc_feature (1)...(349): n = a,t,c or g
gcaatatccattgtatccattgagtggattgaaagttcattcctttnttttttttttttttttttttttaaaaagggttttttttttttccccccgggtgggggggggggggggaattttggttttttggaacccccccctttggggttaaccccttttttttgctttacccccccaagaaagggggaataagggggcttgcccccccccccattttttttttttttttttttaaaaaaaaggggttttccttgggttacccggggggggcccaaccccccccccttggagatggggggcccaacccccccaaaggggtggaattacgggggggggccccccccccccc

SEQ ID NO: 101328 - DNA, 149 bp, Homo sapiens
ttttattttttaattattttgtagatatggggaggtgccatgttccccagtctggtgtccaactcctgggctcaagtgatctgccggcctctgccttctacagagctgggattgcatgcatgagccaccacacctgggcgacgcgaccg

SEQ ID NO: 101329 - DNA, 358 bp, Homo sapiens
  misc_feature (1)...(358): n = a,t,c or g
tctcccccccgtccacccccccccccccccccaccccccaaagaaaaatttaaaaaattggaaaacccccccccccccnnaaaaaacccccaaaaacaaaaccccccccccaaaacaaaaaaaaaatccccaaccacaacccccaaaaaaaaaccaaaaattgggacccccccccaaacccccaaaaaaattaattgttcttaaaaaaaaaaaaacaacccccctgaaaacaaaaaaggactaaattacccaaacaaaccaaaccacccccatgcccccccaaaagaaccaaaacaacgggaaaaaccacttgtcccaaccaaaaaaaaaaagggcccctcccccaaaaaaaaaaaag

SEQ ID NO: 101330 - DNA, 341 bp, Homo sapiens
gtggaaggctgtcctatgtactgtaaaatgtttagtagcattcctggtcagccaaacctttctccagctgtgataaccaaagatgtctttagacattgtcaaatgtccactagagggcaaaatcaccctgtggctgagaagcattgataaataacattctatttttttaaattttcctataataaaatattttaaaaaatagttttgactgagtgtggtggctcacacctgtaattccagcgccttgggaggccgggacaggaggcctgctcgagcccaggagttagagaccaccctgggcaacacagggagatctcatctccaagaaaaaattaaaaatt

SEQ ID NO: 101331 - DNA, 129 bp, Homo sapiens
gttggtgctatagggtaaatacaggccctatttgcaagatttttaagggaatgaattctatgacgatgggcatgagcctgaggattgctccacagattttaaatcattgaccgtaggtcgacgcggccg

SEQ ID NO: 101332 - DNA, 280 bp, Homo sapiens
aatcaatacccctggtgcttttgtaatcacatgagtatgggcaaagagtcaaaaactttgaacaggtcaggcatggtggctcatacctgtaaccccagcactttgggaggccaaggtgggaggatcacttgagcttaggggtccaagagcagcctgggcgacaaagtgagaccccatctttattaaaaaaaaaaaaattaaaaaaaattttttttgagactaagtctcactctatctcccaggctggagtgcagtggtatgatctctgtcgacgcggccg

SEQ ID NO: 101333 - DNA, 347 bp, Homo sapiens
cttcttaaaaccaaccacgtgactaaccatattaaaagaataaaggagaaaaacaatatgaccattatggagatgatgaaaaagcatttgaaaaaaattcaacacccacggaacaaagagtcaaacaaatgtactgacatacaacatcataataaaaagaaaaaattcaacacctactcatgataaaaattcttatctcctcactcaaattggaacataggctgagtgcacaggctcacacttgaaatcccaaaactctgtgaggctgaagcaggaggactgcctgaggccaagagttcaagataagcctagtccacatagtgatatcctgtctctacaaaaaggga

SEQ ID NO: 101334 - DNA, 329 bp, Homo sapiens
  misc_feature (1)...(329): n = a,t,c or g
ggatatatcaaaatttgtttatccattcatcagctgaatgacatttggattgcttccactttctgactcttataaataatgctgctatgaacattcacatacaagttttggtgtgaatatatgtttttctttttttttaagaatctgatacattttgacttatgtacatacttataaaaccatcaccacaatcaagactgtatacacaaatatcatccagaaagtttcctcatgtccctttgtaatctcgctcttcctatccatgaaacaaccagtgacctgtttccatcaccatagattagaccacattttttagaactttagagaan

SEQ ID NO: 101335 - DNA, 493 bp, Homo sapiens
  misc_feature (1)...(493): n = a,t,c or g
gtgtggtgtccgccgcccacaaatcctgcgttgtgttgtgcgccgagtgccgtcttctcctccccccccaggggngntnntttgattctggcattccanncnngagagaagaaccccaccaaacccaaaaaagagactctcgaggaccaattccgtttcgcgcgaggcntctccgtgttggcaggctggtctcgatctcctgacctcacgtgatccacccgcctcggcctcccaaagtgatgggattacagacgtgagccaccacacccggccaataaatgacctttttaatccaaagtcctagtacaagatcctcagtcttctctgtgttttgtgtcctctctgccacagctgctgcttattgccttacaaatccaggaacagtgaccttgacaatgaaattacaggagattgtaggattttaaatggaattagaacctcctccagcttaaaaatggcattgcagggatcaaaataatgttcctgagatacg

SEQ ID NO: 101336 - DNA, 350 bp, Homo sapiens
  misc_feature (1)...(350): n = a,t,c or g
attatgcatggtctcatcatttgaagctttaaatacatttctataatacaaagccataaactggacatacaacatgagctatacagatgcttcgcaatcaagtcaaaatcaagctccccaagtctccagttgaaattataccctttaaaatagtcccacaattccaggttcagaaaataaaaagtcagaacaactttttgttactgttccaagagtcacaaatattttttgcaacctcaacaggttctgtcaggcctctgagcccaagctaagccatcatatcccctgtgacctgcacgtatacatccagatggcctgaagtaactgaaaaatcacaaaagaagtgaaan

SEQ ID NO: 101337 - DNA, 329 bp, Homo sapiens
  misc_feature (1)...(329): n = a,t,c or g
cctcgcctcatggtattcatgcctttctggagcatgaggtggacctggtaactccttttaacaaacagaataacccggctaattttttctgttttcagtagagacaggttctcactatgttggcctcctggactcatgtgatcctcccaccttggcctcccaatgtgctgggattacaggcgtgagccactgcacccagcccatgcctggccttttttttttacatttaaatctttgatgcattttgaatttatcctactataaggtaagagaggtatgaacctaggcctattgttttgcagtataaaagtttgataaaaaacagagan

SEQ ID NO: 101338 - DNA, 380 bp, Homo sapiens
tgaagttccaagccaaagctatttttaaaacatcaataaaaaaatttaagttacttacttgcattatctttgttagccatggcattcatgccaatgttatcaaacttggatcccatattttcatccaatagatggccaaacttttaaacaaaaacgataaatttattagaaaactaaaaataatgtagaatagctagcttgttaaaacagtacattagccttacctcttcagcagatacaaataggctggaatcatttaagtttcttttcttttttcttggccctaaaaaaaattgtaagtctacattattcaattataaatctaatgattttagaaaaatgcaatgcaacatgattttattttaaaaattatacttgga

SEQ ID NO: 101339 - DNA, 369 bp, Homo sapiens
attttaaccaccatccttcggctgctcagcctttttttccccttcttcctcacagctctgtttctggctccatgtctccgtcacccacttccacctcctccccagctgctcctcctcgtctccttgtgtgaagtcctttcccgtggctgtttcttctccaccacgcgaacctgctggaggctcttggcttgatagcattagcaatttgccattattttttcctctccttgcgcatgcatttctaccaaaggttcttcaaatgtagagaaccgcacgataagagatatcccacaggcccctctaagtttaaggggaggctaggaatttgtgtgtgtgtgtgtgtgtgtgtgtgtgtgtgtgtgtgataat

SEQ ID NO: 101340 - DNA, 374 bp, Homo sapiens
attttttgatacaaaccgggtttgggcatgtttcccaggctgggtgggaactcctgagatgaggcaatctgcccgctttggccttccaaagtgctgggattactggcatgagctacctgtgtgtggcagaatctctatatttattacctcccttcctgaagatcctttgcagctccctcctaaccctgagcccctatgacacatggaaagttgctctattgtgctcctacacagtgtaatatcggccgatgggatgtttggctgttttaagggacaggatcaattcaattggagctttcctttgccttcccagaaggtgtcactagaggatgaaaattaaatgatttttaatgtcgagaaaaacatggccaatt

SEQ ID NO: 101341 - DNA, 333 bp, Homo sapiens
taattctgatatatttgatatatatataatacaatatatatttctgatatatttgatatatataatacaatatatatatctgatataggtatttctcataattttttttaagtttactttgaaataggagttcatttttatctctttgagcatctctttcagacttgcttttattgtttatagggatgttattttattgtttctttttttttttagttgaaactttgtgggggattcaatctcttaaaagtatgaatgctttcatttatactgtgctaggaataagatgcatgtaagtaaataattgcattatgagacatattcttctaaacc

SEQ ID NO: 101342 - DNA, 360 bp, Homo sapiens
  misc_feature (1)...(360): n = a,t,c or g
cgatactaatcattggttggtaataccttaaaaataagacccttactgtatttnnngctttttttttttttttttttttaaaaaaaaaaaattttcttttttcccccaggtggggggaaaggggtttaatcgggtttttatcttatgggaaggggaactttttccctcttttttaaaagattttttttgttttacccccccaaagaggggggtttaaggggttcccccccaccccccagtttttttttttttttttttaaaaaaaggggtttcccctttttggccaggggggtttaaaaaaaagggccccaagggaccccccttccttggcttcccaaaagtttgggtttaaggggttaa

SEQ ID NO: 101343 - DNA, 415 bp, Homo sapiens
cttgttctgtcatccaagctggagggcagtggtgtgggcacagctcactgcaaccttgaattcctggcatcaaccaatcctcctacctaagcttccctagtagctgggattacaggcatgctaccatgcccagctaatttttattttttatcgaaataaaaatgttacagtgaaccatgattggggcactgcactctagtctcgctatgctgccccagctggggcccctttccctctaccacttttttttactgaatatgcattgctctccatcaggaataaaataaaggaaaaaaaacaaaaacaacctccatgaaacctataaatgacaaagatttggggaaaacaggaaattcccctcaggaagccagaagattatccaaagaacttattaaataggggctcattattcttc

SEQ ID NO: 101344 - DNA, 708 bp, Homo sapiens
gtcatgttcttctctaatttaacctgcattcttaaaaattggttatctgccacgtaagattcacaaaaggcaaacctgaagtgtctgtgactgtgtgtgtgcatatctgggggtgtctgcagatgtctgatgtgtatcctgggggtgtgtgtgtgcatgcatgtctgtgtgtctgtctgcccatgcacacatacacttgcccaggagactaagggatgctgaccaggagaaggcagccaccaagctggaggtgaagtcaggtggacaggagctgggacatctaaaccctagatctggcccctgtcccatgtccatagtaaccccctcacccactctccttctcaagtggatcaggggctatttacaacactcctcccctgtctctctgggtatatgtatgtgcagtttcctcttgctgaaatgcccttcatttcctctctcctcctggaaaatgcctgtctatccttgtgtgagggttcagaggctcagaaaccccttctctgggagggactctcctatctgccaccccttaaccagctcccactgtgcctcttccctcatctggcacattaaattattacttgcaaaataggcacagtggttcatgcctgtagtctcagaactttgggaggccaaggtgggagaactgcttgagggtcagaagttcaagaccaccctgggcaatgtagtgagacccccatctctaca

SEQ ID NO: 101345 - DNA, 347 bp, Homo sapiens
  misc_feature (1)...(347): n = a,t,c or g
cgttgcattgatggcggacggtgctatagacactgagtctaacgactatggagcttttatgcccttggggatagaaaggggattggaccggatctgggagatgcccgaactatgtctgaggccgaacgagtttgattgtatgacggactaaccgtgcatacagcatgccccctcagtgagctgtggactcgcatgaaagcccggcgaccgtattgagacccgcaacttattagacggaagtggtgntatccctagggtaacttgttccgttggtcaagttattggatcaattgagtatagtagttcgctttgactggtgaagtcttagcatgtactgctcggaggtn

SEQ ID NO: 101346 - DNA, 394 bp, Homo sapiens
  misc_feature (1)...(394): n = a,t,c or g
nttgatcacattgttgacatgattacgccatctttcacgaggcgaactattgctgttttttgagatttgaacctttatattgttattaggggccatatcacatccatcttaaaacctaataaaaatttaaagctgtggtatatatatacaattgaatattattcagccttaaaagggaatgaaattctgatacatgctacaatatggataaaccttgaaaacatgcaagatgaaataaaccagacacaaaaggacatatattgtacaatttcacttatatgaagcgcctagaatgggcaaattcacacagatggagagtataatanaggttcccaggagttgggagaaggcgggaatgagaagttactgtttaatgggtacagagtttccgttt

SEQ ID NO: 101347 - DNA, 504 bp, Homo sapiens
  misc_feature (1)...(504): n = a,t,c or g
gattacgccaagcttggcacgaggcagaaattaacacgtgggaaattatacaccacaaatagtacaatccatggaagaaccaagggaatggcgatagcagaatgtcaggaaaggactttgtaatgtgtaggccttagagaaatagggaactgagacaagaatctatttgaattcttggaaataaaaaatgtaattaccatgttggccaggctggtcttgaactcctgacctcaggtgatccacctgcgtcggcctcccaaactgctgggattgcagacatgagccactgcacccggccaagaagtgactattgtttctccattgtgtcctcttgatgcccttgtcaaaaattagttgaccagatatgtttgggatttatttctgagctctctgttgtgttactgtccanttttccatatcctgcttttctntttttttttttggctgcaaaactttcttccccttgggnccaggcttngggagaaggctggaggtgggtnaaaa

SEQ ID NO: 101348 - DNA, 92 bp, Homo sapiens
ttttagtatagacaaggtttcaccatgttgcccaggcttgtcttgaactcctgacctcaagcagtccacccacctcggcgtggactcggccg

SEQ ID NO: 101349 - DNA, 92 bp, Homo sapiens
ttttagtaaagacaaggtttcaccatgttgcccaggcttgtcttgaactcctgacctcaagcagtccacccacctcggcgtcgacgcggccg

SEQ ID NO: 101350 - DNA, 329 bp, Homo sapiens
  misc_feature (1)...(329): n = a,t,c or g
ccagatcaagacagttttcaagcccccagctggctccttcctgccccctccctgatataccccctagaggtaaccagtattctaatctttatcaccataaatgtgttttgtacttacgtttcttaaaaattgtggtgggctgtgtgcaatggctcatgtttgtaattccagcactttgggaggcagaggctggaggacagcttgagcccaggagttcaagaccagcctgggcaacatggtaagaccccatctcttcnnnngaaaaaaaaaaaaaaaaaaaaaaaaaagggaaaaaanaaaaaanaaaaaanggggccgcccgcgccgaa

SEQ ID NO: 101351 - DNA, 380 bp, Homo sapiens
  misc_feature (1)...(380): n = a,t,c or g
gtggattcaacagacaaaaggccaggcgcggtggctcacaactataatcccagcactgtgggaagccaaggtgggcagatcacttgaggtaaattcaatcccagcctggccaacacagtgaaactgtttaaaaaaaaaaaaaaaaggaaacggggggccctattttaaaaacccggtagaagagggaaaaaaaaaacacttcttaaactcaattggggaaccggaaaaaaaggtttccctaacctaaagattcttttataaggctaaaatatccttgaaaaaattaaggggctttttattttaaaaggttaaacaaaattggtttggaaaaattaaactttctttatcagctctcactttcaaaggtccttttgtacttn

SEQ ID NO: 101352 - DNA, 309 bp, Homo sapiens
ccccagccacatggaactgtaagtccaataaaccccttttttttgtaaattgcccagtctcgggtatgtctttatcagctgcatgaaaacatactaatacaatgacgtcttgtatttcaaaaatcttgggaaacacacaatacacatacatgaatattaaagctgaaaatgagttcaacaaggttgcaggttataagatcaatatagataagttggttctatttaacctgggaggcggagcttgcagtgagccgagattgcgccactgcactacagcctgggtgacagggtgagacgtcgacgcggccg

SEQ ID NO: 101353 - DNA, 349 bp, Homo sapiens
atttttagtatagaaggggtttccccatgttggccaggctggtctcaaacccctcacctcaagtgatccacccgccttagcctcccaaagttatgggattacaggtgtgagccaccacgcccagccgagaacttgcatttctaacaattcccaggttgtgctgttctggcgaaccatactctgagaaacacctccctatatcctgataggttattttccctaagatccagataagtaaaaattaatacacattagatgaaattccagaagttaccttcaaaccttgctattcattgaatgtcatgaaaatactggaaaaacaaacaaaaaataaaaaacaaaaaacttg

SEQ ID NO: 101354 - DNA, 370 bp, Homo sapiens
  misc_feature (1)...(370): n = a,t,c or g
aacgcggtctgagtggtatataccaataaatgtgggntncttttttttttttttcttttttttttttttttttttattatttttttactcctttctttttttttttgagatcatttttttgtctcacttctgtttatttccaactttgtatttttattccctatttttatttttactgtgttccaagcccatttatttatttgcttactttttttccctatttgtatgtttttaaacttattttttcctaattttaattattacttttaccctttccccctctttttttatctacttttttttttttttggatgattctttaaccaccttttttacttaggaaattttctttctttctttgttgcatcat

SEQ ID NO: 101355 - DNA, 350 bp, Homo sapiens
ggggcagtgtcactaggttggttttcattaaacatattcttggcccattcgttggggccatcttggattgcatggtgaggtctgggaatcacagagctaccactcaacattttctaccactaaagacgttgaagagagctgggcgtgatggcttaagcctgtaatcctagcgctttgggaagccgaggcgggaggatctgttgagcccaggagttggagaccagcctggacaacttaccgagaccctatctctattaaaataaattaaaaaaaaaaagatattgaagaggatacgcagctaatgttcattttagaaaggctgcttttgattatcaaacatgatgtgtgcg

SEQ ID NO: 101356 - DNA, 344 bp, Homo sapiens
  misc_feature (1)...(344): n = a,t,c or g
gtaaaatcaataagctttactgatagatttggatttggcatataatataaaaagaagagaaagacaagaatgactccaaggattttagctgtaacaattagaaggagaaaagttgacagttattgagatgtagaaggctgtggaagtcaggcacggtggcccacacctaaaatcccagcactttgggaggccaaactgggaggattacttgagttcaggtgttcaagaacagcctaggtaacacactaatactctgtctctattanaaaaaaaaaaaaaacggaaaggaatgaaggaaaaaaaaggaaaaggggggaaggaaaaaaaggaagaggggggggtga

SEQ ID NO: 101357 - DNA, 276 bp, Homo sapiens
gttcatctcactggggagtgtcggacagtgggtgcaggacagggggtgcagcgcacccagtgagccaaagcagggcgaggcgtcacctcacccgggaagcacaaggggtcagggaattccctttcctagtcaaagaaagcggtgacagatggcacctggaaaatcaggtcactcccaccctaatactgcacttttccaacgatcttagcaaacggcacaccaggagataatatcctgcgcttggctcggagggtcctactcccgtcgacgcggccg

SEQ ID NO: 101358 - DNA, 364 bp, Homo sapiens
gtaagcagtttaccacccaataaacgaaagttgcgttttgaatataggaaaagattcttgtctcttgtattgactgttcgaaaaaaaaaaaaaaaaaaaaaaaaaaaaaaaaaataaaaaaaaaaaaaaaaaaaaaaataaacactatgaataatttaatacatttcccggggtcgcccgtaaaataaatttatttttatgtatacaaaaggtggacgcgggggggggaactttatgggggggggggccccccattttttttttttttttataaaggggtggtccggtctttttttcaaatattgccgtcactttaacctactcttgaaggaggaggagcaagtttgctgattgaaagaggaaa

SEQ ID NO: 101359 - DNA, 406 bp, Homo sapiens
agccacctcacttggcactgtctaatttttcaaaacattttctcgtagagatagggcctcactatgtttcccaggctggtcttaaactcctgacctcaagtggtcctcctatctcagcctcccaaagtgccgggattatacgcatgagccaccatgcccagccaagccctgcattgtctagattgaggtctttgtcattgaggtggcagagtaactgtgggcttcctgtaagaaaaagagtcccagctcctagatgacattctgcatggccttagaatgttacctgacaggcttcagttttctcatttgtaaaagaacacaactgggaaagcaaaggctgcgctaaattggtttctgaattgctcctctctaccacttgagataagcggcccctctttatacaaag

SEQ ID NO: 101360 - DNA, 412 bp, Homo sapiens
caggctttcgccatgttgcccaggatggtctcaaactccctggctcaagcaatctgaccaccttgacctcccagattattggaattacaggcatgagccactatgcctggtcaatctaaataatttctagtttttgtatgtttaagctgttcccaatgtttcctcaaatatcaacaatgctgctattgtatgtgtgtgattatttctaattcatgttttcctaaaagtagagttgtttgctcaaagagcatgcacatttaaaattgtaattgatattgtcaaatttgtatccccattcgtaatacacacaatataggagagaccttttcccacaccattggcaatacaggaataacatcaacctatatgtttaatagcagaatactgcttaaggtaactgtcatatctatat

SEQ ID NO: 101361 - DNA, 416 bp, Homo sapiens
  misc_feature (1)...(416): n = a,t,c or g
ataaatactgtgtgtatatcttcattttgtgggaactcatccatttgtacatttgtaatatatgcacttcctaccactcaccctagcattacttatatgatatgtctccatacccattacaatctccagcattccccctcanacctataaaaaaaaaaaaaaaaaaaaaaagggcccccccttaggggggtttgggaaccttataggctttggaaattttcccaaaaaatttttttgaagttggaaaccctaaaaacaaaaacagcaattggttttttttggaaaatttattttaaaaaaaccttaaccccttcttttcttgggaaaatttttttttcatttagggggggaatcccacctccttttccccgggattacccctgccttaaaaggctttaagccggggggcccaactt

SEQ ID NO: 101362 - DNA, 384 bp, Homo sapiens
gtagtccgagtaacgtcggggcattccggataggccgctgcatacgccacatgatacattctatcagctgaaggctcattctttcctctaacagaagaattattaatatgattcatgaagcgagaagccttcacttagaagcgataagtcctaataatccatgaaccctccataaacctggattgactatatggatgccctacaccctaccacacattcccggatcccgtatacctaaactctaaacgaaggaggagggactcgcaccccccaaagctggcctcacgcctgccccacgtgcttcatgactttttcaaaaaaaaaaaaggggggcgaagattttaaaaaaccccccaggggccccaacttaacggggacttgaac

SEQ ID NO: 101363 - DNA, 399 bp, Homo sapiens
  misc_feature (1)...(399): n = a,t,c or g
caactttgcgtagactctggaatgggctgcttcaaagtaggatactccatataacctatattctaatatgcaaccaacaaaagacagtacattttttgtgtgtgtgtgaaaaaaagcttttagagaaaataggcaaggcatggtggctcatgccaataattccagaactttgggaggccatgataggagtatcacttgaggccaggagtttgagattaggctgggcaacatagggagacctagtctctacaaaaaaaaaaaaaaaaaaaaaaaaaaaaaaaaaaaaaaaaaaaaaaaaaaaaaaaaaaaaaaaaaaaaanaaaaaanaaaaaaaannnnnnnggggggggggggaggaaaaannnannnggggaagggaaaggagggggcgggctgttt

SEQ ID NO: 101364 - DNA, 375 bp, Homo sapiens
tttaattttcttcttattattattattgagatggagtctcgctctgtctcagctcactgcaaactcagcctcccaggttcaagcaattcttctgcctcagcctcccgagtagctgggagcagaggtgcacaccaccacacctggctttttttttttttttttttttttttttaaaaaaaaaagggggccccccctgggggccagggggggtttttaactctaaaaaaaaaaaatccccccccccgggccccccaaaggggggggattaacgggggaaccccccggccccaaaacggggggggtaaattttttccttggggggaaaagaaaaaattttaatttattttttggcctccaacccaaaaggttcaatag

SEQ ID NO: 101365 - DNA, 1455 bp, Homo sapiens
ttttttttttttctcgttgatatacaaagttttatgtgacctgagcccctctggaggcaccagagtccacactctgtactcagaaggtgagggattggctcacgggggcaacatggcccgaaaggtgggagatcgtccatcccctgcgggaaaggaggcatccctaatgcattgcacaggcttgaagggggcacacccccacagttggggaggaggaagcaatgatagctaagaaggagaggggcaccccaaagaatactacagtatagggttagaaccttgaaattgcacctaatagtctagacctgtggacctttagaatcttagaaacttagaacatttgagtcttagaactacagtgcctagaactataagattttagaaatgtggattcttggactcttaaccatggtcctagagaggcagaatgcagcaaagaacctaaaggtgtccaacattagaaattattagaactttggtgtctagttagtcacaactgagtgtgagagtcttataacttagatgcttaggatccggaatcttggaccaatggaatctagagtgccttgaaacagaacagaccgttagaatcttatttaatcatctagaatcttggagcatctgatctagaatcttagacacagagaatctaagatcttagagtaagtcttagaatatcacatcttagaacaccggaccttagaaactccatctttagactcttggaacttttgaattgcagattctagagctttcgacccttaggatctaggatcttatacaagagaatctattatcataaagcctcagaaactataattgatcatcattagaatcttagaacttgagaagataacattttgaagccttatgatctagagccttacagccagagaatctagactctcagagccttagaacatcacattttagaatcctaggccttagaacctccatgtctagaactatagaatctttagaatctataatcttacattttaaggactctgaactctagaagaataaacatctagactcatagagccttagctcctaaaatcagaatcttagaactttagaacctaaaaccttgaggctttatcaaaaatgttagaaccagaaaatctaaaaccacataatgtcagagctttagaacagtaggtcttaaggttgagtgcaagtggctcatgcctgtaatctcagcactttgggaggctgaggtgggcagatcacttgaggtcaggagttttagaccagcctggccaacatggtgaaaccctgtctctactaaaaatataaaaattagccgggtgtggtggcacacacctgtaatcccagctacttgggaggccaaggcaggaaaatcacttgaactcggtaggtgaaggttgcagtgaggcgagattgcaccactgcactccagcctgggtgacacagtgagactctatcgcaaaa

SEQ ID NO: 101366 - DNA, 399 bp, Homo sapiens
acagctatgaggatggacttgatccaggtggctgcccttttgtagctcactttgattctaacttcagcggtgcatgatgccctatgaatggaatatacaatgtgtgtctttcacatctgtcttctttcacttagaataatatttccaatggcatctacatttttagtatgtatcattacatcaaacctttttgttgctgaataatattccattaatggatatactaaaatttatccatttatcagttaagaacgtttgggtttttttcactttttggctattgtgaataacacttctaagaacatttgtgtacaaggtttcctggggatgtatgtttccatttctcatggctacatacctaagagtgaaattggtggaccatatggaaactctgtgttt

SEQ ID NO: 101367 - DNA, 363 bp, Homo sapiens
  misc_feature (1)...(363): n = a,t,c or g
gtgatatccagccctgaccttgaagaataaggagggctggagtatatgcagagagggggaagggtggaacagagaggtgccaggggaaactggatgagcaaatgcccagagggaggagattgcttatgttgggtggctggagcgtaaactctgatggctgcgtatagacaagtgctgctgcgtgggtctgatgaggacattaaggcaaggaaggccaagcacagtggctcacacctgtcatcccagcaccctgggaggccaaagtgagagaatcacttgaggccaggagtttgagtctggcctgggcagcatattgagatgccacctctacaacaaattttaaaaattagccaggtatggccn

SEQ ID NO: 101368 - DNA, 372 bp, Homo sapiens
tttgaggtgagatcttgctctgttgcccacgctggagtgcagtggcatgatcaccgtggctttgaatttctgggttcaagtgatgatccttctgtctcagcctcctgcatttctaggattacaggtgcaagccactgtacccagggataattatgattattaactaaagtattataggtatctgctttttgcctttctgtaaacactttaaggcttacttctctgctaaagagtgatacttttctgggttctaggtcaaaattaaactctctgggagaatcattgcaaacttacatttctccctccaggcatttcatccagctcctctgcttcaggtctctcttccccagattcctcgttaagcacaagaaa

SEQ ID NO: 101369 - DNA, 370 bp, Homo sapiens
  misc_feature (1)...(370): n = a,t,c or g
cggcgtatgagtgttgggtgatgaataatacctcagagatattgcagatcacctaactaaagtgaagattgcaaaaaagcaagtcataccaattttttcgttaaccaatgcatacggaagttgtgtttatactatagtaagtgtgcagtagtattgcatctaaaaaaaaacagtgtgaataccttaattaaaaaatattttataggtaagaaatgctaaggatcatcggagccttcagtgagttctaatctttttgctggtggaaggtcttgtcttgatgttgatgactactgactgataatggtggtggttgctgaagattgcggtggctgtggcaatttcttaaaataagacaacaatgaagttgccn

SEQ ID NO: 101370 - DNA, 358 bp, Homo sapiens
attctttaaccctactgctgctttatcaactaagtttatataatattctaaattttgtttgtttcatttcaacaatgttcacagtgtcatcaccagcagtagattccatctcaagaaaccattttctttaaaaagaaactgctcatctattgatggtatcatgaaattggaccaatacatctttaggctccacttctaattctagttctctcgctatttccactacttctgcagttacttcctacatggaagtcttgagcccctcggagttatccgtgagtactggaatcagctcctttcagactcttgtcaatgttgatattttgacatcctcccatgaatcatggatgttcttaat

SEQ ID NO: 101371 - DNA, 316 bp, Homo sapiens
  misc_feature (1)...(316): n = a,t,c or g
cccatctctactaaaaatccttgcatatttttcatgtgcatattgggattnattnnncttaaanatattattatagcatccattaataaaatatttaagaaaaataaatcacaatatgacatgaaaaatatgcaaggatttttagtagagatggggtcttggcatgcgggacacgctggccttgaactcctgacctcaagggatccatcctcctcggcctcccaaagtgctgggattacagacgtgagccaccatgcccagccgaactaacaacatttgaaatctgtaaaaaggacatttgcagtcgacgcggccg

SEQ ID NO: 101372 - DNA, 360 bp, Homo sapiens
ttttttctttgagacagggtctccatcacccagacctcatgggctcaccctcccacctcagcctcctgagtagcttggactacaggcatgcaccaccacacctggctaaattttgtattttttgtagaaatggggtttcaccatgttggccaggttggtatcaggttgcccttgctctcctggaagtagcaggtgaacttctgggctcaaaccattgcctgcctcagtctcccaaagtgctgggattatggatgtgagtcacctcacctggcttagaaactgcttttaagccttaaagtacactgatcgggaagttctgctgtaaggcactttggtgctgagaaaggaatagtttgtcga

SEQ ID NO: 101373 - DNA, 362 bp, Homo sapiens
cacggagactgaataaaagataacagaaatcataaaggagtataattttttcccaaatgtttgaaggtcacgtaaaagagggtatgaattgattttgccctctacagctataatttttttaaaaagaagaaataggtaaacatacaaaaggggatggcaaagatgaatttctacttacaggaaataagcagtcatccattaatggaattagaagcctctaaagagccgggcacagtggctcactcccgtaatcccaacaatttcagaggctgaggtaggaggatccttgtagccaggagtttgagacgagcctggccaacatagcaagatcccatttctacataaatcttttttaaaaatta

SEQ ID NO: 101374 - DNA, 353 bp, Homo sapiens
tttgagaccaagaccactctgggttcttattctaactgtggatgccaccggcttcgggagaagagatcttaatccactttctaaatggaggtttaggaatctaagctgtgtaatggaatactatttcccttattagaacaaaccctaactcgggtgcggtggcacacgtctgtagtcccagctactcagcaggctgagatgggaggatggcttgagcccaggagtttgaggttgcagtgcactatgatgcacctctaaattagtcacggcactgcagcctgggcaacatagcgagactctgtctaaaaaaaaaaaaaaaaaaaaaaggtcaacccggcccgaatttccaaatc

SEQ ID NO: 101375 - DNA, 201 bp, Homo sapiens
cagcaattcagtcacgtcttcaggctcctcttccagttttcattctcttgtcaggagccaccatcctctcatatacaacctggggtctgtactagaaatacaaaagttagccaggcatggtagtgtgtacctgtgatcccggctaatcgggaggctgagacaggagaatcacttgaacctggtaggcggtcgacgcggccg

SEQ ID NO: 101376 - DNA, 270 bp, Homo sapiens
ggattgcttgagtccaggagatgaagaccagtcagggtaacacagtaagatcctgcctctacaaaaattagccagacgttgtggcatgcgcctgtagtcccagctacttgggaagctgaggtggaaggatcacttgcactccggtgggcctagacttctggtgggactgggagtcgtcagagtgtagggtagagttgttagagtatggggtagaccaggacattttggaccaagcatcagaacacatggaaccaaatgtcgacgcggccg

SEQ ID NO: 101377 - DNA, 354 bp, Homo sapiens
ctcatttttgtatttttagtagagatggggttacgccatgttggccgggctggtctcaaactcctgacctcgtgatccgagtagagacagggtttctccatgttggtcaggctggtcttgaactcctgacctcaggtgatccgccgtcctcggcctcctaaattgctgatattataggcatgagccaccgtgcctggctgtgcccagttaattcttacccagccatcttaggagaagaatagagatgagaatctagaccaagatcaagttattcctactcctgaaactatatgtcgtgtaagctggccatccagagtggtaaatataagtagattacataacttggactgagta

SEQ ID NO: 101378 - DNA, 263 bp, Homo sapiens
ccactgcacttcagcctgggcaacagaacaagaccctgtctcaaaatagatataaatagagaatgagagagcacgagcctgtctgatctggagcttcaactagatgaatttttttgatgttcaaagagttattactggccagatgcagtggttcacacctgtaatcctagtactttgggaggccaagatgggtggatcgcttgagctcaggagttcaagaccagcctgggcaacatagcgagaccccccatctctgtttttta

SEQ ID NO: 101379 - DNA, 359 bp, Homo sapiens
ttgagtttttaaaataacactaaaatttttttttaatggaacacaggattctggtggaaacgttagcaaaaaagacaaaaaagtgttagtgatgtctgatttggctatatttttcacttatactaaatactaaaagcttgtgttcttcagtcggatatagaatttaacaagtaatactacagagtaagttctatagcagaatttaattttcaaagagcccaatttaaatacaatggttttcttaaacttttattttttctgagacaaggtctcactctgtcacccaggctggagtgtagtggcatgatcacggctcactgcagccttgacctccttgggctcaggtgatcctctcatgt

SEQ ID NO: 101380 - DNA, 155 bp, Homo sapiens
ggcatgatctcggctcaccgcaacctccctctcccgggttcaagcaattcccctgccccagcctcctgagcagctgggaggccaaggtgggaggatctcttgatccaggagtttgagaccagcctgggcaatatagggaaacgtcgacgcggccg

SEQ ID NO: 101381 - DNA, 339 bp, Homo sapiens
ttctagtttcttgattttcagctcaggctgcattctaactcatactgtgaagacaaaggtgtttttgattcagaaatatatgaaatctgcatagtcttaatttgtaaaaaataaagaaaattccttaaccaaaaaaaaaaaaaaaaaaaaaaagaaaagccgggtttaatttaaaaaaaaaaaaaaaattcccaaaaaaagtggtttgatttcccatggcttcctccaaaccccgaaacgaaaaactcattatttttgcctaaggagtttttgtggttgaaaacaaaacctcctttccctttaaccctcacttaaaaaagaaccttgctttaaaagtgg

SEQ ID NO: 101382 - DNA, 425 bp, Homo sapiens
atcaagcccgaatgatatttgctattcgcctacacaattctccgatccgtccctaacaaactaggaggcgtccttgccctattactatccatcctcatcctagcaataatccccatccttcatatatccaaacgacgaagcataatatttcgcccactaagccgatcactttattgactcctagccgcagacctcctcattctaacctgaatcggaggacaaccagcacgctacccttttaccatcattggacaagtagcatccgtactatacttcacaactatcctaatcctaataccaactatctccctaagtgaaaacaaagtactcctatgggcctaaaaaaaaaaaaaaaaaaaaggggggtggtgttcagaaaatgcttcggggggcacatgttgaggccgctgagcgacatcatatct

SEQ ID NO: 101383 - DNA, 410 bp, Homo sapiens
  misc_feature (1)...(410): n = a,t,c or g
tacggctcaacattttttgtagccacaggcttccacggacttcacgtcattattggctcaactttcctcactatctgcttcatccgccaactaatatttcactttacatccaaacatcactttggcttcgaagccgccgcctgatactggcattttgtagatgtggtttgactatttctgtatgtctccatctattgatgagggtcttaaaaaaaaaaaaaaaaaaaaaaaaaaaaaaanggggggggcccgtttaaaaaaacccctggggggcccaaatttaaccggggatggaaaaaaaatatttttttccttaaggggggcggattaaaaaccccccggggaattttgggaaagaacccttatttgtggggggggcaatactggaacaaccctccaccgggaattag

SEQ ID NO: 101384 - DNA, 424 bp, Homo sapiens
  misc_feature (1)...(424): n = a,t,c or g
caaatgggccattatcgaagaattcacaaaaaacaatagcctcatcatccccaccatcatagccaccatcaccctccttaacctctacttctacctacgcctaatctactccacctcaatcacactactccccatatctaacaacgtaaaaataaaatgacagtttgaacatacaaaacccaccccattcctccccacactcatcgcccttaccacgctactcctacctatctccccttttatactaataatcttataanaaaagaaaaaaagaaaaaagaaaaaaaaaaaaaaaaaaaaaaaaaaaaaaaaaaaaaaagggggggggggcttttaaaagatccctggggggggccaaatttatgggggggggggaaagattaattttttcttttgaggggggggatataagagcggcgggggg

SEQ ID NO: 101385 - DNA, 389 bp, Homo sapiens
  misc_feature (1)...(389): n = a,t,c or g
tgggagtcagccaagatttaaagggatgccagcgattgctcttttcaaaacctaccagtcccactgtgggtggagaaataaatggtctttctcctcanaaaaaaaaaaaaaaaaaaaaaaaaaaaaaaaaaaaaaaaaaaaaaaaaaaaaaaaaaagggggggggccctttaaaaaaaactcctggggggccaaaataatcccgggaaaaaaaaaaataatttttttctttttagagggacaaaaaaaaaaactgtgggggttttttaaaaaaaaacctcttttttggggggggaaaaaacggcccaacccccccaaaaaaaattaactctctaaaaaaaaaaaaaaatttttaaaaggaaaagggggcaaaacaacccgcatctcttt

SEQ ID NO: 101386 - DNA, 507 bp, Homo sapiens
  misc_feature (1)...(507): n = a,t,c or g
cgcctggcccggggggnaaactgaaaccgtagcggctgcggcaaacggcacgaggagagagagagagagagagagagagagagagagagagagagagagagagagagagagagagagagagagagagagtccccccgtccccccaagagacagagagagagagagacagagatacagacgctctctctgacagtgtctctggcgcccccacccacctgtgtcttctgagagtgtgtatacacacacacatctacgcggggggagggagagacacctcttctctctctcctgtgtcatagagtatcccccccccccccgcgctaccctgttttttatcacacacacctatggtcgcccccgcgcgcgagacagagacacaggggggcacacaatacacactcatttttgtgtgtttgtgtgtgtgttttttttttttaaaaaaaaaaaccgtttttttccccctcacaaaaaaaaaaaaaagtgtgggggggggcgccccccccccct

SEQ ID NO: 101387 - DNA, 436 bp, Homo sapiens
  misc_feature (1)...(436): n = a,t,c or g
tttcgttgttccctggtgctgttccctccgccctgtgccagggccttcgcagtgccctctactgggaatcctcctcaggcaggtcccacctgcaggcctttcgtgtcatcggcactgcaggccctccccacccaggactccaggcctactttcctgctttgggtcttccgtgttagacagtgtcacataatatatatgtttcctatttatagattcatcgtatgtcaggtctcctccattagaatgtcaatttcaaaagtataaaaatttttacctgtttaatcattttaggaacctagagtattgcctagtacagagtaggaattcaataactatttgctgaatgtatgctgtttcaaaatttaaaacgtgtgtgtgtgtgtgtgtgtgtgtgtgtgtgtgtgagaaaaaaaatgtatntctgagcgcatataan

SEQ ID NO: 101388 - DNA, 411 bp, Homo sapiens
gcactatagtaaccccacaaaatattaattattattattttgagtggtcttttttctttttctttcttttttttttttttgggggggaaaaaaagtttggccctaaaccccggggggggggggtggggggcccctaaaatggccccagggcccccccccgggggaaaaaaggggaaagggccttctcaaaaaaaaaaaaaaaaaaaaaaaggggggggggggttaaaaggaaaccattttttcccccgggggggggggaggtttttttttttttgggggggccccaatttttaatttcgggggggttttttaaaggggggggggggggaaaaaccgggggggcccccaataaatcgggggaaaaccccccctttggagggggggggaaaaaaagagaggggggggattgcg

SEQ ID NO: 101389 - DNA, 433 bp, Homo sapiens
tttcgtgcccagcacagctaactggtgcttctttctttggtcagtcttctagacaggaggatccaattatttctttgtgcatagatcatattcccaggctggagttgatttaatcttcattaggctggcaaacaccatctctaatttatcatttatttagtagagggggggccttgctatgttgcccaggctggtattggaaactcgggctcaaacaatcctccattcttggcctcccaaagtgctgggattgcaggtgtgggccactgtgcccagcttccaatttcttaaaaattaaatattaagaatagcaaatgatcaatagacaattacctttattaattaacaatatttttaaattaaaaagacatattctttattcagagacttagctttaggtatgattagtaaaagaaaaattataagttatatt

SEQ ID NO: 101390 - DNA, 417 bp, Homo sapiens
  misc_feature (1)...(417): n = a,t,c or g
gctgcgagaagacgacagaaggggttgaaagaccagtagacgctcctctactctttgagacatcactggcctataataaatgggttaatttatgtancananaaaaaaaaaaaaaaaaaaaaaaaaaaaaaaaaaaaaaaaaaagggggggcccttttaaaagaaaaatttttttccccgggggggggggagaaaaaattttttttttaggggcccaaaaaaaaaattacggggcggggttttaaaaaagggggggggggaaaaacccgggggtacccaaaaaaaaaggtttggggaaaaaacccctttttcccggggggggaaaaaaaaaaaaacccggnnnnnnnnnnnggncgtttttcttgttgatcatggttaaactagggggcaaaaggcaaaactttctatgcccgaaat

SEQ ID NO: 101391 - DNA, 413 bp, Homo sapiens
tttctgcatcctgaggcagaagaaggcagccattttgaaaacccaattttatatcaaatcaaagtgagtgcacacaatagccaagatatggaaacaacctcaatgcccatcaatggatgactagataaagaacatgcggtatttgtatacagtggagtaatattcagtcttaaaagagagagaaatcctgttatattgggggcattatgctatgtgaaatgagccagtcacaagcacaaatgctgcatgactccacgtacatgaggtacctgaaacagttagacatgtagaagcagagagcagaatggtggttgccaggggtttggggagttgctaaccaatgggtgtcaagtttcagcaaagcaagatgaatgagtcccagagatctgctgtccaacattgtccttatagtt

SEQ ID NO: 101392 - DNA, 405 bp, Homo sapiens
  misc_feature (1)...(405): n = a,t,c or g
aatacattggggggttcgattccttccttttttgtctagattttatgtatacggcttcttcgaaagtgtggtacggtggggggcatccatatagacactccaggtttatggagggctcttctactattaggacttttcgcttcgaagcgaaggcttctcaaatcatgaaaattattaatattactgctgttagagaaatgaatgagcctacagatgataggatgtttcatgtggggtatgcatcggggtagtccgagtaacgtcggggcattccggataggccgagaaagtgttgtgggaagaaagctagatttacgccgatgaatatgatagtgaaatggattttggcgtaggtttggtctagggtgtagcctgagaataggggaaatcagtgaatgaagcctn

SEQ ID NO: 101393 - DNA, 401 bp, Homo sapiens
cactcacagacgcatcataatcctctctcaaggactttaaactctactcccactaatagctttttgatgacttctagcaagcctcgctaacaaaaaaaaaaaaaaaaaaaaaaggggggggccgtttaaaaaattcccttggggggccaaaatataaccggagaaaccatgaataaattttttcttaaaagggggggtaaaaaaaacgcggggggggacttttgggaagaaacctaattttgggggggggaaaaaatgggaaaaatcctcaaaaaaattataaagtcttaagggaaaaaaaaaattttaaagggtaatatgggtaaaaaaacgcaaaatactttttgttttaaaaatttgaaactcctttggctccttcatttgtgagtggtgttttttat

SEQ ID NO: 101394 - DNA, 410 bp, Homo sapiens
  misc_feature (1)...(410): n = a,t,c or g
cactcacagtcgcatcataatcctctctcaaggacttcaaactctactcccactaatagctttttgatgacttctagcaagcctcgctaacaaaaaaaaaaaaaaaaaaaaagggggggcgcccttaaaaaaaatccctgggggggccaaaataaaacggggtatggaaataaaaaatttttcccaaaaagggggggaaaaaaaaacccaacgggggatttttggaaaaaaaccttatttggggggggggcaaaattgggaaaaactccctaaaaaatttaaaggccttaagggaaaaaaaaatttttaaagggtaaaagggtgaaaaaaacccttattttcctgggtgtggaaaagttgggnnncnccnnaggtagaagacaagatttttattttattgttacgctgct

SEQ ID NO: 101395 - DNA, 422 bp, Homo sapiens
cccacgcgtccggcataagataaactcacttttacctccatctaaaattatcctgttctgatgccaattcaatttcagctctgcaagttcttgtcaggctaatctttaaacattgagtgatcttgagagattgttaatgaaagcagtgagtcattttttgatgattgatttgttggaaaaatgttgatgtgttttaaaaaatcaatcatcaaaaaaaaaaaaaaaaaaaaaaaaaaaaaaaaaaaaaaaaaaaaaaaaaaaaaaaaaaaaaaaggggggccccttttaaaaaattcctggggggggcccaattttcccgggggggaaaaaattttttttttcttttttagggggggtttttaaaaacccccggggggtttttgggaaaaaacccttttttggggggggaaaaaaaaaaaaca

SEQ ID NO: 101396 - DNA, 446 bp, Homo sapiens
  misc_feature (1)...(446): n = a,t,c or g
nattgttaccctgcggtaccggnccgtttgactccgtcgacccacgcgtccgcccacgcgtccgtttcacccatgggaaaatgataattttttaaagttcagctatggtaagagccttggtttattaaaacttagactgtcttttctgtaaacgattctgaggcaggagaattgtttgaaccccagcggcggaggttacagtgagctgagattgcaccactgcaccactctagcctggacgacagagcgagactccatctcaaaaaaaaaaaaaacaaaccctctttgtttttaaatcattggaaaaataatttgaaattttgggcggggggttatattaccccacacacacacacacacacacacacacaaagaaggggcgattttttattggttttaaatttatttggccattttttggaaaaacgggaaaagtgcattaaaan

SEQ ID NO: 101397 - DNA, 387 bp, Homo sapiens
cggctcaacattttttgtagccacaggcttccacggacttcacgtcattattggctcaactttcctcactatctgcttcatccgccaactaatatttcactttacatccaaacatcactttggcttcgaagccgccgcctgatactggcattttgtagatgtggtttgactatttctgtatgtctccatctattgatgagggtcttaaaaaaaaaaaaaaaaaaaaaaaggggggggcccttttaaaggacccctggggggccccaatttatccggggaaggcaaagtaaaatttttttccttaaagggggccgattaaaaacctgcctgggaattttgggaaagaaccctttttttggggggggaacaaattgggccaacctccca

SEQ ID NO: 101398 - DNA, 389 bp, Homo sapiens
tcccagcatgagtgacgcagaaaatgggtgatttctgcatttccaactgagatactgggttcatctcaccggagattgtcggacagtgggtgcaggacactgggtgcagtgcaccgagtgtgagctgaagcagagcgaggcattgcctcacctgggaagtgcaaggggtcagggaattccctttcctatccaagggaaggggggacaagcagcacctggaaaatcgggtcactcccaccctaatactgcacttttccaatggtcttagcaaatggcacacaaggagattatatcccgcacctggctcggagggtcctaagcccacggagcctcactcattgctagcacagcagtctgagatctaaccgcaatgcagcagtgaggctggg

SEQ ID NO: 101399 - DNA, 400 bp, Homo sapiens
  misc_feature (1)...(400): n = a,t,c or g
tttctccattttggtcaggctgctctcgaactcctgacctcaggtgatccacccgcctcagcctcctaaagtgctgggattacaggcgtgagccaccgcgcccagctagtatgcacttttataaccatttatgtctttttaaaaaattcttcctactagattgtgagttccatgagggcagagacagtcttcattcatctttaaatttctgggaccatgtgcagtgcctgcagaaatcagttatacaataaacgtctgttaaatgaatttgtttccctctagattcgaagtttagaaaacaaagacctaccaatcaataggatttatgggcgcctcatggcaatcaattcattaaaaatatttattaaagaaaaagggggccaagtgtggtggctcatgn

SEQ ID NO: 101400 - DNA, 382 bp, Homo sapiens
  misc_feature (1)...(382): n = a,t,c or g
cccacgcgtccggctgggacagatccttagttgcccctcttaccagcccaccaccttgtgcatattatgcctagcaatccataatggcaagctccgagtccaccaagacaccccaagtagtaaatcatggtgagtatcacctttagagtctggactgattgagaagtacaaaaaaaaaaaaaaaaaagaaaaaaaaaagaaaaaaaatataaaatatatgaatcacaacaatgctcgttgnntnngagaaaaaaaaaaaaacccccgcaggaaaaaaaaaaaaccctcccccttaaaagaaggaactaaaaaaaaaaaaagagggggttggggggggagtcttttttttgggggggggaaattttgttagaaaactcaataa

SEQ ID NO: 101401 - DNA, 401 bp, Homo sapiens
  misc_feature (1)...(401): n = a,t,c or g
ctagtcacattcttgttttaagtgcctttagttttaacagttcactttttacagtgctatttactgaagttatttattaaatatgcctaaaatacttaaaaaaaaaaaaaaaaaaaaaaaaaaaaaaaaaaaaaaaaaaaaaaggggggggggctttaaaaaaaaacctggggggggccaaaaaaaaagggggagggaaaaaaaaaatttttttttttaaagggggggaaaaaaaaaaccctgggggaattttgaaaaaaaaacttttttttgggggggggaaaaatggggaaaaaccccccaaaaaaaaaaaagcttttggggaaaaaaaaaaattttaaaggggaaaggggggaaaaaaacccccaatcccggggggggaaaaagaattttnanncccn

SEQ ID NO: 101402 - DNA, 443 bp, Homo sapiens
  misc_feature (1)...(443): n = a,t,c or g
tgtcttttaggatggggactcataccgaggagaaatggtgacagtgggatcaaaatgaagcaggtcaggcatggtgggtggtgcctgtaatcctggctaaggcaggagaattgcttaaagtgaggaattcgagaccagcctgagatgcatagtaatacccagtctctaaaaaaaaaaaaaaaaaaaaaaaaaaaaaaaaaaaaaaaaaaaaaaaaaaaaaaaaaaaaaaanggggggggccctttttaaaaaatccctgggggggcccaaatttcccggggggaaaaaaattttatttttttttttttgggggggtttttaaaaaccctctgggggtttttgggaaaaaaccttttttttgggggggggaaatttgggcccccccccccccaaaaatttaaaccctttggggagaaaaaaaatttttgggggggtgggggggg

SEQ ID NO: 101403 - DNA, 416 bp, Homo sapiens
ggcacgagcaagaacacctctgattactcctgccatgatgacccttggccataatatgagttatttccacactagcagagaccaaccgaacccccttcgaccttgccgaaggggagaccgaactagactcaggcttcaacatcgaatacgccgcaggccccttcgccctattgttcataggcgaatacacggacattattataagaaacaccctcaccactacaatcttcctaggaacaacatatgacgcactctcccctgaactctacacaacatattttgtcaccaagaccctacttctaacctccctgttcttatgaatgcgaacaggatacccccgattccgctacgaccaactcatacacctcctatgaaaaaacttcctaccactcagcctagcattacttatatgagat

SEQ ID NO: 101404 - DNA, 498 bp, Homo sapiens
cttcgattagagcgcctgtcggaattcagcacgaggagagagagagagagagagagagagagagagagagagagagagagagacacacgtattgatatatatattgtgtctcaaaagaggaaaaaatatattgtctaaataagaagaaatattttcgtgtatcacgctgaattttctaaaagataaccgtgtgggctggtgccaaaataagagtatatagaggacactgattaggtgtctatactttagcgcgccctctaaagatatctatatttcttttgcgtgcgcgtgggtgatcagtttatatacagggtgcaacacatagtattcattagagacatgaatatacaagtgatttctgtgagtggtatctctcttgagtgagcagatacacaaaataatctgcatatatatgtgtggcgcatttgactcactcttgagaaattcttatacgtgaagaggattagcccttagggttttaatacctgacacaggagg

SEQ ID NO: 101405 - DNA, 487 bp, Homo sapiens
cttgcccgcctgcaggggatgacccacgctgctgcgctttggaggctggaccatcgtggggcctgtctgtgcccacttttcccccattcaagagttaccacggccaggcgcagttgctcaggcctgcaaacccagcactttgggatggcaagacaggaggatcgcttgagcccaggagcttgagaacagcctggacaacatgagccagccaggcccctgggcctggagcatccacaggaggaaagtacaagaaccctggcaccctgccaagcagcagggattcttcagacacccaagggctggtttgctgggaaggactcatgtgaccagaaggggaaactgaggcactgctgagcaccaacagtcctggagagctttaagaatggttgccatctgaggccaggcatggtggtttatgcctgtaatcccagcactttgggaggccaaggcaggcaaatcacttgaggtcaggagttcgaggctgtca

SEQ ID NO: 101406 - DNA, 440 bp, Homo sapiens
ggctgatcgcctgcggaattcctgagaggcgtgagagagagagagagagagagagagagagagagagagagagagagagccctaccccccctcacacatttacactgacaggaatagacactgaatgcgccacgaggaaagaacgctgtttctgtggggtagtggggaggtcagagacgcggcgccatgggtgtcccacattcccaacaccgctctgtgatcaccgtgggaatcttttgactcaagacagggacaggcgcggggctctcccttctctcctcttgtgtaccccctccccctggagggcatggtgtctgcgggtggcactgatctatgaccctccgtgatggtgatgtacgccacagacagagcctccctatgagtgagtatagtgctggtgagtgtgtcatatacccacacgccatgtgtgtctaagatac

SEQ ID NO: 101407 - DNA, 460 bp, Homo sapiens
ggaaattagtgaagagtgaatgtaacttattacccacagggacaattccaaatgaaggccttaaatgatgctcagctaagctggttcttgtgtggcctctgtaccttcaaaagctgccgagtcctatgattacacgtgatgggacttgtacacttgaagtgaaacagttttaaaacttgctttgtttagaattcccacctcatttttccatggacaaaagtattctttatgtcctagtgcacttacaatttggtattacctgggagtgaaaagaaattttacagccatgcctaactgacttcttgaggtaacattgaattggcagaacactttcttccattttcaccttccctctacaggaattcacattttttctcatcttatattgttctatatgagaccctctatcagttgtttactaaccattctccgctaagcttgtcagcgactcttgactcct

SEQ ID NO: 101408 - DNA, 498 bp, Homo sapiens
ttttttttttttcagcacgaggcagccgaggctgtcgtttattgcagatggacacggattcagggaggtgaagaggcagatgggctgtgggctctgtgctcagcatcccacagcaggaggggcaggagacagagctcaggatgggatcttcctgatggtggaggacccggcctgaccacagagtagctgcaagaggcaaggccccgagctgacaccccctgggcccccattccgcgggatgacggctccagagacgctgagcgatgtcattaggaagaaggccggaccaatccagagacggtgcatcctcggcgtggagcacagagctctcgagggctggcgatccgggttggggtggaagggagagttacccgggtcttcgcccctccggcggcctctggcgtctctctgggtgtctggcggctcggacggcggtcagggtcgctgtagcggcggcggcggctcagcggcagctggagctggggtcgcggcccgccg

SEQ ID NO: 101409 - DNA, 490 bp, Homo sapiens
  misc_feature (1)...(490): n = a,t,c or g
ntttgccccgcctgcacgaattcggcacgaggcgacctgngagaggggaattgctggaactgcttccttctctatacccttctctatgttttattgcataaataggaaacattgttgaaaagactttcctggtaaactgttctgaattttacgtttatcgaaatatctccaaagactcaatttagaactttattatgcccttatttatttaacatttctttgtaacaaacatgtatattgcccttatgttgtgccaggcagtgctcaaagcactttcttcccagagagagatgaattctactgttctcccaaacctttgttagctactaaaatatacacattttgctatcataaataccagggtggtggccagtgcggtggtcatgcctgtaatcccaggacgttgggagggaggctgaggcaggaggattgcttcagctcaggagttccagaccagcctggngaacatggagaaaccccaactctacaa

SEQ ID NO: 101410 - DNA, 491 bp, Homo sapiens
  misc_feature (1)...(491): n = a,t,c or g
nattgatagacatacgccagngcggnggaattcggttgtttggcctttggactcttggacttaacaccagtggcttgcctggggcttttgggccttaggccacagactgaaggctgcactatgggcttccctactcttgaggcttttggactcagactgaaccactactggcttctttcttcctcagcttgcagacggcccaccgtaggactttgccttgtaatcatgtgagccaattctccttaataaactccttttaatataaaaaaaaaaaaaaaaaaaaaaaaaaaaaaaaaaaaaaaaaaaaaaaaaaaaaaaaaaaaaaaaaaaaaaaaaaaaaaaaaaaaaaaaaaaaaaaaanaaaaaaaaaaaaaaaaaanaaaaaaaaaaannnnnanaaaaaaaaaaaaaanaaaaaannnnnnnnaaannggggnnnnnaaaanannnnaaaaaaaaaaaanaaaaannnattnnnntttaaaaaaaaa

SEQ ID NO: 101411 - DNA, 492 bp, Homo sapiens
  misc_feature (1)...(492): n = a,t,c or g
cgatggtacccnnnaatggagacctcnatgatgagctgtggaaancctcgcacttccattgagcatatattgatatgcttaatgatgcttctgaagatctattcatttttcctttattcctttatattctgtgcctcagcccagatcatttcaatgcacatatcctcaagattgctgattctttcatttcctgctcaaatctgctgttgagcccctctagagaatattttatctcagttattacacttttcagactccagaatttctatttgccctttaaataacttaatctgtcgatattctgaatttggcggtgcattgatcccatactttcatttaattctttagacatggcttcctttagctcattgaacatatctaaaatacatgattggcctggcacggtggctcacgcctgtaatcacagcactttgggaggccgaggcaggcagatcaccggaggtcaggcgtttgagaccagcctggccaact

SEQ ID NO: 101412 - DNA, 456 bp, Homo sapiens
  misc_feature (1)...(456): n = a,t,c or g
gaaatcttagacactcggaantcggtagaaccgtcgacanacnccctgcctgaaaaagatttttcatggtcaggtatttttaaatacttgtatactttggtcagaattctgtatacattaaaaaaacatgttctctttaagaatattctggccaggcacggtgactcttgtctgtaatcccaacacttttggaggccaaggcgggaggatcacttgagcccaggagtttgagaccagcgtgggtatagcgagacctttgtctcnnaaataaaataatactaaaacatttataaaatatgattttttttattgagtggggggccttttagaacccccgtgtggccccccgggtctcctcttgtatccccacttaatggggatgccctacccacaccccccttcctgtgggggggtcgccccccccaaccctttatattgtattggaaaaaaagatgc

SEQ ID NO: 101413 - DNA, 457 bp, Homo sapiens
  misc_feature (1)...(457): n = a,t,c or g
natggangacccttgaagacccactatcagtgtggtggaattcgcttggttaagtaaaccatagttcacctatattgagacatgaaaacaaataagacaggcatgttcattgaattacataaaaatgtaaaaataatatgcagaatataaacattcttataaacaaggggaaaatcgctcttagtacatgtacagaaaaaagtagaggaattttactctataaggatgaaattatagaatgctttcattttctaggttaaatatatctgtaaggtttaaattaattgtaatgattatgcattggttttgtaattttaataagttattttaatattatggaaaactggtactgccggcccggcacagtggctcatacctgtaatcccagcactttgggaggctgaggcaggcagatcaccaggtcaagagatcgagaccatcctggccaacatggtga

SEQ ID NO: 101414 - DNA, 477 bp, Homo sapiens
ggggcccctccaatcgagatcatagtcagtgtggtggaattcccaaactggaaataaagttaaattcaccattagctggtgaatagataaacaaatgaggtgtatccatttaatggaatactactcagcaataaaaaggaatgaagtattgatcaatgctacaacaacatggataaaccttaataccattaagctaagtaaaagaagccagacattaaaaagcaatacattgtaagagtccctatatatgagatttctgtaaaggcagaaccacagagacagaaaacagaagcagagattgactgcaaaggggcatgaggaaactttttggggagtgttctaaaactggattgtggtggtagttgtgcaactctataaatttactaaaataatctaactatacatttaaaatgggtgaattttatggaatgtaagctatgcctcaataaagctgcttcttaaataaaagaatgtatt

SEQ ID NO: 101415 - DNA, 475 bp, Homo sapiens
  misc_feature (1)...(475): n = a,t,c or g
gcggcatnnntttgattcccatcgaagantcctatgtcagtgtggtggaattccccggctcgagcggcccaacccttccctcaccctggcaccagacacccaggacttatttaaactctgttgcaagtgcaataaatctgacccagtgcccccactgaccagaaaaaaaaaaaaaaaaaaaaaaaaaaaaaaaaaaaaaaaaaaaaaaaaaaaaaaaaaaaaaaaaaaaaaaaaaaaaagggggggcctttaaaaaaaaagggccctaaaaaaccccgaaaaaaaccccgggggggttttaaaaggccccccctttttgggggggccccccccccgggtttttttttacgggggggggggccccccccattgtttttttaaaaaaaaaaaaaaaaaattccctccatttggggaaaggggggtttttaaatgggggnnnnnanaaaaaaaaaggagccaaatggttgttgataat

SEQ ID NO: 101416 - DNA, 462 bp, Homo sapiens
ttgaccttagtagaccctactcagtgccgtggaattcgtgtgtggtggcttccacctgtaatcccagcaatttgggaggcggaggtggaaggatcacttgaggccagcagttcaagaccagcctgtgcaacatagcaagaccccatctctacaaaaacaaacaaaacacagcaacaaaaagactaaaagatctactatctgtccctttgcaaaaaaagttcaccaagcccatctaagactttgaaagactcccaaatgaccccagatttgaaaataatactcaaaggggctctgtctgtaggaggagccttggcattggctggcatgttaatttcctaggggtgtcatcacaaattacaacacacctagtgtttaaaacaacagatattaactctcacaattctagaggccagaagtgcaaaatcaaaatgtcagcaggggccgggtgtggtggctctcgct

SEQ ID NO: 101417 - DNA, 903 bp, Homo sapiens
  misc_feature (1)...(903): n = a,t,c or g
atcctacacttgtaagataaaagggactttaataatcaagattttcttgaagatttgttagaaataatgtcttatttctggtaacctttccctttttgtatttataactctactaaccaaattacctatcaataaaccattactataatattttaaaacaacctatgtttatcaagcttactctctgagtgacagaatatactaaataaagaattttttaatgaaaaaaaaaaaaaaaaaaaaaaaaaaaaaaaaaaaaaaaaaaaaaaaaaaaaaaaaaaaaaaaaaaaaaaaaaaaaaaaaaaaaaaaaaaaaaaaaaaaaaaaaaaaaaaaaaaaaaaaaaaaaaaaaaaaaaaaaaaaaaaaaaaaaaaannnngggcggccgggggaggaggggggccccccccccccccggggaaaaaggggggggggggaaaaaaaaaccacccctttttttttccccccccccccgtttttttttttggggggggggggccccccccctttttttttttaaaaaaaaagaaaagagctcccctccttggtgggggggggtgtgttttttttgcgggnncccnccgagggccgagaccgcagaatgtgcatgagcgcggtcgagcgcccatggctctggggagccctctggtcgttttagctagtccgaagcgggcgtacgggttctccccggcacccgtggcggacgctcgctctcgccccccagccaccctttcttttcctgctgttccgcgcgcggccgcgtgtcctcgtcctcgaggctgctgagtgccttgacgcgcctcggcccgatgcgtcgctaggcgattactcccatgcccaggtgatctagtgcgctccgagcgtgcggtcgcgatcgatgcctcggcctggtccctctcgctcg

SEQ ID NO: 101418 - DNA, 464 bp, Homo sapiens
  misc_feature (1)...(464): n = a,t,c or g
caggcccntnnnatagagacctagagacatctacccagagcggnggaattccaaaataatgtcttttgccgcgacttggatgaagctggaggccattattcttaagtaactcaagaatagaaaaccaaatattgtatgtactcacttataagtgggagctatgaggacacaaaagcataaaagctatgaggacataaaggcataaaaatgataaaatgtaatttgaggactcgggggaaattggaagaaggatgagggataaaagactacatattgggtacagtgtacactgcttgggtgatgggtacactaaaatctcagcaatcaccaccggagaacttatctatgtaaccaagaagcacctgtacccccaccccaaaactattgaaataaaaaaattggagccccaaaatacaatctattaaaaacctttaattgcacttcatcacaatttaacacttgct

SEQ ID NO: 101419 - DNA, 463 bp, Homo sapiens
  misc_feature (1)...(463): n = a,t,c or g
cccccatcgagaccatagtagacgtctnggaagtcccgagcccgggcacactatctttaactggaagctgctttcctatgtcactcctctaaacattaatttttataaaagagtgtaaaaccttcctaggagagatacaaataaattttaaaaattgtttctaaatgaaatgtcgatatcataatttgaacaaccacttaagctatggagttttctgaaatgaataaccattaactgtgtttggttttcaacccctgtctattaagtgcattcagtgttatcaggcctatcacaatcattattcctttttttaaaaaaaattgaacgctgcgcgtggtggctcacgcctgtaatccaagcactttgcacctgcgaggcacgtggatcacctgagggtaagagttagagaccagcctggccaacatggagaaacctcatctgtactacttaagtgagaattagg

SEQ ID NO: 101420 - DNA, 481 bp, Homo sapiens
  misc_feature (1)...(481): n = a,t,c or g
tgtggccnnnnnagggggaaatgagaccatagaactgaggctatcgnacagngcggnggaattccacaggccaagagagtggtatggcatatttaaagtgctgaaggaaagagacttttaccctagaataatatatccagcaaaaataatcttaagacatgaaggagaaatgaagacattcccagacaaacaaacactgagacattttattaacactagacctgtactacaagaaatgctaaagaaagtacatcaatcagaaataaaaggatgttagtgagcaactaataatcacctgaaggtaaaaaaaaaaaaaaactcacttggttggtaggtttaaataaaaccccggaatattataagactgtaactgagggggcaactactcattctaagtatgaaggggaaaggatgacccaatcaaaaggttaactatacactgcacactatattaaggtgttatcagataaaataatgggtt

SEQ ID NO: 101421 - DNA, 437 bp, Homo sapiens
  misc_feature (1)...(437): n = a,t,c or g
ggagcannatcgagacatttgacagcgtgggaattccaaaggctatcatcttaaaatgattcaacaggaggagataaggaagctcgaggaagagaaaaatcaactggaaggagaaatcatacatttttataagatgaaagctgcctctgaagcactgcagactcagctgagcactgatacaaagaaagacaaacatggtaagaagcagtagtttctcttactattctgagagccttatcattctacatcccatcttcctgtgagattgtctttgtagcatttaactctaattgcagttctctttttaaaaattggcttgcttattgtatattttccccaactaaagcgtgaactcctagcagggcgtggtggctcatgcctgtaatctcagcactgtgggaggccgaggtgggtcgactacctgatgtcatgaagcg

SEQ ID NO: 101422 - DNA, 471 bp, Homo sapiens
  misc_feature (1)...(471): n = a,t,c or g
ggggccaagnnaagnaacactgatactctaggaagtttgatggccttctgtagagacggtcttgccatgttgcccaggctgttcttgaacaccggcctcaagcgatcctcctgcccggacctcccaaactgctgggattataggcatggaccaccgtacttggcctcatttgtcctcttgaaatgaacacttagcattcttctacttccttactaccacaaaatgcatacatgcgtcttcatggtgctgtgtacaaatttctgtggcggtgtgtgtccaggaatggaattgctgtgtcttaaggtatatgggtacctttcattaaagcatacttttcattaaatactgccaaattagtgtctaaaatggtcatatcagtttatacatttatattggccagtatttgaaagtctacttctaatttttgccagtctggcaggtataatcttatctttgttaacatgttcactt

SEQ ID NO: 101423 - DNA, 472 bp, Homo sapiens
  misc_feature (1)...(472): n = a,t,c or g
cggtgtcccaggnttgcnaatacctaactgcccgacctcgattgnanaanncnagnacantaccacctnggtaatgagctccattacagaaagtggaacataagagaatgaaggggcagaatatcaaacagtgaaaagggaatgataagatgtattttgaatgaactgttttttctgtagactagctgagaaattgttgacataaaataaagaattgaagaaacaaaaaaaaaaaaaaaaaaaaaaaaaaaaaaaaaaaaaaaaaaaaaaaaaaaaaaaaaaaaaaaaaaaagaggggcccctttttataaaagggccccaaaaaaaccccggaaaaacccctgggggtttttttttagacccccccttttgggggggtccccccccccggttttttttttccgggggggggcgcccccccctttttttttttaaaaaaaaaaagaaaaaatctccttttttgttgggaggg

SEQ ID NO: 101424 - DNA, 492 bp, Homo sapiens
  misc_feature (1)...(492): n = a,t,c or g
tatcgaaacctctcgcannnncntaccgataccctccgcaagngccgnggaannccatccatgccattctcaaaatttttgacaacatattcttcctaatgctgaggataaaattcccttttgtgttggtatttttctttatcacgctttttgtactacattcagaatctttatctcttaacatgttttggcctgcgtgtgtttcttccacttggtggtaacatcaattagcatagagtttagaaaaatgcttccccaatttaaaaaatcacttgtactacatcttctttcttagttctgatttgtattaacttataattatattttttgcttttgctgtactaatgctgtgttaattacctaagttttttttgttttgaattgtttttgcatttgagacggagtctcgctctttcgcccaggccggagtgcagtgtcactatctcggctcactgcaagctccacctccctggatcatgccattctccggcc

SEQ ID NO: 101425 - DNA, 460 bp, Homo sapiens
  misc_feature (1)...(460): n = a,t,c or g
agcagcgcnnncactgagcctanggcatngcccaggcngnggaattagctttttgagccaggttgagccaggagaaagaatttcacaaggtaatgtcattagttaaggcaacgaccggccattttcacttcttttgtggtggaatgtcatcagttaaggcaggaataggccatttaaatttcacttcttttgtgattcttcagtgacttcaggccatctgaatgtatatgtgcaggtcacaggggatatgatggcttagcttgggctcagaggcctgacagtaagacaggtttcaatgaccagtcaggtttgggaatcgccggtttggggttatgctatcagttattgggtgaatttttggatttaactgtttctcatctttctcttattgtcctaatttcttcaactggcttgtgaagttaatattcagagctgaccattcttagcatagctgtgtcca

SEQ ID NO: 101426 - DNA, 449 bp, Homo sapiens
  misc_feature (1)...(449): n = a,t,c or g
ctaatgcacctccgatgancggcatgaaaacgacagangncctgncccagctttcgtttgcattctaagcaccccctccccaccatgcctggaggcctttaaggtgggaggggtggggttagtaaatgggctgccattccagttaaagtaataacagttctttttaacctaaggatgactgggttgccgtaaatatttattttatctgaatggaggtttaaaatgtctgtatataaagtgcgtgtgtgtgtgtgtgtgtatatatataggtgtatatataggtatgtgtgtctatatatgtatctatatatatctaatggcttcttaaaatcaggtaacatcatttctttctttctatgtctttcttttaaactatagatgaattcccttggtttccctagacagactatcaccatggaaccagtggctggcattttaaccttgttttt

SEQ ID NO: 101427 - DNA, 466 bp, Homo sapiens
  misc_feature (1)...(466): n = a,t,c or g
agaggccggccnaggcggcaatgagngccatccgaatgatcgccctcggacagacnggtgcaattcgcttacctgcattcacaagtctaaccctgagggtatttttcttcagccctctttaagcatttcctaacaaaacagtgtcagtaacacaactttattattcaattctcatctcatcaaagcatcatgacattattttattttgaaatgacatggttcgagggccctgacagccaaaaggatatgtctaccaggccttaaactttttttttttttaactaccccccccccagtaaaggaagaattatttattaaatgaatgaaccaatttatttatttatttatttattttggagacggcgtcttcctctgtctcccaggctggagtgcaagggcgtgatcttggctcactgcaacctctgccctccgggggcaggtgattctcttgcctcagcctcccgag

SEQ ID NO: 101428 - DNA, 452 bp, Homo sapiens
  misc_feature (1)...(452): n = a,t,c or g
nttcgagacactagatagagcggcgtaattcgnttacctaagcaagcctgggcaatggtgggcgcccctcccccagcctcgctgccgccttgcagtttgatctcagactgctgtgctagcaatcagcgagactccgtgggcgtaggaccctcccagccaggtgggggatataatctcctggtgcggcgttttttaagcctgtcggaaaagcgcagtattcgggtgggagtgaaccgattttccaggtgccatctgtcacccctttctttgactaggaaagggaactccctgaccccttgcgcttcccgagtgaggcaatgccttgccctgcttcggcttgcacacggtgcacgcacccactgacctgtgcccactgtctggcactccctagtgagatgaacccggtacctcagatggaaatgcagaaatcacccgtcttctgcgtcgctcaa

SEQ ID NO: 101429 - DNA, 443 bp, Homo sapiens
  misc_feature (1)...(443): n = a,t,c or g
nattgatgtccatctgaacagncttgaggaccttctgcanacacgaaccagttctctcaatgcataaagaagagcgtaactccagacttgatggaagagatgtataagaaagctcatgctgctatatgagagaatccagtctatgaaaagaggcccaagaaagaagttaaaaagaataggtggaactgtcccaaaatgtcccttgctcagaagaaacatcaggtagcttaaaagaaggcaagctccctcagagctcaggagcaggctgctgagagctaaaccaaacaattttctataaagatttttcagataaagacgataaacatatggacagaaaaaaaaaagatttaacctctttgagtctcagtattcccacctctaaatggggtcactaatatttctaacccaggcctcttataaggatcaagtgaaaaaatttatgt

SEQ ID NO: 101430 - DNA, 495 bp, Homo sapiens
  misc_feature (1)...(495): n = a,t,c or g
aggagttaggggnnnnnnnnnattgtagacctgaatcactgtcgnggaattcgnatgttgcccaggctggtcttgaactcctagcctcaagtgatcctcctgccttggcctcccaaagtgttggggttacaagcgtgagccaccacgtctggccccactttctaatgtgctgacctggccgtatccttcccctgcctaaagccttgccctggggcagagtgggtttggagctcggccttacttcctgccctggggatggaggacaggcagcctcctgtttctgagcctgtctgctgtactttgggctggtggcatggcctcggtgcctcagtcttcccacacgcaaagtggagcgacagctcccacctcatagggacgctataagaactagcgatgtggggaccgggctaagaggggagccggccacagtgagctcaataaatgtctgctgctgccaaaaaaaannnnnnnnnnnnnnnnnnnnnnnnnnnnnnn

SEQ ID NO: 101431 - DNA, 576 bp, Homo sapiens
  misc_feature (1)...(576): n = a,t,c or g
agaacggagctcgatcacantngnangnnncnctcgaacaccactccgagnggngcaattcaccgcgcccggctccatttgttttttttagacggngcctcggtaaagacttcaagtgtgcaccatggttttcggcacttttgatttctaaggctcagggttgaaaaccatgttgcagataaagctgtttcagtgggacatccactaatttcccactttgcttatctgaggcgaaaagcacctaacacctcagcaatttctttttttttttttttttttgggggggattttcctcccccagggtgggaccaaatttttttaaagggccggggagggggatcccccgggggtgggaaatggaaacccacccggcccaactggggaaaaccttgtctggacaaaaaaaccaaaattaacccgggcggggggggggctttttgtaaccccacttcctgggagggttgggggggaaaatttgtttaaccctggagggggggggttgaagggacccaaatatcgcccattaaattcaacccggggcgaaaaaggaaaattttgttaaaaaaaaaaaaaatn

SEQ ID NO: 101432 - DNA, 403 bp, Homo sapiens
caagtcgcttgctctttatgatttggactcaactacctcatgaagcctccagactggccatgatagtaattttccctagattatcttccacaaaattctattctcaagcagatgtaagatctataataaatacctatgaaattgctgtgaaagaaactagagtaatcaaccattgcattttttatgtgaagttttgtaatggagaaaaagttaatcaagaataaagattcaggcccaggtagtgtgcatctatagttgcagctactcaggaggctgaggcaagagaatctcttgagcccaggagttcagggccagcctgggcaacataatgagacccctacctcttaaagaaaaaaaatcaagattcaaatatgaagaacagacgttagtagacaaagtgtga

SEQ ID NO: 101433 - DNA, 338 bp, Homo sapiens
atcaacaccctcctagccttactactaataatcattacattttgactaccacaaggaatcggctacataaacaattccaccccttacgagggcggcttcgaccctatatccaccgcccgcgtccctttctgcataaaattcttcttagaagctattaccttcttattatttgatctagaaattgccctccttttacccctaccatgagccctacagacaactaacctgccactaatagctatggcatccctcttattaatcatcatcctagccctaagtctggcctatgagtgactacaaaaaggattagactgagccgaataaaaaaaaaaaaaagg

SEQ ID NO: 101434 - DNA, 527 bp, Homo sapiens
  misc_feature (1)...(527): n = a,t,c or g
ttaagtgacatggagagctgcaataggtgaaaatacataaacatacatttaatagaaaagttaagtgacatggagagctgcaataggtgcctattatatgtttttgaaagtataatggagtgaattatatgaaacaacattataacttacagtctctgaaaattttccaagtgaaggaaatagataaaataatgaattatatgactgcaaatgtactcgaactataagcaagataaataaaaataagtacattaaaacatattatagtaaaaatgtagaaacaaaaaggtaaaaagaaaaatcctaaaagccatcacatagaaaaaaaaatactgttaggaggaaaacaaattgcaccagtatcaatagatgccacacgacaacacatannnnaaaaaaanaaaaaaaaaaaataaaaaaaannnnngggggggggcgcctttaaaaaaatcctggggggggccacctatatacgcgggaatggaagatataaanttttttccttataggagctcattaataagcca

SEQ ID NO: 101435 - DNA, 569 bp, Homo sapiens
  misc_feature (1)...(569): n = a,t,c or g
nagataactgacagtaacactctcgatacccgctcgacccacgcgtccgcccacgcgtccgcccacgcgtncgcccacgcgtccgatgactaacacccttaattccatccaccctcctctccctaggaggcctgcccccgctttaaaaaaaaaaaaaaaaaaaaaaaaaaaaaaaaaaaaaaaaaaaaaaaaaaaaaaaaaaaaaaanannnnnnnnnggggaggggggcttaaaaaaaaaaacacggggaaaaaaaaaaaaacccccggaaaaaaaaaaaatattttttattaaaaaaagggaaaaaaaaaaaccccttttgttttttaaaaaaaaaaaaaatttttttggggggggaaaaaaaaaaaaaaaaccccaaaaaaaaaaatccttgtaaaaaaaaaaaaaaaatttttgggggggggggggggccccccctccttttgtgggggctgaaaaaaaaaaaaaaatnnnnnnnnntnnnnnnntgcttggcgctcgngttgcctcctctttctccaatgataaaaagaagaaataaaaactgtgtttattttaaaaaaaaaaa

SEQ ID NO: 101436 - DNA, 409 bp, Homo sapiens
attagttgattgacacagtgtctccctctgttgccctggctggggtgcagtggtgcaatcacagctcaccgcaaccttgacctcccagtctcaagcgatcctcccgccttgccctaccaagattctgggattacaggtgcgcaccattatgcaaggcccactccttcaactcaaaccatgaaaagtagcagccccctccggcagttgcctggcttttttctcatgagtatcccgtccttcctgctcacaaacctcccgacagccgtttccagcacagcagagtgatgctgtgaaaatgattccatttctcgcacaaaatctgctagtaactccctactttgctcagaataaaggccaccatcctcaccatgacccatgtgggttcatgccctgccctcctgcggcatct

SEQ ID NO: 101437 - DNA, 869 bp, Homo sapiens
tttatatcatgacttttaaaaaatcaactttattgtggtagaacttacatgcagtaatacagtgcatacattttatgtgtacggttttgacaaatgtatactcccaaccacccaactgtttttttttctctaagagacagggtttcacagtgttgccaggctggagtgcagtggcgtgatcatggctcactgcagcctcgacatcctgggctcaagctggaggccagctaattttttaaattttttgtagagacagggtctcactctattgcccaccccaatttttaaattaaacttcaaaaaaatctctgggccaagactgcatcctctgtttgagaatgttgtgggagagattgatgagtaatcaccatacaatctggtaagtggaaagatggtaataagttctctgcagcacacaaaagggttaacctggtcagcgaaggcttctgcactcccatctccctctgggcacacccaacccaagccaggggcagggaaatctgggtgatgccaggtgagcagggtggggatgcatgtggacaaaaattaataaaaacatgattttgaacactttttgcctgtggagttctgataatacttaaacacttttcatccttaacatactcagtgaacactttacccaaggcttcaattaaggatatagataaaatcacaaagccctacaatgcaggcatttcccttctcccttatcatagtgaacattttaaaatggagtcacccaggactgggcacggtgactcatgcctgtagttctgcactttgggaggctgaggcggatggcttgcttgagcccaggagtttgagaccagcctggtcaacatagcaagacctcatctcttttattcaaa

SEQ ID NO: 101438 - DNA, 460 bp, Homo sapiens
  misc_feature (1)...(460): n = a,t,c or g
ctgtttgcagagttgaaggagaagagccaggcgtgcggagggaaaggcctctttgggatgtctttcatcttatttcaagccaaccccatggcctccatgactttttcaaaaaaaaaaaaaaaaaaaaaaaaaaaaaaaaaaaaaaaagggggggcccttaaaaaaaaaacctggggggggcaaaaataaagggggggaaaaaaaaaaaattttttttcttaaagggggggaaaaaaaaaacccccgggggaattttaaaaaaaaaacattttttgggggggggaaaaaaggggaaaaaccccccaaaaaaaaaaaaagccctgaagaaaaaaaaaaattttaaaggggaaaagggggaaaaaaaagtttaatttgttgggttgaaaaaaatttggggnnnntcnnnncncccccccctttttggggggcgtgttttccccccctctcctcttagaagaag

SEQ ID NO: 101439 - DNA, 449 bp, Homo sapiens
ctataaacaaataaactgtcctgagcttatgcacaccttttggtttcatctccccctcagaatgtataaaaactcttggagaatgaggttccctgtctcctattatgttggttctccctttcctcatacacctcctatgaaaaaacttcctaccactcaccctagcattacttatatgatacgtctccatacccattacaatctccagcattccccctcaaacctgagaaaaagagctcaccgccctggatggcaatgcttaaaaataatgggaatcatgaggggggggggaattttaatagacccccggggggcccccaatcacaggatccccgcgaagtacctgtttttcctcttggagggcgtcataaaagttctgccgaggaagctttggggggacttcttttctttgttgggggaaagcttgaaccacgccccgtagctgattt

SEQ ID NO: 101440 - DNA, 442 bp, Homo sapiens
  misc_feature (1)...(442): n = a,t,c or g
aggtgccatcataagaagattgcttcactgatttcccctattctcaggctacaccctacaccaaacctacgccaaaaggcatttcactatcatattcatcggcgtaaatctaactttcttgccacaacactttctcggcctatccggaatgccccgacgttactcggactaccccgatgcatacaccacatgaaacatcctatcatctgtaggctcattcatttctctaacagcagctgtattaacaactctcatgagttgagaagccttcgcttcgaagcgaaaagtcctattagtagaagaaccctccatagacctggagagactatatggatgccccccaccctaccacacattcgaagaacccgtgtacattatatctagaccaagaaggaaggaatcgaaccccgcaaagctggtttcaagccaaccccatggcctn

SEQ ID NO: 101441 - DNA, 188 bp, Homo sapiens
tcatccctcttattaatcatcatcctagccctaagtctggcctatgagtgactacaaaaaggattagactgagccgaataaaaaaaaaaaaaaaaggggcggccgttttaaaggatccctggaggggcccaagtttacccgggcatgcaacgtcatatttttttccttatagggagccgtattataac

SEQ ID NO: 101442 - DNA, 437 bp, Homo sapiens
ctaagctacctttttgtatttttcatagaaatagagtctctccatgttgcctaggctggtcttgaactcctggactcaagctatcctccctccttggactctcaaagtggggttatgtttttttgatccactctgacaatctttgtcttttaattgcatcagttacaccattgacatttgaagtgattattgatatagccagattaatatctaccgtatttgttactggtttttatttgttgttcttgtacattattttatttttgccttccactctttgtctgccttttgtggtttaactgagcatcttctatcattccatctttttctccattcttagcatatgaattctacctaattttcttttacttttttatagtgattgccctagagtttgcagcatacatttacaacagatacaagcctactttcaatat

SEQ ID NO: 101443 - DNA, 430 bp, Homo sapiens
  misc_feature (1)...(430): n = a,t,c or g
aatcacctaagcctgggaactcaaggctacannnnnnttcgtgatgatgccactgcactccagcctgggtgagggagtaagaccttatctcaaaaaaaaaaaaaaaaaaccaccatgggaggggggttctccccccaaaaattttaaaaaccaaatttttgcctaaaaccagaaacccccctttttttttttcatacccccaaataaaaaatgggggtccccacccggggggggggcctcccccctgtaatcccacccctctggggggccaggggggccaaataacaaggtcaaaatttcaaaaccaccctgcccaccagggggaacccctgtttttactaaaaccccaacctttacctgaccttggggccccatccctgaaaaggaaggcagaaaaactgtttgccccagaacccattaggcggaggtt

SEQ ID NO: 101444 - DNA, 422 bp, Homo sapiens
  misc_feature (1)...(422): n = a,t,c or g
aaaaacatcacctctagcatcaccagtattagaggcaccgcctgcccagtgacacatgtttnaaaaaaaaaaaaaaaaaaaaaaaaaaaaaaaaaaaaaaaaaaaaaaaaaaaaaaaaaaaaaaaaaaaaaaaaaaaaaaaaagaagaatttggggggggggccctaaaaaaaaaaaccttggggggaccaaaacgacccgggagacaagttaaaaattttttttctaatgagggggaaaaaaaaaacaaccggtgaaatttttaaaaaaaaaaccatttttgggggggggaaaaagttccacacaccccccccaaaaaaaattgtggggggggaaaaaaaaaaattttttggggggggggggggaaaaccccccccccgcggccggggggaaaaaaaannnaggacnancgggaaaaactn

SEQ ID NO: 101445 - DNA, 403 bp, Homo sapiens
  misc_feature (1)...(403): n = a,t,c or g
ttagacgcgagcggccgcctacctccctcaccaaagcccataaaaataaaaaattataacagaccctgagaaccaaagtgaacgaaaatctgttcgcttcattcattgcccccacaatcctaggcctacccgccgcagtactgatcattctatttccccctctacctgcacgacaacacataagaaaaaaaaaaaaaaaaaaaaaaaaaaaaaataaaaaaaaaaaaaaaaaaaaaaaaaaaangggggggggttttttaaaaaaatcctaggggggccccaacacaacgcgggggagaaaattttttcctttttctgtgggggggggcataaaaaaaaccctggggggttttttggaaaaaaccctttttttggggggggaaaaaaatggaaaccccccccc

SEQ ID NO: 101446 - DNA, 481 bp, Homo sapiens
  misc_feature (1)...(481): n = a,t,c or g
acgccccccatcgcccgtcctgcagagaattcggcacgaggcgcggagggccggagacgctgcagacccgcgacccggagcagctcggaggcggtgaataatagctcttcaagtctgcaataaaaaatggcctccaacaaaactacattgcataaaaaaaaaaaaaaaaaaaaaaaaaaaaaaaaaaaaaaaaaaaaaaaaaaaaaaaaaaaaaaaaaaaaaaaaaaaaaaaaaactttggggggggggggggggaaaaaatttctttaaaaaggggggaaaaaaaaaattggggggggggtttaaaaaaagggggagaaaaaaaaaaaaacntccnncccacttacaggttttctggcctctgtttgggtgccctaattatttttggattgtcctttgaaaaatttttttaaagcactttatttaagaacatactgattaaatgcaggatcgctactaaaaaatgttttggatccttggg

SEQ ID NO: 101447 - DNA, 492 bp, Homo sapiens
cttcgccccgccatttgacccgcgctgcaggaattcggcacgagggccagactggtctcaagctcctgacctcaggtaatctgcccgcctcggcctcctaaagtgccgggattacaggcatgagccatcgcatcgggccgagaatgttagatctcttaactttggtgtcgtggaagcagcatgggctttagagtcaggcagatctgggttcaaatcctgtctggcagtctagtggtgtagcttctttctggtaagaaacctacctttcctgatgctcagtttcctcatctgtaaaatgggaacaaaaataacctgttttgtggagttgttctgtgacggtggttctcatgtgtggtagctggggcagcaccagcagcagtggcggcctcagcatcacctgggaacttgtcagaaatgcaaattctcgggcttcaccctagacctcctgaatcaggaattctgggaatgactaggcaaactattttcatgagc

SEQ ID NO: 101448 - DNA, 504 bp, Homo sapiens
  misc_feature (1)...(504): n = a,t,c or g
agatggccnnnnnnnttggancgttcgcaccgcctgcaggaattcggcacgagccgaggtcatggtggttcggagagataaggtctcaccatgttgtccagactggacttgaactcctggcttcaagcaatctgcccacctccgcctcccaaagtcctgggatttataggcatgaaccaccgcacctggcctccccaccattttattttctcccgtggctatcacaaccaggaataagagagggagggggacctcagtggtgattttatgctaaggattatggataacaccatccccccattttacaaatgaagaaactggggctcaaaaagcttaattaaatgtctaaggccactgaggcagcaattaanaaaaaaaaaaaaaaaaaaaaaaaaaaaaaaaaaaaaaaaaaaaaaatnnattaaataaaccccccgggggggggggccgcccccccaccccccctaaaggggggcgtgtaaaattgtgcgccgccgggtataa

SEQ ID NO: 101449 - DNA, 373 bp, Homo sapiens
gtgggggtgggggtaacaaatggtcgggaaccgtggcgcgtctcaggcaggcatgactggctacgggatgccacgcctgatcctctgatcccaccccaggccttgcccctgccctcccacgaatggttaatatatatgtagatatatattttagcagtgacattcccagagagccccagagctctcaagctcctttctgtcagggtggggggcccataccgaactgttttatatgatgacccacgtggcgttcactcccccatgcttacttattcgttattattcccataattctccaagtgtggacccctccgacttatcctttgcaatcggtttcccaagggtccgccttaatacattaaggggatccccg

SEQ ID NO: 101450 - DNA, 336 bp, Homo sapiens
agttttttaaaaaacccccaattcccctggcgggaggaagtcccaccagggaacccccttcccaggcccatttgttcccacaaaaccccccccgtggaaacccaccttgactgccgactgtttccaagtccccaggagggctttattttttttttaaacatcctgttttgcggcttccttggctttttttgcccgtatcccaaaaacccggccgttggcccggcccttccggaaactagcgaaggctttgaaatttttcttttcctcagggatgactcgagctttttcttttttataaactttccgaacggtcttgaccggcccggccagttgggg

SEQ ID NO: 101451 - DNA, 464 bp, Homo sapiens
  misc_feature (1)...(464): n = a,t,c or g
attgagnactgangacnttagcgccgngcggnggaattcccgtatcatcaccaagtgtcaaagaactcttagctcagtctgtgattgttttgtcgttaaattatggtccacatgccaaatccagcacacagcctcgtttggtacagtttgcaattaagaatgtattttactttttttttttttttttttttttgggaaaaaagtttttttttttccccaaaactgagttgttggggggaacttttttttagggacattcccccctcccgggttgggggggtttttttgcctgacccccccctattagtggggtaaaggggtttttcccccgcccccaatttttttttttttttttgggggaaggggggtttaccctttggtgcccgggaggtttttttttcccccggtggtattttccccccctttctcccccaaaagggtgggttttaggggggggccccccg

SEQ ID NO: 101452 - DNA, 496 bp, Homo sapiens
  misc_feature (1)...(496): n = a,t,c or g
aggggaggcnccnnagtaccccaaacttgaaagctancganacttgatnagcnaaggacagngcggnggaanncggcaaccagcttctgaaaagcccactgaaaattgcctgtcctgctggtaactgctacggggtaagatttgccttaacagtactattttctcgccaccaaaaaaaaaaaaaaaaaaaaaaaaaaaaaaaaaaaaaaaaaaaaaaaaaanggccgcgggggtttataaggggcggcctttaaatcacaaaaaaaaaaaattggaggtcaaatatttttaaaaacaatgagagatggtcccctcaaacactatatctgggagggaggaggggggttttttttttttttttttaaaaaaaaaaaaaaaaaaaataccaaactgtgtataaaaataatattcctcccganncctaaaacatctcttccacaacttttttacaaaataaataaagaataaataagaaaacatacactacaacaaattg

SEQ ID NO: 101453 - DNA, 499 bp, Homo sapiens
  misc_feature (1)...(499): n = a,t,c or g
agatggtcgnnnnccttgaaacctgaagacgtggcgagaanncctangatctgcccgcctcagccttctaaaatgctgggattataggtatgagccaccatgcctggctttctttctttctttctttttttaagatgaggggctcactgttgcccaggctggccttgaactcctgtgctcaaacgatcctccttcctcagcctcctgagcagctgggattataggtgtgtgccacgcacagcgtgcctttgcctcctaaacccctgatacactaacactgtctcgctgtccacatagcctctgctgggttgggtgggggaacaaaatgcaattaaggggaggagagatgggagcaaacactttttggacacttactctgagccaagcactatgctaagtattttcaatatacactctttcatttaatcttcacaactcgatgaggggcaatatatctccagttcacaggcaaagaaatggaggctgtaagaggttatgt

SEQ ID NO: 101454 - DNA, 493 bp, Homo sapiens
  misc_feature (1)...(493): n = a,t,c or g
gagcgtccnnnaattgaagacccatgataccctcnggaanncgcgatctctgtctcagtctcctgagtagctaggactactggtatgcagcaccatgcctggctaattttttttatttttattatttttgtagagacagggtctcactatgttgcccagacttctcttgaattcttggcctcaagtgatcctttcacctctgtcccccaaagcacttggattacaggtgtgagctattcctggtcaggaccatttgttgatcagggcatccaatgctaagatgactgcctgaggtttggctaagtgtgttgtttcttgggccctatcctaagatgggctccacccaagtttggctccaccctgttttaacgaggtcttccttcatagccaggctgagcttgtggcgtgctgcttccatgacccaaagcataatgagcagctgggtatggagggtcacaggctcaaggtctatgagatcttctatttccaaatg

SEQ ID NO: 101455 - DNA, 455 bp, Homo sapiens
  misc_feature (1)...(455): n = a,t,c or g
aatgatagcctgcgccgcngcgnggcanncangccaaggctgaaggatcacttgagcccaggagttcaagactagcctgtgcaacatagtgtaacgctgtctctagaaaaaattttaaaaattagccaggcatggtggtacatgcttgtgaagctgaggcagaagaattgcttgagcccaggagttcaaggctacagtgagctgtgatcgcgccactgcactctaacctgggcaacagagagtgaccctgtctccaannnaaaaaaaaaaaaaagaaagaaaagaaagaaaggagggcccttttcggctttggttaccttattaatttaccttcccaaacccggtttttttttgccaatttttccaccccaaacccttggtaaaaaaacatttttccagggttttctcaaataacggttagaagaaattggcctggccggcccttaaaaacaaag

SEQ ID NO: 101456 - DNA, 1620 bp, Homo sapiens
  misc_feature (1)...(1620): n = a,t,c or g
tttattctaaagtaccaacacaagggtgagttggttgaacagaatgtgtatagttggggactttcagatgattgtcatgtgggcgtgtgtgactaacagtatggttgattatacactagaatgttgtggtctagaaataatgcttaattttgttccaagcattttgttcaacctgatatgcaaacagtaatatatctcaatatcttctggaagatgaaaccttaagtcatttaaggacgcaagcagcaacattaactgttatcagactttggtttattgtaaaatttagcaaagtttttcttgtaatccctgacccattgctctgaaaacaaaagcaaaaacataattattgcttattcttttccccctactttgtttgtgctactgtaaaagaagggagaaaatcattgtaataaataaaaaatagagatgtaacagagaaaaataaatcagctcagatgaggaagtattagggaggcaacagcaataccattaaggcagtttcaaaatcaggcttcttttaaaaagggtcatcttattaaagataaaaatcacaccaaaaatatagcagcggagaagaaggataaatacaagttcattgcacaccagtcccatgcaaaaaaactngtcacttagccaaagcagtagtatttcagaatccaatttaggacgcttgtgtagtgcctgtgagtcctctatgagggagctgtcactgaattggtccaagtctgaaggggtctgatggcctgggacatcatccgccaacgtgtccagataacttcccacggaaatgccatccagcccatcactgccatcgtgtaggctgttgtagctgccacgtaaggaggtgctctgactctccaacaaactgcacaggctgccactgaggctgctgcctctgctggtaatggtggctttttcttcgatcatccacttgatggactcgatgctctcattgattacaagcaactggcgcatgagcctgacgtctgtggctctgaggttaaccatctcttgcctgaggaggtgaagcttggtttctagcctctccagggcgctagagtggctacctcgtggggagccagaggttggggaggacgaagaggaggacgacaaggagggagggaagctgcagtagctgctgccgctactgcagccgccgcnnnnnnnnnnnnnnnnnnnnnnnnnnnnnnnnnnnccgcaggggtccctgtccctttccctgggaaccggctcctccccacggagagagcgcactagactctcgggtactttgcgccccagcttcagctcgatgtctctgaggtctggcagcgggctgtcttccatgacttttccggaacggcgataatagtaataaaacgcagcagatgaaaggcagccacggcttcgaaggctgctgcgaaatcagcagacctctccgggggccagggtctctatcctccgccgctccggtgtaccgtcctttccataaccgcctatgcggtatcagccctgaaatccgcacaggacgcggggggtcgcagctgcagttcccagtccgctgcgactcctctgacactaagatgatcaagatctcctcattctctctctttttggccacctcactgcaaagttgag

SEQ ID NO: 101457 - DNA, 456 bp, Homo sapiens
  misc_feature (1)...(456): n = a,t,c or g
ganctggcggggtcnnnnnacctgatgaactgagtatcgtgcggnggaacnctggattttaactgtaaactgaaaggcaaaataacacatcaaagagattacttagaacatcttcaaaatctaggtgtatggttaagatttcttaaacaggaccaaaaaatccttagtcatgaaggaaaacagtgataaaatggattacattaagatgaaaagcttttcatcaaaaactccattaagaataaaatatgggccaggtgctgcggctcacacctgtaatcccaacaatttgggaggccaaggtgggaggatcacttgagcccaggagttcaagaccagtctgggcaatttagtgagacatcgtctctaattaaaaataataataataaaatacaaagccacaaaatggtacatctgtgtaaatcataagcgaacgtataaagaactacaaatcaacat

SEQ ID NO: 101458 - DNA, 716 bp, Homo sapiens
ttttaagatggagtttcgctcttgttgtctaggctggagtgcaatggcgcgatcttggcttactgcaacctccgcctcctgggttcaagcgattctcctgcctcagccttccgagtggctgggattacaggcatgcgccaccacacctggctaattttgtagttttagtagagatggggtttcaccatgttggtcaggctggtctcaaactcccgacctgaggtgatccgcccaccttagcctaccaaagtgctgggattacaggcatgagccaccgggcccggcctggtatttccgtatttcatttgaaactgcatagttttgatccttttaaaataatttttcggccaggtgcggaaactatgcctagctagtgattaggatgctaataactattagcattagaatgctagtaactatgcctagctagtgattagaatgctattttttaactcttctcattggttttataaatcatatttataatatagtacatccaatcaaaatgtagatttttgtttcgatttcaataagttacatttcacataatgacaattgtatgactgtttcatccaaagagtcttgaattcttttgttttcccagtaccaaatttactttagttttatctatgaaatggtgataaactttcgttgtaagtatcatttgatagcattgaagtatttaactttttttgttggagccagagtctcagtct

SEQ ID NO: 101459 - DNA, 336 bp, Homo sapiens
  misc_feature (1)...(336): n = a,t,c or g
attgagaccctcgagaccctagcgcanngggnggaattcccaggtttcccggatttggtgggtggagagaatggtgcctggtggggtctacgatcctgagtatttgttgaaattgtgtttcctgagggccttctcttcagcccttgttccttccatctctgtggatttaggatccacttgaaagctgagttccttggctgggcacggtggctcatgcctgtaatcacagcactacaggaggccaaggtggcaggatcacttgagcccaggagttagagacaagcctgggcaacatagatcctgtctctacaaaaaattaaaaaaaaaaaaaaaaaa

SEQ ID NO: 101460 - DNA, 474 bp, Homo sapiens
  misc_feature (1)...(474): n = a,t,c or g
tgcgtgcnnnncatgatggcatacatagngcggngcaattcgacacttggaaaaagataaaattgattccatgccttaccccgcatgttagaatcatcttcaaatgggataaaaatccaaacgttagagaaaatgaaaccataagaatactagatacaaacacgggtaagctcattatagcctgggagtagggaatgcctatgatcccaaatccataagcaataaaaaaatggatacactggactctgcaaaaacacatgcatgcaatatgcacgggaaaacagtcaaaaaggcgaactgagagaaaacataacaacataccatgaagggctcatctcggtaatagacaaagagctcttagaaatcaagaagagaggccaggcatgcctataatcccagcactttgggaggctgaggcgggaggatcacttgagcccaggagttcaagaccagcctgggcaacataaggagacn

SEQ ID NO: 101461 - DNA, 450 bp, Homo sapiens
  misc_feature (1)...(450): n = a,t,c or g
natgaagactganngacatctcccccagngcggnggaattcgaaactattccagttaccaacagtcacctaattgagttcagaatggatgaataagaatggattttcctctctgtggcttcttgttttttgttttttcttttttgtttttatttctggaggtacatcagcatcctctctgtggcttctgatgcaaaggtaagctatatgctntntttttttttttttttttttttggggaaaaaggacctttttttttcccccaggggggggggggggggggccaattccgcctttttcccccccccaaattttgggaaaaaagggggngcccctccccccccccctttaaaaagtgtttaaaaccccgcggctccaacgggcgtttttttttttttttgtggggggggggcataaacctcccaaccccctccttaatataaccttggag

SEQ ID NO: 101462 - DNA, 456 bp, Homo sapiens
  misc_feature (1)...(456): n = a,t,c or g
ggaggcccagccaggggnncctcggatcgcttacgcttagncagtgtggtggaattcggagactgaaagcataaagagggtagaaaagtcataaaatccacagggatacacaatggtctggattcttgcagtcacagtgttacataggaaagctcactctgggacaacagccctggagctcctgtagctagatagggacagtgtcacttgtaatcccagctacttggtaggcagaggttgcagtgagcagagatcaccccactgcactccagcctgggccacagagtgagactctgtctcaaaaaaaaaaagaaaaacaaagatgggcagggtcagggtggtttttcaaaccctgaattgttgaatagatgggggatccaaagccaactcaggcccccctactcccaaatgtcatcaaacagattgaattcctaagggcagatgggagcaatggga

SEQ ID NO: 101463 - DNA, 1578 bp, Homo sapiens
atagtcagcataagccaccgcgcccagtagagatgtgatattattcaagtaaataaaacctgaaacttggcacatttgcctatttaatgtgcatcagtcatctgaactaggttgatcctggaataatgaaaacacttcactagtattaactaatgttttctacatagtagttcccaatagattaaggaaaatttccaacctgagattctttgttttggaatttgaataatgtgtttgtaactattccttgattgtcccaaatccaggctttacgtctgcttttgtcaatgtaacatcctagtgccaggaaattggaaaatccaatgactttttgtgtgtaaagtactggaatttttttgttcgtttgtttttaagacggagtgtcaactctcgcccaggctggggtgcagtggcctgatctcggctcactgcaaccttctcctcccaggctgaagtgattctcctgcctcagcctcgcaagtagctgggactgcaggcatgtgccaccactcctggctaattatttgtatttttagtagagagagggtttcaccgtgttagccatgatggtctcattctcctgaccttgtgatccgcccacctcggcctcccaaagtgctgggattacaggcgtgagccactgtgcccaccctggtatgttttttttaaattggccacttaagagttgtccttcagaaagtggagcagcagtgtgattagtaaaaacgatgggctttcctgcagctctggcttatggtctttgtttttccagttaacagctgttacttcatgctgttatagggggtggggggagaaagagaaagaatatgtctagtggcttaattttggggctcaatttgtttattatgtttttcctgcaaaagagtcaccagtcttgtcatggctcaatgcatattttaaaatgagtcaaagccaatttggaagctgctatcttaggttatttgtagtcaggcttcaaatggagagtgaaactttgactttgaaaactggtgctctatgctcaatgatggtcttacacattcctctagggaaaggtcaagaaataaatttggcttgattgtattctctcatttaccatataggaaatactatggtagaactgaaaatatgtacaatagtaaaagtggtggctgagactgggcacttggaaaatagacttggattcttttctaagtgtgaaaacctaattaaatacctttaatggtgacctgggtagtaggtcacagcctcccttgattgattctagttcccttttcaaaagtggagagaccctgaatatagattgtaacaggatgtcccaaccttgccagacaagcaggcatatatgtctctgggatgcagaagcagttacaagttaatatatttaagcataatgttagccaatcctaggtgataccagagatgtgaatatttgatcatatttgagttcattccttgaaagtccaaacctaactggtcttaattgattacttcttagtattccgaattttagaatttaaaaccctatgaattttcagtttgtgcttacattttctaacattggatgtttgctttggc

SEQ ID NO: 101464 - DNA, 455 bp, Homo sapiens
  misc_feature (1)...(455): n = a,t,c or g
cccccccccgcgngccgnnattganncccatagtagacccttgtccatgcggtggaattcaagagtcatcactactccctaatctcaagtacccagggacacaaacactgcggaaggccgcagggtcctctgcctaggaaaaccagagacctttgttcacttgtttatctgctgaccttcccttcactattgtcctatgaccctgccaaatccctctctgcgagaaacacccaagaatgatcaattaaaaaaaaaaaaaaagacttctatattgggcggggtatttacattaaaaagagagctttattttatatatggttttatgaaactgcccagtatttttttaaaacaaaactgactcattttactgactcatttcagcatttcttattgttatttacagagtctcacattactcaggctgatctgaaactcctggtttctagggttctgaa

SEQ ID NO: 101465 - DNA, 493 bp, Homo sapiens
  misc_feature (1)...(493): n = a,t,c or g
nattgaagaatgnatgccgtgtgcgggaatccgngnggagggagaggcgcaggcgggaactggggctggcccccatggcacttgcgtgccagcgcaagttccaggtgggcgtgggctctgcagccccacactcggagcagccagccggccggccccactggccccaggcagtgaggggctcagcacctgggccagcagctgctgtgctcaatttctcaccaggccttagctgccccaccgcagggcagggctcaggacctgcagcctgccatgcctgagccttccccccgcccacccctgccgtgggctgctcagtgagcgccaccccctgctccacgacacccagtcccattgaccgcccaagggctgaggagtgcgggcacacagcacaggactggcaggcagctccacctgtggccccggtgtgggatccactgggtgaagccagctgggctcctgagtctggtggggtcttggagcatctttatgtctn

SEQ ID NO: 101466 - DNA, 439 bp, Homo sapiens
  misc_feature (1)...(439): n = a,t,c or g
ggaataggggnggttgagnacattaactgatgtccccttgnacangcggnggaattccatctgcggacttgctaaatgctttatttgctgttatgggaggtcatacattattacttctgatcaaggaattcacttgatgatgaaataatataagtcaatgaaatgatgttcctgagattcactggtcctatgtggtattccatcacagaagcacctgacattatgaaagagtgctatggcatactgaatgcccattaagctaagaaagaatgccttatgaacttggagtatagacctatagcatatggcatattttcttttcttttcttttcttttctttgctttcctttccttttctttactttccttttctttacttttctttgcttttcttttcttatgagtcccttccttttcgttatttcagagacagagcctg

SEQ ID NO: 101467 - DNA, 506 bp, Homo sapiens
  misc_feature (1)...(506): n = a,t,c or g
ngggactnnncagggggncccccnnntttcgtagtcccctggacagtctggtggaattcatttaacccttcctaaattgactttccaaagaggttctaccactttgcagttccaccgtggagatcagcactcgttttcccatgctttgccttcatgggtatcagattttccaatacttgccaatgtgctaggtgaagaatggtacctcagtttccttggtgcatttttaactgtgaagttgaatgcctcatcatgtttctctgccatgtgcttgccatctgatcatgcactggtctggctgtcagagcatgaaaggctatggtttgtttcactgttaattaattttcattttcattttcatttaactttaattttatttatttattgtttttgagaagggctctcattctgttgcccagtgtggaatgcagtggtgcaatcttggtttactgcagcctcgacctcctgggctcaaatgaccctcctacttcagcctcctgagtagn

SEQ ID NO: 101468 - DNA, 361 bp, Homo sapiens
ttacgggatcctcccacctcagcctaagtagccagggctacaggcatgtggtagccaccatgcctggctaattttttaaagttttttttgtagagacagagtcttcctatgttatccagactattctcaaactcctggcctcaagcagtccccctgcctcgacctcccaagcgcaatcaattatatctttattttgggtgctgttcacaactctgtaatccccaacatctttgtagcaagcagcacacttttaaaatactttttgacatagaaaaacattttaggctcagggagcactaattggaggaggaggagatggcaacaggtggtaacacctggggataagtcaaggaagggaacc

SEQ ID NO: 101469 - DNA, 364 bp, Homo sapiens
tgccataaaaaaaacctcaccagattttatattaacaagtttcattcatcttctcaaaagtctcctctgcatagttcttaaaagacaaggagtatgaatatagatgaaaatagtgggattttaaaagtgttttgtttggcttaatattttggaggaaaacagatttattttattttttgtagagacaggatctcattatgctgaccagtcttgttgaccagtctggtctcgaactcctggcctgaagcaatcctcccatcccagcctcccaaagtactaggattacaggcgtgagccataacacttggccagaaaaaaaattttgttttccatctacgtttgtatctttctaagcaagccccat

SEQ ID NO: 101470 - DNA, 366 bp, Homo sapiens
gtctttctctgttgcctaggctggagtgcagtggcacattcacggctcactgaagcttcaaacttctaggctcaagggattctcccacctcagcctcctgaatagctaagactacaggcatgcgccaccatgcccaactacgtttttttttttttgtgcccgggggggtgtgtgtgtgtgtgtgtgggtgtgtttatgtataaaaacagggactgttgtttgttaaaaaagcaggggtttttttaaccataaccaaatccaagagggcccttttttcaccccaaaggcgggaagggagatttacatatagcgggggggacggggccccaaagcatattgatgagggccggggccgagaaggagatt

SEQ ID NO: 101471 - DNA, 363 bp, Homo sapiens
  misc_feature (1)...(363): n = a,t,c or g
gtttaaaatgacactgtaataattcatccaaaaaatggctgaaatgaaaaacatagtataatagattttgaagtcagagcagagttgactcacagttctttggactactagcaatatgacctaaatttaaacttagagtaatcatcctggtttgcctgggacagtcccagtttacacatgccattccactgtaattattatatgtatttaaaacagaaatggggtttcattatgtgcccaaactggtctcaaactcctggcctcaagtgatcctcccatcttagcctctcaaagtgttgggattacaggcatgagccaccacgcctagcccactataattattaacagtaccttctttgactn

SEQ ID NO: 101472 - DNA, 372 bp, Homo sapiens
ccagcactttgggaggctgaggcaggtagatcacttgaggctgggagttcattaccagcgtggccaacatggcgaaaccccatctctactaaaataaataaatgtgtatatatatatgacttaggaaccactcagcttttgactcttctaactaattcagttataaaacctttaccagcatgagcatcctatttccaacccacgcttgacctggtcttgaccactagcatatgcttatacttactagggctgtacagctcaactaatccacttcttaaaggtttggcccaccctcatgcctaaactgcactccagctatgtttgctttgcaggatttctctcagtcccaattcctagccagtaattgtgtct

SEQ ID NO: 101473 - DNA, 365 bp, Homo sapiens
  misc_feature (1)...(365): n = a,t,c or g
atttaactaggatactttaaataagnnnnattnctggttctgctgcttgaatcagaaataactagggtaataaaaaaaaaaaggaaggaaggaaaaaaggaattacctagggtattttgggccaggcatgttggctcactcttgtaatcccaaagctttgggaggccaacgtgggaggattgcttgaggccaggagtttaaaaccagcctgggcaacgtggcgagactccatctttacaaaaaattttaaaaataagccagggccgggcacggtggctctgttacaatttcaaaacaaaagttaaaaagaaattccaacccctgggccaggcgcggtggctcacgcctgtaatcccagcactttt

SEQ ID NO: 101474 - DNA, 470 bp, Homo sapiens
  misc_feature (1)...(470): n = a,t,c or g
catagagaactgaggccatgtcgnggaactccttaacacatatacagctacttcattctttttaaccattgggaggtactgtaattaatttatgtgctttctgttattttcattgttttgctattgtatttacttatttattttagaaacaagatgtcactatgttgcccaggctggcctcaaactcttgggctcaagcagtcctcccaccttagcctcccaagtaggcgggactacaggcatgaaccctgcaatacggctggcttctgctattttaaactcgtgtgtgtgtgtgtgtgtgtgtgtgtgtgtgtgtgtgtgtgcgcgcgcgcgcgtgtgtgtgtgcgcgcgtgtgtgtgtgttttctctcagtgcactctgtgaactcttttaagagagattctcgcgcgctggatatattatagcgcgcgcccacgcacaagaatatgtgtgaaacacacatcccgcgg

SEQ ID NO: 101475 - DNA, 463 bp, Homo sapiens
  misc_feature (1)...(463): n = a,t,c or g
aatgagatgcatagcatgngcggnggcattcctcctgactcggcctcccaaagtgctgggattacaggcatgaaccaccacacctggcctgtatatcttctttctaacgcaaaagtgacatttctctttcagatgaactcggaacaaaatgtcataagtggtggccacaggtagtgaagagcagggcagggagtgttggcagggacccatgctctggacactttatacttgcaggctttggtcaattgggagcctagggcctgagtgtggatgaggagaggtactgctacatgccagtcgtaagtgggcacaggggttggctggggaacgggccagttcttggaagcaagcttcactgccctcggcctgggcgtcctgtgctcttttggcttctctgggtaggaaggtgtccctcttatctctgcaaaggtcagagtcccactgtctgctttcaagtataaan

SEQ ID NO: 101476 - DNA, 408 bp, Homo sapiens
ggcatagatgtgatgcctggcgatatggcttacttatgagacagcacctgacctacagccatctatgactcctactgtatcttccatgccaggagtaagggtgaggatacctggcaataataaaaataataacctgagagtctaatggcttattttttgtagagatggggtctcactgtgttgtttaagctggtcttgaacttctgggctcaggtgatcctcccacctcagcctcctgagtaactgggattataggcgtgcactaccatgcatatatatatatatttttttttttttttaaaaaaaaaaaaaaaaaatgaaatcttgttattttgctaaggctggtctaaaactccgggcctaaggaaatcctgttggtttggcctttcaagggctaaaaaaacaggg

SEQ ID NO: 101477 - DNA, 389 bp, Homo sapiens
ggcgtgcatgtgtgctgtgattgcaagtgcatctgtgtgtgtttgtgtgttgtgggagtacatgagtgcctgtgtgtgtgtgtgagcaagtgagtgcacatgtgtcaccgtgaagggaccatatttgggaacatctcttgggagggagactgagctaagccctgaaatggtcaaatatatgaacaggccaagctgcctagggaatgtcctcttgagtggctggagggaccaggacaccaggagacagaagggacctccaagaggcccggaaacgccaagaaaggagaaacctgctgtggggtggaggccttggctccacctggcttccctgacattccaggcatccctggtgcaaggtggcaccaatggttgagccagcccctggggtg

SEQ ID NO: 101478 - DNA, 539 bp, Homo sapiens
  misc_feature (1)...(539): n = a,t,c or g
agacggccnnaatcgaacctaattganacgctattccagngtggcggaattcccctaattgaagaattatgtttaagtaacagttttaaaatataattaggaaataataaatattgtcttcttcttttatttttttcttcctcttctttttttttttttttggggggggagatttaaaaaacaattaaacccggaatttttaaccaattcctggaaaaaaaaccataaaactattgggggaaaaaaccccatgggggggtaaaaaaaggctataacaaacccccaaaaaaagggaaggaaaaggagtttttcgttttgaaataaggcccagccaacccagggaaaaaacgggcaaaacagtcaagggagtaaggcggtgggagcactcacggcccactgaagctttgaatcctaagggaggccaccggcccattctaaaacttggccgggggccccagcctacccttaaccacaaaacggagccgggttggggggagatcggaaacctaaaacaaaaaaaactttcttcttttttttat

SEQ ID NO: 101479 - DNA, 484 bp, Homo sapiens
  misc_feature (1)...(484): n = a,t,c or g
agatcgggnaactgatatcttgatgagcgtggaaanccacattgccttccagtgtatttgttcatactcacagattgagtgcctgccttcctgcatgtgtatcaatactggttattatcagtctttaatttttgctaatctaatggacagaaattggcatgtgattgttgtaatagtgagatttcactttttttttttttttttttaccctttttttttcccttggccaaggggggcctttttaattgtttttaaacaggccggggggccttttctttttttttttcgggggcccggggaaaaatttttccctaaataacgggcgggttggggttttaaaaaaaaattgtttttttgctttaaaaaaggggttttttaacaactttttttttttaaaaaccggcttggggggcttggaaaaaaaagccttttttttataaaaatttaaaacccccctcttttttttttttgagaatttttaaag

SEQ ID NO: 101480 - DNA, 496 bp, Homo sapiens
  misc_feature (1)...(496): n = a,t,c or g
ntgggcctcncaaactgatncccctcgaangcggcggaattaaaaggcaagcaagtaaatgtgagcaaaaagaaagcaaatttagtaacatcaaataaagtaggattcaagatgctaagaaaaaaggggaacagagagatataattcctaatatagataacctactgagaaaagagagcagctgtgaacttttatgctcctaatgccatagctttgaggaagacataaacaaagaacactcattgtttctctttaaaaaaaaaaaaaaactttttcaaaaaaatgaaatcagagacccattccctgtcaataatgctaaagcaaaaaagacaagttaataccaaaatgactttgaggagagggggcaggcttgaaaaagcgaaaatcaaacacacacacacagacacacacacacacacacacacacacatacggtggataatacttgtgtagttaaggagaaaaccaaaactcaaattcaaacttccaggggggg

SEQ ID NO: 101481 - DNA, 465 bp, Homo sapiens
  misc_feature (1)...(465): n = a,t,c or g
aggagagcccgncttctnnanccatgggattgacgacgtgcggaggaactcggcacacttctacagtcccagctattagggagggtaagatgggaaaatcccttgagcccacaagtttcaggttgcagtgaggcatgattgtgccactgcactactctagcctatgtgacagcatgagaccccatctcttaaaaaaattttttaaaaggaggtatctaaaatttaaaataattcaatcatttcccatcacttctgtaagttccaaggtctttaggacaacatcaggtttttttggtacccatttccctcagactttatggtgtgttaataatgaaatacaatactcaagatgcttgagtaggaatttcctctatgtgaaatggcttcatgtgtccttccctgctccttcatccgcctgacaaaattctgcctgtattttaaaatcttgttatcacaccacttccn

SEQ ID NO: 101482 - DNA, 653 bp, Homo sapiens
  misc_feature (1)...(653): n = a,t,c or g
ggaattcgctggggagcgagtgtccaggggtcttcaaccaggatgactcagagaacctcccacagccaggtccctcacgccaccccgaaaacaagggcgggaggtgatttgctctgtgccacacatcacagagccaggcactgcaccccaggactcagattccccttgttcctggctctctagttaccgtgtgtcctggggtcacctcagggaaaataggtgtaaatatttgtgaaattttcctggaccagcctattaggaatgaggaaaaagtaagcacatgtgggttatccttgttgttgaagagtgggnnnnnnnnnnnnnnnnnnnnnnnnnnnnnnnnnnnnnnnnnnnnnnnnnnnnnnnnnnnnnnnnnnnnnnnnnnnnnnnnnnnnnnnnnnnnnnnnnnnnnnnnnnnnnnnnnnnnnnnnnnnnnnnnnnnnnnnnnnnnnnnnnnnnnnnnnnnnnnnnnnnnnnnnnnngannnnnnnnnnnnnnnnnagtttgaaaggaaaactaggtctgccccccaggttgaagggaaggggcccaatttttgttcactggaggctccccctcccggtttaagccttttttcgtgcttaaatttttagagaagctgggaccccgggccccccccatgacccccggtt

SEQ ID NO: 101483 - DNA, 448 bp, Homo sapiens
  misc_feature (1)...(448): n = a,t,c or g
cactgagatcgtagcacangcggnggaattctttttttttggagagatgggggtcttgttatattgcacaggctggtctcgaactttcccgtctcaagtgattctcccatctcagcctcccaaagctgggattacaggtgcgatccaccatgcccagcctgccctttaattttttggtgacttctaaagcacagtttttagttttttaatatttaaaaaataaatattttacttaatgtttcacataatataatcccccctcccaagactatacaagcttttgtttatattttcttctcggaaggctatggtttcatttttatataaaatctttaaaatcatccaaatgcatgaaagtcacaataaatcactagaaatttattttagaacatggtgtattttttccctccaaacaattggccaatgaccctttcatttattgtatagt

SEQ ID NO: 101484 - DNA, 451 bp, Homo sapiens
cttgacttcgatgaccttagtcagtgtggtggaattcgactctgtctctaaaaaaacaaaaagaaaatgtatatctatacactggaatactatacagctttaaatactgtcattcatgacaacatggatggaagcagaggacattatgctaagtgaaataagccaaacacagacagacagatactgtatgatcttacttgtggaatctaaaaatgtcaatcttaggccgggcatgatggctcatgcctataatcccagcactttgggaggctaaggtgagaggatttcttaaggccaggagtttgagaccagtctggtcaacatagcaagacactatttctacaaaagaaattttaaaataaaaagtaaatttaaaaaaattgtaagaaaatctcagaaaaagaacgtacgaaggtggttgctagaggctaggaataagggaaggtatggg

SEQ ID NO: 101485 - DNA, 509 bp, Homo sapiens
  misc_feature (1)...(509): n = a,t,c or g
aggggtagaanaanaggngttgattccctgttgagtgtcgtggaatacgccaccatacccggcctaaagcaacccttgaggtccctccacagccaggcggctggatccacactaacccccaccccacggcacccccaccccaccgtgaggcttctccccacaagggcattggccgatgcttcgtggctgtggatgaatgaggccaacatggtggaaagtaagtgatgcagagtcacaggcacgccctggaagatgcactcgctgttcccaaaacgccaagccacacccactcctttatggatggtagacattgcggtctcggttttattggtcatcctgagaaggccactggagtaatagaaagaaatggaatttgaagttgaaaagtgtagatctgccagcctgggcaacacggcaagaccccacctttacgaaaaatttaaaaattagccaggaatggtggcacgtgccagaggtcccagctccgatggagactgacgatacaggat

SEQ ID NO: 101486 - DNA, 461 bp, Homo sapiens
  misc_feature (1)...(461): n = a,t,c or g
tggtcttnnnnnnttaaatcgcagtccctaggccgngcggggaattcccaaaaccaaggaggcggagcttgcagtgagccgagatggcgtcactgcactccagcctgagcgacggagcgagagtctgtctcaaaaaacaaacaaacaaaattcttgtgtagtgttccatattttgaatcaacacatttccattgtacaaatgaggcaactggggcctggggggttgagaaagttgccctaggtcatgcagctagttggtagtaaagctgagactaactccagaattcatgctgttttccttgaggagttgatgaaatcctcctcagaaaaaaagacacatattcagaacatttttgcatccaattttataaggttcaagaatagtcaagcccatctctgaaccatctcctccctagaggcagaccatctgtgctaaacctgaacaatactaatgggtttgn

SEQ ID NO: 101487 - DNA, 466 bp, Homo sapiens
  misc_feature (1)...(466): n = a,t,c or g
nnaaggtaggcccggnnnnnnccacgacataccnacccatacatgcggtggaattcgaaagaaactaaccaacaaaagagaaaaccaaaaataatcacaacagaaaccatctgccccaaaggaaccagaggtgaaaaacaaacaaaaaaaaaccaaaaacaaaccaaaaaaaaaaaaaaaaaccccccaaattcaaccaaccaaaaaaccctttcggaacccaaacttaagggtgttcaccttttttgttacaacccaaaataaaacccccacccgggggcgaaaaaccttccagaaggtaaaactttttccccccaacccttgtttggggaacaaaccccaaaccttgcttccccggggggggttacaaaagaaaaaaaaaaaaatcccttttttttattcccaccccccacccttggcccagaaaaaaaaggccacaccttggcaaaatgggttgggttttacc

SEQ ID NO: 101488 - DNA, 632 bp, Homo sapiens
  misc_feature (1)...(632): n = a,t,c or g
aaaagaattagaagaaaaagcgaagtctcattacaaaaacacagaggattttagcccagtataactctagaagaaatggaatcctattaaggaaggaagtttggggcaaagcaccaggaaatccctcaaccggaagtgttgctagattgaggaagtgtcctaaaggaagtgggagacagctgtgggcactgtgtgcccagccccggccttcccagcagagtctgtgtgcatcgtgtcccaagtaaaaacaattcagttaccagaatggggtagttccttcacttgctaaaataaatnnnnnnnnnnnnnnnnnnnnnnnnnnnnnnnnnnnnnnnnnnnnnnnnnnnnnnnnnnnncatttgtttctccttcctaccactgttctcagccatttgaggagtggaaggtcgtggactggggaaagggccttccactctggctctctggatttccgagttgctgggaacagtacctcccacgctgtttgctttaaccagcgcgccttttatcactgcatagctacgaagtgaagagtgtcctcccaaaggaagaggggttgctaaatttttttgtacagtccgtaaccgcccacccgaccagctgcattggattggaagaaatctagcttctga

SEQ ID NO: 101489 - DNA, 492 bp, Homo sapiens
  misc_feature (1)...(492): n = a,t,c or g
aggccggnnnnnaggggcctgataccntcganactgcagaccactagaacagngcggnggaattcatccaatacagaattctgcctacataacatgatccaaattttgcctaaagtttgcctaaaacgtgcatagcaaaagaatttcgggaactacaccagaatgttagcatgggtccatcatttctgagctgtggtgttactggcatgactcttgtttttcttggttattcttttatgttatattaaggtgaccacctgttcccgttggcctggtactgccctggttttagcactggaagtcctactctggacaattaatgattcgtgtgtgtgtgtgtgtgtgtgtgtgtgtgtgcacacattaaggtgagggtgtgcccatttgaaaggaagggccaaagataaagtgacaagctcatggggcctgtgtggtagtcaggcaatagattttttttttttttttttgagagaggacctccctctgcccccc

SEQ ID NO: 101490 - DNA, 476 bp, Homo sapiens
  misc_feature (1)...(476): n = a,t,c or g
ncttgagnccattagncagtgtggtgtaattcctctgtctccatacacacacacacacacacacacacacacacacacacgcacacacacacacgaagctgggtggggtggcacatgcctatagtcctatctactcaagaggctgaggctggaagattgcttgggtccgggagtttgaggatacagagagctatgattgtgccactgcactccagcctgggaaacgcagcaagaccctgtgtgttaaacacacacacacacacacacaacacaatatttttttaaaatcctgaacactctcagttaagtcattattattattattatagagaggggggtcttgctgtgttgtctaagatggacatgaacccctaggctcaagagaccctcccacctcagcctcccaagtaagtgaaaagacacgcacgcgttaccatgtttagctaaagtgtttatattacgctgcggatataaaa

SEQ ID NO: 101491 - DNA, 430 bp, Homo sapiens
cggacgcgtgggaccctctaaatccccttgtaaatttatttgttagtccaaagaggaacagctctttggacactaggaaaaaaccttgtagagagagtaaaaaatttaacacccatagtaggcctaaaagcagccaccaattaagaaagcgttcaagctcaacacccactacctaaaaaatcccaaacatataactgaactcctctaccccctctagagccaaaaaaaaaagaaagaaaaaacctaaaaaaaaaaaaaaataaaaaaactcccagaaaaaaaaaaaacccatgagaaaaaccaaaaaaaaaaagggggggggccttttaaaaaaaattcttgggggggccaaatttttcggggggaggaaagaaaaaattttttttttttaggggggaaataaaaaacccttcggggatttttttggggg

SEQ ID NO: 101492 - DNA, 424 bp, Homo sapiens
cccacgcgtccggaataatcttaaaagtccatagcattatggaaaacaaaatataaaataaatgaggatgatttttaggtatattttatttgtattttaaagcagtaattatttaccatcttttaattaaactcgtttacttaatgatatcaattttttcctgatttattaagaaatgatggacaaaagaacattgtatatattgaaggtgtacagtgtgatttaatatacctacacattgtgaaataaataccacaatcaagctaagcggtggtgcatggtggctcacacctctaatctcagcactttgggaggccgagatgtgcagatcacctgaggtgagaagttagagaccaacttggccaacataacaaaagataacaaaacctcaccctcaaaaaaaaaaaaaaaaaaaaaaaaaaag

SEQ ID NO: 101493 - DNA, 388 bp, Homo sapiens
agccaataactttattgactcctagccgcaaacctcttcattctaacctgaatcggaggacaaccaggaagctacccttttaccatcattggacaaggagcatccggactatacttgacaacaattctaatcctaataccaactatctgcctaattgaaagcaaaatactcaaatgggcctaataaaaatagagataaagaaataaaaaaaaagaagaggggctgtttgtaaaagtcccatgggggggccccacctttactcggacctaagaaggcggttccttaccgatacagggagcccttaatacacgctcaggctgattaacggagagacttacttcttagggggcgggaaaggagaggccgcagctccctagaaatctagagt

SEQ ID NO: 101494 - DNA, 338 bp, Homo sapiens
cccacgcgtacgcccacgcgtccgcaacattttttgtatccacttgcttccacggacttcacgacattatgggctcagctttcctcactatgtgcttcatccgccaactaatatttcactttacatccaaacatcactttggcttccaagccgccgcctgatactggcattttgtagatgtggtttgactatttctgtatgtctccatctattgatgaggggcttaaaaaaaaaaaaaaagggggggccgttttaaaggaaccctgggggggccaaagctaacgcggacatgcaaagccatacttctctccttgtagggggccctattagaagccccg

SEQ ID NO: 101495 - DNA, 405 bp, Homo sapiens
cccacgcgtccgctcactatgttgcccaggctggtctcaactcctggtctcaagcagtcctcccagctcagcctcccaaagtgctaagattacaggtgtgagccagcatgcacagcctattctttttaactgataacctgtttatcaaaaaaaaaccagaccgtgctgaagtagaatttcacaaagtggataccctcgtttctactcattcctgtcctatcctgtttaccagaggaaaccactattaaaatagtttgctttgtctaggatattttaagggataatatcttaggtatagtataggtgcttctcacccactggctgattagaccacagattacattccaaatctacattaatccagttccttccctggtaggatgaaagttgattgcttcgttaata

SEQ ID NO: 101496 - DNA, 414 bp, Homo sapiens
  misc_feature (1)...(414): n = a,t,c or g
gcgacccagacaattataccctagccaaccccttaatcacccttccccacatcaagcccgaatgatatttcctattcgcctacacaattctccgatccgtccctaacaaactaggagggcgccttgccctattactatccatcctcatcctagcaataatccccatcctccatatatccaaacaacaaagcataatatttcgcccactaagccaatcactttattgactcctagccgcagacctcctctttctaacctgaatcggaggaggaccacgaagctacccttttatcctcattgggcaagtagcattcgtactatactttacaacaatcctaatcctaataccaactatctccctcattggagacagaatactcaaatgggcctaaaanaaaaaaaaaaaaaacaaaa

SEQ ID NO: 101497 - DNA, 410 bp, Homo sapiens
tggatgtgttgaaaagggaacactttcacactgttagtgggaatgtaaactagtacaaccactgtggaaaacggtgtgtggattccttaaagaactaaaaatagatctaccgtttgatccagcaatcccactactaggtatctacccagaggaaaacaagttcactcttggtcctttacattccgtggggagaagcagtagaaaattaccgggttattcaccccgagtctaagcagctgaataggaaaatagctttaatagccctgttaggacctaggccaaggacttttcctttgggcttgttgtgaatgattacaggttaacggtggcatttttctttcagctgaggggaggcaaccacctcagtaatgatcctaattggatccaactggggaactccagaaagtttc

SEQ ID NO: 101498 - DNA, 527 bp, Homo sapiens
  misc_feature (1)...(527): n = a,t,c or g
aggaggnnnnnnnnnnaatagacgatcgataggcncgggccggaattcccgggcgcggaggctcacgcctgtaatcccagctctcagggaggctaagaggcgggaggatagcttgagcccaggagttcgagacctgcctgggcaatatagcgagaccccgttctccagaaaaaggaaaaaaaaaaacaaaggacaaaaaaaaattaagcgtaacttccttaaaagaaacaacccccgacccccgcaaaggcaaaagaaacccatagggagcggatcggaaagttaataatgttacttccccacccctactttttttgaaaaaaaaaaaggaattttaaaaaaaaaaaaaaaaaaaaaaaaaaataacttaaaaaaaaaaaaaaacaaccccaaaaaaagaaaaaaaaaaccaaaagggagcagaacgaaaaaggaaaaaaagattttttccaccccttaaaaggggggaattaaaaaaaaaaaatgtggggggggacaaaaaacaggggcgcctatgaaaattttta

SEQ ID NO: 101499 - DNA, 410 bp, Homo sapiens
aaaaaaagaaaaggtttccaatgaaatttgaaaataaaaggctggccaggcacagtggctcacgcctgtaatcccagcactttgggaggccaaggcgggtggataacttgagctcaggagttcgaaaccagcctgggcaacaagaccctgtctcaacaaaaaaaaaaaaagggggcggccctttaaaagaatctgtggggggcccaattttacccgggaaagccaaagttttagtttttcccttagggggggccttataaaacccgagttgggaattttggagagggaccttactttggggggggggacaaattggaccaacctccctccaaaaattaaaccctttagggaaaaaaaaaaattttaaggggaaaagggggaaaaacaacctgcatagcctggttgttgaa

SEQ ID NO: 101500 - DNA, 511 bp, Homo sapiens
ctcaattttaggaaattccctggacctctccacagcactgcaggctgttgcttagggtggattattggatggcttattttatccattttcctgttgatttcctctaccttcaagggcagaacatgacccttttcctgatcatatgactcaaaactccccatacccaccagcacacagacaacatcttagattttctgaggtcattccattgttcccttacctagtctcagactgccagaccacagactctggcctttgctttgaagaacctggaacctgggctttggcagttaccgtgggtgagaaatctcaggcgatatacaaggaaccatataccagtgggttctctgaatgataagaactgaaatcctgaccggggcggaggttcactcctgtagtcccagcaatttgggaggccaaggcgggcggattatttgaggtcaggagttcgagaccagcctggccgatgtggggaaacccagtctctatgaacaattaacaaaaattagcg

SEQ ID NO: 101501 - DNA, 417 bp, Homo sapiens
tccagcaccacgaccctactactatctcgcacctgaaacaagctaacatgactaacacccttaattccatccaccctcctctccctaagaggcctgcccccgctaaccggctttttgcccaaatgggccaaaaaaaaaaaaaaaaaaaaaaaaaaaaaaaaaaaaaaaaaaaggggggggggcgggtggaaaaaaaaacccaaaaagggggggggaggagaaacttcctctaaaaaagacaccttttttaaaaaaggagggccctaaaaatttcatttggtgtgttggcaaggggggtaaaagacaaagagggggcccaacgaaaaaaaaatacttataaaaaaaagggaggggggtccctttaaaaccccttatgggggggggggggagggggaaaaaaaaaaacccccgccccgt

SEQ ID NO: 101502 - DNA, 414 bp, Homo sapiens
  misc_feature (1)...(414): n = a,t,c or g
cctctgtctgccatttattagccatgtgaacttggccacatcacttcacctccctgagcctcagtttcctcatctgtcaaatgggggtttataaacacctacctcgcagggttgttgtgaggatttaatgcgataatgtatgtaaagcgccttgcacactgcctggcacacagtaggcgctcaataaatctaagcttccctttaaaaaaaaaaaaaaaaaaaaaaaaaaaaaaaaaaaaaaaaaacctaactaacaaggntgttgggaggaaataatgcgaaaatgtatgtaaagcgccttgcacactgactggaacacagaaagcgctcaataaatataaacttcccttttaaaaaaaaaggggggggtttttattttgggggggggggcaaaaaaaaaaaaaaaaaaaaaaa

SEQ ID NO: 101503 - DNA, 397 bp, Homo sapiens
cccacgcgtccggttgctttaatgcattgtattagatcttcaaacagaataaaggttgttttgaaactgagaaaaaaaaaaaaaaaaaaaaaaaaaaaaaaaaaaaaaaaaaaaaaaaaaaaaaaaaaaaaaaaaaaaagggggggggggcttaaaaaaaaaattcggggggggccaaaaaatacacggggataaaaaaaaaaaatttttttttttaggaggggtaaaaaaaaaacttcgggggattattaaaaaaaaaaattttttttgggggggggaaaaaggggaaaaacaccaaaaaaaaaaataaagctgtgaaggaaaaaaaaaaatatttaagggggggagggggaaaaaacatttttttttgtgggggaaaaaaaaggttggaaaaaat

SEQ ID NO: 101504 - DNA, 395 bp, Homo sapiens
tgacctgcccgtgaagaggcgggcatgacacagcaagacgagaagaccctatggagctttaatttattaatgcaaacagtacctaacaaacccacaggtaaaaaaaaaaaaaaaaaaaaaaaaaaaaaaaaaaaaaaaaaaaaaaaaagggggggggcctttaaaaaaaaacccggggggggccaaaatttaagggggggggaaaaaaaaattttttttttttaaagggggggtaaaaaaaaaccccggggggattttgaaaaaaaaaattttttttgggggggggaaatttggggaaaaaccccccaaaaaaaattaagggcttaggggaaaaaaaaaatttttaggggggagggggggaaaaaaaccctcatttccgtggggataaaaaaatc

SEQ ID NO: 101505 - DNA, 399 bp, Homo sapiens
  misc_feature (1)...(399): n = a,t,c or g
aaaagatcctatttaacatgacaagtaaaatgcttgccataggatatttatatctagaactttgacagacatacctaatcattgtcactcaggcatcctgcatatcattcatttattcatttgcctatcatttgttgaacatttaaaatgtcctagatacttagaatatgaatgttgaatgtcacaaaaatgaatgtcacactccctcccctttagaaatttacagaatgggatgagagataatgatatgtaaataaatacatatttttaaatannaaaaaaaaaaaaaaaaaaaaaaaaaaaaaaaaaaaaaaaaaaaaaaaagaaaaaaaaaaaaaaaaaaaaaaaagannnttccccttttatannttttnnaatntggtggtgcttcctttgttt

SEQ ID NO: 101506 - DNA, 446 bp, Homo sapiens
  misc_feature (1)...(446): n = a,t,c or g
nattgatccccctgcggtaccggtcgaggaacctcgggtcgacccacgcgtccgcggacgcgtgggaaataaagtataggcgatagaaattgaaacctggcgcaatagatatagtaccgcaagggaaagatgaaaaattataaccaagcataatatagcaaggactagcccctataccttctgcataatgaattaactagaaataactaanaaaaaaaaaaaaaaaaaaaaaaaaaaaaaaaaaaaaaaaaaaaaanggggggggccctttaaaaaaaaccctgggggggcccaaattttacggggggggggaaaaaaattttttttttttttgggggggggaaaaaaaacccccctggggttttttggaaaaaaacctttttttggggggggggaaattggggcccccccccccccaaaaaattaagcctttaggggaaaaaaan

SEQ ID NO: 101507 - DNA, 408 bp, Homo sapiens
  misc_feature (1)...(408): n = a,t,c or g
cccacgcgtacggtgcgtgtgtgtgtgtgtgtttgtgtgtattttgtaatatgtgagggaaatctaccttcgttcatgtataaataaagctcctcgtggcanaaaaaaaaaaaaaaaaaaaaaaaaaaaaaaaaaaaaaaaaaaaaaaaaaaaaaaaaaaaaaaaaataaaaaaaaaaaaaaaaaaaaaaaaaatagtggggggggggtttaataaatactcctggggggaaccatctttatgtgggcgagagaaaaaatattttttttttttataaagagagttttaatataattcgtgtaagttttataaaaacaaaaccttttttggggggggaatatatgtaacaaaccctccccaaaaaagattgtgcgccagatattaaaatatacttgtgggggggggggg

SEQ ID NO: 101508 - DNA, 395 bp, Homo sapiens
tttaaaacatagtttgtcaatcagccaaaatatgaatcaaaagaaggcatgaaaataaaagtatttaacagtcatagtttatagtttaaaattaaaacacttctagaaaatgtggtatatttacacattggaatgctattcagcccttaaaaaaaaaaaggaaatcttgttatttgatacaacattgataaacctgaaggatattatgctaagtaaaataagccagcacaggaaacacacacacacatgatttcatttctgggtaaagttaaaaactttcaaactcatggcaacagagagtggaatgatgattgtctgcagctggaggtggaaaagatgttggtctaacgtaatgggtcttccatacatcacttaccttaacaaatatgttattc

SEQ ID NO: 101509 - DNA, 478 bp, Homo sapiens
ttttttttttttttaagcggcagaatcttgctccaggatcaagtgcagtggcacaatcatagctcagtgtaaccctgaactcccgggcttaagtgatcctcccacctcagccacctgagtagctgggactaaaggtgtgtgccaccatacccagctaagattcatttttatagtctaattattttatattagtttttaacacaattgcagattttgcatgtttattctaaacaacaatttgccagttactggaggataagactgttaaactggcaattttctatataaaaggttactatattaggaatgggcagcaacagccagagatttgggatacaatcttaaatggacagaagtaaaacaaaaagtttacacaagagagctggatccttaatttagattcaaggagttttgggcaaacagggttatgtggagggtaaaaccgggaaattttttcagctctacaggccgtatgttc

SEQ ID NO: 101510 - DNA, 396 bp, Homo sapiens
gaaaatgtatttcattatttgaatatattattatttgttgcaaaaacagaagatctggaaaggtgaggtctgtgagggcaactgtaaaagcaattttatttttgctccctttattatagtagggcatacaagcaagaaaggagccaggtgccgtggctcatgcctataaactcagcactttgggaggctgaggtgggtggatcacctaaggtcaggagttggagaccagtctggtcaacatggtgaaaccctgtctctgagtattttaagtgagtcatagaacataccagaaaggattgaaagtgactaaaatgaactttgtagttaaccgaagctcaatttggtttaactttttcatattatgttaactgttaaagccaaagtaatttccactcg

SEQ ID NO: 101511 - DNA, 399 bp, Homo sapiens
cggataagcgtttttcgcagccactggcttacacggacttcacgtcattattggctcaactttcctcactatcggcttcatccgccaactaatatttcactttacatccaaacatcactttggcttcaaagccgacgactgatactggcattttgtagatgtggcctgactatttctgtatgactccatctattgatgagggtcttaaaaaaaaaaaaaaaaatgggggggccgctttataggagcccccggggggccaaagttaacccggcactgcaacgacttgattctctccttataggaagccgcatcctaagcaacctgggaatttttgggaaggctcctcactcttggggggggacaaaatgggacaatccacccccagatatgaagagctcc

SEQ ID NO: 101512 - DNA, 407 bp, Homo sapiens
cggacgcgtgggcatgatttgagaagccttcgcttcgaagcgaaaagtcctaatagtagaagaaccctccataaacctggagtgactatatggatgccccccacacccactccacaccagtaataaaaagccaccacacacaaaaaaaaaacaaaaaaaaaaaaaaaaaaaaaaaaaaaaaaaaaaaaaaaaaaaaaaaaaaaaaaaaaaaaaaggggggggcctcttaaaaaaactctggggggggcccaaaaataccggggggaaaaaaaaaaattttttctttttttggggggggaaaaaaaaaaaccttggggattttttaaaaaaaaaccttttttggggggggggaaaaattggccccacccccccccaaaaaaaaaaccccttgggggaaaaaaaattta

SEQ ID NO: 101513 - DNA, 398 bp, Homo sapiens
cccacgcgtccgcccacgcgtccgactagttctagatcgcgagcgccgccctttttttttttttttttttttttttttttttttttttttttttttttttttttttttttttttttttttttttttttttttttttttttttttttttttttttttttttttttttttttttttttttttttttgtgagcgccgcccttttttttggaaaaaaaaaaaatttttttttttttttttgattttttagggggtgaggattttatttttttccccccctctatttttttatttgtgggggggggggggtttttttttttttttttttcgcggggtggaatattttttttatccctcccaaaaaaaatggaatttttaaaacgctgcgggggaagggggggg

SEQ ID NO: 101514 - DNA, 388 bp, Homo sapiens
  misc_feature (1)...(388): n = a,t,c or g
aaatctaactttcttcccacaacactttctcggcctatccggaatgccccgacgttactcggactaccccgatgcatacaccacatgaaacatcctatcatctgtaggctcattcatttctctaacagcaggaatattaataattttcatgatttgagaagccttcgcttcgaagcgaaaagtcctaatagtagaagaaccctccataaacctggagtgactatatggatgccccccaccctaccacacattcgaagaaccctccataaaaaaaaaaaaaaaaaaaaaaaaaaaaaaaaaaaaaaaaaaaaaaaaaaaaaaaaaaaaaaaggggtgaaaaaaaaaaaaaaaatnatttaaaaagaatgagaaaaaaatgatctcttca

SEQ ID NO: 101515 - DNA, 382 bp, Homo sapiens
  misc_feature (1)...(382): n = a,t,c or g
cggacgcgtgggcggacgcgtggggaatcgaacccatccctgagaatccaaaattctccgtgccacctatcacaccccatcctaaaaaaaaaaaaaaaaaaaaaaaaaaaaaaaaaaaaaaaaaaaaaaaaaaaggggggccccttaaaaaaaaaccctgggggggccaaaatttaaccgggcccaaaaaaaaaaaatcttttttttaaaggggggctaaaaaaaacccccctgggaaattttgaaaaaaaacccttttttgggggggggaaaaaaaggaaaaaacccccccaaaaaaaaaaaaccctcaaagaaaaaaaaaaattttaaaggggaaaagggggaaaaacacccccaaatgcccggggaaaaaaaattnnnc

SEQ ID NO: 101516 - DNA, 419 bp, Homo sapiens
  misc_feature (1)...(419): n = a,t,c or g
cacaaatgtagcaacagctcacatgactgagtaggtagaaaatgtgaaataaatctcatatatatagttttgaaaaaaaaaaaaaaaaaaaaaaaaaaaaaaaaaaaaaaaaaaaaaaaaaaaaaaaaaaaaaaaaaaaaaaaaaaaaaaaacaaaaaaaagaaaacaggccaaagaacggagacagcgaaaacgggcacccaaaatccaaaattttttggctgtgagaaagaaccattattaactaacttacacaccatttggaatatatacattaatcaaccaccaacttgttgtttaatttcaaaacaaataattttttagaggccagaattaaacaagccatcctccacctctttattgccttgtggggggggctccctcctcttgggcccagttntgcacaaaattaccccccc

SEQ ID NO: 101517 - DNA, 399 bp, Homo sapiens
  misc_feature (1)...(399): n = a,t,c or g
caacgatggtttttcatatcattggtcgtcgttgtagtccgtgcgagaatacccaaaaaaaaaaaaaaaaaaaaaaaaaaaaaaaaaaaaaaaaaaaaaaaaaaaaaaaaaaaaaaaaaagggggggccccctttttgaaatttttgggggggggcccctttttcctggggggggggggagtttttttttttttttggggggcccgtttaaaaccccttcctggttttttttggggggctttttttttttgggggggggatttttcgcgccccccccccccccgatttttccttcttcggggaaaaaacttttttttggggtggggggggtccctcccttcttttttgtgcgggttttattacgggcggccccnacccccanggcccccacctcccccg

SEQ ID NO: 101518 - DNA, 397 bp, Homo sapiens
cccacgcgtccgcccacgcgtccgcgcccgtcttcgtttgatccgtcctaatgacagcagtcctacttctcctatctctcccagtcctagctgctggcgtgactatactactagcagaccgcatcctcaacaccaccttcttcgaccccgcctaagatatgaaaagaaagacaaacatcactaatcatcaaagaaatacaaatcaaaggggggggacatactatgtcacaccagggggggcggaagttattacgaagtcaaaaaataacagatgcttgtgagggtgcggagaaaaaggaacacttatacactgttgatgggaatgtacattttgtggggcgctgtgagaaacaccccgccgacccctcaaagagctctgcgtatgagcaccattcat

SEQ ID NO: 101519 - DNA, 406 bp, Homo sapiens
  misc_feature (1)...(406): n = a,t,c or g
cccacgcgtncgcccacgcgtncgcgcccctcttcgtctgatccgtcctaatcacagcagtcctacttgtcctatctctcccagtcctagctgctggcatcactatactactaacagaccgcaacctcaacaccaccttcttcgaccccgcatangaaaaagaaaaaaagaaaaaaaaaaataaaaaaaaaaaaaaaaaaaataangggggggggtccttttaaatattccctgggggggcccccgttttgcggggggcaaaaaataacactttctcttcaatgggggggataaaaaagaccccttagaggttgttggggggaaccccctttttgggggggagtgagagagggccccccccccccccaaaaatatccctggttagagagaaaattcattttagagg

SEQ ID NO: 101520 - DNA, 919 bp, Homo sapiens
  misc_feature (1)...(919): n = a,t,c or g
ccgcgtggtggaattcatccagtatatcacgtgcttctgcaatccaagccgactgatgactggagaggatggctactatttcaccaatctgaannnnnnnnnnnnnnnnnnnnnnnnnnnnnnnnnnnnnnnnnnnnnntcctatttcacaagtagggaaactgaagcccaggtaggcaagcctgacttgctggagtcacacaggaagttggcagctctgctccatccctgggatctggagcccctgctctggggaaggagaggtggggcgctgccttcccagagtcccctcaagctggcagggacggctgtacccccagggtcagaggagaactaaaaggagcggaagctggcctgggtccagggagagacctcgtgtttgcccaaaagggaactggagaagggtggctgggcccatacgcagggaggagctgtggggagctggtggcggggcagcaaagagaagtggatttggtgggtagaggggcccctccttggttttagtcctccccacagcccctccaaaaccggcagggctctcttgtccctttctcctctcctgcagcaagccctataggaagcggcctctctagtgagtggcagctcaacctctgcttaaatgcctccagtgacggggagttcactaccttccaaagcttttaaaaaacgttaaccactgctattcaagaacaattctagaattttttttttttttgaaagacaaggtctcattctgtctcgcaggccagagtgcagtggtgtgatcatagctcactgcagctttgacttcctgggctcaagcaatcctccctcctcagcctcctgagtacctgagactacagatgtgcaccaccacactggctcattgttttcattttttgtagagacaggatctcactatgttgcccagggtggtctc

SEQ ID NO: 101521 - DNA, 426 bp, Homo sapiens
  misc_feature (1)...(426): n = a,t,c or g
natgacngcctgtagacgtccggnggaactcgngacacgggagccgcagctaccaggcagcgagctctcgcccgggctgttctaggtgctggctacaggagcccacagaacagacccccttccttcctggggttctcctccagccaagggcttcatccctcattggctggggccgtctccttgtttgacagatgtggaggctgtgaatgcaataagtaaggctcccggaactgccttgaagtactcaggttgcctttaccaacccttactccttgtgaggatcctggaggtagctgccattaatattcccctcctttgggctggacgcagtggctcacacctgtagtcccagctacttgggaggcagaggtaggaggatcacctgaacccaggaggtagaggctgcagtgagccaagatcgtgccn

SEQ ID NO: 101522 - DNA, 394 bp, Homo sapiens
  misc_feature (1)...(394): n = a,t,c or g
ggtaaacatgtagcctttggttatgttacatcacataccaccatgttgggaaagaagacgtatgtatttatgatgtaaatgtctttcagaatgacctttgggactaagcttttttttttttttccccccaaaaaagggccaggaccaaggagcctttgttggaaaaattaaaaagggaaaagtgggtgggcctgggggcctaagcgcctgaaccaaaccattttggggggccggggggggggaataattgggggccaaagtccaagacccccctggtaaaaagggggaacccccgttttaacaaaaaaaacaaaaataaccgggccatggggccctgggccggggaccccacttactcggaagccagaaacatgaaaatcgtttgaccctaggn

SEQ ID NO: 101523 - DNA, 409 bp, Homo sapiens
aatttttgaattttttgtagagactggggtcttgctttgtcacccaggcagctctcgaattcctggcctcaagtgatcctccctcctcagcctcccaaagtgctgggattacaggcatgaaccactgtgcccagctgcaacctaaatcttttaagggtctttgcccttgtctgtctagggtacagaagaaaaatgaaaaattccctctttctcctgctccctcattgacttttttgaatatatttagatcatcaggtgatatgatgttttgagtaaaatgtggccagggagccttgagtcctctctcttattaatgtggaaagtgccttgaaattcagatggatggtcatgagccctaaagcccagggcctaaagcccaggagaggctgacagcagtggaccaggctgg

SEQ ID NO: 101524 - DNA, 393 bp, Homo sapiens
  misc_feature (1)...(393): n = a,t,c or g
catcctggctaacctggtgaaaccccatttttattataaatacaaaaaaaattaaccgggcatggtggtgggtgcctgtagtcccagctactcggaaggctgaggcaggagaatgacgtgaacccaggaggcgggatttttttttttattttcttccggcagaatgggaaaagttttttatatattttgaaaacaggtcttttataagataaaaaaatggggactttttttttcctttctggggcttgccattttgttttcttgaaggtattttttacaaagcacaaggttgaaattttgatgaggcctgttttttttttttaaaaaaaattatgatagtttactaatttcatgtcctgagtttttggctaccaaaaatatatatgtgttttn

SEQ ID NO: 101525 - DNA, 390 bp, Homo sapiens
cggggtttcatcgtgttggtcaggttggtctctaactcctgaccttaggtgatccgcctgcctcggcctcccagagtgctgggattgcaggcttgagccaccgcagccagcccttgacttggagtctgtaatgaacagcaagtattatgatgtgctgttcacagaggagcaggatctgctgttagctggtgaggcaggatccagggggaaatgagtacccattccctcagtggccctagagtttataattttaaaaatgttcacttacttttggatcactaaattcttcttataaaattggagtaatcactcatggccatgtgggctttagaacagtgtaaagctgttgcttttctactaagtcaatcagtgccccaaaacccaagctgc

SEQ ID NO: 101526 - DNA, 402 bp, Homo sapiens
cccacgcgtccgtatttcttcagtatccttagaaagctgagtccagttcaggttgctgttgattgcaaaggctgataagaggagggagggagtgtgtgcatgcagaaattccccagcggagggaaaatagtccttttcacaggttagagaaagtgcagtagtttccttgagggagaataaagggcatggttgatacctctctttaagaacatgatgaccgggcatggtggctcctgcctgcaatcccaccactttgggaggctgaggcgggaagaatgcttggcccccgagctggacaccatcttgttttatatattgagaccctgcgggtgttaaaaaataaaaaaaaaaaaaaaaaatgcctgggtggccggggaaaaaccccccctccatacataaaaa

SEQ ID NO: 101527 - DNA, 400 bp, Homo sapiens
ctccgagccaggtgcgggatataatctcctggtgggccgtttttaaagcccatcggaaaagtgcagtattggggtgggagtgacccgattttccaggtgctgtctgtcacccctttctttgactgggaaagggaactccctgaccccttgcgcttcccgagtgaggcaatgcctcgccctgctttggctagtgcagggtgtgctgcacccactatcctgcacccactgtctggcactccctagtgagatgaacccagtacctcagatggaaatgcagaaatcacccatcttctgcatcgctgacgctgggagctgtagaccagagctgttcctttttggccatcttggctccagcccccaatcaaaattgtaaatgtgatttttcttttttgctattaaa

SEQ ID NO: 101528 - DNA, 406 bp, Homo sapiens
tcgtttgaacctgggaggcggaggttgttgtgagccttgatcgtgccactgcactccagcatgggtgacgaagcgaaactctatctcaaaaaaataaaaaaaagaaagaaaaaaaatcaatgcagagtgcttttagtatacaagaaacacttgcttcaggggaccagcagcacttagctactttgagaaagttggcttctttgaagaaggcatagagtgggcagaacaggtcaattacaagtgtttaccaagtctcaggtctttacgactatataaactataaatcattttaatttccttgagttcaggagccaaactagtgtggagggacaggataaaaataaaacaatttgtgaatatgacaatatatgattgagtgttaactgtgtgacacagtaagtgttgg

SEQ ID NO: 101529 - DNA, 365 bp, Homo sapiens
cccacgcgtccgtctcaaactcctgggctcaagtgattctcacacctcagcctcccaaagagctgggattacaggtgtgagccaccgtgcctggctgttattttatcaattcctcaaaattcaagcatgccctcaaatatttttgcagcctcatatagctcttaatttggtttatattcatccagatggtaggatatgattcatgttccacctggttttcttcagaaatacttagacagtgtctatggaaaaaaacattgaaccagatttagcttttaggtaaataatataatcacctgggaaaaaaaaaaaaaaaaaaaaaaagaaaaaaaaaaaaaaaaaaaaaaaaaggggggggccctttg

SEQ ID NO: 101530 - DNA, 383 bp, Homo sapiens
accaaatagcaagtgaagtgttttgaggtctgctttgtaccagatgagggttccagagacctttgatttgtgaacgcaactaaatagctgaactaggcttattctgcctatagtttgttccgttgaagcaaagattgtgtgcgcattgtattactcagagcccaggccaaggcaggtagttacagaacagttaattggtgtaggccaggcgcagtggctcacacttgtaatcacagcacattgggaagccgaggtgggaggattgcttgaggtcacgagttcaagaccagcctgggtaacatagtgatccttcctctctacaaaaaaaacaaaaaaaaaaaaaaaaggggcgcccgtttaaaagaacccaacttaacgcccgc

SEQ ID NO: 101531 - DNA, 398 bp, Homo sapiens
aggattttgctctgtcgcccaggctggagtgcagtgacaccaccatagctcattgcagccttgaactcctggcctcaacctatcctcctacctcatcctcccgaggaggggcgccactccatgcctggctaattttttttttttttttttttttgaaaaaagggattctaagcccgggggggggggtttttcccttaaaaaaaaacaaaaataaccgggcaggatatttttttaaccccagaaccaaaaggttgcggggacccaaaaatgtccctttgtttgaggggaccaaaaaagggccccttgccctccgccctgagcaaaagaggggacccttttttaaaaaaaaaaaaaaaaggggggggcctctttaaaaaaaaaaattttataccgccggg

SEQ ID NO: 101532 - DNA, 388 bp, Homo sapiens
gtgaacatggctcactttaccctccaactcctgggcttaagcagtcctcctacctcagcctcctgagtaggtaggactacagatgagcagcaccatgcccagccaatttttttatttttaattttttgtagagagaggatctcactatgttgctcaggctggtctcgaattcctggactcaagcagtcctcctgcctcccaaagtgttgggattattggtgtgagctgctgtgcccagccaatgcttcttttatatatttatttagatttggtgtttgatttttttgttaataagggaccttctcaaagatacttttaaatgaaaagacaaagggtcagaaaatactggtttttttttttttgggaaacagtctcattctgttgaccc

SEQ ID NO: 101533 - DNA, 393 bp, Homo sapiens
  misc_feature (1)...(393): n = a,t,c or g
caccttactaccagacaaccttagccaaaccatttacccaaataaaaaaaaaaaaaaaaaaaaaaaaaaaaaaaaaaaaaaaaaaaaaagggggggcccctttaaaaaaaaaaaattttaaacccgcgggggggggaaaaaaaattttttttttagggcccccaaaatatttttcggggggcgggttttaaaaaaggggggggggaaaaaacccggggaacccacaaattaaggggttggaaaaaaccccctttttttccgggggggaaaaaaaaaaaaagccgnntnnnantnntnttannttattannaatattcattttaattatcattttttggtgcaacccaatcacaagtggaataaaaattattgtctgacgttgacgacaacatt

SEQ ID NO: 101534 - DNA, 393 bp, Homo sapiens
tgatttagtgacagaataaggactggaatgcaggccttctacagtacatgcagtacatgctgtgtgtgcatgtgtgtgggtgtgcaccacatggctctgtgggcctttgcagggtgggctacagcagtcacaggaccttttttcgagaagagatggggtttcatcatgttggccaggctggtctcgaactcctgaactcaagtgatccacccaccttggcctcccaaagtactgggattacaggcgtgagccaccgcgcctggcgagaaggggctggaggctccacttccctggagggccagatcccaggaggaactgtggggtggaaaaaacggaggggggggaacagccccagatccacctgccccccaggtctccagccaccggcaccag

SEQ ID NO: 101535 - DNA, 406 bp, Homo sapiens
  misc_feature (1)...(406): n = a,t,c or g
gtttgttgaggtggaggaacagaagtgaaatgagcaatctgctccatttagaagtcagtcgcttcggctgttcattccactaatatttatctagtacctattctgtgccaagcattgtctctacctcagtttgccacaaatatgaaaaaaaaaaaattcttggaactgggaggcttcaatgtgttggggaccaatatacaaataaaccagtggaaaagaaaaaaaaaaaaaaaaaaaaaaaaaaaaaaaaaaaaaaaaaaaannnnnnnaaaaaaagaaaaannnnnnnnnnaaaccgaggggaaaaaaaaaagccttaaaaaaaagtccattttttgttttttttttnnntnttggtgggggccctcttagaaaaaaaacacctctccccccccccccccccccc

SEQ ID NO: 101536 - DNA, 392 bp, Homo sapiens
  misc_feature (1)...(392): n = a,t,c or g
ttttagcattaaaatgatgaaggggttactgtgagttgaagttcaagtctatcttcacatgtggagtcccagggaagtccctagccccctaaagcaggaacctgtaattaatagcttcttgggtctttatttgatgattagctagaagttaggtcagctatagcttgagtgagaggcattttttctttttctctaaaccacatcaaaatcagaagcctgccagcttgcctgtctcagctgtacctttgcatttccaccaagagtgtgccaatgttcccttttcttcacatccttgccaacacttggcttttgattttttggtaataaccatcctgacaggtgtgagatgttatctcattgcggncataatttgcatttccttgtatgttttn

SEQ ID NO: 101537 - DNA, 301 bp, Homo sapiens
ctttagtgaacatcttagactgaggggagattcataatcataatcatatctatcacttattaagcaccacctttatacatcagggacttaatatgtgttacctgattacaactgccaatcacccaactagtttggcacagtatctattttatgaagaaaattaggtatagactaggtgtggtggctcacacctataatcccagcactttgggaggccaaggtgggaggattgcttgaggccaggtgttcaagaccagcctgagtaacacagcaagacaaaagaaaaaaaaaaaaaaggggg

SEQ ID NO: 101538 - DNA, 384 bp, Homo sapiens
acgtgagccactgcgcccggcctaaaaggaactttaattaaagtcttgggtttatcccctcacatttcagaattttttcttcaaagatttttatctcatccttctaattaggatataggtgttgaatcaatactgtaggtactgtctagaggcctgtgatcaaattccaggaactcttaagtgctattcttccatttaagaagcttaaaattgaccagtctggacaacatggtgtttcaccatgttggctaggctggtgtcgaactcctggcctgaggtgatccacccacctcagttatccaaagtgctaggattataggtgtgagtccccgcacccagccctcagttaaggttttgagtgttcagattaaaaatgttcaggtg

SEQ ID NO: 101539 - DNA, 395 bp, Homo sapiens
  misc_feature (1)...(395): n = a,t,c or g
gttgagacgggaagatcacttcagtccaggacatagaggctgcactccagcctgggagacagagccagaccctgtctccagaaaaaaaaggagaggagacaacaaaatttccaaacctaggatacgtagggaggagcagtaactggatctgagagatgacaccttggccagcagtccctcaagtctgctttcccatttcatatggaacttgctccttccttgccccagcaggagagtagagcagaaatgtctggagagggtgacataccaggtagccagggaaggtggctcactcctgtactcccagcactttgggaggctgaggtgggcagatcccttgggtcaggagttggagattagcctgggcagcatggggaaaccctgtctctacagan

SEQ ID NO: 101540 - DNA, 393 bp, Homo sapiens
cggacgcgtggggcgacaataatcatacactggagaaatcaagcagtacctaaactgggtattcctgaggagcagatggacattatgcacctctggatgtgacacacacaggagaacacatcactttacagtattctgacaatgagaaaacatcagacaaacacaaaatgaggatgttgtaataaaaagtagcaatgagactgtattctgtaaaaatattattatcagtctgggtgtagtggcacacgcctgtaatcccagccctttgtgaggccaaggtaggaggatcacttaagccatggagttctagaccagcctggacaacatagccagaccctgtctctaccaaaaataattttttaaaaattagccatgtatggagagttgggctgt

SEQ ID NO: 101541 - DNA, 381 bp, Homo sapiens
aaagttttctactaagataaagatgattgtgtatggctgggagcagttgctcatgcctgtaatcttagtactttgggaggctgaggcaggaggatcactcaaggccaggagtttgagaccagcctgggcaacaatgagacactgtctctcaaaaaaaaaaaaaaaaaaagggggggtcccctgcacccatttttccaaaattaaggccaaatggtttttaaaaaattccttttcccctttccgtttttttttgttttggggggggttttttgggggggggggttttaaaaagggattccccctttgccccccaggttgaaggacaagggccctttttttttttttttttttttaaaaagggagtctctttttttgcccctg

SEQ ID NO: 101542 - DNA, 864 bp, Homo sapiens
tttttttttttctgtacgtatgttttatttgaacatccacatttcttagcttagagacaattatattccgtacacttttcttctctctctcttacaatatttagactggccaaaaaccagggaaaatgtccttggactggcagtcattataaaattttacttaatgcttatgaaagcactcatgtgaaaagcttcagcatgaagtgtaatcaccacattcagtttcaaagttcaaatgcccattcctatgatgggtaaacacctaccatagcgcaaagaaggagagtgattgtgggtaatgacagagggaggaaaagtgaaggggggtaacagcttctcccagaggagggggtggtccctgttccatgcccatcttgtctccttaaacaggaacagccaacaggcctaccagtccttgtactctatgcagctacttcccctgctggaaatgagcagctgccttcttctccctaaggtttgtcctcttttatctgattcttggaaacgtttttttaagttttgccaggttctttgttctttcatgaatgaactgatggaaattttctatggaagttacttacctcacttaagaagcacacagcagctctcgcctataatcctagcactttgggaggccaaggcggggggattgtctgagctcaggagatcaagaccagcctgagcaacacatgtgaaaccccatctccactaaaatacaaaaggccaggtgtgcatgcgcctataatcccagctactcaggaggctgaggcaggagaattgctagaaccccggaggtggaggttgcagtgagccgagatcatgccactgcagtctagcctgggccacactgcggactctgtctca

SEQ ID NO: 101543 - DNA, 402 bp, Homo sapiens
cccatttccatctcactttgttttaaatgtccccttgcaaaggatcggtcactttagggctgttttgagacatacctttttggggcagacacgtggctcctgccggggtggggagaggggggcatgtcctggcacctccccgagagtctgctgcacagccaatgcttcacaaaagttggctgaatgaatgaatgaatgtggcttaaaacccaccatccctgatgggagcgattaattcattccaggacttggctgtagagacttccttgtttctgtgattgctgtttctatgtatgaaaaattgaaacttggccgggtgcggtggctcacacctgtaatcccagcattttgggaggctgaggcgggcagatcatgaggtcaagagattgagacctttctggg

SEQ ID NO: 101544 - DNA, 401 bp, Homo sapiens
cccacgcgtccgcaccctctttgcacctctccaagccataagaaacaacccactctctaaaaaaagttttaaatttttatagagacggcacctctctatgttgcccaggctggtcttgaactcctggcctcaagcaatccgcccacctccgcctcccaaagtgctgggattaaaggcacgagctactgcacccagccacaaatgttttaaaaaagtttataataatatgggaaaggagaggactttggtattatattaaactagaaattcacaggacatgggaacagtatccaaaatagtgtgtttttgtacatacacacataactcagaatgtgtcaagaatttttgctcaggaaaaaaaaaatactagaaggaaatgccctagaatgttaaagtgattt

SEQ ID NO: 101545 - DNA, 396 bp, Homo sapiens
caacaaggaagatctgttccagtagcattttaaaaaggcctctcaactaagacttattgatggtgatggtgcatatgtctgtcggtctgcggaaatgcaggtgagcaagggaatgcagaacagatgcagagtatacacataggcgtctgatgcaggttcaagtcgagtagcttccgatacgactgttttctttagttttcacaaccattgaaaagagcaggccaggtatggtggctcacacctgtaatctcagcactttggaaggctgaagtgggtggatcacttgagcgcaggaatttgagacaagcctgggcaacatggcgaaactgtctctaccaaaaatacaagaatcagctagtctcataacccggtctcaaaataaataaaaaaaaaaaa

SEQ ID NO: 101546 - DNA, 397 bp, Homo sapiens
cccataatgaaatgtgtagtagttgcatatggctagtgcttctctgtgtattggaattgtactgttttcccttagaatttgttttttctttaatgagtaattttcagttatataaagaatgtttgcatacttttataataatgagaactgtaatagctcattttccactcagcagatgattttggagatttactaggtagatgttgatacatacagacctagtttgggtcattgttctttaaataatcatcctgtaaacacatttatttacagtgttttgtcacttattgaaagtggggttttttttggcggggcgcgctgagtcacgtctgtaatcctagcacttagggaggctgaggcaggagaattgcttgagcccgggaggcagaggttgcgg

SEQ ID NO: 101547 - DNA, 411 bp, Homo sapiens
  misc_feature (1)...(411): n = a,t,c or g
cattatttctgtacctgatgtacctaactgggatggaaatgaacaaatttcccaactctcattcttgggagtgaacatttgcatttaccagcagtgggtgccagtttgcaaatctaggaaatacccagaccagactcaaattcttggccagaagtgccaaccccctgaggcacccacagggtagaaatgtgtagtcaatggctgggtgtggtggcccatgcctgtgatcccagccctttgggaggccaagtcaggaaaatcacttgagcccaggagttcgggaccagcctgggcaatatagggagaccctgtctctacattaaataaataaataaattattttatttatttatttttttaaaagaagaaatgtgcgggcaaactattataataacctacttctttttccan

SEQ ID NO: 101548 - DNA, 405 bp, Homo sapiens
  misc_feature (1)...(405): n = a,t,c or g
cccacgcgtccgggaagacaaaaagttaaaacaactgcaggatagtaaatggaatcagaatgaaatgatacacataatgtcagtgaacctcaaactgggcatggagcttgctagcaactggcataacatagaagccttatcagttataccacttgtagtatctttaaaacaaactgtttaacagtgacatggctcttcccgatgccaggatcagaaggacagctctcagaagggtcttcaaaagaacacactgaatcctatgactctcattgcagngagagctttataggattgttcttcctgttgctctccattaaaaggccgataacggggctgagcgcagtggctcacgcctgtaatcccagcactttgggaggctgaggcgggtggatcatgaggtcaaan

SEQ ID NO: 101549 - DNA, 496 bp, Homo sapiens
  misc_feature (1)...(496): n = a,t,c or g
cgcgccccnnnnnttttgaatacgtaggtgctacgaaggggcaccgngncggaattaccgggtcgacgatttcgtggcgccgggcgcgagcggagatgagggtttcggccgttacaagagaggatgctgctgagcgctagggcgcgacccctgctggaaggttaagagatatggaaatttccacaaggatttggagaggagccccagcagttactaaaattctgcattagatctgtcaggaaagatagatggacttcaaggcaattgcccaacaaactgcccaagaagttttaggttataatcgatatacatcaggctggaaagtggttaaaacttcacagcagcggtgtgcacctgtagtcccagctactcaggaggctgacacgggaggactgcttgagcacaggagtttgaggctgtcatgcaccatgattgtgcctgtgaatagccagtacactacagactgcgcaacataaagagaccctgtctttgaaag

SEQ ID NO: 101550 - DNA, 402 bp, Homo sapiens
tttcgtcattaattagtccgttaatccatgggtggatgaaggcagagccctcatgactcaatgacctcttaaagcccacctctcagtactgccacactggggattagattacatttcaacatcatttttgcagaggacaaatattcaaaccatgacaaccttaatcagattaagaaagtttcctgatagtgtatttcttcatttctaaaaataaggtttcctttaaaagttgtcttttgattatgatttctaacttaatttcattttgatcagagagcatggttcatatgattttaatcctttaacatttattgagatttgctttatggctcaggatatggtcaatttctttttttttttttttttttttttaaaaaaaagaccctttttggggcccagggt

SEQ ID NO: 101551 - DNA, 399 bp, Homo sapiens
  misc_feature (1)...(399): n = a,t,c or g
tttcgtcagggtctcagnnnnnntccggggttgttcttgagctcctgacatcaagtgattctcctaccttggcctcccaaggtgctgggattgcagttgtgagtcaccacacctggcctggaatctgcattttttataagacccctggataatttcttatgtgcatgagagcatagggttgggggactgagtttcgctcttgtcacccaggctggagngcanngnngcgatctttgctcactacagcgcataactcctgggctcaagggatcctctttagtattcgagactatagatttgtgcccacttccagtgactttttaaacattttttaaaagcggttattattattttattatctttattttggagaattatttttgtaaatccaaggcgctt

SEQ ID NO: 101552 - DNA, 436 bp, Homo sapiens
tttcgtaaaacacatatgtttaaggtgtcaggctttattgagaattacttaataaattaggcttttataccacctttagatgcttttaatttttagcatgtcattatatgaaagcttttttaaagtttatagaggtgataaataatattatataacaaattgcaattctcccttttttttttttttttttttttttttttttaaaaaaaaaatttttttttttcccccaggggggggggggggggggaaaatttgttaaatagaaccccccccccccggggtaaacccctttttttttcctaccccccggggggggggggaaaaaacgccccccccccccccccgggtttttttttttttttttttaaaaaaaaaggggttcccccgggttacccgggggggcccaatttcccggggggggggatttccccccccc

SEQ ID NO: 101553 - DNA, 406 bp, Homo sapiens
  misc_feature (1)...(406): n = a,t,c or g
tttcgtgggagccccaaggaggcccacgaacgggaggccgcgcctctgtgtgcagcggagctcgagcgctgttgtgtgtttggaaggaaggatgctgctgccaatttgtgggaccgctgctgcgaggagtgggcgtggcctcggcggtgtggatgcttgttaggaaagatgctgagtgcttttcagtgaggagtcagggaggtgtgtgtgagagagagagagaaaagagagagacagagacggggagagagagagggagagagaagagagggaggagggaagaaaaaaacacggagggaggtgaggaggaagggagggggagagacatagacctagaggggctgaagacccagacagagctggcagagctactgataagaggactggagcgctctgagagcctctn

SEQ ID NO: 101554 - DNA, 399 bp, Homo sapiens
agcgggaccctgaggagccagctggcgcaggctatgggctgggcggcggttgagacagcggcggtatcgggaggggtaggtgagggtcgcgaggctgcgtgagcatctgagtgaacgcggtgcttttgggaacgcgggacgggcgacctgtggcgccaggagcgggccgaggcgtggcgcacggatgccgtctggatgggaagttacggtttacagcgaagtccacccagcgtttccgaggtgaaggcgccgcgccaggccgggcgggcggctggtgatgggcaagccgggtgtaccaagtccaggatgcacatgaggagcgtttgtagcagtcactgaatcacctcatgactagcggggcaggcctctaattcaccgcaggatttccggctggagtgc

SEQ ID NO: 101555 - DNA, 398 bp, Homo sapiens
  misc_feature (1)...(398): n = a,t,c or g
ggcagtagagcaagactgtctcaaaagctcctggatcaggcgatcctctctcccacttcctccacttaccacctctccaagatgccagcctcactgtgggctttccctagaaagaaacactggtttctttctatcgtgccctggttagtgttgtttctcacattaggcctctgtgttagaaataaagctgctaaactccatgtcgttatacaacaaaaggaatacagngacctatccttcattcttctgatagttccctcaactccagctgcagcccctgccaaatactatcatccttaaaagatagacagtgatcccagcactgtgggaggccaaggcagctagatcacttgagtccgggagttcaagaccagcctgggcaacatggtgaaaccccn

SEQ ID NO: 101556 - DNA, 438 bp, Homo sapiens
cgcagatgtgtggtaaattctgggaaaggagacgaataagaggagatattttgtatctgatttggtaatgcatttgaagccacactagtagatcaagatgtctctgtgtccaaattttttttttttttttaaaaaacaaaatgttggccccagggcaggggcttacccctgtaatcccaccattttgggaggccaaggcaggaaaatcacttgagggcaggacttaaaaaccaccctggttaacatggggaagccccatttttactaaaaaggcccccccccccccagctaatttttgtatttttaggggagacggggtttcatcatgttcgttatgctgagcgggaactcctgacctcatgatctgcctatctcggactccctaagggctgaggttaagggggcccaccaccatgtcaggccttattttttatattg

SEQ ID NO: 101557 - DNA, 425 bp, Homo sapiens
  misc_feature (1)...(425): n = a,t,c or g
atgagagtagaagataaggtggtaatatttatgattttataaattcataggactgccacactatttgcacatttttgtctcatgtttttttcttttctcaactttagaattttgcatatgtacacttcccattatttctttggctctctaattagctacaattattagcaatattcttggtggtctttgagttctcacaggtgtgtgtgtgtgtgtgtgtgtgtgtgtgtgtgtgtgtgtgtgtgtgtgtgtgtccgngnnntttttttttcccccccccctgttcttttttttgcgccccgtgtcttttttagagatatttttccctcctttcgccccaaaaaaaataacgtgcttcttttttgaccaaacctgatgactccctcactcagtatttttgtgtacccagggaggaggctactttg

SEQ ID NO: 101558 - DNA, 411 bp, Homo sapiens
tgtcctattatgtgttgtaatattttggattaaaaaatggagaaaaaataaacaagaaatttttttttgactttttagcagaggtagaaaaaaaaaaaaaaaaaaaggggggggggggggggggttaaaaggatcaagattgggggggggggggggggtatttttttttttttggaggggggaacaaaattttttccccgggggggagtttaacaaacgggggaagggaaaaacccgggggaaaaaaaatttttgggggtggggccccaatcccttttgggggggggggaaaaaagaaggggcgcggaatttttaattatttaaagagggggggtgcggaatggcccaccggctataaaatttggggaaaaaaacacggccagggcgtcaaaagggggggggggggggggt

SEQ ID NO: 101559 - DNA, 398 bp, Homo sapiens
aaaaaaatctgtttagaattccatcctgttttatttttacgaaatagggaaatagactgtcttactttttgaaaagatcctatttaatgtattgtgatgtcaaaaggaaatggaatgccatgtaactgctatgtttaagtttttatttttatagtgcaggataggtgcaaaaaagcaccagtttgaactgttgtgtcatgtttttcttttataaaatattaacatcggcctcagcaacatagcaagaccctcctttagtacaaaattaatttttaaaacttagatatggtggcatgcacccatagtcccagatactcaggaggatgagaaggaagagtctcttaagaccaggagtttgactctgcagtgagctatgattgctccactgcactccagtg

SEQ ID NO: 101560 - DNA, 584 bp, Homo sapiens
  misc_feature (1)...(584): n = a,t,c or g
gcctccgcgcctgagtatcctctcgtcggcctacccgctgtctaatttgtatctctctttcacgtcttcttcctcanccagaggcagtcgcccnnnnnnnnttttgattgcatagccgtgcgccngncgnaccggaccggaanncccgggccgacccacgcgnccggnncataanannaanactncggtttaattatgagacccttacgatgagattcactaggaagctgagcaagacatgtatgctggagttggccacgggtaccactgcagatgctgggcaatacagtttgtgttgtgtaaattatacacacttgagctggcaggaactagggcagcacctggacctgacaaaaaagtcaattgatagatgacacatttcctcctttgtatgttggtgatcaattctaactttttacaacctagtcaaattgcttacagctgaaaaatatggggttttggtttgttttgtttcggtttgagacggagtttcactctgtcacccaggctggagtgcagtaacgcgatcttggctcactacaacctccgcctcctgggttcaagcgattctcccgcctcggccg

SEQ ID NO: 101561 - DNA, 420 bp, Homo sapiens
tgatctgcccgtctcggcctcccaaagtgctgggattacaggtgtgagccaccgcacccggccaagtatcccattttacagatgagaaagctgaggcatagagggttaaagtaacttgagcaaggtctttcaacaatgacagatctgaaatttgagtgcatctgatttagttccagagattatgctctttaccatcttacggacttttcttgtagtctttagtattacggacttttaattgaaatttctgattaagatcatttatgttccttgagttatttatgtattcactattatttcttcaagattatccatttttttttcacctgagtcttacctcaccttttatcttaccctgacaggagactgttgggcagagtacttgatttttaaatgtggtcttttggggcttgtgtactt

SEQ ID NO: 101562 - DNA, 414 bp, Homo sapiens
ctaaatgggagaattgaatttccattactgtgatttaaataccgcaacttcgataggaagtgtattggatctatacatcactttggatgggtatggcactttattaatatttattctttcaatccaaagacataaaatattttaaaattcattcggaccttccttttttatttatttgttattgaacaggatttttacatccctggttaatttttttctcagaaatttattatgtaatgctatagtaaagaagagttttttctctattttatcacatagcttgttttaagcgtatgaaactgtaactgggcgcagtttaagtgtatggaaccatagctgggggtggcctcccaaagaactagatcacgcctgtgctcctatcactttgggagacaacagagcatggatcccccg

SEQ ID NO: 101563 - DNA, 404 bp, Homo sapiens
tcctgtcgttgtatgtagctttgagatacataaggtttcagattaaaaagtctttccatatgtttataaccagtcacataaaggtcgtgtattttactgaaatgttttgagttatcttaatgatacttagcttctttcataaggcatatagtcacagttgagctaagtagcaggacacacagggaagacaatgcattattaattttagaaatctttccctttaccattcttgcaaaattaatctgatactaaaatatgatactaagaggctgggcatggtggctcattcctgttatacctgcactttgagacgccaaggcaggtggatggatcgcttgagtccaggaattcaaaaccagcctgggcaacatggtgaaacctcatctctaccaaaaaaaaaaaaa

SEQ ID NO: 101564 - DNA, 402 bp, Homo sapiens
attctcctgcctcggcctccctttctgttgggattacaggcatgcaccaccacacctggctaatttttgtagagatggggttttgaactactgacctcaagtaatccacttgcctcagcttcccaaggtgctgggattataggcgtgagccactgtgcctggccagaaaccttttaaaactgcatacaagcaaaaccagaccagagcaccatatagcagtcagagaagagggttttctgagtcataaatattgactcagaaaaaaaattcaatatttttctgagtcaaaaatattgaatggtgtgaggaagagtggaacagaattggtacaccttagttcgtgtaaaataaggaagtgtgtcagaatagccaagtgctaagtttagaaatgagctaaataaa

SEQ ID NO: 101565 - DNA, 389 bp, Homo sapiens
agcatggggaacactattaaaaacatagttttctaaagtcagatcaagggtaaaaggagggcctggcatggtggctcacgcctggaatcctagcactttgggaggttgaggcaggagggtcacttgagaataggagtttgagatcagctttggcaatgtagtaagaccctgtttcccctgtctctacttaaaaaactaaaaacaaaacaacaacaacaaaaaaatcaggtggggggtgggaggggcggcatgtggaatgggggaaggaagtaaaggctgtaataaaaagaactgcccaaaaagcaatgaatgtatggttttttagttaagggtaattaaacaaaaaaaattaggtgctacttgtatggccaatatagagacttagtgat

SEQ ID NO: 101566 - DNA, 404 bp, Homo sapiens
  misc_feature (1)...(404): n = a,t,c or g
gtaatctgatactttgttcttcttttgcacacacacaccttaaagaagaatgcatcctctatccaaaagcagaagtaagaggaggtgaactcagggtctgctcctcataccttgaatttatatttgggtcatttttcaaatagagctgatgctgctttagaggagaaggtgacaaccaatctaagatataacaaaaagtttagtcttttttgggaggggtgttggggcctaactctattgcacaagatggagtgcagtggcatgatcatggctcattcagtctccacctcctggctcacgtgatcttcctgccttggtctcccagctatttgggaggctgagggaggagaatcacttgaaccagggagttggaggttgcagtgaaccaagatcgcgccactgcn

SEQ ID NO: 101567 - DNA, 414 bp, Homo sapiens
aaatagtattatctcctgtgtaccaggcactgtcctaggcactggttgctaaaatggaatattatgaaccccatgggccaagaggacaaaaactgctgagtgtattttctaaactttgttggtacctgtcctgacttctgtgatttgccaattttcttcaaccacacaccacaatttgggtccaaacaaaggttcttctgtaggccctgccctgagagtcagtagagggagatctcactagagtaaaaatgaactctttttgaggttacagtaagctatgatcatgctactgcactccaacctgggtgacagagcaagaccttgtctcccaaaaaaaaaaaaaaattcttttgcaaatatgaagctgaaattatacaatcctaacaacaacctatgatgagctttactgcttct

SEQ ID NO: 101568 - DNA, 424 bp, Homo sapiens
  misc_feature (1)...(424): n = a,t,c or g
agaccacaggcggggcacagtggctcatgcttgtaatcccaacactttgggaagccaaggcaggcagattccttgagcccagaagttggacaccagcctgggcaatgaagtgaaaccccttctctaccanaaaaaaaaaggaaggaaggaaaagaaattatttttttaaaaagggggagacaatcctccaaaaaaccgttgcaaatgtcccaaaaaggtgatgctcccaagtgcacagggacaaaaagtaaaaggggggttgccaaagggctgggattacaggcgtaagccacccccccggccacaagcattagaatttacttccgtaatttccccatgcccttgtaaaaaaaacacacacacacacacacacacacacacacaaattctccccccatccattagaaaattctatcagtctacg

SEQ ID NO: 101569 - DNA, 410 bp, Homo sapiens
  misc_feature (1)...(410): n = a,t,c or g
caagcctagcattttttgttgagacaggttctcactttgtcgcctaggctggtctcgaactcctgagctcaagtaattctcccgcattggcttcccaaagtgctgagattacaggcgtgagccaccacacccaaccagaataaggatattctcatatgtaaccacaatacccgtatcaactcagatttaacagtgatacaataattttatctaatgtattatttgtgcccaatttttgatcttacaatattctttatcctctcctcttcctccactaaagaatgcaatctaggatcaggtgtcatatttagttggcctgtctcttatttcctttaacctgggatatatctaaaacctttgtgtttcatgacagtgacattttttaagagtacagtattcctcctttntan

SEQ ID NO: 101570 - DNA, 398 bp, Homo sapiens
ctcctaataccggcacctttagtgttagattttcaacctatgaattttgggaagatactaacattcagactatatagcatgtggcaaaccagaccttggaagtttctttaatgggatgtataaactaaatacagaagacagaaagaaaacaacagcaaaaaaagacaacaaaaaccatacacaccaaaaaaaaccacagaaaacaaaacagtgacaccacaacaacaacaacaaatataagagtttagataacatcatggatgacaaattcataacctacaagtaaggacaactcaaaagtgtagggagacacagacagccattacctcttttggaagggctgctttcaggagaatagttcagtgtcccatggtccatgctttgatgattctaacaag

SEQ ID NO: 101571 - DNA, 410 bp, Homo sapiens
aatctcactatgttgcctaggctggtctcaaactcctgggctcaagcgatctgcctgtcttggcctcccaaagtgctgggattataggcatgagccaccatgcccagctaggccttagccatttcaaatgccaggtggatatcgaggcggtcttggggtttgaaacctggttccccatggatcatggatccagtttaagtccagtgtcctcagaggatcactgacaagacactgatttgggtagataaaaataaatcatgaggcttaccaaaatatttactttaaggggcccacttcccagaagaatttgcagagaaagggaaaggctagactgagagcttatctctggcttcatttcatcaaatacctgatttctcactttcagtttcctttccttagtaaggaaaact

SEQ ID NO: 101572 - DNA, 413 bp, Homo sapiens
cgcccggctaatttttgtatattttttgtggaaacagagttttgccatgtcgcccaggctggtctcgaactcctgggctcaggtgatccaccaacctcagcttcccaaggtgccggaactacaggcatgagccactgagactgacctacgttatttcttataccttgctagggaagtgtaagttaatacaatcactttggcattatctcttataccacccccaggtacacactcactcacgagaaactctgacactttttagaaagatcatagcagcactgttcacaatggcagagacctggcaaaggcccaattgcccatcaacaggagagtaggtgaagaaactggcattttcacacagtggaatatttacagagcagtcgaaatcaataaacaatgacagcaatttggat

SEQ ID NO: 101573 - DNA, 411 bp, Homo sapiens
  misc_feature (1)...(411): n = a,t,c or g
cccacgcgtccgatctgttcagagggtaatttaccaatatgtataaaacttacaaatacatgtgccctttgactcaacaaatctaggaatttatttgacagatatacttccacatgtatggaatgataatatgtacaaggtttttgctgcagtatcatttgtaatagcaaaatattgaaacccatgcttaactaggagacaatgtaataaactgtggcccatccatgcaatggaatactatgtaactataaaaaagaatgaggacggccgggcgcnnnnnnnnnnnnnnnnnnnnnnnnnnnnnnnnnnnnncataattttttttaatgtttgcataattaaatttttcaattgtttcttttgtggcttctgggatttctggtttccttagaaaggtcttcttcactgcag

SEQ ID NO: 101574 - DNA, 389 bp, Homo sapiens
ttaataagcatttaaaggccaggtgtggtgggtggctcacacccataatcccggcactttgcggggctgaggcgggaggattgcatgaactcaggagttcagggccagcctgggcaacatggtgagaccatcatctctacaaaaaaaaaaaaaaaaaaaaaaaccccccaaattttcccccggcccccggggccatttttggggcccttacttttggggggggggggggggggagaaccccctcctttgggggattcggaaattgaagaaccttaaattcccccctttttttcccaggggggggaaaaaacaaaattttttttaaggaaaaaaaaaaaaattgggggggtttagggtttccgggggaggaagggcccccccgccccccc

SEQ ID NO: 101575 - DNA, 407 bp, Homo sapiens
aatttgttgttttggttatgcagaagttagttatcaggttatatggttcccaatgagtgaggaaattgggaaggttttgtgtttttttttgtacttgttaactaaaaatgggttttgtagtttagcttaagggccccaacagcttgtttgagaagacagctatggaacttgagctgtttacatgttttttaatactgcgagtgtattaggaaaattgtaacaagtccttctcttgttctttaggacttcaagtgagttaaagagatgacaacatgtgttttccccaggaaagctttctttgaggatttgctttcttttaaaaaagatggctgggcacggtggctcacacctataatcccaccactttgggagactgaggtgggaggatcacttgagcctaaggagtg

SEQ ID NO: 101576 - DNA, 388 bp, Homo sapiens
tcgattttttgagacacagtctcgtttgctgcagcctccacctccccagctcaagtgatcctcccacctcagtctccaaagtagctgggactatagacatgtaccaccatgcctggctaatttttttcttttttggtattttttgcagggacagggttttgcttttttgctcaagctgaaatttttgtttaaataaaaaaaattaaaactagagactgggaagggtgggtatgcagtgactactgaaattggggttctgtctctgtttgagtttttccctgaaaatgaagacagatgtccctcagtatttgtgggaaattggttccaggaccctctgtagatgccaaaaaccttggatgctcaagtcttacataaaaaggcatagtat

SEQ ID NO: 101577 - DNA, 482 bp, Homo sapiens
  misc_feature (1)...(482): n = a,t,c or g
cgggggtgctcnganatgaannaaancccaggganccttcgataganncccntnnnaangaancnnngggataggatactctcttgancccaggagtttgaggctgcagtgtgcaattactttgccattgcactccagcttgggtgacaaagcaagaccctgcctctaaaaaaaagaaataaggaaacatttgtttgattaaaaatcaaaacacctcagctggatacaatggcacctgcctgtctgcctgtagtcccagctactcgggaagctgaggtaggaggatcacttgagcctagaagttcaaggtcaacctaagcaacatagaaagaccctcatctctaaaaaaaaaaaaaaaaaaaaccaggctgggaggcccagggggccaaataacaaggtcaggagtttgaaaccaccctggccaacatggggaaacccccccgctactgggaatacaaaaattacccaggcttggggatgag

SEQ ID NO: 101578 - DNA, 376 bp, Homo sapiens
  misc_feature (1)...(376): n = a,t,c or g
accatgtccagnnnnnnncctttgttatttgtatagacagggtctcccctcgttgcccaggctgggctcgagctcctgggcttaggcgatccttctgccttggcttcccaaaatgctgggattacaggcatgagccactgtacctagccaaaaccaaaatttttattcatcttttcaaagaacgaaatttggttttggtgattttctctattaattcctgctatggcttgaatgtttgtcccctctgaaactcatgttgaaactgaatccccagtggggctgtattgaaaggtaaggccagctggtcgcggcggcacatgcttataatctcagcattttgggtggctgaagagggaagatcgcttcaggccaggaa

SEQ ID NO: 101579 - DNA, 488 bp, Homo sapiens
cgcccacgcgcgccccccttcgagcccctttcgagaccatagtccaagaggaggaattctccaaacatcactttggcttcgaagccgccgcctgatactggcattttgtagatgtggtttgactatttctgtatgtctccatctattgatgagggtcttaaaaaaaaaaaaaaaaaaaaaaaaaaaaaaaaggggggggggacctaaaaaacccggggggggacccccctttttccaaaaaaggggcccaaaaaaatggggggccccccaaaaaaaaggggggggagggaaaacttttggccggggaaaaaggaaaattttttttttccccccaaaaaaaaaaacccaaagttttcttttattttaaggggggaattggcctcaaaaccgggaaaaaaaaaagggttccccccccccccccccaaaaattttaattaaaaaaaacggggcggaaacaaaaaaattttttttttaaaaaaaaactaaag

SEQ ID NO: 101580 - DNA, 468 bp, Homo sapiens
  misc_feature (1)...(468): n = a,t,c or g
gagcnagannnnaatcgagacctctagcaagtgnggnggaattccagagcatagaggatttttaaggtatcaaaaacactctgtatgatactataatgcatacatgacattatacatttgtccaaacccatagaatgtgcaacaccgagtgaaccctaatgtaaactatggactttgggtaattatgatgtgttgatgtagatttaccaattataacacatgtaccattctggtccagatgttgataataggacaggctgagcaagtatgggagttggaggtatatgggaaatttctgtgctttcctctccaattttgctctaaaactgctctaaaaaagtaaagtcaggctaggcatggtggctcacacctgtgatcccaatgttttgggaggctgaggcaggggaatcacctgaggtcgggagttcgagaccatcctgggcaacatggtgaagccccgtctctact

SEQ ID NO: 101581 - DNA, 470 bp, Homo sapiens
  misc_feature (1)...(470): n = a,t,c or g
ggcttccggncttntttaaaaaggcaananagtancnncnnnnaannnnnnnnngagctgtggggggctctttccagttggagcttcctgactgctttgtttatttactcaagccttggcaatggtgggcgcccggcgcccattctcaatgctgccttgcagtttgatctcagactgctgtgctagcaatgagcgaggctccgtgggcatgggaccctccaagccaggcgtgggatatagtctcctggtgtgccgttggctaagaccattggaaaagcgcactattaaggtgggagtgacccgattttccaggtgccgtctgtcacagcttcccttggctaggaaagggaattccctgaccccttgcgttttctgggtgaggcactgcttcggctcacactcggtgggctgcacccactgccctgcacccgctgtccgacaagcaccagtgaaatgaacccggtacctcg

SEQ ID NO: 101582 - DNA, 439 bp, Homo sapiens
gcgctaagttctaaatcgcgagcggccgccctttctccataaaattcttcttagtagctattaccttcttattatttgatctagaaattgccctccttttacccctaccatgagccctacaaacaactaacctgccactaatagttatgtcatccctcttattaatcatcatcctagccctaagtctggcctatgagtgactacaaaaaggattagactgaaccgaataaaaaaaaaaaaaacaaaaaaaaaaaacaagaaaaaaaaaaaaaaaaaaaaaagacaaaaaaaacaaagggggggggccttttaaaaaaaattcttgggggggccccaattctatggggggggaaaaatatgtttttttttttttgggggggggaaaaaaaaacccctgggggttttttgggagagaacctttttttgggggggggaaaaa

SEQ ID NO: 101583 - DNA, 397 bp, Homo sapiens
  misc_feature (1)...(397): n = a,t,c or g
cggggtgaggtccggggatctcggtgcagccactgctgcctcccacgggcctgcgaccgcaagcccaagtcagggttcatgtttgtgtcatcctgggggcaggcttgcccggggctgaagcgtttgggcaaagtcgaccaccctcctgtggtctttgtcttgatttttcttaataaacggtgctatccccgcaaaaaaaaaaaaaaaaaaaaaaaaaaaaaaaaaaaaaaaaaaaaaaaaaaaaaannnnnnnnnnnnnnaaaaaaaanaaanaannnnnnnnnnnaaaaaaaaaaaaaaaaaatttaaaaaaaaanaaaaaanattttttttnnnnnntnttataaaaatttttttaaaaaaaaaaaaattatttattatataaaaataatnnaat

SEQ ID NO: 101584 - DNA, 445 bp, Homo sapiens
aattgcttgaacctgggaggtggaggttgcggtaagctgagatcatgccattgcactccagcctgggcaacaagagtgaaacgccatctcaaaaaaaaaaatgacggggagaatgttcatagaagtatcattcataatagcctctagctggaaacaactcaaatgttcttaaacaggagaatgaatgaagagtttatggtatattcacataatagaatactacttgacaataaaagagaataaagtcctggaacatgaagtatcaaggcttactcttatagatacggggagggaaagaagcaagacaaaagagtatactctgtataatcctatttatacaaatttaagaatagcaaaattgtctgggtgcgggggctcacacctgtaatctcagcactttgggaggccaaggggggcggatcacctgaggtcaggagttcaagac

SEQ ID NO: 101585 - DNA, 403 bp, Homo sapiens
  misc_feature (1)...(403): n = a,t,c or g
aagactcattttgcttttagagacagagttgctccatcacccaagctggggtgcagtggggtgatcgcggctcattgtagcctcagtctcctgggctcaagcgatcctcctgcttcagcctcccaaaacactgggatcacagggatgagccattgcacccagccggggttgctgttttaaattaggaagtcaggtaaggattcactgatagtgacttttgagcagaggtcnttttaaaaaaaaaaaaaaaaaaaaaaaaaaaaaaaaaaaaaggggggcccccttaaaaaaaaccaaattttacccccgggggggggaaaattttttttttttttttgggccccctaaaattttttcggggggcgggtttttaaaagggggggggggaaaaacccccgggccc

SEQ ID NO: 101586 - DNA, 688 bp, Homo sapiens
  misc_feature (1)...(688): n = a,t,c or g
ggaattcctggccccagataaccctttttatgtgagagtgtagagaatgttgctgcagctggtgtgggatgggggatggctgggttgagactgtgttgtcacctgcagtgtacacctgaggtgacatggttctgaacatcactttccccattgaaggcccgagtgacctatcacttgcttctcaaaattcaggaactaggtgactctaggagagtgcacaggaagctttctgcatattctttcaagagatttcgaggtcactgactcttttttcaagacttaaacacaaaatccacatccatcattcttgcgtaaagagaccattcttttttttttgagatggagtctcgctctgttgcccaagctggagtgcagtggcatgatctcggctcactgcaagctctgtcttctgggttcatgcccttctcctgcctcagcctcccaagtagctgggactacaggcacccgccgccatgcccggctaattttttgtattttttagtggagatggggtttcaacatgttggccagaatggtcttgatctcttgacctcgtgatccacccgccttggcctcccaaagtggctggggattacaggtgtgagccactggcacccggcccaagatgggggttttcatcatgttggaccnggctgggtttcaaanttccaacctcaagtgatccatt

SEQ ID NO: 101587 - DNA, 466 bp, Homo sapiens
  misc_feature (1)...(466): n = a,t,c or g
agagcccngnntttgaanncncttgatgacactcgaaagagcggnnggaaaaccactattcatttagggatgttgttcatctcagacaggaatattatacccaaaannnatcgacgacccattgccctcttcccttatgggctggtaacctccattctacggtatttctatctgaatttacccatcctgatgctatggtctgaatgttagtgtctcctgaaaattcatttgtcgaaatcctaacccccaaagtgatggtataggctgtggggggacccctgggaggtgatgaggtcatgagagtggagccctcatgaatgggaatagtgcccttataaaagagacctgtggatccggatgtggtggttcacgcctgtggtcccagcactttgggaggctgaggcaggcatatcactaggtcacgagatcgagaccatcctggccaacatggtgaaaccccgtctct

SEQ ID NO: 101588 - DNA, 465 bp, Homo sapiens
  misc_feature (1)...(465): n = a,t,c or g
nttgattgccttcgnnctgtgcggtggaattcggcccaccaacattatgaagggcaatctgctttactcaaagtccattggtttaaatgtaagtctcctcccaaaaaaccctcgcagaaacatccaaaataatgtctgaccaaatacgtgggcattgcagcccagtcacgttgacatatgaaattacccatcatggggatgaaaactggtgagtcactggcatatgaatagctggcatgactgtggactctggggagagagaagagaaggagaaggcagggcctaaggaacatcactattcaatgatcagatggaggagagggcaggtagctggcaaaggagacagctgacacttcatcaagtcctcagataccagtactgtagggagagccgtgtgcaggtagcagagccatcccagggccaaggtggggcctcagtttcccatcgagcaagtttccagaaccc

SEQ ID NO: 101589 - DNA, 487 bp, Homo sapiens
  misc_feature (1)...(487): n = a,t,c or g
gggtggnaggggggtttgagancctagcctgagggcgtttgcgncagacagggacgtttaagtctgcagaagtttctgctgccttttgttcagctatgcccggcccacagaggtggagtctacagaggcaggcaggcctccttgagctgtggtgggctccacccagttcgagtttcccagccgctttgtttacctacttaagtgtcagcaatggcagccgcccctcacccagcctcgttgctgccttgcagtttgatctcagactgctgtgctagcagtgagcaaggctccgtgggcgtgggaccctccaagccaggtgcgggatataatctactggtatgccatttgctaagactgttggaaaagcgcagtattagggttggagtgagtcaattttccaggtgccatctgtcatggcttcccttggctaggaaagggaattcccggaccccttgcactttccgggtgaggcggtgcctggccctgn

SEQ ID NO: 101590 - DNA, 379 bp, Homo sapiens
  misc_feature (1)...(379): n = a,t,c or g
gagtctgccaccacaatgggctaatttttaaaatttttttgtagagccaagatcatgctatattgcccagactagccttgaactcctgggttcaagcaatctccccacctcaacctcctgaagttttgggattacaggtatgagtcactgtgcctggccttaaccattctgaagtgtacattgtagttgcattaagtatagtcacactgttgcacaaccatcgccattctctatctccagaattctttttttttttcttgagagggagtttcctttttgtcccccagggttgagtgannnaanaaaaatatttttactccaccctcctcctcctcgggttcccataatgaaaaagatggtgttttatataaaaaaaaaa

SEQ ID NO: 101591 - DNA, 317 bp, Homo sapiens
tcaagaaataaagttgtggttaaattaatacgcttcagttccactagtgcactgctagaaaaacagtcctccactaacgtgaagtcaacttgaaataaatatgaagtatttaggtatttgcctaaagttgcaaaaagacctaagaattgttttacttaaaagaaatggtatagaggccaggtccggtggcttatgcctgttttcccagcactttgggagaccggggtgggaggatcacttgagcccaggagttcaggactgacctgggcaacatagcaagaccctgtgtctatttaagaaaaaaaaaaaaaaggggg

SEQ ID NO: 101592 - DNA, 412 bp, Homo sapiens
  misc_feature (1)...(412): n = a,t,c or g
aacatcttcagcataagacctgaaactgttaaactactggaagaaaacataggagaaaagctaaatgacattgtgtctggacaatgatatttatagttattaaatatttttatttaaatcctcaaaacaactctatgagatattattattcccattttatggataaggaaactgatgtacagagtgattaaatgacttgctagaggctaggtgcagtggcccatgcctgtaatcccagcactctgggtggaaggatcgcttgaggccaggagttcaagaccagcttangcaagactctgtctcaaaaaaaaaaaaaaaaggggcggccgttttaaagaaaccaattttacgtccgcgggcgtgcagaggtatagttttttttttgggccacctaaattaaattcacgtgccg

SEQ ID NO: 101593 - DNA, 395 bp, Homo sapiens
  misc_feature (1)...(395): n = a,t,c or g
tgatcgtagctcactctagcctcactcctgggctcaagcagttctcctgcttcagcctgccaagtagctaagtctacaggaacatgctaccacgcctggctaattattgattttttggtacaaacagggtctcgctgtcttgccaaggctggtcatgaactctgtagctgtttatagcttctcaggtgttaagaagttgtagataatttcatacaaactttttttagggtaacagtttttttgacgaccacacatannaaaaaaaaaaaaaaaaaaaaaaaaaaaaaaaaaaaaaaaaannnnnnnnnnnnnnnggnnnnnnnnnnnnnnngnnnnnnnnnannnnnnnaaannaaaaaaaaaaaaaaaaaaaaaaaaagggggggcccccaacc

SEQ ID NO: 101594 - DNA, 420 bp, Homo sapiens
  misc_feature (1)...(420): n = a,t,c or g
attgaatggatgaatgaataaaaagatgaggataatagctaggagggaagtaggggtgcttcaattttgaaaagaatggaggtcattgaggttgctcattcttgaggcagcagaaccattaaagggcagaagttcaagaccagcctaggcaaaatagtgagacctcatctctacnaaaaaaaaaaaaaaaaaaaaaaagggggggggccctttaaaaggaaccaatttttccgcccgggggggggaaagtttttttttttttttgggggccccaaaattaaattccgggggcgggttttaaaaaggggggggggggaaaaacccgggggtaccccaatttaaatggggtagggnnnnnnnnnnnnnnnnnnnnaaaaaaanttttttggggggagggtttttccccacacaacacacacc

SEQ ID NO: 101595 - DNA, 427 bp, Homo sapiens
caagctggaaaaaatgtctgtcctggagtctcaatataaactggcttggaccagtttaaataatggtccctttttctggctagagagactccggcagaaactcaccaggacatcttaggagggtttcttaatcacttcacagtttcattaccaaaagacatttcaaatgagtgccagattttttttaaatttttattttaatcaaataagtgaacatagttttaaaaatcaagtagccaaaactcatttaaatatatacttaaatccatacattgcactccagcctgggcaacaagaacaaaactccatctcaaaaaatattaaaaaaaaaaaaaattaaatgggtgtgggggcctgtgcctgtggccttatctccttgggaggctgaggcagaagaatcacttgaacctgggaggcagaggttgcg

SEQ ID NO: 101596 - DNA, 754 bp, Homo sapiens
  misc_feature (1)...(754): n = a,t,c or g
atttattaatactatgctatgtattcatctagttcaaagactttgtctgctaataggtcatattttaagaagaaagatatgccagtcagtgagtttgatgaggttatattcgcttacagtttaagtacacttcatatgtttggtttctttttatttatttcaataggtttttggggaacaggtggtgtttgcttacatgaataagttcttcttatttatttagttacttttttttttgagatggagtctcgttttatgcactccagcctgggcaacaagagtgaaactctgtctcaaaaaaaaaaaaggaaaaaaaaaaaagggggggggcccttttaaaggaaccaatttttaggccggggggggggaaagaaattttttttttttgggggcccctaattttatttcggggggcgggtttttaaaaggggggggggggaaaaaccggggggttccccaatttaaggcggtgggggggnnnnnnnnnnnnngggcagcagcggttccctggggaagatgggggcgcggcccacagccgccaaaaaagagaaagggggggggggaaaagggggggttgcgccccgggggggagnnnngggnnggtgcgcgcgtggcgcggggggggcgggcggtgcgtgcgcttgtggtgggttggagttgggtgcggctgcgtgggactttggtggcgcgggggagggagtcgagaaatgcagtagcggaggtgggacgtgctgaggttggtgacgaggcgggg

SEQ ID NO: 101597 - DNA, 744 bp, Homo sapiens
  misc_feature (1)...(744): n = a,t,c or g
aatcagactcagggtgagacgcttccgcccggatgaaggtattgtcggggtgatagtccttgcttccggaaaggcgagctgagcattatgggttagggtctcactttgtcacccaagctgaagtacagtggcatcatctcggcttactcaacctcctgggatcaagtgatcctcccacctcagcccccaaagtagctgggactacaggtcaggcatggtggctcacacctgtaatcccagcatgttgggaggccaagatgggagactcacttgagcccagaagttccagaccagccttggcaatatagtgagatgccatttctattttaaaaaatattttaaaaataaaatatttttctattcacctttcatcaatacaaacccaaaaaaaaaaaaaaaaaaagggggggccgttttaaagaatcaaagtttacgtccccgggctggcaaagtattagtttttttatggggccacctaattcaattccgggggccgcggtttaaaaacggggggacgggaaaacccggggggttacccaatttattggcccctaggggnnnnnnnnnnnnnnnnnnnnnnnnnnnnnnnnnnnnnntnnnnnnnnngnnnnnnnnnnnnnnnaannnnnnnannnaanaaaaaannngngagnnnnnnnnnnnnttttaaannannnnnnnaannnaaaaannnnnnnnnnnnnnnnnnnnnnnnnnnntnttnnttttnnnnnnnncnnnana

SEQ ID NO: 101598 - DNA, 725 bp, Homo sapiens
cggacgcgaaggacgcgtagctggtggtacatgcctgtcttgccactttctcactatggtgaggcgggagaatcccttggaccttgaaagtggatggtggactgagccccaattgcgccactgcactccactctgggagacaaaatgaccctccctgacataaaaaaaaaaaatggggagactgtggcaaacacatcaccattatccaccactgcaaagcctgccaaattgtttttgaaagctaaaaaagaccaactcatgcgggacctctttctcccgaagacgccgaagaagccccagatgtccacaggtttggacgcccgctccaagcgctggttaaaaataatatggagacggcacgggatttggcctctaaaaaatataggtcccactgaagatgtgcaggcgtctgcacacggcggtgtggaggagaatatgacatcagatattgaaatacctgaggccaagcacgaccaccgtcccactgaagatgtgcaggtgtctgcacacggcggtgtggaggagaatataacgtcagatattgaaatatctgaggccaagcacgaccaccatttggtcgaagatctcagtgaaagcctatctgtctgtcttgaagacttcatgacaatcggatctcaatggaagcctatctgtctctcttgaaaacttcatgacatcaggggctaaaagaaagcctatctggcttcttttgaaaaacctcatga

SEQ ID NO: 101599 - DNA, 427 bp, Homo sapiens
tgcaggagcaaaatgataaatcaaagaaataatcaacacagtaaaagggagagaaaaataaacaaaaaaaaagatatataggataaaagaaaagaaaaaatcaaatacatagacaaagaaaaaaaaaaagggaaattagaaaaaaaaaaaaagaattaagaaaaaaaaaaactttttggggaaaaaacaaaaccttatggaaaatggaaaaaaaaaaatttattttttaaaaaaaagggggacccccaaaaaaaattaaaaaaaagggggattcctggggaaaaaaaagggaaaaattcaaaaaaaaactttaaaaaaaccggggcccaaaaaaaaaaaaaaaccccaaaagggggggaaaaaaaaaaaaaaattttaaccctttttttaaaaaaaaaaaaaattatttttgggggagggggaagag

SEQ ID NO: 101600 - DNA, 403 bp, Homo sapiens
cccacgcgtccgctgttttcggaagtatctgactttgtataagactgcaaagtcctagaacccaggtccttaactattcaccattgggttccaaatgcccaagaccctgatatgtgtgcagtagaaactcagtgaaaatcgttttaataaatgaacaaatgaaggagtcattgataagttttctatggataatacaacaagtaggtgattcctctgaactggataatactttattattattactattattattattttgatagagagggtgtttcactatgttgcccaggctgatcttgaactcctggccccaagtgatctgtccacctcggcctcccaaagtgctgggattacagacataacccactgcatctggcctactttattattttgtgtaattacg

SEQ ID NO: 101601 - DNA, 409 bp, Homo sapiens
  misc_feature (1)...(409): n = a,t,c or g
aattgaatgacttgctgattaaaatatactgggtactgaataatgttgctgatgagagtaaatgtaaatggtgtgaagtcaaagttggagaattactgatctcagtggaaaaaaaaaaaaaaaaaaaaaaaaaaaaaaaaaaaaaaaaaaaaaaaaaaaaaaaaaaaaaaaaaaaaggggggaaaaaaaaaaaaaaaaaaaaaattaaaaaaaaaaaaaaaaaaaaaaaaaaaaaaaattaaaaannnggggggggataaaaaaaaaannnnnaaaaaacccccctttgggccaaaananntntttttttnnnnnnnnnnttttttttgggggggggggggaagaaaaaaaagggaggaaaaaaaaaccacctcccaaaaaaaaatattggggtgaggggagtggtccc

SEQ ID NO: 101602 - DNA, 415 bp, Homo sapiens
ctttctttaaagaaaaactgatattaaatcttatagcataaagatgggcagttttggaatgagtgagtgggcagctaaatgaatgagtgtatattggggaagggagggaaagatggtggcttttttgaacagtgtgaaaaccttgggttgtgttaatttttaaaagtcccttgagattctgacatctggttaggcgcagtggctcatgcctataatcctagcactttagaaggccaaggtgagcggagcacttgagctcaggagttcaagaccagactaggcaacatgacaagaccctgtctctaccaaaaacacacacacaaaaaaaaaacaaaaaaaaaaccccacccgggtttggggtggggtgcctggggccccacctacttgggaggtgtgggcacaaaaatcacttgac

SEQ ID NO: 101603 - DNA, 469 bp, Homo sapiens
  misc_feature (1)...(469): n = a,t,c or g
gggcgtgcccggnnttnntaattgacctgcgtgcgtccgcccgcagcaccggtccggaattcccgggcagggtcttgctctgtcgcccaggctggagtgcagtgatgcgaacttggctcactgcagcctcaatctcccagctactcgggaggctgaggtgggaggattgcttgagcacaggagtttgaggttacagtgagctatgattgcaccactgtcctccagcctgggtgacagaacgagatcctattaaaaaaaaattatgtatgttgccaaatcatgtatactgcagacaggatcaccattttattacttgtgtttaaagttcaaagttttttagactttttgtttgtcatattaagactaatgatattaatggtgttcctaataggcatacagctctcctacaacctgtaattcaggcaccaacgttccttccattttttacttccaccatctttaacaaggc

SEQ ID NO: 101604 - DNA, 397 bp, Homo sapiens
gccaggatagtctcgatttcatgaccttgtgatctgcctgcctcagcctcccaaagtgctgggattacaggcataagccaccatacccagctggcccataacactcttaaagcatctcctacattgttctagtatttaggctgaaagttagggactttgactatgtgtggaaccacttgaattcatgtgagttcctggactgtactgtcacttgttatgacattattgttacctttagtttttatttttacaaccttatcaggtaggtatttaatgtttacattgaagaagtaaagatcctgaataacttctcaaggttatagtcacacagctagtaagaagcaaagtggcattgttaatacctcccaccattaaaaaaaaaagggcggccgctctt

SEQ ID NO: 101605 - DNA, 417 bp, Homo sapiens
  misc_feature (1)...(417): n = a,t,c or g
ngcaggctcatgccaccacacctggctaacttcttatttttctagagacacggtttcacttatgttgcccaggttggactcaaactcctgggctcaaatgatccttccgcctcaacctcccaaagtactgggattacggatgtgagccactgcacccagcctcatctccttaaatccagtcacagtactttcccgctcaaaaccctagattcaatggctaccaattgctcttgggataaagtccactaccttcccacagcctgcagggccctgctgccctgccccctgccctctgcttgtttccccagcctctcccaagttccttctgtcttcacttgctgtgttccagccacactgaccatcacactccttcccctcctcagggcatttgaacatgtgactctctgtcccctcttt

SEQ ID NO: 101606 - DNA, 387 bp, Homo sapiens
ataattattgatcatgtatatatccccaggtgatcaaatcagtttccttttggtatggagttaaattagtattgttgagattaaccttttctaataataatcaagcaagaggaagcttctagttcagtagtttcaaaataataataatggctgacttatattaagcacttatgaattaggtatggtgtttagtgtacatatatacacacacacacacacacagagatatatatacacacacacatatatatacataaatatatagatatacacacattatatatttccccctaaattaaaacaataatctcattacatagatggctgtttatttaggataagggaaagcaaatccaatttatgcaattgctagcccaagttacacaa

SEQ ID NO: 101607 - DNA, 397 bp, Homo sapiens
  misc_feature (1)...(397): n = a,t,c or g
atgaccactcccaactataaaggagtcttattccaagtggccctgtgccctgccaaaactcaggaattctattactatagaagaaatagaggatgggggataagtaaccatctgtgccacattggggagagtgaaggagataaggtctaataaggtatcaaaaggccaggcgcagtggctcacaactgtaatcccagcactttgggaggctgaggcaagtggattggttgagcccaggagttcaagaccagtccgggcaacatggtgaaaccccaaatctatttgaaaaaaaaaaaaaaaaaagggggggccgttttaaaggatccaagtttacgtccgcgggctggcaaggtaatagtttttttttggggccccctaatttaatttcccgggccgn

SEQ ID NO: 101608 - DNA, 394 bp, Homo sapiens
ctctggggaaccatcctgcagttctccatgtgtacttaagttgattttggaaaccagaaacatatactacttccttagaagttctacattgatgaaatgtgggtttctggcttacttgctaatcacactcttgtatgtttggccagttattaatgcttgctaccttctaggatcagatttaaaatgaatttgcttgaaatttcaatttgccatatctagtttataaattatgcttagaaattagctaacctaagaccaggcaccatggtgcgcacctgtagtcccagtgctttgggaggccaaggcagatgaatcacttgagcccaggagttcgagactagcctgggcaacatggtgaaacctcatccctaccaaaaaaaaaaaaaaaaaaatg

SEQ ID NO: 101609 - DNA, 413 bp, Homo sapiens
  misc_feature (1)...(413): n = a,t,c or g
ggtaaggcacatgaatatgggaaatgactaggaacatagcaggaaaagaccagtaataagggtccacgagttgtgaagaacaacaataaaaatgcttgttaaaagcatcataaatgcagtattagtcagaactgtatctggctctagcctccattttccacctcaaagggaattcacatgagagttgtaaaaatgactactttttttttttttaagaatttggctgggggggggggctcgggcctgtaccccttaaattttgggaggccagggcgggaggatcatttagggccaaaagtttgaaaccagtttaggcaatacagcgagactttatttttttttttaaaataatataaaaggtttatttttacagacattcccggggagagggctccccagcaaattacctcaan

SEQ ID NO: 101610 - DNA, 400 bp, Homo sapiens
acgaggtttctccatgttagtcaggctggtctctaactcctgacctcaggtgatctgcctgcctcagcctcccaaagtgctgattatatttttataatcagcccggccaagattatatttctataagattaaattatcttttaaaattgcattatgggaatttataatgcttattgtttcattgtattaatgactgatggaacaatattctatttctcttaaatattcctcttgtttttaacgaataatttctaataggaagttaagtttgcattagtctttggttagaattctctggtatttattatacttaattgatttatgacaagtatatgtagcaccctccatcttttgtagtaagagaggttcaagaaaatcaccttgaaattactgaggtcac

SEQ ID NO: 101611 - DNA, 372 bp, Homo sapiens
ctcatctgagtccttatttttatttttttaaagatagggttgcactttgtcacccaggctggagtgcagtggtgcaatagcccattgtaacctccatcttttggtcttcatgttaaaaattgacctcagttgtcaggagatggagaccatcctggctaacacggtgaaaccctgtctctactaaaaatacaaaaaattagctgggtgtgggggcacacacctgtaatcccagctactccgtctcaaaaaaaaaaaaaaattgccctcagggggaaatttctgtccccccaccctttggaaaggaacaacaccagcttggggttgccctttaaaaaacaggatttttaaaatcttctccatgtcggggtaaaa

SEQ ID NO: 101612 - DNA, 373 bp, Homo sapiens
ttttcctctttttcttccagttttagtttatgagattgggtcttgctatgctgcccatgctgggcatgaactcctgggcctaagtgatcctcctgcctcagcctcctgagtggctgggactacaggcataagcagtgcatctggctgattcttcctttttaaatatgcctagtagaaaatgtaaaattacacatgtgacatacattttatttctatttgataacactacgtctaaatcttttcccattgtacactgctgtatccctggagtatgtctgaagtgaactaagataaaatcccaaagtctgagatggaaaacactaaggtagttcctatgaagcaaaggtagacttctaaagataggtaataaaca

SEQ ID NO: 101613 - DNA, 363 bp, Homo sapiens
atgttggtcaggctggtctcgaacccccgacctcaggtgatctgcctgcctcagcctcccaaagtgctgagattacacgtatgagccaccgtgcccagacaaaatgagattttttttttaaagataccaaaaatttaaagttcttggatcagattttattggtagcttcagtgaagaattctcatgagtgtatatttggtacatttggtacagctggtggcatttgaatctgctctgtacttaaatgactcagcgcggacgtgtttttaccatgtttgcccttcctttggatttttagcaacaaggggcccccacggatgatgagactgggaaggagctggtcttggctctctacgactatca

SEQ ID NO: 101614 - DNA, 403 bp, Homo sapiens
tgagccactgtgcctggccaaaatttaccatcttaaccatttctaagtatagagttaagtaccgttagttaaattcgcattgttatggaagagctctccggaatttttttagcttgcaaaagtgaaactatacccatgaaactaacacctctgtatttccctctccccagcccctgacaaccactattctactttctgtttctatgaatttgactactatagacaactcatgtaagtggaatcacatagtatctgtgttttggggactggcttatttcacttaataagatgttctcaaggttcaaccatgttgtagcatgtgtcagaatttccttcctttttaaggctcaataatattccgttgtatgtatgtacctcattttctttatccatttgtcagagg

SEQ ID NO: 101615 - DNA, 403 bp, Homo sapiens
ctcgatctcctgacctcatgatctgcccgcctcggcctcccaaagtgctgggattacaggcatgagccaccatgcctggcctttttttttttttttttgggggggagcccaccttttccccccaggtgggagggaagggggcccttttaagttaatggcaccccccccctttagggtaaaagaatttttccgccctaccccccccaagaggggggaaaaacgggccccccccaaacccccgggttattttttttttttttaaaaaaaaaggggttttccccgggtaacccaggagggcctaaatcccctaccctaaggaacccccccgtttggtttttaaaaaatacgaaaattacgggggaaacccatggcccccgcccccaggggttttttttaatgggga

SEQ ID NO: 101616 - DNA, 374 bp, Homo sapiens
  misc_feature (1)...(374): n = a,t,c or g
actattgcaatcaggaaaggagtccagcacgagctgattttgatttgtgcagaggtgactgggtgctttcaagggagaatgaggggaccaggtgtggtggctcatgcatgcctgtaatcccagcactttgggaggccaatgtggtcggatcacttgggatcgggagtttgagaccagcctggctaacattttttttcccatctctaccaaaaaaaaaaaaaaaaaaaaaaaaaaaaaaaaaaaaaaaaaaaaaaaaaaaaaaaaaaaaaaaaaaaaaaaaaaaaaaaaaaagaaaaaaaaaaaaannnnnnnnggggggggcgtctcttaaaaaaaaaatttttccccccgggcggggaaggaaattttttttt

SEQ ID NO: 101617 - DNA, 382 bp, Homo sapiens
caataggttaaaatattaattaaatttggaacaaaaagaacaaacagaacaactacaaaacacaaaactgctgatattcagatccaacaaatttttctaaactgacaataagaaacaaaatgatgccaggcgcggtggttcacgtctataacctaagcactttgagaggctgaggcaggaggattgcttgagctcaggagttcaagactagcctgggtaacatggtggcttttgttgttgttgttgttgcttcccaaaaaaaaagaaaagcaaaagaaaaaatagctaggcgtggtggcacacacctgtggtctcaggtacttgggaggctgagatgggaggattgcttgagccccacgaggtcgaggctgcagtgaggtga

SEQ ID NO: 101618 - DNA, 388 bp, Homo sapiens
  misc_feature (1)...(388): n = a,t,c or g
acttgagtcatcgctcaggaggtccttctgggatctgggcaggtgactgccccaggtggcaggacgtccccacccatcttagactgatcagggtcagtctaggagaacaaccctctgagctgggcatggtggctccaatctataatcccagctacacaggaggctgaggtgggtagactgcttgagcccaggagttcaaggtcagcctaggcagcatagggatatcccacctcataaaaaccaaaagacaaaacaagcctctggccagggctaccttgtctgtggggccttccctttcctgtctgagtctcagggaatagtcaaaatttactgttgaaaaagcagttgctatgtgctttcttaccctggtctgttccagntttgctgg

SEQ ID NO: 101619 - DNA, 416 bp, Homo sapiens
  misc_feature (1)...(416): n = a,t,c or g
aacaagagtaggataaagaaagcgataaagatgacagaaaagatgaaagagaagatagagatgatgaaactgatgaaccaactcccgaacggagaacatcacgcgatgattcagatgatgatgaagatagagatgaagggaagaatgaagataaaagaaaagatgattctaaagatgatgatgaagctgatgaagataccgatcaagatgactatgaccctatggatgcccataaggctgcggatgaagatgatgatgaggatgaggatgaggtggccgaanaaatgaccaaaaaaaaaaaaaaaaaaaaaaaaaaaaaaaaaaaaaaaaaataataaaaaaannnnnntttttggggggggtttntttttgggtgnngtttttttnggggggcggtgtgtttttttttttttttt

SEQ ID NO: 101620 - DNA, 423 bp, Homo sapiens
acttcaaactctactcccactaatagctttttgatgacttctagcaagcctcgctaacctcgccttaccccccactattaacctactgggagaactctctgctcagtttgctgttattggtatgtatattctttattgattaattataagctcaattttttcttttttacttatcctgctttgtccttttgtcctaatcatttgaattgtaggcataaagaggagctacagaatcctttcttaggctgccttaaacacctccctggctgagatatgaaggggtctgagaggttcttctgtaggcttaagaattagttatatttctaattcctttgctgtaagttttaattctttccttgtggctatatagattcatagtgtatattattttataaagccatgcttcatttattaaacagatat

SEQ ID NO: 101621 - DNA, 431 bp, Homo sapiens
  misc_feature (1)...(431): n = a,t,c or g
tactttatgaactgccttaaattacttttcaaacaagatgggttataaataaggtgatgctttggcctattatttttaatatctacatttttacttttttgtgagataaaaactaatggggctggacacagtggctcacacctataatcctagcactttgggagacccagagaggcggattgcttgagcctaggaattcaagaccagcctgggcaacatggtaaaaccttgtatctacaaaaaaaaaaaaaaaaaaaaaaaaaaaaaaaaaaaaaaaaaaaaaaaaaaaaaaaaaaaaaaaaaaaaaaaaaaaaaaaaaaaaannnnnnngggggggggggcgttttttaaaaaaaaaaaaaacctcccgcgggggggggggattttttttttttttgtgggggaaaaaaattatagggcggggggggcgc

SEQ ID NO: 101622 - DNA, 403 bp, Homo sapiens
ccacgcgtccgcccacgcgtctttggacgtgtgggcggacgcgtggggtttatagcagttcctgggactcaggaaatgagcccattctgtttattttctagtatgatttcctcctcacttaaagaaaaagctatatatttattttgagactggctaatttttgtgtttctggtagaggtagtgtttcaccatgttccccaggctggccttgaactcctgggctcaaatgatccgcccgccttggcctactaaagtgctgggattacaggtgtgtgccgatgcacctggctgatttcctcacttttactgaggcaaggtcactttgacagaaggggagaggtattttttcgttttttttttgggcgggagttttgctttgttcccaggctggaatgcagtgggt

SEQ ID NO: 101623 - DNA, 417 bp, Homo sapiens
  misc_feature (1)...(417): n = a,t,c or g
ccacattgtataaaacaattcaggcccagtgtgagccacctaatcagttagggaattttgggaacactccccacatccaggcacccatagaatgtttcaggccaacaggcagtcttgcaagcaggcctctcagtggttagcagtctcaggcctgctgtagtaactctgttctgtacatggagacatcacagattttgcagccacttcttattgattggcaggttcatccttttgaaagcatgaggtgtcctggctgagcgcagtggctcacatctataattccancactgtgagaggctgaggtgggaggattttttgagcccaggagtttgagtcctgcctgggcaacagagtgagaccctgtctctacaggaaaaaaaaaaaattaaaaaaaaaacccctcccggcctggtgggn

SEQ ID NO: 101624 - DNA, 401 bp, Homo sapiens
  misc_feature (1)...(401): n = a,t,c or g
cccacgcgtncggatgctggcaggggccataggtgggcacagtcagtgacaagagactcaagtggccaacgtcagcagacagccggagagggtagcaggtgggcaacatttggcaaggtcttccctttttacccaatctctagtcacaatgctacacaagatatgagggaggggagcacaggccagaatctcatcaatattagaagtggccctggcaagcgactctgctgttgacttccagaacagttttccctcaggaaaacgggttttcaggctgggcgtggtggctcgtgccttaatcctggcactttgggaggccaaggcgggaggattgctggagtccaggaattcgagaccagcctaggcaacagtgagacctcgtctcacaaaaaataaaatta

SEQ ID NO: 101625 - DNA, 400 bp, Homo sapiens
  misc_feature (1)...(400): n = a,t,c or g
ctttttnnnnntaaagttggtattattgttggccaataaatggtttatttacaggcagctgcattttacaaatgtatcttctactttatgccttttatagaacaaagcatagtagagcatttttagatgaaggagcccgtgtatctgtctatccaggtggaatcagggcactggattgtgtatctcccaaaccagctcttctcacgttttaatgagaggaattccctggcaatcttgttaaaatgcagattcttaggtgggcatggttgctcacacctgtaatcccagcactttcggaggctcatgtgggaggatcacttgagctgatgttcgagaccagctggggcaacagagtaagacccagtctctacaaaaaatacaaaaattagccgggcgcgat

SEQ ID NO: 101626 - DNA, 406 bp, Homo sapiens
ctcctgcctcagcctcctgagtagctggtattacaggcacccaccaccatgcccagctaatttttgtatttttagtagagacagggtttctttttttttttttttgggcggtttttcttttttttaaaacaaaaaacggccccccgggggggcaactatttttttttgcggcccccccggccttgggggggggggactttgggggccagggggccaccttttcccccaagggtttgggggttttgggggaaaccagggggggggcccccgccccaaaaaaattgggggcaaaaaaggagccttcccacctcttgggggggggggcccagaacctcccgaaaccccgggggcaaaaggggtttggtttttatttttattttttggcacgggatttttttttggggcc

SEQ ID NO: 101627 - DNA, 427 bp, Homo sapiens
atttaaaatagcatattaaaggctctgaaaagtactgccgtgaagaaacatgcccctttttaggcgttttggtttttttttttggggaaaaggggtttatttttgtcccaagggtgggggggaaggggggaattttggtttatgggagggccccacttcgggggtaaccccatttttcgggcttaatttttgggggaggggggaataaggggggccgccaccaaacccgaaaaatttttttggtttttggggaaaaagggggttttaccggggtaaccagggagaacccaatttccgggccttgggagcctcccaaagggggggggttaagggggggggcccttggcccggggggccttttttttttttgggggaaatttttgtttcccaagggttggaagggggtttccattattggttggcaagg

SEQ ID NO: 101628 - DNA, 414 bp, Homo sapiens
tgcaaaataaaattagccaggtatggtggtacacacctgtaattctagctacttgggaggctgagggaggagaatcagttgaacctgggaggcagaggttgtggtgagccaagaccgcgccactgcactacagccaggatgaaaaatatctcaaagccagtgttgactcttattgtctcatttcatgtcactagggatcagcagattaaggcaggtaggtttacgaatagcttgtgggctcacaatgaatttcatatttttaagtggttgaaaaaattaaagaagaatcatatttcatgacttgtgcaaattatttgaaattaaagtgtcattgtctctaaataaagttttatcaaaacacagccatgcccatttgtttatgcctgcttttgtcttacgatgtcagagtggcta

SEQ ID NO: 101629 - DNA, 416 bp, Homo sapiens
acttctttcaaaaacggaggcaatcctctcaaaccctgatgctactttatcaactaagggtgggtaatattctaaatcctttctgtcatttcaccaggagtagatccatctcaagaaaccactttctttgctcatccataagaagcaactcctcatcccttcaagtttagcacaagattgtagtaattcagtcacatctgcaggctccacttctaattctagttctcctatttccaccacgtctgcagtgactttctccattgaagtcttaaaggcctcaaagttatccatgagcattggaatcagcttctttcaaactcctgttaatgttgatattttgacctcctcccatgaatcacaaatattcttaatggcatctagaatggggaaatattttcataagggttcaagttacc

SEQ ID NO: 101630 - DNA, 414 bp, Homo sapiens
  misc_feature (1)...(414): n = a,t,c or g
cccacgcgtccgctattactgtcttttaatgttagctttggttcctagaatgagaatatcttctatgtctttatttcagtaacaataacaaaacttgcttatggactgaggagcctcattaagacaaataactgaaataatattctctcagcaggaattcatagagtaaatgcatgcatatttagaataattggggcttgcagtggccaggatttggccagttgtgacaaactgaaagtaaccacaattgatcaatttttgagaattaagctacggtaaatatttctcaaataattgattttaaaatatttactggctggacacggtggcttatgcctataatctcancactttgggaagccaaggcaggagaattgcttaaacccgggagttcaagaccagcctgagcaacat

SEQ ID NO: 101631 - DNA, 407 bp, Homo sapiens
caggagaatcatttgaacacagggggcggaggttgcagtgagccaagatcatgccattttgcactccagcctgggcgacaagagtgaaactccatctcaaaaaaaaaaaaaaaaaaaaaaggggttgggaattttttttgggcccaaaaaaaaaaaaattttaagggaccgggctttttttgggggggttttctttggccaaaatgggaaaaaaaaaaaaaaaagggggggccataaaaaaaagggaaaaaaccaaattttttttggcccccccctaaaaaaaaattaaaaaagggggggggggggggggccaaacccttaaaaccaaaaatttggggggggcggggggggaaaaaccccggggggggggggttaaaaaaaaaaagggccaaaagggaaaaaccctt

SEQ ID NO: 101632 - DNA, 412 bp, Homo sapiens
  misc_feature (1)...(412): n = a,t,c or g
atttctcaagactttggagggctctgacaccatgctcacagaactgggctcagagctccattttttgcagaggtgacacaggtaggaaacagtagtacatgtgttgtagacacttggttagaagctgctgcaactgccctctcccatcattataacatcttcaacacagaacacactttgtggtcgaaaggctcagcctctctacatgaagtctgtggacatgtaaggacgagagtaaagaggaaaatcttataaaaaaaaaaaaaaaaaaaaaaaaaaaaaaaaaaaaaaaaaaaaaaaaaaaaaaaaaaaaaaaaaaaaanatgaaaaaaaaaaaattttttaaatataaaaaaaaattattttaatataattaaaaaaaaataaaaattggtggcccaccctctgcccc

SEQ ID NO: 101633 - DNA, 407 bp, Homo sapiens
  misc_feature (1)...(407): n = a,t,c or g
tgcagtgagccgagattgcgccattgcacttcagtctcggccacagagcgagagtccgtctcaataaaaaaaaaaaaaaaaaaaaattagggggggccccttttaaaaggacaaatttttttagagggggggtgaaaaattaaatttttttttttgggcccctaaaaaaaaaaaaggggggggggttttaaaaaaaaaagggggggaaaaaggggggggttaaaaaaatatttttttggggggaattttcctttttgggggggggggatatttagaaaaggggggaannnnnaaaaaaaaaaaaaaaaaaaaaaaaancgggggggggggcttttttttattnntttcctaaatggcccctgcgggtaatatttttttttttattgagggggcagataattnacccc

SEQ ID NO: 101634 - DNA, 408 bp, Homo sapiens
  misc_feature (1)...(408): n = a,t,c or g
ctcaaagtggctcatacctttaatcccagcactttgggaagccaaggtaggaggatcatttgagcccaggagttcaagaccagcttgggcaagatagtgagaccccatctctcaaagagagagagagggagggagggaggaagggggnnnanacanananacanatatattgagcccttgagattgagagaaagttttgccaaatatcgagaaccccccttttataaatatatgtagggtgggagggggggaatttttttcttccacacagggggcgacatattggccttttaaaaaaaaccctctctcttttctctccagggggggggatataaaaaaaaaaagggggtttttgtgggggggggcgttcattctggtgttggggggccccctttttttgtttttata

SEQ ID NO: 101635 - DNA, 395 bp, Homo sapiens
  misc_feature (1)...(395): n = a,t,c or g
tcctttcacaaaagattttgctgtagcatgagatgctgcttgataccattttacccacggtagaacttctttcaaaattggaatcaagcagcagtgcattcctgtactcccagctatttgggaggttgaggaaggaggattgcttgagtccaagagttctgggctgtagcacactacactgactggttgtctgcactaagttcggcatcagtatggtgacttcctgggagtagggaccaccaggttgcctaaggaagggtgcactancccaagtcagaaatggagcaagtcaaaactccaacgctgatcagtactaggatagtgcctgtaaatagccactgcactccaacctggacaatagagcaagaccctgtctcttaaaaaaaaaaaaaagg

SEQ ID NO: 101636 - DNA, 378 bp, Homo sapiens
aacttcagtactttagagtagcagccagtgtgtagttgatgtgcccgcatctgttgagggtgtgtgtgagttagcgaatgagcttcctagcttcttcagcatattgctggctctctcttttttttttttttttggaaagggggtttctttttgccccccgggggggggggcgggggcccattttgggttaattgaaacccccgccgggggggtaaaggccttttcccggcctaaccctggggaggagggggaacaacgggccccggacccctggccgggttaatttttttgtttttttagaaaaaacggggtttccccgggtaacccaggggggtctcactctccccccccaaggggggggaattatgggccggaccc

SEQ ID NO: 101637 - DNA, 367 bp, Homo sapiens
cccacgcgtgcgctgagaactgagcctttgccattgtaggcgatagtgtctattacatgcctactatgtgctgagcactggcctaataattttatagggttatctcatttaacttctcataataattctagaatgtaggtactattgttagcccgttatatagacaaggaaactcaagcaaagagagatttattaatttgtccaatatcgttgctagtaagtggcagagaatcacttgaacccaggaggcggaagttgcagtgagctgagattgtgccatggcactccagcctagacagccgagcaagattctatttaaaaaaaaaaaaaaaaaaaaaaaaggttgggcccccccttgtattcctac

SEQ ID NO: 101638 - DNA, 404 bp, Homo sapiens
gcgctaggcttggtggctcatgcctataatcccagcactttgggaagccaacgtggaaagatagcttgaggccgggagtttgggaccagcctcggccaccgagcgagaccctgtctctacaaaaaataaaaatgaactgggcgtgggggtgtgcacctatcatatctagtctttggactagaaaaatctaaaatggtttggtaagactttgctgttgctttaaagcaatggtccccaacctttttggcaccagggaccagactggttttgtggaagacagtttttccactgataaagttgggggtatggtttcaagataaaactgttccacctcagatcatcaggcattcgattctcatacgcagcatgcaaccgagatcaccacgtgcacagttcaccgtagg

SEQ ID NO: 101639 - DNA, 400 bp, Homo sapiens
agatgatccacccacctcggcctcccaaagtgttgagattataggcgtgagccaccgtgccaggcctcaaaattagttcctacaggcattttagctgatagtaaacatagcaagtgtcagacaatggactcctgtttctcaaaccagctttacaaacagagatgacctgttcatcaaggagaacagaccacacaggataaatgcttaagaaatgggctatttgggtcgattattttttaatctttgaaattggtggaggagaatgaataaataaagtgaatctttgcaaaaaaaaaaaaaaaaaaaaaaaaagggggggcccctttaaaaaaaccaattttatcgcccgggggggggaaaggtttttttttttttttggggcccctaaatttaattccgg

SEQ ID NO: 101640 - DNA, 401 bp, Homo sapiens
gcagagattgcagtgagctcacatcatgccaccacgctctagcctgggcaacagagtaagactcagtctcaaaaaaacaaacaaaaaaacccccaaaaacaaacaaacaaaaaaaccactgaaacagaatgtgaaaaagtgaaagtaacaaaagttttctggtcaagctggtgaagtaagtttatgcttctgtgtaccacgctctgctctaaatacagcagtaacaggtaaaaattaaaaattaaaaaaaatgcggctgggcgtggtggcttgcacctgtaatcccagaaggccaaggcaggcggaactcctgaccacaggtgatccatccatctcagcctcccaaagtgctgggattataggtgttaagccactgcgcctggcaaacagatttaaaataa

SEQ ID NO: 101641 - DNA, 404 bp, Homo sapiens
ttggagcaggagagtcctgagagaaaattacggaaaatcgtggttaggcgctgtggaaaggagtagtgtggaaaggagaccgcggggatgaggagaggagagaggcaggctgcatcaccgaatgggcagcatgtcttaaagtacactgtttgtcttaaagtacaccgtaaagcctctcttgtgcctgttgtttagagcctgccctttttgcttaatgtgtatggacatctttctaggccagtacttatagagctacctcattcattttatttatttatttgtttgtttgagacagggtctggctctgttgcctaggctggagtgcagtagcacgatctgggctcactgcagcctccacatcccaggttcaagcaatcccgctgccttagcctccacagttgctg

SEQ ID NO: 101642 - DNA, 403 bp, Homo sapiens
gggtttctccgtgttggtcaggctggtctcgaactcctgaccttacgtgatctgcccacttcggcctcccacagtgctgggattgcaggcgtgatctaccgcgcttggcctggggaggcctatttattctcaggttgatggctgaggttcacctgatatgattcaccattgacaaactttgatgaagacaagcatgtttatgctttctttcaaataactttttatttgtggtcccaaatttcttctggtataaataggatctgaattctgtcttttatgttggggctttcctgtatatctggtgattcttggttgtctgttcgttgttaaaagtggaatactaaaaagctgattagaagttttaaatgctggccgagtgtgatggctcacacctgtaatcctt

SEQ ID NO: 101643 - DNA, 404 bp, Homo sapiens
gccagggctcttgcactttgccccgagagagagccgtggagccagcccaggcaccacccgagccagttggtttaaaattgtgtacatagcatggctgtgattcagtgagcttggttgtcttttttttttcccccttggcaaatttcagttactccttgggctaacagacagcagactggtaaagataaaatgagagttgcccacccagcgttaaagagagagaggagaatcacttgaacccaccaggcagaggttgcagtgagccaaaatcgcaccactgcactccagtccagcctgggtgacaaagcaagactcttccaaaaaaaaaaaaaaaaggggggccctttttaaggaatcaaattttacttccgggggcgggcaaggattttttttttttttggggc

SEQ ID NO: 101644 - DNA, 431 bp, Homo sapiens
  misc_feature (1)...(431): n = a,t,c or g
acagcagtaatattaataattttcatgatttgagaagccttcgcttcgaagcgaaaagtcctaatagtagaagaaccctccataaacctggagtgactatatggatgccccccacccacccaccanaaaaaaaaaaaaaaaaaaaaaaaaaaaaaannttttggggggcccccccttgtttcccaaaaaaaaccccccacaccaggggggggggggattcaaacttaaaacttgtggaaaggggaccccccttatcgggaagaaaaatggggttggggggggggggttttttttttaaaaaaagggggggggggggggggttcaaaaggggggggggggggacccctttttgccccggggtaaaaaaaagggggatctccccgggggggggggggaaaattttgttttcaaaaagggggaccccggggttg

SEQ ID NO: 101645 - DNA, 399 bp, Homo sapiens
  misc_feature (1)...(399): n = a,t,c or g
ggntgggggagaaccccttcagtatccttatgatggtggcttctggaatacactgcactagaaagtcaggcttccttaagaatagctggtcatactcaggcaacgttcccagggataaattagattagatgaaaattacaccataattagggtacttatttctagaaattcaataggaaattctcctggggttctcatgcttttaccttggtcttccccaaagggtcaaagtgcttattaaggctgggcacaatggctcatacctgtaatcccaatacttggggaagcagaagctgaaggaatgcttgaggccaggagttagagaccagccgaggtaacatatcaagtctctacaagaaaagaaaagaaaagaaaaaagccagatgtggtgacatatgc

SEQ ID NO: 101646 - DNA, 398 bp, Homo sapiens
atttggagaatgagtggctactttgaaaattgtcagtagataggaaataaaaataacagaatgaagcagctcacacacttcagagtttattctcaatattgttgaattgggccataatgaagcataatgcctggttaaactttattgcaattcaaacatcacaccagaaagaaatttttaaaaactatatcaacaaataaattcactgaagtctgtctatagcttcttctaggaactacaatttatttatttgtttattttaatattgttttttgtagagacaaggtctcactttgttgcccaggctggtcttgaactcctgggctcaagtgatcagcccgcctctgaaagtgctgggattacaggcatgagccaccgtacctggctgaaggaactac

SEQ ID NO: 101647 - DNA, 402 bp, Homo sapiens
ctgcattctagcctgggcaacaagagcgaaagtctgtctcaaaaaaaaaaaaaaaaaaaattgggaaactatttttaaggaccccattctaaggggtggggctgaaaaaaaaaaagaacctttttaggcaaccaaaccttttgggggttgaggtccttgggccccaaaacccaggcctccgagggttaaccattgaccgttgtttgtttaacaaaaaaatattccattggggcagggccttcttggcccgggccacgggggggggggggaaccaaatccaccggagcggggggggccgggaaaatttgttccggcccctggggggttatttaaaaatgggggcccccacggggcagggaactaacctgcagcctttggttttgtgcaccaccaacaggagaa

SEQ ID NO: 101648 - DNA, 399 bp, Homo sapiens
  misc_feature (1)...(399): n = a,t,c or g
gtcttgctctatcacccaggctggagtgcagtggtacaatcatggctcatgcagtaaacaccaagtaatgcagacatatggaggattgctcgtgggttcaagcggtcctcccacttcagcctgctgagtagctgggaccacaggcatgtaacaccatgcttggctaatttttttttaattttgtagatatggggtcttgctatgttgtccaggcttctgcctcttcgattaaggaaaccagtcctattggattaagccccctccccatgtggcctcatttaaccttaattacctttctccaaatacactcacattctgagatactgggcgttaggacttccacatacnaatttggtggtggagggagagcgatacaattcagtccataacaccctcctt

SEQ ID NO: 101649 - DNA, 406 bp, Homo sapiens
cactatccaagcactattttgcttgaggaataggagttcacaaggaaatctgtgagggaataagttgtacaaagacatggtaggatgaagcagcatgatgtatgaggaattccaggtggtttggtctgactagagtctaaaaggtgaggagggggattatgggagagataggcagggccaggtcacaaagggaagatgtgataataccatatataggaataaaatggggggttttgtgattgactctgaattcaggtccaaccaatttaatggagctgctagaaatgttaatgtacgccaggtgcggtggctcacacctgtaatcccagcactttgggaggccaaggcaggagaattgcttgagctcaggagttgaagactatcctaggcaacatagtgagactct

SEQ ID NO: 101650 - DNA, 383 bp, Homo sapiens
agatgcgcaccaccatgcctggctgactttttaagtttttgtagaaacaaggtctcactgtattgcccaggcgggtctcaaactcctgggctcaagagatcatcctgcctcggcctcccaaagtgctaggtgtcagccactgcgcccaacctccttcaacttctaaatgacagttactttccacgtgttgtattctttattttttcttgaatatttaattttgctgtttgaatatttttacttgtctcatgtaccagaatactttcaaattgttgcattgagccaggtacactggctcacacctgtaatcccagtgttggtagcccgagggggaatacaattgaggccaggaactcaagactgcagtgagctgtgatcacacc

SEQ ID NO: 101651 - DNA, 382 bp, Homo sapiens
  misc_feature (1)...(382): n = a,t,c or g
tcggtctgagtcccactgcccaccccatcacagccttcacgtctcagcccctcccgtctggtctgtccgtgtgccgtctgtttctctgggccatgtgtgagcagtgtccccatctccccatccgtccctgctgtccccgcatcattgggcctgagtgtgctctgtatacaacgtcatgtctgttacaccaattaaagaagcgggaaggcttctaaaaaaaaaaaaaaaaaaaaaaaaaaaaaaaaaaaaaaaaaaaaaaaaaaatattttaatggggggggggtaaaaaaaanagntnttatttaataggatttttttagaattaaatttttttttaattaaactattaatgttaaatattgctatgataaggaaaaacaga

SEQ ID NO: 101652 - DNA, 400 bp, Homo sapiens
  misc_feature (1)...(400): n = a,t,c or g
cctacctcccaggtaaacacacacagacagaccaaccactacagtgaaacagactgcaagatataggaagtgcattcctcctctttactattttgggttacactcattattacaccaagcacccatgaggtctcaagtgcagtctgttcgctcttatatgtgaaatcagagcagaagtgtcaataatgcagaatgaattcatgattttcttttctttttttgaggaagggtctcactctgttgcccaggctggagtgcagnggcacaatcgcggctcactgcactgtagcctggggaactcaaggaaactttttatctttgaattaggaggagctgggaccacaagcatgcaccaccattacctgctcccttttgattatttgtatagacagtctcgaag

SEQ ID NO: 101653 - DNA, 380 bp, Homo sapiens
cgacttctggtagcttagcaaagagaccagctgactgtctctcggcccagcccaccacgccgagtagcttgtgtggatgcagtcctgtgagggtgtgcataaccgttcccaggtgtacgcacgcgcgcgcacacacacacacacacacacacacacacacacacacacacagtaaccacgggtaggcaccaggggctttgtacattcaagagctgcagagaggaaaggtctcccatgtaccagagaaagaaaagtctgatcccgaaacagcttgaacgaagggtggttaacacgtgaccaatccccatggcagacagcggtctggtgaacaagaagaacacagaatctgtgtggggcgatgctgcagcgggtgaaaccac

SEQ ID NO: 101654 - DNA, 547 bp, Homo sapiens
  misc_feature (1)...(547): n = a,t,c or g
tacttataaccgcatacgtaactaaataatagagtgtagagtctcagttcacttatcaattttaaaactaatattacacaaaagctcgaagccgcccnnnnnanaatggaagactagagcatcctgcaccggacgcggaatcccgggtcgagaaagaaaataataataataataataataataatgacaacaataataataatgcaggagggcagtaggaacataaaaaaccaaccttgccccttttataaatgtcttgattcctggtgtggcacttaggccgtaaaatatttgtaggcttgttttttttcttttttgaaaatattttcaccagttgtggtggtacacgcttgtagtcccaggtactcaggaagccagggcacaggaggatcgctggagcccaggagttggaggccacaggaagctaggattgcatcactgccctccagcctgggcaatagagcaaggccttgtctcttaaaattttacctatgtatttatttattgataaattatgtataggcttgttttcttaaatgaccttctg

SEQ ID NO: 101655 - DNA, 411 bp, Homo sapiens
acgcccacgcgtccgatctcagatagtgatatatcatgataagaggttagaaagtgaaggtgaagtgctcttgttttcctgagtaacactcttactccacatacatatacaggtcactcaactccttcaatttgcaaatctctggttaaatagaaaggcagcagaacagccctccttgatctctgccaacttaatatttgaacagagatttaaaggaaaaaatattacagaagtgggaatcctcaaaatactttctaaaactagctttgggctgggcaccatagctcgtgcctgtggtcccagcactttggggggccaaggggggaggatcgcttgaggccaggagttggagaccaccctggggaacacagtgagactttatcttcttaaaaaaattagctgggcatgggg

SEQ ID NO: 101656 - DNA, 401 bp, Homo sapiens
cggacgcgtgggcggacgcgtggggttcattgacagatgaatgggtagaaaaaatatggtacattcatgcaatgcaatactactcatcctttgaaaagagggaaattctgtaatatgtgaggacatgcatgaaccttgaggacactatggtaagtgaaataagacagtcacagagggatgattactgcatgattccccatatatgaggtatttaatatggtaaaattcatagaatcagagtagaatggtggtttccaggggatgacaggagaggaagatagggcattacaaatcaaagggcataaagttttaggtaaacaaaaatcagtgctacagatttgttatatatcattgtactacaaccaacaatagtgtattgtacacttaaaaattcgttaaga

SEQ ID NO: 101657 - DNA, 409 bp, Homo sapiens
ctgtgcagcacggagtgaggggcggctcctcttcgctgcaccccttcctgattacccctaggcccagccaaataaactcttcttcctgctcccttgtgccccatttggacttcactcgtaacaagggagtataactggatggtaaaagggacttttcctgttatctagacatttcagcagaggcctcaaaggcagaacaaaatagtgcaaggagccgcacatccgcacagtgctgagaccctgcccaggacaagcttgacaaaaaagaagaaaattgggtcttgttatgttgcccaggctggtctccaactcctggcctcaagtgatcctcccagcttgtccttccaaagtgttgggattataggtgtgagccactgtgcctggccatgtctgaatgttgaatgttgat

SEQ ID NO: 101658 - DNA, 442 bp, Homo sapiens
  misc_feature (1)...(442): n = a,t,c or g
cgtcatttcccatgccctggttccagatacattttgaaaaccttccatcttattggcattttctggggttgtgagggaaacggggatggcagtcagactcaaacccgtgacactccaaactcgattatgctccagggcccactttctaaacctgtaagatctatgttccagcctgcgcaacatagtgagaccccaactctacaaaaaataaaaaattagccaggtgtgnaaaaaaaaaaaaaaaaaaaaaaaaaaaaaaaaaaaaaaaaaaaaaaaaaaaaaaaaaaaanannnnnnnnnannnnaagaaaannnnannnggangggggggggcgtgaaaaaaaaagaaatatatgaaaaaagggttggggggggtgggttttttttagagggggagatttttatagggggggggcccacttaattatagggggggggcaag

SEQ ID NO: 101659 - DNA, 394 bp, Homo sapiens
tggaggttgcactgagccgagatcgcatcactgcgttccagcctggccaacaagagcgaaactccgcctcaaaaaaaaaaaaaggagagagagccgggggggttttaaaagggggggggggtggtaaaaaaattttaattttttacccaaccattaggggaaagggggggggcctttaaaaggccccgggaaaaaccattattggggattggggggagggaaccctttttcccttagaaattagggaagggtttctggggggggggggttttggaccggaaatggagggaaaaaaaccccccccgggaaacttttggaaaaaagctttcccaaagggggggccacccagaacaaagggcttaaaaagaaaacaaggcggggtgggggctcaaaa

SEQ ID NO: 101660 - DNA, 466 bp, Homo sapiens
  misc_feature (1)...(466): n = a,t,c or g
ggccncccaattgaaagcttgacaagcgttacgaccgcaccggaagtcccggaacgacccacgcgtccgggtatttaatagaacctctggtagctgaggcttcctatgagctcatcctttccttggcattctttttttttgagagacggggcctcgctctcttgcccaggctggagggcagtggtgtgattgtagctcactgcaccctcaaacttctgggctcgggggggcctcccgcctcggcctcctaagtagctgggactgcaggaatgaaccaccacgaggggcatgagcccggcctttttgaaaagcagaattctggttttatattttaatcaccattatacccatattgattaattttgccgctaacgaatacatttctctactatttcattccaaagggtcctatttcgctcattatattttagctacacaggtcattccttttgggacagagtcttgn

SEQ ID NO: 101661 - DNA, 396 bp, Homo sapiens
cccacgcgtccgcccccacagtatttgatcacttataagctgtggtaattttccccacagagcgctcacatagagtggggctcaattacaacttactattgccatttgaaaagagatacactgtgggtcaagaaatctgtgtgctgattgcttcaagggacacaggcaggataaatgagacatcctgccctcagggaatgaatagtctgagaggggataagacaaggtcacatgaaaagtctactaatagcggccaggggccatggcttcctacaatacaaccactttgggaggccaaggtgagaggatcacttgaggccatgaatttgacaccagcctggacaacatagcgagaccctgtctctacaatgaactttcccaggtatggaggtgggg

SEQ ID NO: 101662 - DNA, 391 bp, Homo sapiens
ggaccccaggtgcgagccactatgcctggctcatttttgtatttttttttttaatagaaacaaggttttgccaggttgcccaggctgattttgaactccggggcttaagggatccactggccttggcctcccaaaggggtgggattacaggcttgaaccaccatgcctggcccgaggggtttattttaataagcaccctgaacttaatttataaataggaaaaaaaactggggggtattaaacaaaatagcttttacagaaaccacatagttgttaatataaaaacaaaaaaaaaggggaagcaattcggaatatactttttgggtaattctattaataaaaaaaaagggataatactttgaacatatgggggggtaggctattttcattt

SEQ ID NO: 101663 - DNA, 438 bp, Homo sapiens
  misc_feature (1)...(438): n = a,t,c or g
cccacgcgttcgttttattatttgagaccaggtcttgcttatcactcaggctggagagcagcggtgcaatgatcgcttactgccgccttgaactccttggctcaggtgatcctctaacctcagcctcccaagtagctgggactaaaggtatgtgagatgatgcctggttgagacaggtctcaaactcctggcctcaagtaatcctccggcttagtcacccacatatgtttttattccagtttagcttggagacttaaaacttctctgaacagttgtaataatgcagaaactcacactatcctatctaaacaaaaccccagcccccaccctgggctctctttgatattattagatgacacttagattactgtacttggttctggatttattactactagaaatgcagngaccagttggaattgtttcagagaataacat

SEQ ID NO: 101664 - DNA, 371 bp, Homo sapiens
accctcccagctacttgggaggctggggcaggaggattgcttgagcccaagagcttaagggtgtaatgtgtttttactgcaactgtgaatagcagccgcactccagcctgggcagcatagcaagaccctgtctcttaaaaaattacaagaagcataaaacatttgtttgaacaaaaataaataaatagcaactaggttttggtgtgtatcattatgaaaatatccattttaatcagtgcacgctagcttaagatttaatggtattttcatgatcttaatgcagagaaaaaaaataaaaaaaaaaggggcgcccgctttaaagaatcaaagtttaggtccgcgggctggcaaggatatactttttttatggg

SEQ ID NO: 101665 - DNA, 382 bp, Homo sapiens
  misc_feature (1)...(382): n = a,t,c or g
gcagaatgtattcaatatcaggccaggtatcatggttccttggcaaggcagaatgtattcaatatcaggccaggtatcatggttcacgcccgtagtcccagcactttgggaggctgaggcaggaggattggttgagcccaggaagtcgaggttgcagcgagccatgatcgtgccactgcactccctggataatgggaaggccaagacaccattgtccactgcagtatggcagctagagctcaatgagtttaaaagtgagctcattgtcctcccctccaaatgtcctctcctctcccaatttctgccatagtttcttaagggccccatctttctctaccagtcacccaaactcaaaactctttcactcaagtcctaatgattn

SEQ ID NO: 101666 - DNA, 395 bp, Homo sapiens
  misc_feature (1)...(395): n = a,t,c or g
ctatctgcaatgaccctttttccaaatgaggttctgaggtgctgcacgttaggactttagcatgtgatttctgcggactcaggtcaccccataacagtagtcatgccccaccccatcccactcctacctatctccccttttatactaataatcttataaaaaaaaaaaaaaaaaaaaaaaaaaaaaagggggggggccgttttaaaggatcaaattttacgcccggggggggggaaggtatttttttttttttggggcccccaaaattaatttccggggcgggtttttaaaaaggggggggggggaaaaaccggggggtacccaaattaattgggttgggaaaaaacccctttttggcgggggggcaaaaaaccaaaaacccccccaagnnnnng

SEQ ID NO: 101667 - DNA, 425 bp, Homo sapiens
  misc_feature (1)...(425): n = a,t,c or g
aaaggcatggctgtattaagaaatagcgtggtgcagtggaaagtatgctagggaataagaaaccaggatttcagtattctcttgttggttggtgcttataatatccagattgttaaaaattttgctgggcgcagtggctcatgcctgtaatcccagcactttgggaggccaaggcaggagaatctcttgagcccagaagttcaagaccagcctgggacaacacaaggacaccctatctctattttacaaaaaantaaaaaatatataattttttagaaaatacatccccctacttatacacgtgaaatgggattttaatatttaacctcctgctgtcccaagactatcatgagactcaaaacaaaccatgaatactataatgcatttcagatacaggggtaactattatgatctccccagctaga

SEQ ID NO: 101668 - DNA, 402 bp, Homo sapiens
cccacgcgtccgcccacgcgtccgcccacgcgtccgatttttagcagagacggggtttcaccatgttgtccaggctggccaggctggtctcgaattcctgacctcaggtgatccacccacctcggcctctcaaagtgctgggattataggcgtgagccaccatgcctgccttatgtacttatattttaatgagactatttctcttggttttctgataaatgagttactggaacccttatgaatctgaatgcaaaagaaacagctaaatgttatgtaattgttgtgtttaaaaaccagattataaaactatctgtattatatgattacagttttataaaaacaaaacaacggcctaaatgtgtatagtataaagggctggaagagtcagcactttcatgttct

SEQ ID NO: 101669 - DNA, 405 bp, Homo sapiens
atcctggaatcaaccatttcttcaagaaaatggaggagaaattctatggagtccttatttcttttattagggaacagtatttgaaagtaaaatctaggtgcagaatgtcctcattgttgttgaggtgtcatggattctagtccctctccacagacagagctagggactgtgtttctgtgtactcatatgccaattgtgatggttaccttcatgtgttaacttgactgggccagagatgtgtggtcatacattattctggatgtttctatgagggtgtttttggatgagattaacatttaaattaagccaggtgcagtggctcatgccaccgggcggatcacctatagtcaggagttcgagaccggcttggtcagcgtggtgaaaacccatctcttctaaaaaata

SEQ ID NO: 101670 - DNA, 427 bp, Homo sapiens
  misc_feature (1)...(427): n = a,t,c or g
tgagctgagatcgngccactatactccattctgggtaacagagcaagactgtctcaaaaaaaaaaagaaaaattattttttgtagatacagggtctcatgaagtccgggatttaagcagtcttcccacctgggcctcccaaagggctggaattacaggcgggagccaccacacccggcctccaccttttcccagtccttcccggttaaggatcatttctgcagtggggtctccagctagtcacacctcccactttgctccagcttcacacatggccttgaggcccatgccctccgggcagattgttccccctctgtgagagggcacgtgctccaccaggtgtgcggcccctgaggggtcctctctacctctgacggccaactggcagggagtgaatgtccttgcagagggccaggctgtctgagacc

SEQ ID NO: 101671 - DNA, 391 bp, Homo sapiens
agactgctgtgttagcagtgagtgaggctccgtgggtgtgggactctccgagccaggtgcgggatataatctcctggtgttccgtttgctaagaccattggaaaagcgcagtattagggtgggagggtcccgattttccaggtactatctgtcatggcttcccttggctaggaaagggaattccccaaccccttgcacttcccaggtgaggcaatgccccacgctgctccttgggctgcacccactgtgtgacaagccccagtgagatgaacccggtacctctgttggaaatgcagaaatcacctgtcttctgcgtcgctcacgctgggagctgtagactggagctgttcctttttggccatcttggaacctcggttcaaacctgagttgt

SEQ ID NO: 101672 - DNA, 401 bp, Homo sapiens
  misc_feature (1)...(401): n = a,t,c or g
tccgtgggtgtgggaccctctgagccaggcgcataatataatcttctggtgtgctgtttgctaagaccattggaacagcacagtattagggggggagtgtcccaattttccaagtaccgacagtcatggcttcccttggctaggaaagggaattctccgaccccttgagcttcctgtgggatgcgaggccctgccctgctttggctcacactacttggactgcacccactgtccaacaagccccagtgagatgaactcagtacctcagttggaaatgcaganatcacctgtcttctgtgtctctcacactgngatctgtagactggagctgtttctattcaaccatcttggaacccgccctgtgctatagactccgcaccctatggctggagggggtgact

SEQ ID NO: 101673 - DNA, 376 bp, Homo sapiens
cccacctcagcctcccaagtagctgggactacaagcgcatgccaccacacctggctaattttttttttttttttttgggaaaaaaaggggttttgccatgaggccaaacgggtttggaactctaaaactaaaaaaatccccccgcctaaccccccaaaggggcgggggtaaagggggtgacccatcgccccaagccttaaaatggtggtaaagggaggtttgaaaaggacacccctggggggccatttttataaaaacattccgggaaaaaaccaagagcaaggttgttttggcccttaatgggggggcattaattttttcaagggggcccatttaagggggctttttttgtaaagggaaggcgtggtaaaaaaaa

SEQ ID NO: 101674 - DNA, 409 bp, Homo sapiens
tttctgtcttagtgtttaagggaaaaaaaagttttgaaagaaaaattaatagaaaaaagcttgcagaatgagtataaggaaaataatttttatgcagctgtacaatgtatttgtgttgtgttaattacagaagagtcaaaagttaaaatgtaaaagtctgtaaaactcatgaacagtggcatgcacctgtggtcccagctactcgggaggctgaagaggcaggatcacttgaggtcaggagttcgaggctgcagtgagctatgattacacctgtggatagccccactgggcaacatagactctgtccctaaaaaaaaaaaaaaaaaaaaaaagggggggcctttttaaaggatccaattttacgtccgggggcttggaaggaaaaattttttttatagggccccctaag

SEQ ID NO: 101675 - DNA, 435 bp, Homo sapiens
  misc_feature (1)...(435): n = a,t,c or g
cctgaagtataaatccaaagccttcatgcctgtggtccgagtgctttgggaggccaaggcaggaggactgcttgagcccaggggtttgagaccagcctggacaacgaagtgagattcatctctactaaaaaaaaaaaatttaaaaaatcgggcggcctttaaaaaatttcggttttattgggggggggtgggaaaccctattttttttttggggggccccaatttataatataggggggggttttttttcggaggtaaagttgaaaaaccggggggggcccaaattttattttttttaaaaaaaaccctttttgtgggggggtgtaatatcaaaaaatgcgatttnncctttttttataaggcccttgggtgtggcctccttttcgcaaatattccaacgaaaaccattccctgaagcttacttggtttcaaccg

SEQ ID NO: 101676 - DNA, 400 bp, Homo sapiens
cacaggcgcaccaccgcaaccggataatttttgtattttttgtagagatgatgtcttgccacactgcccaggctggtctcaaattcctgagctcaagtgatccacccacctcggcctcccaaagcgctgttattacaggagtgagcgccacgcccaagaaatcctttcaaagtaaaataccacaggacatggtggctcacacctgtaatcccaacacttcaagaggccgaggtgggaggattgcttgagcccagagttacagaacctccccacccactgtgccatgcaacatagcaagaccttgtcactacaaaaaatttaaaaattagctggggtggtgttgcgtgtacgtcctagctactcgggaggctgagacaaatagattgcttgaggctacgcg

SEQ ID NO: 101677 - DNA, 456 bp, Homo sapiens
  misc_feature (1)...(456): n = a,t,c or g
tttttaggtgaaaaaaaaaactgagaggattcattactaacatttccacaactaagaaatactaaaggaaattctttaggtgaagagaaatgaaacccacatttgtaggaaggaatgaagaacaccataaatgctaagtatgtgataaatatgaaatcccttttacctctttttaaaagtcctttaaaagataattaactgtttaaagcaaagatcataatgatgtattgttggcaagtaaaatatttgacagtagcacacaagataggaaaaacagtgagccaagattgcactactgcactccagcctgggtgacagaacgagaccctgtctcaaaaaataaaaatttataaagacaggaaaggattagaggaaaatacactgttattctggtgatagaagcataatattgtttagcggngactgcnnaagggacgtttttatgtagaacaaccn

SEQ ID NO: 101678 - DNA, 425 bp, Homo sapiens
cggcaggaaaattgcctgtgtcactgagtccccagtgcttataatcgggcctgacacatagtggccttcagtaaatatttgctaaatcaatctgtaaagttagctggaaccctaagtattgtatatatttgcttaaaatgttctgtgtttttgttttgtagagatgaggtcttgctatgttgctcaggctcttctcaaactcctggcctcaagtgatccttccaccccttcctctcagagtattacaggcatgagccaccacttctggcctgtttttgttttcaggaaaaataaattattttgccccatgcaaggcaatttgtctaacattttacctttctaggtctcagggaagtggcagaattttttattacctcgactgctactcttccaaacagcaagccttgttctactataggctatca

SEQ ID NO: 101679 - DNA, 415 bp, Homo sapiens
  misc_feature (1)...(415): n = a,t,c or g
caacaactccatgttgtgtgactttggacatgttccttaactttctttatcttggtcttctcatctctgtaaaattgggatcataatggcaccaacttatagnnntttttttttttttttttctttggagccaggatctcaccttgttgcccaaactggagggcaggggggggattttggttaaccctttgggctaaaacaatccccccacctaaccctcttgagtagttaggattacaaacataccccaccttgccgggttaatttttttttttttttgggggggtttggtttttttcccaaggcgggttttaacctcgggaactaaaggaatttccttgcctcgccctccaaaagggcgggaatggcgggaataaataaccttgccggcccaatttttaggttttttaaaaag

SEQ ID NO: 101680 - DNA, 424 bp, Homo sapiens
aagaaagcaagcaagcaagaaagaaagaaaagaatgaaagaaataaagaaagaaagaaagaaagaaagaaagaaagaaagaaagaaagaaagaaagaaaagaaaaagaaagaaaagaagagccttaaggtcaacctacaaactacagagttcctaaggtctcttttttctctattttcttttctgcctgctttaaatctgctgttatttttctattaagatcaaaaccactgtttggatacaacaggctttttgtttgcaacctggtgaatttgtatttgtctcatggctaaagttctgaagtaaaagctataggatttctgtgtgtgtgtttgagtgtgtgtgtgtgtgtgtgtgtgtgtgtatctatttaaaaggcctttataatttttataattttatgtttaagtggcaattaaatccat

SEQ ID NO: 101681 - DNA, 417 bp, Homo sapiens
tctttaaaaaggcccacaaggcactacactcacttgtatctttgacctaagctactcctcttcactctctcactggtctcagagcctttgtgttgcattccctttacctgaatgtatttttccccataagccactgtgcccagcctgtcacttttttttttttcaaagctggggtcttgctctgttgcccaaacgggaatataggggcaagatcggggttaatggcaacctcgaactcctaggttaaaacaatcctccctctgggacctcaaaaatagctgaacctgctgaattgttccaccacacccacgctagaccttttaattggataataaaaacagattttccttacatagcccaaactggtttttaactccggccctcaagaaatcccagcactttggaagtctgaggcgg

SEQ ID NO: 101682 - DNA, 557 bp, Homo sapiens
  misc_feature (1)...(557): n = a,t,c or g
cagatgatgggtgcaccaaaatctgaacagtgtccactgcaccctatttgtagtcatttatcccttgttcccgtctcacccttccctccaagtccccaaagtccattgtattattcttatgcccttgcatcctcatagcttagctcccacatatcagtgagaacatctgatgtttggtttttcatccctgagttacttcacttagaataatagtctccagtctcatccaggtcgctgcaaatatatttcatggtaaactgcttcttaatggggtcattggcttcagccttagacttgagagcaatacaatactctagagataaatgttgtttctttaagttttacaggttaaataagaattataatgcatgaccaaaagtatgttaaaaaccttattcactttacatctgtattacctatatgagtatataggttatatctatagctctctctatatgtatctacatatggcatatctannnnnnnnnnnnnnnnnnnnnnnnnnnnnnnnnnnnnaaagaatcagtatatcaatagatttgggtatacaaagattt

SEQ ID NO: 101683 - DNA, 353 bp, Homo sapiens
tcccggagcgctgggattacaggcatgagccaccaggcccggcctcttttacataattgttgctgtttgtttttaatttatagagaaagggtctctatgttggccagcgtggtcgacaactgttggcctcaagcagtcttcctgccccagcctccctaagtgctgggattatacgcatgagccactgcactccagcctgggtgacagtgagaccctgttactaaataaataaataaataaatgggaaagatactatacgccaaaacttaaaaaaaatgtaaatatttataaaaatgtttaatcatcaaagaatgtggtaaaccacgttcaaaggtttaaaaaaaaaaaaaagg

SEQ ID NO: 101684 - DNA, 403 bp, Homo sapiens
  misc_feature (1)...(403): n = a,t,c or g
cccacgcgtccgctcatccactcccatggcttgaaatacactgatgggctttgctgagcaactccatgctcccccaaaaaaaaaaaaaaaaaaaaaaaaaaaaaaaaaaaaaaaaaaaaaaaaaaaaaaaaaaaaaaaaaaaaaaaaaaaaaaaaaaaaaaaaaaaaaaaaaaaaaaaaaaaaaaaaaaaaaaaaaaaaatntgtggggagactcttataaataaaaaaaaaataaaaggggaggggagaaaaatatttttttttattataaaatataattaatattgtcgggggtctaaaaaaaaatggaaaaggaaaaaactctccctgtaaaaaaaaaatatgggtgggaaaaacacctcttttgacgaaggtaaaaaaaacaaacaaaaccccatttga

SEQ ID NO: 101685 - DNA, 391 bp, Homo sapiens
tgagccgaaatcacgccatcatactccagcctaggcaacaagagcaaaacacggtctcaaaataaataaataaataaataaataaataaatgcaacaaaaacaaatatcagagagtcaaaagagcttctgaacattaaaaataggaaagctgaaatagagtctttaatggaatgtttaaagacaggatctaggaaatctcccagaaagtagaacaaaaagacagcaaaatggacaataaaaagaaaagaaaagtgtacagtcaattaagaaacaataatatgtggctaacagatgtttcagaaagagtagaaaaaaataatgggagaaaattattaaagaaaagataaaatatgatttttaagaactaaataaagcattatgtttcttatt

SEQ ID NO: 101686 - DNA, 425 bp, Homo sapiens
  misc_feature (1)...(425): n = a,t,c or g
gaaggaagaaaagaaagaaagaaaggaatgaaagaaaagaaagaaggaaagaaagaaagagaaaagagaaaagaaaagaaagagggagggagggaggaaggaagggaaggaaggaaaaaattcctcaacatgacacagcaatgtttagcgggttttactgtgtagatcttacactaaatgtaagccaaatgtaatgctatgtatgccattttttgtgtcattgcttatggcatttttattttaatttccaaataaagaagtatgatcgaaaaacaaaaataaaaaaaaaaaaaactgaaatacctataaattttaatcaaaataanttgggggggggcttttttaaaaaaaataaattatatccgccgggcggtggaagtttttttttttttttttgggcccccaattaaatattggtgggggtg

SEQ ID NO: 101687 - DNA, 392 bp, Homo sapiens
tgctggcccgcctgaccttattccaggtacctgggagtcaggggtaaccgggaacctggcatgcttgcttaggtggagaggacattctgaaatggcaaactaaaggcagggggaggagggcaggcagccacagaacatcctggattgagcctctggaaacagtcttcctggagttagaagcaggagggagacttgaaagtcctggaaaaaattatagccggctgggcgcagtggctcacatctgtattgccagcactctgggaggccgaggcaggcagatcacttgaggtcaggagttcgacaccagcctggctgatttttgtagtacctaggcgtttcttaaagagtaaatatatttctttgtacccttatttcaaaagggggaagataga

SEQ ID NO: 101688 - DNA, 430 bp, Homo sapiens
  misc_feature (1)...(430): n = a,t,c or g
ccannnaacgggaggctgaggcggggctttgccatgttggccaggctggttttgaacttctgacctcgtgatccgcccacctaggcctcccaaagtgctgggattacaggcatgagccaccatgcccggccaacaattgaatctttcatacattactgttgggaatgtaaaatggaatagccactctgtaagctaattttgtattttcatttatttatttttaagagacaaaaacttggagtgcactggtgccatcatagcttactgcagcctccgactcctgggctccagcgatccttccgcctcaccccaccgagtggctgggattacaggcgtgggccaccatgcccagccaacatttgactaattatttaaaaaattttttgagggacaggtctcactattgtgccagactgttctcgactcctgg

SEQ ID NO: 101689 - DNA, 432 bp, Homo sapiens
  misc_feature (1)...(432): n = a,t,c or g
nntccactcagtagcaacagccgtccaagatacagccctgcggggctttgagtgttaacgttgggtgcatagtgatgaggcttttttaaagccttgaaacggggccaactggtaatacctaaggaacctcttctaccagaggcaagcattttcaccagccattttgaatttgatgtgctcagcactttgagagtctcacactgtcgcccaggctggagtgcaatggcacaatctcggctcactacaacctctgcctcccaggttcaagcgattctcctgcctcagcctcccatcttcaaatatttttgcacccttatcttactttttcaggaactccagtttcacaaatattagcccaagtgaaattggcccacagatcactgatcctctgttcattaaaaaaaaaataaaagtctctgtgatggttgaaaa

SEQ ID NO: 101690 - DNA, 446 bp, Homo sapiens
ctcagctttttccaaataggaattctgagatttggctttaattggccttgcccacttgtgttctggtaattagcaattgtaaacttaagttatattggttaaagaaacccattgcaggccaggcatggtggctcacacctctaaccccagggatttgggaggccaaggcaggaggatcacttgagcccaggagttcaagactagcctgggcaacatagtgagaccccatctctacccggaaaaaaaaaaaaaaaataaaaaaaaaaaaaaaaattggggccccgggttggggggcctacggctttccccttccttgagtcccccaaagtttttttttttgcggcccaataaattaaattaaccccccgggagtacacatacataagggggagaaaaaggggggaagtcaaaaaataattatcttggaacctttcttttttctcggg

SEQ ID NO: 101691 - DNA, 403 bp, Homo sapiens
  misc_feature (1)...(403): n = a,t,c or g
cccacgcgtccgtttgtatttttaatggaaatggagttttaccacattggccagactgccctcgaactcctgacctcaggtaatctgcctgcctcagcctcccaaagtgctgggattacaggtgtgagcgaccgttgactggcctagtacttatttttttttcatgaactgttttgttattttgcccttctcctcatttaggttcattttgacatctaccttttgtccatgtattgattcattgagagaaaatgataggtttttaaatttttaaaaagtactcccttttctgngcttagttagaaaagcaatcaactatttttttttaaatagggatattaaaacttaaaaggcaattgcaatttacatttagctaatgcttatcaagtgttgcttaatatgt

SEQ ID NO: 101692 - DNA, 412 bp, Homo sapiens
gcgcccacgcgtccggcagtgagccgagatggcaccactgcactcaagcctgggcaatatggtgagactctgtctcagaaaaaaaaaggaaaaaaggagaaaaaaaaaaaaaaaaaaaaaaaaggggaaaaaaaaaaacccacccaaaaacctttttaaaaaaaaaaaattgtaagctttgggggggggaaaacccccccacggggggggggggggggttcccccaccccagggggaaggggggtttgggctttaaaaaaccaaccaaaagaaccttttatttggggggaaaaggggacccttaaaaacccctaaaaaaaaacggggaaaagaaaaaaaaggggtcccctgggtttgggggccccttccgcccaatttttggagggggggggggggggggggaccccccctt

SEQ ID NO: 101693 - DNA, 407 bp, Homo sapiens
  misc_feature (1)...(407): n = a,t,c or g
acggggtttcaccatcttggccaggctgatcttgaacacctgaccttgtgatccactctctttggcctcccaaggggctgggagtacaggcgtgagccaccgggcccagcctccttcacaatctcttacagactttctgatttctaggcagatagtatttaattatgaaaaaagataattctgtttcctcctatgaagagaattgctgctttccaatgacctttttgcccaaaatggcaaataggaagtaatttaatcaggagtagccgaattttgtactgacaaaacttcatattttcatctgaaactgaatatttgtctcatttctaaaagtgaattgcctgtttgccaagttgagaaacccctccaaaaatttctaatagtgtttaagatacatagtgattaan

SEQ ID NO: 101694 - DNA, 407 bp, Homo sapiens
  misc_feature (1)...(407): n = a,t,c or g
agaattacttggagaaagaactgtgaatctatgattgtccatgatttcttttacttaattatgttgatgaatggaaaataagtgaacaagggaagtgggaaaaagatttttttttgtttgtttgtggtagagtttcgctcttgtagcccagggtggaggttgcagtgagccaagatcgcaccattgcactccatcctgggcgacaaaaatgaaacaccgtctcaaaaaaaataaaaataatttattataaaaaaaaaaaaaaaaaaaaaaaaaaaaaannnnnnnaaaaaaaaaaanttttnnnnnannnaaaaggaaagggaaaagaaaaaaaaattnttaaanaaaattaaaatatattnaaattaaaangggggccctttttataaaaagcaacacccctcccc

SEQ ID NO: 101695 - DNA, 407 bp, Homo sapiens
gggattcagagtgaaagcagtcattggactaggggtggggttagggagagcctgtctgacagacacaagaaagggatggataacgccacccagagaaaaaagcattttaggcaagaacaaatatgaaaaaggaacaaagtctgtgggtggggagcaaggaggagataagttgacttgaaggaagacaacacttatgaaagtcacctggaggctgggtgccatggctcatgcctataatcgcagcactttgggaggctgaggtaggaggacaacttgagcccaggagttcgagaccatcctgggcaacatggtgagactgagtctctaccaaaaaaaaaaaaaaaaaaaagggggggccgttttaaaggatcaaattttacgcgcgggggctggcaagtgtttagttt

SEQ ID NO: 101696 - DNA, 411 bp, Homo sapiens
aatttttaatttttgtacacatagggcctaattacgttgcccaggctggtcttgaactcctgagctcagatgatcctcctgccttggcctcccagtgtgctgggattacaggcatgaatcaccatgcccggccctactatttgctttaaacactaaacattcccttaccatatgacccagaaattttcctacttggcatttatcccagataaatgaaaacttatgttcacacgaaagcctgtacatgatttttcataacacctttatttgtaatagccaaaacctggaaacaaccaaaatgaccatcaaatagatgaatggctaaataaaccatgatatatccatatcacatgtatcgagttaaatgggagccccccaaaagacatgtacatatattaactcctgaaccta

SEQ ID NO: 101697 - DNA, 414 bp, Homo sapiens
agctgcttagcctacactcagatccacccgcggtgcatagaagccctccgagaggcttgaggtgtttaactagcacagcctcctctgacatttagctatgcaggagtgaccctggggaagccagaccaagagataaaaagactgtaaaacagactgtaaaaaagactgtaagcagagacatcagcagctacattctcttgtgtgggagacagattctgcagttacattcaatcaagctttataaaaaaaaaaaaaaaaaaaaaaaaaaaaaaaaaaaaaaaaaaggggggggccctttaaaaaaaacaaaatttaagggggggggggggggaaaatattttttttttttgggggcccaaaaaataatttcggggggggggttttaaaaaggggggggggggaaaaccccggggt

SEQ ID NO: 101698 - DNA, 423 bp, Homo sapiens
ctctgtcactcaggctggagtacagtggcacgttagcttactgcagcctcgacttcctgggcttgagcaatcctcctgccttggcctctgatagtgctgggattgtgggcatgagccatggcatcttgcccttgtgactacttctaaacacactgagagctgttcacttctctgtatacccactgctactttcttagggctggttacttaaatcactgcaggttaggtccctcactggatttccagcctctagtcctattcacgtctgtgaaatactctatattgtagcctgatcacctgatcattccaaaaaggagatctgatcatgatactcctctgcaatgcctgttcaatgtcacttgatcgccttcaggtgaaagtctaaattctccaacttggcatataagactcttcatgccctgg

SEQ ID NO: 101699 - DNA, 421 bp, Homo sapiens
catgaagcaggctggatgtgctggctcaggcctgtaatcccagcactttgggaggccaaggcaggaggatcacttaaacccaggagttcgggaccagcctgggagacttggtgagcccctgtctctataaaaaataaaatccaaaaaaagaagttatgaaacaaacaacatgttaaattaaatatactttatcatccttatccctctccttcttaccttataaatccataacaagaaaattaaaaatatgtatacctattccccttggtcacagtcaggggtctgtggctagcatggctggttcagccagtgcagttggtgacaccaggagctagggggtaattgtccagcatcctcagccaacagcaccttattcaagtggtaaaagttaaaaaaccaccaatagtgggatgaattaaca

SEQ ID NO: 101700 - DNA, 393 bp, Homo sapiens
ccagaagtctgctaagaacttctatcatctatctatctatctatctatctatctatctatctatccatccatctatcatctatctatctatctatctatcatctatctatcatctacctatgagtaggtaatcatactggagcaaaaatggaactcaatcaaaaagggctgtttgtagtgtacaattcaaacaaattgcttataacaattaaaagaataggtcattaggcttattcccaaactatgatataaaatcaaactcccaacatgttggtctgtacacttaaattggtttacactctgcaatatctcctggtacttaaaataccttgcaatgtaatgaagaaaattagtttgttttgcatgatttgaacctctgaaaagtaatatatt

SEQ ID NO: 101701 - DNA, 391 bp, Homo sapiens
agactcggggatatctaacagcaatacctgatcactacttcgcactagttctagatcgcgagcggccacccttttttttttttttaaaaaattaaggggggttaataaaacccggtctttaaaaaaaaaaagggggccccgaaaaaaaaatccagttttaagaatttttaaattttaaaaacaaacagcctaaattttggagggggttttaaaattccccacaatattttaaaaaaaatcttcttttttaaaaaaaaaaacaaaaaattctttttcctttgggggaaattaattattggccaaggtttttttttttgtcttcccacccccaaaaatatcgggggggggaggatttactttatccgggggagattcccttttaggaaacggc

SEQ ID NO: 101702 - DNA, 416 bp, Homo sapiens
  misc_feature (1)...(416): n = a,t,c or g
catcacctcagtctggtcgggagtggaatgggacacgggttgtcggaacttgctgggcttcacaggggccactgtgtggccctttggggaccagatgcccagagccagtctaaatgaataaacatgctaaaacgctaaaaaaaaaaaaaaaaaaaaaaaaaaaaaaaaaaaaaaaaaaaaaaaaaaaaaaaaaaaaaaaaaaaaaaaannnngnaannnaaaaaaaaaaaaaaaangnnnnnaaaaaaaaaaaaaaaaaaaaaatttttttttttttaaaaaaaaaaaaaataatggggggggggtaaaaaaaagggggggggggaaaaaaaaggggtgtntaaaataataaattgtggaaaaaaaaatttttttggggggggggaaaaanaaanagggggggggggtggaaataa

SEQ ID NO: 101703 - DNA, 416 bp, Homo sapiens
aaaaaaaagggcggcaatgataaattgctataagcctctccctgcccccttccctcctcctccagcagttactcaactgggttgtagattatgtttacattcaagttgtctcaccagtcactcaggactcttctgacctacactctggcaggcactacactggggtgaacacagacaaagcaattcaacacaacccctcaccagtcagaatcagaatgtgaccagacgtagtggcatgcacctatggtcccagctccttgggaggctgaggcaggaggattgtgtgagcctaggagttcaaggcaggcgtgggcaacagggtgagaccctgtctcaaaaaaaaaaaaaaaaaaaaaaggggggcccgtttaaaaggatcaaattttaatacccgggggtgggaaggtaatattttt

SEQ ID NO: 101704 - DNA, 259 bp, Homo sapiens
agggagccgcgggatggaccgcagtagagacggggtttcgccatgttagtaaggctggtctcgaacacctgacctcaagtgatccacccgcctcggtgtaatcccagcactttgggaggccaaggtgggaggactgcttgaggccgggagttcgagaccagcttgggtgacatggtgagattctgcctctactaaaaaaaaaaaaaaaaggggcggcccctttaaaggatcaaattttactgccgggggggggcgagaa

SEQ ID NO: 101705 - DNA, 423 bp, Homo sapiens
  misc_feature (1)...(423): n = a,t,c or g
cacacgcgtgcggacaacctcgtcaagacctacaccagagtctccgtgcatcggactcaggctacagctgagggtacaacatagggattttatacaagaaaaatacggggaattaagcgtgaaaaaaaaaaaaaaaaaaaaaaaaaaaaaaaaaaaaaaaaaaaaaaaannnngnnaanntaaaaaaannannaaannnaaannnnnnnnnnnaaaaaaattttattataaaaaaaaaaaaaatntttttatntnantnntattttgggaaaggtgggaaaaaaaaaaaatattggaaaaaaaaaaaaaatttttttttaaaatttttaatataaaaaaaggggaaaaggggnnnnggcgnnnnnngggnnnnnnannntttttntttttattttaaatattatntttggtgtttatgggggg

SEQ ID NO: 101706 - DNA, 267 bp, Homo sapiens
aaaattttaaaattacagttaaagttattaaaaaactatttaaaaaatgtctcagcctgtgcaacacagcaagaccctaaaatctgggacttccagcatgcaccaccatgaccagctggtgcgtgcctgaagtcccagctactcaggaggctgaggcgggaggattgcttgagtccgggaggttgaggctgcagtgagacagtctctctcactctgtcacccaggctggagtgcagtggtgtgatcatggcctagtttagatcgcga

SEQ ID NO: 101707 - DNA, 411 bp, Homo sapiens
  misc_feature (1)...(411): n = a,t,c or g
aggacgcgtgggcggacgcgtggggatatagtaccgcaagggaaagatgaaaaattataaccaagcataatatagcaaggactaacccctataccttctgcataaaaaaaaaaaaaaaaaaaaaaaaaaaaaaaaaaaaaaaaaaaaaaaaaaaaaaaaaaaaaatggggggggcccccttaaaaaaaaaaaaattcatatccccgggggtggggaaattaatattttttttaggggccccaaaaataaaaccagagggggggaaaaaaaaaagggggggggggaaaaaaccgggggcccaaaaaaaaaaaagggtgaaaaaaaaccccctttttcgcgggggaaaaaaaaaaaaaaaagacgccgnaatncactgctgtattccagactggatgataaaacccgaccttt

SEQ ID NO: 101708 - DNA, 409 bp, Homo sapiens
ctacgggtgcatttcaccacacccagctaatttttaattttttaaaagtgcattccatcatacccggctaatttttaatttttttttttttttggaaaaaacagggtctcactatgttgcccaggctggagttgaactcctgggctaaagcagcccaaccacctcagcctttgaaataggggggattacaggcctatttttaagttttaaaaattaaaaatttttatccactgggtttggcctataaacaatttttattcttcaatatgaaattaaccttagcttactatataacttttttactttaggaactttttaattttaactttttgattctttggggaaaacactttgcttaaaaaacaaatacattgtacagctgggcaaatatgttttgtttatattccta

SEQ ID NO: 101709 - DNA, 409 bp, Homo sapiens
acacatgccacaacatggatgaatcttaaggactgcttgaggccaggaactcaagaccagcatgggaaacatagcaagaccacatctctacagaaaacaaaatcagccaggcgcagttaatgtgtgcctatagtctcagctactcaaggaggattgcttgagcccaggattttgaggctgcagtgagctatgatcacaccactgcactcctacctgagtgatagaatgagaccttgtctcaaagataaaaagaaagatttgaggttacctggggttgggagagatacaggaatgaggttattgctcaacagttacagagtttcagtgtggggtgatgagaaaattttggaaatagtagtaataatttcacaacattgtgatgtaattaatgcctctgacttgtaaattt

SEQ ID NO: 101710 - DNA, 405 bp, Homo sapiens
cggacgcgtgggcggacgcgtgggggcatgtgccaccatgcccagctaattttgtatttttagtatagacagggtttctccacattggtcaggctggtctcgaactcccgaccttgagtgatccgcccgcctccgcctcccaaagtgtatttatttattttttagagacagagtctcactctccagcctgggagacagagcgagactctgtctcacaaaaaaaaaaaaaaagggggggccgttttaaaggatccaattttacgtccgcgggcttgcaacgttttattttttttatggggcccccaaaattaatttcccgggccggggtttaacaacggggggatgggaaaaacctgggggttacccaatttattggcttggaagaaaatccccttttggccaggg

SEQ ID NO: 101711 - DNA, 403 bp, Homo sapiens
cccacgcgtccgcccacgcgtacgaaattggggagatcatttgaatccttgccaattagtagtcaaggctgggctaaaggaaccaaaagcattatttcacagaaaatttcaaaaggaaaggatatatttacaaatatacgaagcttaggctggacacggtggctcatgcctgtaatcccaacactttgggaggctgagacgggcagatcacttgagcccaggagttcgagaccagcttggccggcgtggaggaacactgtctctaataaaaaaaaaaaaaaggggcgcccgttataaagaacccctgggggggcccaattttacccgggaatgcaaggaaatacttcttcccttatagggaggggaataaaaagctatctggggattttggaaaaggaccctt

SEQ ID NO: 101712 - DNA, 387 bp, Homo sapiens
aatcagcatgctcctagccttactactaagaattattacatttcgactaccacaactcaacggttacgtagaagaattcaccccttacgagtgcgggttcaaccctatatcccccggccgggcacctttgttcatagaacacttcttagtagatatcaccttcttattatttgatgtacaaattgccctccttttacccctaccatgagccctacaaacaggtaacctgccactaatagttatgccatccctcttattaatcatcatcctagccctacgactggactatgagagactacaaaacggatctgactgatccgtactactggtagagttcgatggactgaaaaacgacgggcgataaggtggacccttcgatggtgcggc

SEQ ID NO: 101713 - DNA, 332 bp, Homo sapiens
  misc_feature (1)...(332): n = a,t,c or g
aacattactnnnatactactaataattattacattttgactaccacaactcaacggctacatataaaaatccaccccttacgagtgcggcttcgaccctatatcccccgcccgcgtccctttctccataaaattcttcttagtagctattaccttcttattatttgatctagaaattgccctccttttacccctaccatgagccctacaaacaactaacctgccactaataggtatgtcatccctcttattaatcatcatcctagccctaagtctggcctatgagtgactacaaaaaggattagactgagccgaataaaaaaaaaaaaaaag

SEQ ID NO: 101714 - DNA, 410 bp, Homo sapiens
  misc_feature (1)...(410): n = a,t,c or g
aataattattacattttgactaccacaactcaacggctacatagaaaaatccaccccttacgagtgcggcttcgaccctatatcccccgcccgcgtccctttctccataaaattcttcttagtagctattaccttcttattatttgatctagaaattgccctccttttacccctaccatgagccctacaaacaactaacctgccactaatagttatgtcatccctctannaaaaaaaaaaaaaaaaaaaaaaaaaaaaaggggggggggccttttaaaagaacccttggggggcccaaatttaacgggggggggaaaaaaaaatttttttcctttttggggggggttttaaaaccccccgggggatttttgggaaagaacctttctttggggggggaaaaaaaagggcaa

SEQ ID NO: 101715 - DNA, 450 bp, Homo sapiens
  misc_feature (1)...(450): n = a,t,c or g
gtgatctaaacccgtttacatgtgcatccgcannggcantnngggtngancacgcgtccggtcgttttctgcctacaatttctctgacccctgtccctgtttatttcagcagtgttcacagcatcttgaccaggagtagattctatcttgagaagccactttctttgttcatccataagaagtaagtcctcattcattcaagttttgtcttgagattgcagctattcagttacatcttcagactccacttctaattctagtaggcttgctattttcgccacatcagtagcaacttcctgcactgaggtcttgaaatgcacaaagtcatccgtatgggctggaatcaacttcttccaaactcctgcgaaggtgggtattttgacctcctcctgcgactcacaagtgtacttagtgacatttagaatggcgaatctgttccattacgccttc

SEQ ID NO: 101716 - DNA, 407 bp, Homo sapiens
cttaattgtaataatcaacaccctcctagccttactactaataattattacattttgactaccacaactcagcggctacatagaaaaatccaccccttacgagtgcggcttcgaccctatatcccccgcccgcgtccctttctccataaaattcttcttagtagctattaccttcttattatccgatctagaaattgccctccttttacccctaccatgagccctacaaacaactaacctgccactaataggtatgtcatccctcttattaatcatcatcctagccctaagtctggcctatgagtgactacaaaaaggattagactgaaccgaatctggctgggagaagctcgtcaagaaagaaaaggccgacaaattaaagggggggcggccgtgataaattgacc

SEQ ID NO: 101717 - DNA, 377 bp, Homo sapiens
ggcacgagaggacttcaaactctactcccactaatagctttttgatgacttctagcaagcctcgctaacctcgccttaccccccactattaacctactgggagaactctctgtgctagtaaccacgttctcctgatcaaatatcactctcctacttacaggactcaacatactagtcacagccctatactccctctacatatttaccacaacacaatgaggctcactcacccaccacattaacaacataaaaccctcattcacacgagaaaacaccctcatgttcatacacctatcccccattctcctcctatccctcaaccccgacatcattaccgggttttcctcttaaaaaaaaaaaaaaaaaaaaaaaaaaaa

SEQ ID NO: 101718 - DNA, 375 bp, Homo sapiens
ggcacgagggagtctccctgggtgacagagcaaaactccatctccagggaaaaaaggggaaaaaaaaaaaagaaaatttggtgtttttgggaaaaccgggtttcttggcaaaaaaaccccggaattttaaattggtggggggaaaaataaaaaaaaaaattttgggtcagggaaaaaacttttttaaaaaaaatttaggggcccgggttgggggtccaaccccggaattggcccaccatttgggaaaatggggggggcaaaaaaattggggccagggatttgaaaaccacccggcaaaaaaaagggagcccttgtttttctggaaaaaaaaaaatttgcccgggggggggggcgatgctctgaaaaacaagtcag

SEQ ID NO: 101719 - DNA, 478 bp, Homo sapiens
  misc_feature (1)...(478): n = a,t,c or g
cgcgccattgattgcactacntcagngcggnggaattcgacacggatttgccatgttgcccaggctggtgttgaactcctggcctcaagcaatcctcctgccttggcctcccaaactgctgggatgacaggcgtgagcacacggccacctgtgttattgccaacactcggaacgcacctatgtttagatgcttgtttgggctcctctctgtgacggatcctccggaggtcccggctcctccgtctttctgccacgccatcctcagcgcctagaacagtgcctgacacacggcaggagcctgatgaggatttgttgaatgaatgaatgacaccagggctcaacgccactccaggactcagtcttctcacctgtcaagggggctagcacctggcccagggttgctacctggtccactggtccagggagacagacctgcttgagcctgactggtttcgtacttgtgggacccccggggctg

SEQ ID NO: 101720 - DNA, 410 bp, Homo sapiens
acgcgggtcagggtgaggggtgaatatacattccatgtttaagagtactggaatctaaaaccaaacgtaccaaacttaagtgtacaaactacaatcaacaattcttctttttcaaataatattaatgaaaaataaagatcaaattcggaatgggtgattttgttgttttatatgcagttttacccttacaaatgttcacaaatgcagaaatgcattaataagaactgcttagggtcatgtgtggtggctcatgcctgtaatctcagccctctgggaggcaggaggatcacttggggcaagaagtttgagaccagcctggacaacatagtgaaaaaccgtctcaaaaaaaaaaaaaaaaaaatttaccagggggggggggaccatccctgtatttttaccaactaaggagg

SEQ ID NO: 101721 - DNA, 488 bp, Homo sapiens
  misc_feature (1)...(488): n = a,t,c or g
cgggtgnnnnntttgaattcagttctatctgactacgccaagcttggcacgaggcatacgtgtaatcctagctacttgggaggctgaggcgggaggatcacttgaggccaggagtttgggaccagcctggggaacatagaaatactctgtctctaagaaattttttaaaaattggctgggcatggtggcaacatgcctgtgatcgcttgagcccaggagtttgaggttgcagtgacctatgattttgccactgctctccagcctgggaaacagagcaagatcccatcttggggaaaaaaaaaaaaaaaaaattcctgcggcccccggggaattacggggccggctttttaaaacctcgggatttggaatcangcccggaacccctttgctggattccaaagaacgggggctttgactcacagttaaccaatgccttttcccctggaaaggcccacaatgatgaggcagaactcagaccctgatttttt

SEQ ID NO: 101722 - DNA, 454 bp, Homo sapiens
  misc_feature (1)...(454): n = a,t,c or g
cccctaggatcctcttaccaagcnnacgccaagcttggcacgagggccacaaactcttgggctcaagctatcttcccacctccagcctcctcttttgctaggactacaggcgtacaccaccacacctggctaattttttttattttttgtagagacagattcttactgtgttgcccatgctggtgtcaaactcctgggttcaagctatcctcctgttgcaggactttttctcagttcagctaaagatggggttcttgtctgtcccatgaccatgaaaaattaggcttgcagactgtttaaagggtaggtaaagcagggttttattgggtgaaaagggaaaaaaaggagggaaacagggactctcacaaggccagagtccctcagctagagagcttcccgccaggccgttggaatcccaggttccacacaagaagaggaggggccaggctcctcc

SEQ ID NO: 101723 - DNA, 442 bp, Homo sapiens
  misc_feature (1)...(442): n = a,t,c or g
ntcgagaccttcgtagaccactatccatgtggtggaattctcctaaggtacttctctgggacccccactctggccagggtcctcgatcttgggctgaatgagtgagcacccaccctgggctgccccaagctcaccacttggtctgctcttccttagtcttacacagtgtgggccatgtggtgaatgtgtacctgttctccatcagccccctcagcgtcctctcttgcctctttcctggcctcttccatgatgatgggtgagtaagtgcgaatgtgtgtgtgtgtgtgtgtgtgtgtgtgtgtgtaatggagaggattccttttgggtggaaagaaattatctggctccaaaggagactgccaccttctaggtgacaagacatacagtgaccagtctgagcccctaatgccaagttagcatgagagactggtgtgtgaggtgg

SEQ ID NO: 101724 - DNA, 469 bp, Homo sapiens
  misc_feature (1)...(469): n = a,t,c or g
agtgaggggcccnnnnnctggtgcctagcnngtcgggaaannctnnnangagngngagggtcagtagagcttgctgaacagaattcctttctgtctttgtctgaatagctttgattgtgtttttttgttgggtttgttgtttgaggcggggttttgctctgttgcccaggctggagtgtggtggtatgaacacggctcactgcagccttgacctcgtgggctcaagtgatccttccacctcagtctcccaaagttttgggattacaggaatgagccaccgcacccacctttttcttgtttcaaggccttaaactttaaggactattgtgactcaggtaccgttccttgcccttttatgaaagagttgtccatgctctttattcatgccctcactgaatcctttgtcttgttcatcgttatgtcaaaattaataacaactaaacacttaacaattatatcaaatgtctaa

SEQ ID NO: 101725 - DNA, 500 bp, Homo sapiens
  misc_feature (1)...(500): n = a,t,c or g
tggatgcccggtgccgaaaatgaaanccctaaatngcttgaagngccngnaannacgggacggaggngggacacttggcctctcttcccgagtctaccactcacttgctgggcagcctttgacaggacattcagaccctctgcgctgcagtgtctttagctgtaaaatggggaaactgtcgccttgggtactttcctgatctatgatgctgaaacacactggagaattgccagtgaccttatttttttagataggaatgtggtaaaagacactagaaagctgtaaaagaatatagaatgaaagagtaaacctcccttatactgtgttagtccattttatgttgctatacaggactacctaagactgggtagtttatttaagaaagaggtttgtggccgggcgcgatggctcacgcctgtaatcttagcactttgggaggcctaggcgggtggatcacctgaggtcaggagttggatacccgcctggccaacatggtgaaa

SEQ ID NO: 101726 - DNA, 480 bp, Homo sapiens
  misc_feature (1)...(480): n = a,t,c or g
agcgcaggnnnnnnnncctgcntgactagnatgctgnggnaanncngannncattaaatctacggttatgaaggcaggggctcagtggccgggtccctgagctccctatagtcggccaccacagattcagacttggactatgattatctacagaactggggacctcgttttaagaaactagcagatttgtatggttccaaagacacttttgatgacgattcttaacaataacgatacaaatttggccttaagaactgtgtctggcgttctcaagaatctagaagatgtgtaaacaggtatttttttaaatcaaggaaaggctcatttaaaacaggcaaagttttacagagaggatacatttaataaaactgcgaggacatcaaagtggtaaatactgtgaaataccttttctcacaaaaaggcaaatattgaagttgtttatcaacttcgctagaaaaaaaaaacacttgtgatacaata

SEQ ID NO: 101727 - DNA, 477 bp, Homo sapiens
  misc_feature (1)...(477): n = a,t,c or g
nttctgagaccctttgaagagcggnggaanncgnnnnccttttttaggttccacatgtaagtgagatcatacaggatttgtctttctgtgtctggcttatttcacttagtataatgccctccagccacatctgtattgttgcaaatggcaggattttccccttttaaaaaatttttaattaaatttttatttttatttaaaagaaataggaggtctcagtgtgttgcttagactggtctcgaacttctgggctcaagtgatcctcccaccttggccttccaaagtgctgagattgcagatgtgagccaccatgcctggcctgagccactgtgcctggtcccctttttattgttgaataatattccattgtgtctatatcacatttttttatcaatttatccatcgatggacaattaggttgtttcacccagcctggatgacagagtgagactctctaagaaaaaaaaaattgaaaaa

SEQ ID NO: 101728 - DNA, 500 bp, Homo sapiens; identical to SEQ ID NO: 101725
  misc_feature (1)...(500): n = a,t,c or g

SEQ ID NO: 101729 - DNA, 403 bp, Homo sapiens
cccacgcgtccgcggacgcgtggggaagaaatgaatggccatgtgcggtggctcacgcccataatccaaccacctcgggaggctgaggtggatggattgcttgagcccaggagtttgagtttgagaccagcctgtgcaaaatagtgaaacctcatctctccaaaaaaaaaaaaaaaaaaaaaaatttttccccggggtgggggagccccccttgtaccccccttttttaggggggtgggggggggggggaaccctccccccagggggtgggggttccaggaccccgaatttcccccattgttttaagccgggggggaaaaataaaacccccttttaaaaaaaaaaaaaaaaaaaaaaaggggggccctttttaaaaattccctggggggcccccatttttccc

SEQ ID NO: 101730 - DNA, 415 bp, Homo sapiens
  misc_feature (1)...(415): n = a,t,c or g
ctagaccttttgcctgagccctcatgccatatttctgattcctactggatatttccctatgagggggattttagaatcttcattccttttttttttttttttggaaacaaagcctccctgggccccccagcctggagggcaggggcgcggttttggctaattgaaacctccttctccaaaaggccggcatttttggggccccgccctctcggggggggggaataaggggggctcccccccccccccaactattttttggggttttgggaagagacggggttcccccgggggggccggccgggcctggaccccctgacatcaagggatcactccccctggcccttccaaggggcggggggggaaggggaaacccccctgccccggccaaaaactattattgggaaaaatccgcgcn

SEQ ID NO: 101731 - DNA, 414 bp, Homo sapiens
  misc_feature (1)...(414): n = a,t,c or g
ccgcagccggggcggggggcgggcggcgggggcggnnntccgggaccccggtacccttctcagcaacatctcctccgcgcgcggaccccgaccccattcgcacgttctcggggctctttcccgggcgtgaggggctctgggtggcgcgggggactgggcggttgaagccgggagcgaccgctgccttcgctgccgcccagggcgcttccccgctcaggagcttcctctgggcctctggacggaggcgcgcaggggcccgggaggcgggaacgatgggcctttctaggcggtatcagggccgatgctcgtggatgcagagcagtgaccagcccagaaccgtaccggcttcccggggcaggggcggcccgagcgcgccgctaacgggagcaacgggccctgcccccggtggagtat

SEQ ID NO: 101732 - DNA, 422 bp, Homo sapiens
tttcgtggctttggtgtgagaactagctgaggggttggttgacaggggaggccggctcctaagggggctgtcgctgtgtttagtaattagcgagctgtgggaggatagtgtctccctgggtccgtaagggctccagacgccacagcaaggagaatacagaaataagaaaacatattatgggctgccatggtggttcttgactgtcatcccagcactctgggaggctgaggtgggaggatcacttgaggccaggagttcaagaccaacctggccaacatagagagaccccatcttttttttttttttttttttaaaagggattctctttttgccccccgggctgaagggggggggcccattctattttaatggcacctctcccttccgggattcaccccttttcttggcccccccccctggga

SEQ ID NO: 101733 - DNA, 1803 bp, Homo sapiens
gtggcgatatttaaaggggacgcagcctatctgtcaggagtggagcgtgagtcggctcagccaatgcgcatgcgtgaggcgccagcggtttctcccgtcccagtggttcccacggttgtcttggaaaccagaccccgaggcttggcagagcaggagccctcggtggcagtgcttgggtgtcgaggctctgaggctccggcctcacctctccacggggtcgaagggaacgtctccggatgccaggagtcgcaaagggccgaccatgatgatgaaaccccaggcagagacggtggaagcagcacgggatcccacctcaggcctgcacggacggtgttggttgggccagaagatcaagggagtcagtccacccaggagcagaggagaggatgtccctcatgaatgagacaggaagtgcagaggaaatgcgacactacctttcctggaagacaaggccagtcttggtcgcctagcgctcattctaggcaatccacccacccatgaggggaaacgtggagaagaaggaagcttccctgcctgagacatgtatggaagtcaagagctccagggtcatgagacctgcccaatccagcagaaacacgtttggagagagaaacagtcatgacacggatctccaggaagtgtctccctgacggactgggaagtcatcttttttgaaggcatttggccagagcgagaggcatccaggcccctgagaaacaggggaggcagagccagagggaggagagagtagaggccagagcccaggcaggatacagcaccgtgccaccgccacaggcataaggggtggggttcctaaagggtggcttgtccagggaggccagcgttccagtgacagggactgttgccatctcccattcccggcttcctcttgctgactgtatcgtggtgtggcttcatttctcagagaagagccgtgaaaagatacaagcatcttctctggcgtggatccgctgctctcctgtggaacaaagagttcctctggggctcttgttctcggctgcagtgtactcatcttgatccccaaccaacaccgtccgggcaggcctgaggctgggatcccgtgctgcttcccccgtccccgcctggggtttcctcatcgtggtcggccctttgcgactcctggcatccggagacgttcccgtcgaccccgtggagaggtgaggccggatcctcagagccccgacacccaagcactgccacagagggctcctgctttgccaagcctcggggactggtttctaagacaaccatgggaaccactgtgacgggagaaaccgctcccgcctcgcgcatgcgcattggctgagccgactcgcgctccgctcctggcagtatggctgcgtcccctttaaataccgccaccgccgcgcggcggcagcgaggttcctcctgccgccacggcggcggctggatccggggtccagtttggggcggcgtgggagagggggccgcgggtgtcttgtccgttcccagggccaaacccctaggagtcctgtcctcaggacctccttgagccgacttccacggagggaggtggagcttcaggatgcctgctgtgttctccagactcccgttcagatccgattttggacccctccgagtgagataggataggctcaccacatctggtgaggcaggcagggccttgctgcaacacagaatgatcccgtaggtctcaaggcctacttgtactgttgtacataatgtatataattgacttttattcactcgacaaaatttccataatgtattcccagcacaatctacagtaattattaagac

SEQ ID NO: 101734 - DNA, 389 bp, Homo sapiens
gcgcaaacccactccaccttactaccagactaccttatccaaaccatttacccaaataaagtataggcgatagaaattgaaacctggcgcaatagatatagtaccgcaagggaaagatgaaaaattataaccaagcataatatagcaaggactaacccctataccttctgcataatgaattaactagaaataactttgcaaggagagccaaagctaaacctagccccaaaacccacactccaaaaactaacaaagaataaataaataatataaaaataaaaaaaaaaaaaaaaaaaaaaaaaaaaaaaaaaaaaaaaaaaaaaaaaaaataaataaaaagggaaaaaaaaaaaaaataaaaaaaataaatattgaacgtggtggtgtta

SEQ ID NO: 101735 - DNA, 477 bp, Homo sapiens
  misc_feature (1)...(477): n = a,t,c or g
aggaggcnncccccaatagaagctcacgacgtcgaccggccggaatcccggtcgacccacgcgtccgaatttttaagttttttgaagagatggggatcttattatgttgcccaggctggtctcaaactcatggcccctagtgaaccttctgccttggcctcccaagattctgggattgcagatgtgagccactgtgtcctgtctaaaccttcattttgaaggaaactgagggccattgtgtgggctgggtatagggtatgacttgccccagatcacacagctacgtagcagcagggctgggaccagaactcaagatttcaatggtgcatggtggggagccagccatgctttcccacctgtcccctgtggtcatgcagaagggctcttgggatatttggccgggagagtacctttcaggcaagctgagtgaccttttagaaaatgactttatgaactttgactcctgcccaaactgtg

SEQ ID NO: 101736 - DNA, 418 bp, Homo sapiens
  misc_feature (1)...(418): n = a,t,c or g
cccacgcgtccgcccacgcgtccgcccacgcgtccgcccacgcgtncgaaaaaaaaaaaaaaataaaaaaaaaaaaaaaaaaaaaaaaaaaaaaaaaaaaaaaaaatggggggggggtttttgagatttttgggggggggaaaaggggcccccccccctgcaaaaaaacgacttcctccttttttggggtttttttttaaaaagctttttttttttttgtgggggcctttttttttggggggggcctttttttttcccccccccccccaattttttgggggttggggggaaaaaaaaaactttccgcctcctttgtgggcccttctccgctttttttgggggggaaaaaaactnnnngggcccccccccnccgcggcccgggcccgaaaaacggggcnccncacgccaccctgctttc

SEQ ID NO: 101737 - DNA, 351 bp, Homo sapiens
gcgttgggttgacaccgaggggggtaatgacttgttgggggagggtagatattgagctgttaattgtcagatcagtgttttaatctgacgcaagcttatgccgaggagaatggtttcatgttacttatactaacattagttcttctatagggtgatagattggaccaattgggtgtgaggagttcagttatatgtttgggattttttaggtaatagcttttctagtcacgttaggtctaggaggagtaagggcaggttttggctcgtaagacggcctatataggggattgggccgtgtgtgatgctcaggtagaatctcaatatgttggacaaataaaaagtgcctaaccg

SEQ ID NO: 101738 - DNA, 463 bp, Homo sapiens
  misc_feature (1)...(463): n = a,t,c or g
agaggcaggggccccgcaatagtagacattgatcactgtcggggaannctntnnnnnntttttttttttacccccgcccccagggtttttattttggggggcggtttaaaatttttttttggatcctcccctcccccggccaaaaaaaggggggtccttaaccaacgggaaattgcccaacctaatccttgcccaaaaaaaaaaaaattttccccaaaaccggctttacccgggggcccatggttttgccccccccccaaaacctgggaaagaaccgggtaaaacaactggccccccttttaacctttttttccccccctttggaaacccttttttcggccccaaaaaaccaccccttttttggccaccattttttaggggcccaaaaaaatttttttttttttttttgcccaaaaaaattgggaatttttttttttggggttcccccaaaaatggggggggg

SEQ ID NO: 101739 - DNA, 376 bp, Homo sapiens
tgggactacaggcatgtgccaccgtacctggctaatgttttttttgtaattttcaggggagacaaggtctcactatgttgcccagtctagggtccaaccactgaactgaagcgatcttcctgccttggcttcccatagggctgggattacaggcgggagccaccgcacctggcctgagtatttattattcctatgtgatgggagcgtttcaagtcctcacttgtaactattggaaatatacactacatgttcgccattttttaaaaaatgtgtttttgttatgaaatagaacttactatgggcacatctgggttttttccgccctaatcctgtggtttctcaagggcaggatctctctctcttctgtcttacacac

SEQ ID NO: 101740 - DNA, 473 bp, Homo sapiens
  misc_feature (1)...(473): n = a,t,c or g
nttgaacnaatggataatactgcgacccgcgcggcnnnncannanctacgantcatagaggtggaattcgcggccgcgtcgacctgggcttaaatttttgacctcaggggatctgcctgcctcggcctcgggaagtgctgtgattacagacgtcagccaccatgcctggcctgaaaccttttttaggtaaaggtgaattccatccttaaaaggttctggtatatcctatttagccattttctattggctcccaaagaattcacatcaaaaaaacagctttgaactcccccttcaaaggaaacaggcgactttcataattagcatctaccattatccccaaatcttattttattcattgacttgaaattttttccaattgcttttttttttttttttttaggggaaaaagcaagggtttactaggccaaaaaaaaaaaaaatttttttttttcaaaaaggggccctgaaaaaag

SEQ ID NO: 101741 - DNA, 268 bp, Homo sapiens
caaaaagtagaatggtggttcccacggggcaatgaagaggggaaagtaaagagttgctgtttcaggtttgcaagatggaaaagtttgggagattagttgtacaataatgtgaatgtacttaatgctcctaagctatacattttaaaatagttaagatggtaatttttttgttgtgtatgtgtgtgtgtgtgtgtgtatatgtgtgtgtgtgtgtgtgtgtgtgtgtgtgtgtatatatatatatttttttgagacctcaacgcgggcg

SEQ ID NO: 101742 - DNA, 1485 bp, Homo sapiens
ccgggcccccccccgaggttttttttttttttttttttttttttttttttttttttttttttttttttgaactttaaagatcagatttatttggagaaaacaaaaaacccacaacccaaaggatgggattttacatcaagacatctcccaggtaataagtctacagattacaaatcattttcatagaagatatttttgtacaaattttacatgtattcaggagcgggacattaatcaatccctgtttctattttaataggggggacaaggtaggggagagggaaaaacagttttggatataactatttggaaggagagtagacatgaagagggcaaaccctagcttttcattatctacaatcaatagtttgtttttcttttttaaaaaagaaagaaaaaccctttcaatcttcaatactctttaaaagcccacttagctactggccaatccacaccaattatttaaattcacttggtacacacctttgtccactgggtaaattatattcattatgcccactgctgcagcacgcataaaccaacacccctgcatggctgaacagggcctaatctaggactgatgggagaagggcttgcaaaccaagatcaaggtgtttctccgctaatactgtctaccaagctgatccctacaaaaatgcatataaaagcaggcaagtttagctactgtgttgcaagagaaaccaggaccttgttaaatagttctctccattaccatttattctctcaagggaagcttaaaaaaaaacaacaacaaaacaacacattggtctggccacctcatgaatccaacaagcattagtgtggcatttcagtggagaaggaaacttggggggaaaaatcccatcaaggttgtaagaaaggctcccaatttaactgtccctgtccctatttatccatcatccaagaccatccattattctagagcactctgatcaataaaaggggtccaagcatcaggagcaggcaaggagaaccaaaagacatcaagaaaccgatttgcttgagaaaagcagcgattcttcctttcagagttctccatggctcagaaaatgcccaagacatcatgtatgtgacttagatactgctttttgggaggttaagagtagcatgaagaacttaagatgacgataagagtctaaatttttagtttcaaggtttcaatagaatgtggatatattcaaaactttcaaaaaggacagtgtttagaaagggtaaaactaggacacagaaaacactgggaattaccacgacccccaagtgcttccggctccaggaaataaccattcatgtgtttgctggaggtcacacaattttcccctattacctggtgcaaaatgactcatcacttcccaaaagcttcttttcaaaccacgattttcccatttattttggtccaatgcagtcccattctttatggcctatagtctcactcccaactacccccctggggggttaaaaaaaaaa

SEQ ID NO: 101743 - DNA, 458 bp, Homo sapiens
  misc_feature (1)...(458): n = a,t,c or g
nttgaaagccttgggagcctgaggaattcagnnnnannaacacctgtaatcctagcactttgggaggccaaggtgggaggatcacttgagccttggagtttgagaccagcctgggcaacatagtgagaccccatctctattaaaaaataaagaaatgatttctaaataaccccttgtttaaagaaatcacagagaaaattttgaactgaaggacaatgaatacaatacatatcagaactggtatgatcagctaaagcaatgcttagagagaatttaaaacttgaaatgccgattttaaaagaaaaaagcatcagtgacataagcattcattctcaacaagttagaaaaatcacagaaaattaaatgcaaagagaatagaaagaaataaaagataaaaacaaatcaatgaaataggaaaacttctctctatcctttagatagggatacttcaaaggttt

SEQ ID NO: 101744 - DNA, 456 bp, Homo sapiens
attgatagcatgcggaatagcacgagcttagcctaatatgatttatctccacactagcagagaccaaccgaacccccttcgaccttgtcgatggggagtccgaactagtctcaggcttcagcatcgaatacgccgcaggccccttcgccctattcttcataggcgaatacacaaacattattataataaacaccctcaccactacaatcttcctaggaacaacatatgacgcactctcccctgaactctacacaacatattttgtcaccaagaccctacttctaacctgcctggtcttatgaattcgaacagcatacccccgattccgctacgaccaactcatacacctcctatgaaaaaacttcctaccactcaccctagcattacttatatgatatgtctccatacccattacaatctccagcattccccctcaaacctaaaaaaaaaaaaaag

SEQ ID NO: 101745 - DNA, 297 bp, Homo sapiens
  misc_feature (1)...(297): n = a,t,c or g
actcctacacttgatgaaacattttaatctagaaatccaaaaagctcaataaactagaataaacttaaagagatccatatctagacatgtcataatcaatctgtcaaaagcaaaacacaaaggttgaattttaaaagcagtaagagagaagatgctcatcatgtataagaaaccattagtaaaattgcaggtgatttctaattagnnnnnnnnnnnnnnntccaaaaggcagcgggataacacatctgaagcatcaaatgagaatccngccnnnnnttcnttntccnccntgnnctc

SEQ ID NO: 101746 - DNA, 297 bp, Homo sapiens; identical to SEQ ID NO: 101745
  misc_feature (1)...(297): n = a,t,c or g

SEQ ID NO: 101747 - DNA, 413 bp, Homo sapiens
ggtgtacacctgggggacagggaaagctcgtgtttttccaggagaattttagcttcctgtttggatacccactagacatttgaagttctacaatgaacccatcagagatgcaaatgaaagtgcctccgcagagacagaaaacccacaatcgagcatcatccacccgcaggatgaacaaaatggtgatatcagaagaacagataaagttaccatccaccaataaaacagcacatgtggagagcccgggagaagaatataaataaaaagagacggagatcttagactgacaccgaaagtgagattggggagatagtgttaaagagagagagagagacatagagagagaccatcggagaagggagacataaagatataaggtgcgagtcatcaggtgacgagaaagactgaaaatg

SEQ ID NO: 101748 - DNA, 411 bp, Homo sapiens
gggtttcaccatgttggtcagtctggtctagaactcctgacctcaggtgatccgctggcttcaacctcctgaagtgctgggattacaggcatgagccaccatgcctggcctctaaattgctcttatggagactcattttcatggttaaaatgtcctgaattgactgtggcttgttggtgggaggagggatggaggaagctacttatggaaaatgaacaaggaagggaagcacaccagaagctagaaagtgtcatcaatttttacatcaaagactccatgacaaagagaaagtacaagtagcctgtttttgtagctgaccattggactgcggactgcacatgcagctaccaggttcttctggatagtcccagttttaaatttttgacctgatattcatgaacatagtgctac

SEQ ID NO: 101749 - DNA, 437 bp, Homo sapiens
aaaacaagcttgagatattatactatctcccttggtattttttgtgtgcaaagtcttagaattggatttataacattgataataaaaatataaaacgtttttcctcgggagttaagatggtaaaaagaaaaaaatagaatgaatatgatcatttctccatcataaaggaaagaagagacttcattgtgtgtgtgttttttttttttttttcgaaaaaaagtttaactgtgggcacccagggtggtcccagctacctggaacctccatttcttgggaacaaggaattttcctgcctaactttcctgggaagctgggataacgggggggcaaccacacggctgggttaattttttgtgttttttagaaaaaagggggtttccccatgtgggccagggtggtcttagactcctgacctaaggaaaacccccccctcggcc

SEQ ID NO: 101750 - DNA, 477 bp, Homo sapiens
  misc_feature (1)...(477): n = a,t,c or g
ntttgaattcgtagacatgtacacgccaagnttgggacgagggtgacctacagccatctatgactcctactgtatcttccatgcccnnncccccggtgaggatacctggcaataataaaaataataacctgagagtctaatggcttattttttgtagagatggggtctcactgtgttgtttaggctggtcttgaacttctgggctcaagtgatcctcccacctcagcctcctgagtagctgggattataggcgtgcactaccatgcatatatatatatatttttttttttttttaaaaaaaaaaaaaaaaaagggagtcttgctttgttgctaaggctggtctaaaactccgggcctaaagaaatcctgggggttgggcctctcaagggcgggaattgcgggcatgaaacactggccccccccctataagcttatttttaaagctttataaaaaggtcccgcccccgaacatttgaa

SEQ ID NO: 101751 - DNA, 389 bp, Homo sapiens
caatgatggggatcaagagctctgcactcaaatacccaacaacttatttccacctggatgacctgagtatgttcaaacttgggctcaccttacagcccactccagccctacctgccactgaaacctgctctttctccttacactcagtaattgggtaaagtggaaagctgccattacccatccagtcagccaaatctggctacctagaaaccagttcaaaattcttaacttagggccaggcacagtggctcaaatctgtaatcccagcactcggagaggctgaggcaggagggtggcttgaggccaggagttccagaccagcctgggcaacacagcaaggcccagtctgtaaaaaaaaaaaaattaaaaatcagctggggctgggcgcg

SEQ ID NO: 101752 - DNA, 405 bp, Homo sapiens
gggcctgtagtcctagctactcaggaggctaaggttggaggattgcttgagcccaggagtttgaggctacagtgagctatgattgcatcagtgcactctagcctgggtaacagagtgacaccttgtgtcaaaacaacaacaacaacaacaaaacacccacacaaaacaactttaagaggttgttactgtttaaagcaaaaataataacaatgttattgtgggtttttttacacgttaaaatgtatgacaaaaatagcacaaaagacaaaggggacatggaagtactccgtcttaagggtctaatatataaagtgatacaataggcataatatttgaaggtaaactgtgataagtaaaagatgtgcattgtacaacctaaagcaggctgggcgtggtggctcacac

SEQ ID NO: 101753 - DNA, 440 bp, Homo sapiens
ggggctaaagtgtcttcagactaagaggatgttttcgattctgtcaagatagacacttaccttaaactcattcagtaattttttttttttttttaaaacaaaggctccctttgccccccaggcgggagaccaggggccctttctcaccccacggcaaggtccaggggatcccccggccccaccccccaaaaaaccgggaataacgggcccgggcccccaaccccggtaaatttggaatttttcgaaaaaagggggtttacccctgtgggccaggggggcctaaaactccggacctaaagaagcccgcccccctcggccccccaaaaggcggggataacgggcgggagccgccgccccgggcccattcagaaaaaatttctaaaaactctacttggggaaaccaaatggatggcaaagctaatcaaaacctatctaaaggg

SEQ ID NO: 101754 - DNA, 541 bp, Homo sapiens
aaactattgctgatgactccagggtcaatctggaaaaattaacagtattcctcaactccattactttctgcagccaagcttgattccttgaattatagttttctaagaaaaaatagtttttaataatctaaggtaaatttgttgcaattattagcagcagcataataaggctttttgcgcaaatgaatgttattagctagagttattcaaaaaagaatgaagcacaatttttgctaggacttcttgagaactattcataaaaatgcttttagataataaacaagtataaatgtcaaaatatttttttaaaagtataattggccaggtgctggctcacgcctataatcccagcactctaggagactgaggcaggaggatcacttgagctcgggagtttgaggctgcagtgattcatgattgcaccactgccttccagcagcctgatgacagagtgggactccatctctttacatatgtatatcttactctcttgatgggacaagttggtagaaataaagattttttttttctgttgtgaaaa

SEQ ID NO: 101755 - DNA, 440 bp, Homo sapiens
atgatagctgagtccttatcagaaacagtgaggacctgaagacaatggaacttctttcagggtactaaaaaaaaaaaaaaaaaattagcctaaaattctggaagcaaagaaaaagatcctttaaaaactaggattaaataaagacaatttcttataaacaaatatgaaaagaattcatttttaaaaagccctctaaaaaaaatgctaatgagggttcttcaagctgaagggaaatgaatccagatgggagcatgaatctaccggagggaatgaaaaacaccaaacatgggccgggcactggggctcatgcctgtaatctcaacgctttgaaaggccaaggggggaggatcacttgagtccaggagtctgaaaccagcctaaacaacatgacgaaaccctgtttttacaaaaaaaaaaaaaaaaaaaaatttctggggggg

SEQ ID NO: 101756 - DNA, 416 bp, Homo sapiens
cttattttcaaaaagcaaataattcagaatttgtcatctccttagggtccatttattagtttatttcattccttcattcactgataaccatttactgagcaccagtgcaatgttcctttattctaatgacgtggtcattgctcagaatgtttctgggccttttttggggattatcttcagaacttttttttttttttttttgaagggggagtttttttttgccccccaggtgggagggcagggggggaacttgggttaattgaaccctcccccaccggggttaaagggattttccggcctcacccccccggggggggggaactccggggggggccccccaaataaaccaaatttttggatttttaaaaagggggggggttcaacattgtggcccagaataatttgatccccctgcc

SEQ ID NO: 101757 - DNA, 388 bp, Homo sapiens
cggacgcgtgggtggaacctgaccatactttagttgtgcccttcccaggcatcatcctcctaccaccaacctggggccccatcttggaatgggggctccttggggccagcccagtgtggctcaccacactcttctttttttttttttttttttgaaaagggatttttgttttgtcccccgggtggaaaaactttggctggaggaaagttccttgaaccctccccttctggggttaaaggaattttcttgcctaaccctctggagaaccgggaataacgggggccccccaccccccccggttattttttgtttttgaaaaaaagggggggtttacccttgggggccgggggggggggaaacccctgccctaaaggagacccccggcctt

SEQ ID NO: 101758 - DNA, 694 bp, Homo sapiens
gcaagatctcggctcattgcaacctccacctcctgaggagctgagtttacaggcgtgacacacggtgcccggcctgaatgtagtatctttcttctgttttcttttcctgctctttaaaaaacaaccttcaacctctgattatttattccaacaacagctcttcagtagggtaaaagtcttaacagttcttcaaacgaacaatattcttttgtatttttcttcagagatagcaaatgttataaatggcctactctgatttaaaaacctaagttccgatgatgatgaaacattaactcttaaatatacattttgatttatagcaataataacaattgtaacaacagcaattaagaacagcatctggtgaattcttggcaatgtttcctggtctcaaaacagtaagaacaatttgaagtctgttctttagaatgccctactcagctgcataatgtttagaaaattaaagagtctgtattttaaatatttttaggtaattattgcgggacattgtcttatggtgtcctgatgtacgtggggtgtgcatgtgtgtgtgtgtgtgtgtgcatgtgtctgtgtgtgtgtgagaaggacagagagaaatgtatgtttcactgaaacatttgaaacgaccaatttcactttattgtgcctgtaaaatgttagttttaaaataaataaaaataatatgaaaata

SEQ ID NO: 101759 - DNA, 398 bp, Homo sapiens
  misc_feature (1)...(398): n = a,t,c or g
cgtaaatctaactttcttcccacaacactttctcggcctatccggaatgccccgacgttactcggactaccccgatgcatacaccacatgaaacatcctatcatctgtaggctcattcatttctctaacagcagtaatattaataattttcatgatttgagaagccttcgcttcgaagcgaaaagtcctaatagtagaagaaccctccataaacctggagtgactatatataaaaaaaaaaaaaaaaaaaaaaaaaaaaaaaaaaaaaaaaaaaaaaaaaaaaaatatnnnnnnnnnnnngggggggggcccttaaaaaaaaaaaaaaataaaacccggggggggggaaaaaaaattttttttttggggggcccaaaaaaaataggagggggggcggg

SEQ ID NO: 101760 - DNA, 485 bp, Homo sapiens
  misc_feature (1)...(485): n = a,t,c or g
aggtcnctaaaatgagatcgatatcctgcgcaaccgcnccggaantcccgggtcgagccacgcgtccgcagttttgcagatgaaattttgatcttcatcatattaatttattgtcattgttatgttcacctgtaaaaagttgcctattgctcgagggaggtggatcacctgaggtctcgagctcctgagctcaagcgatccacccgcccatgcctcccagagtgctgggattacaggcgtgagccactgcacccagccctcttagccattttgttaacctcatttcccacctctggaggtggtaggggcttcccaagaagatcacttggacctcttcaagtatggtggcaatattgctgggctgttggagagacttctgttatagaggctcccctcttgtgtttttcctcaaaggcaaggagtcatttttggtcacatgaggacaaagagaccacaccagtagtgcattctgttttgcatgggaa

SEQ ID NO: 101761 - DNA, 405 bp, Homo sapiens
gcctcccaaagtgctgggattgcaggcggtatccaccacgcctggcctcttgtttatatttctaacagtttgtgcattatatattttaaagtgatgttatggagtataaaaaccatatggctgttaaagtaataaacaaagaaacattttggcttattaaaaaaaaaaaaaaaaaaaaaaaaaaaaaaaaaaaaaaaaaaaaaaaaaaaaaaaaaaaaaggggggggggcttttaaaaaaaaaaaatttttcccccggggggggggaaaaatattttttttttttggggccccaaaaaataaattcggggggggggttttaaaaacggggggggggaaaaaacccggggtaaccaaaaaataatgtttttggaaaaatctccttttttggggggggggaaaaaag

SEQ ID NO: 101762 - DNA, 448 bp, Homo sapiens
ggtccgtaattggggggtcgacccgcgcgttcggttgtagtgagccgagatcactctactgcactcttatcctgggcaccattgagcactgagtgaacgatacgccgtctgcaatggcggcacctggggaggccgaggttggcggatcactcgcggttaggggctggagaccggcccggccaacacagcgaaaccccgtctccaccaaaaccaatcaggcgtggcggcgcgggcctgcaatcgcaggcattcggcagactgaggcaggagaatcagtcgaacccggtagagtgagcctacatggaagcaagataatgccactgcacttcatcttgagaaagaaaactgagactttctctcacgcagacggcgacggagacagaaacggagacggggagggggactttataaagaaactgccatttgtattgatataatatgagggagg

SEQ ID NO: 101763 - DNA, 370 bp, Homo sapiens
  misc_feature (1)...(370): n = a,t,c or g
nnnnnnttttgccatgttggccttctgatcttgaactcctgacctcaggtgatccacccgcctcagcctcccaaggtgctgggattacagacatgagccattgtgcctggctgttacctgaaattctaaaattccagttgggaatggaccttaaagatgattggatttaatctctacatccccatggggctcttctggggggtggtgaagcacatccagccagattctcatgccataactgggttgtttttgaggtctcactgtgttgccggggctggtctcaaactcctgggctcaagtgatcctcttatcttggcctcctgagtagctgagaccacaagcatatgccactggagctggcttcttgctg

SEQ ID NO: 101764 - DNA, 423 bp, Homo sapiens
ggccgacccacgcgttcgcggacgcgtggacggacgcgtgggtttaattttatgtaattctttgtttaagagacagggtcttgttatgttgcctaggctggagttgaactcttgggctcaagctatcctcctacctcagcctcctgagtagctgggacctccagcacgtaccaccacactcggcctcttgtttaacattttaagtgaaagcctgcttttttctcttaaaatatttgaaacgtttaaagatatacgcaaaaataatgtaaaaaaaaactcatgcacccacgtactatattgaacgaaagtgagtttttctgcatatttgcttcataatccccccctctttaaaaaacacattataggccgtgcgtggtggctcacggctgtaatcccattactttagaaggccgaggcaggtgg

SEQ ID NO: 101765 - DNA, 437 bp, Homo sapiens
  misc_feature (1)...(437): n = a,t,c or g
cccacgcgtccgatcaacaccctcctagccttactactaataattattacattttgactaccacaactcaacggctacatagaaaaatccaccccttacgagtgcggcttcgaccctatatcccccgcccgcgtccctttctccataaaattcttcttagtagctattaccttcttattatttgatctagaaattgccctccttttacccctaccatgagccctacaaacaactaacctgccactaatagntatgtcatccctcttattaatcatcatcctagccctaagnctggcctatgagtgactacaaaaagggatagactgagccgagtttnnnntcnaaaaaaaatttttttttaaaaantnnnnnnnnnggggggggccggaaaaaagacacaaatataaggcggggtgtggaggcaaccctctctttta

SEQ ID NO: 101766 - DNA, 427 bp, Homo sapiens
  misc_feature (1)...(427): n = a,t,c or g
acaaaattaaacgtatcatatcctttggtatttatttaatgtttaaattaatatttctatatctcgtgttagaaattacatttttacgatccacatataattctaacactactttctcgaaacaattttaaaaaaggatcttattaggcagcgcatgtaaaactatgcagtactgtttacagagcaaagcaggctgtaaattaaagatactgaattctgaatcagcgttttttttttttggggaagggggttgtcttggtcacccaccctgcggggcggggcgccttttttgttccttcgaccccccgggggggttttccccgcctaacctccccggaggggggaaaacagcccccccttatggcgggggatttttttaattttgtaaggaaagtgtaaccatgttgcccggtgggtctaaactttn

SEQ ID NO: 101767 - DNA, 405 bp, Homo sapiens
ggtcgacccacgcgtccggggaaataaattccaccattcagaaaaggacattgagaacacctttctgccgcaaccctaggagctaggtagaggaaaaagagatttttctgtgagaatgtgtaaccataagccgtggttacttgtgagctttctgtctgaattcatactacctgtgtgggctgaagacacttcatgcaaaaaaagaaaaaaataataatttaaagagatcctgggttggtatcaccacaaagtatatttagtattttttggtgtgtgtgtgtgtgtgtgtgtgtgtgtgtgtgtgtatgtgtgcgcatgtgtgtgttatctcaaaatatagtgtctagaaataacatatatatatatacacatacatatatataacaggtggattttttaaaaaaa

SEQ ID NO: 101768 - DNA, 436 bp, Homo sapiens
  misc_feature (1)...(436): n = a,t,c or g
cacgcgtccgggtaattggccaggcgtggtggctcacttctatgatcccagcactttaggagcctgaggcgagctgatcacctgagggcaggagttcgagactagctctagtctctactaaaatacaaaaattagtgtgtgtgtgtatatatatatactaatcaaacttccttgggaaagaaaatgtgaatgcatttctgtgtcatacatttcttgtgcagcactatatattctgtgggttagcagtattaacagcatcgagctgaacagtaaccagtggtgctaaggtctcgcatactataccatgtatgctgagaagattgcatccttagagttgagattagaacattgcagttaattgcgtaacttttcagaaaaaagatatatgtgaaattggattctgaggaatttacctgggaaaacttagttggcaccn

SEQ ID NO: 101769 - DNA, 103 bp, Homo sapiens
cttcctaccactcaccctagcattacttatatgacatgtctccatacccattacaatctccagcattccccctcaaacctaaaaaaaaaaaaaaaaaaggggg

SEQ ID NO: 101770 - DNA, 436 bp, Homo sapiens
atcctctagagcggccgcgcgccggggcatcaaggaggaggaagaaataagaggaacagtagcaatctgggtacatacaatagactatccttttccttctaaattgtgtaaattatatttaatgattgagacacaaattattaacaacctcttgtactcaagacaatgatatttaagagcagggaaggtaatggttctaaaaggaaatgcggttttcatgttccacttgaagaggcaaaatgtcgataccagtaaagtctgatgtcacagagcaaccactacaaaaactatacgaacagatatacttttttttttttttttaggcagcctcattttgttccccaggctggagggcaggggcatgattttggttaattgcaacctttacctccccagttaaggcaattataatgcctaagcctcccaagtggggacg

SEQ ID NO: 101771 - DNA, 393 bp, Homo sapiens
  misc_feature (1)...(393): n = a,t,c or g
ctttntttatattttttagttttttattttttttggggggaaaaaaaaaataaaaggggtttttttttttttccccccttttaaaaaaaaagggtttttttttttccccggggggggggggggggaaattttggccccccctttttataaaatgggggggggggggggggggggttctttaaaaaaaaaatatttaccccccccaaaaaaaaatttttttggggggggggggggaaacacccgtgaaaaccccactttttggggggggggggttttttgaaacccgggggggggggattagaaaacccccccccacaaagggggaaaccttttttttttaaaaataaaaaaaaattttgcggggctgggggggggaaaaaaaaaaaaaaaaat

SEQ ID NO: 101772 - DNA, 399 bp, Homo sapiens
cttactgtgaaatggagggttaaggatcacaacaagttctgggtttctgttttagagacagggtcttactctgtcacccaggctggagtgcagtgatgtgatcatagctcactgtggcctctacctcctgggcttaaaggatcctccactgcagcctcttgggtagctgggagtacaggcacacaccaccatgtctctaaaacagaaacccacaacttactgtgaaatggagggttaaggatcacaacaataaaaaatctcataggtgaccaaaaaaaggaaaagatttattttttaaaaaagataaggacctgccgggcacagtggctcacgcctgtaatcccagcactttggaaggctgaagcgggtggatcacgaagttcagggttcgagaccagc

SEQ ID NO: 101773 - DNA, 403 bp, Homo sapiens
  misc_feature (1)...(403): n = a,t,c or g
cccacgcgtncgaaagatataatggcatctggctgtggttttaatttgtgatttcttgattaccaatgatattgaacatcttaacatatttattggacatttggatatctttcatgaagtgtttgttcacatcttttgaactttttgtgatagtggcacaatcacgacccattgcaacctcaaactcatgggctcaagcgatcttcccaccttggcctcccaagtatctggcactacaggcatgtaccaccacgcttggctaattttttaaatctttcttttagacagggcctcgctatgttacccacgcccagtgtctgccacttgcttgttttcttgtctgaaactcttggcttcaagtgattgatcctcccacctcagcctcccaaaatgctggaattac

SEQ ID NO: 101774 - DNA, 416 bp, Homo sapiens
  misc_feature (1)...(416): n = a,t,c or g
cggacgcgtggggtggtattctataccactgttcataccattttcttggggtctgttttgcttaataagaaaattgacatcatttggccagtcttccaaaaatttagcatgtttcatgccttttcacctgttaagtcttatgtattcattcccctctgcttatgttgggagtaaacttattatacccagcaatcacgacatagctaaccttaaaaaaaatctgctgaaggccaggcatggtggctcacgcctgtattcccggcattttgggaggccgaggtggatggatcacgtgaggtgagaagttcgagaccagcctggccaacatggtgaaatgaaaccccatctgtaacaannnnnnnnnnnnntnnnntnnnnntnnattantaatattntgggggggggggcgctttttt

SEQ ID NO: 101775 - DNA, 410 bp, Homo sapiens
ctataccaaatagtggcttattaagtttgactgctgtgcgcggtgactcacacctgtaatcccagcactttgggaagtcgaggtgggtggatcacctgatgtcaggagttccagaccatgcctggctaatttttaaaatttttttgcagagatgggggtcttgccaggctgcccaggcaagtctcaaactcctggactcaagcgatcctcccgcctcagtctcccaaagtgctgggagtataggcatgggccgtcatgcccagccataattcttgctcctcctccccctccccctcattcttcggctgaatatctcactgtggctacacatatttataagccaatcttgggaaaatatggcggctcacttctgctgacccagcattttttgagggtggaggcgcgaggcc

SEQ ID NO: 101776 - DNA, 420 bp, Homo sapiens
atcgcttgaacccaggaggcggaagttgcagtgaactgggatcatgccactgcactccagcctgggcgacagagtgagactccgtctccggaaaaaaaaaaaaaaaaaagggggccaccccgttggggggaaaattttttccccacccctggggggttctgaaaagacggggggaataaaaaaacggggttccccccctttaaaagggatgggccccccccccccaaaaactggaccccgtgggttttccaaaaaaggggggcccccccggaacccccccccttggggggggctttgggaagagaacccctggggggtttttttgggaaggggggggttgaaaccccccccccccccatttttaaaaaaaataacccccctgaaaaaaaaccccaccggggttttaatttttttgctttt

SEQ ID NO: 101777 - DNA, 398 bp, Homo sapiens
aaaatcccgtctctacaaaaaatgcaaaaattaaccaggcatgatggcgtgtgcctgggcaacacagtgaaaccctgtctccaaaaaaaaaaaaaaaaaaaagggggtttttttttttggaaaaagggccattaaaaccccgggcccttttttaaaagggggggttttttttaatttttggggttaaaaagggggggggggggggaacccattcaaaggggggaagggtttttaaaaagccccgggtaaaaaaaaaaaaaaaaaattgggccccccggggccctttttttttttaaaaggtttttggggaagggggattttttaaagggaaagggggggaaaaatttttaaaattgaatttttggagaaaacggggtttggggccttttttttttgag

SEQ ID NO: 101778 - DNA, 421 bp, Homo sapiens
tatttcgttgaggcgggaggatcgtatgagcctggtatgtgaggcgggaggatcatgtgagtctgggaggctgaggctgtggcaaaccatggttgtgccacggcactccagcctgggtgacagaggaaaaccctaagggaaaaataaaataaaatgcactaactatattaactgcattttaaaaaagactatagtgaaagaaaggggaatgggaagacagcttgaggaacagataggattgacgaaacattttaggcttgggtgcttgattatatttgtacagtaagacaaaaggtctataacaaaggaatataccgaagatgcaagaaagcattaaaagatgttgggcaggcctagaggatatagactgccatccacgacatgataggccaatcatccttgaagaaggggagagagactt

SEQ ID NO: 101779 - DNA, 435 bp, Homo sapiens
  misc_feature (1)...(435): n = a,t,c or g
cgtctgaggcaccggnccnnnnacccgggtcgacgtttcgtcaagcctgtagtcccaactactcgggaggctgaggtaggagaatcacttgagcctgggaggttgaggctgcagtgagctgtgaccctgccactgcgctccagcctgggcaacagactgagaccctctctcaatttttagaaagggaattttgtgatggatgttatatattgacagaattaaaagtcatgttgcaaacttaccaatgtccccaggaagtgtagaagtagcaactcatgatcatcccttgttagacatcaacagaccttacattagccaagttacttttacatttggtagtagaggttaataattcagtgtggtgaagttcagagaggatgtttttgaatctacagtcttcatattttcccaatagtcaatcctttatatttgagg

SEQ ID NO: 101780 - DNA, 424 bp, Homo sapiens
ggacatgtgtgtgtctttgtgtgtgtgtatatatatgtgacgtgtgtgtgggatgtgtgtgtgtatatatagatgaatatatacaaatatatagatatatacacacatatatagatatatatacacatatatagatatatatacacacatatatagatacacatatgtgggtgtgtgtatatatatatatatatatatatagatgtatgggcgtgagagaaacttgagaggaagaagcgtgctcttctaggagtgtgaggaaatatgaccgtgccaagactaaaagacctatagagtgtgagctcagttatggagaacaaaaacagctttatagtgagtagaacaccgaggataaacagtggggccgtgggttctttgtgagggagcgccacagaagatctgtgtgggccttgcgtagatgtgg

SEQ ID NO: 101781 - DNA, 418 bp, Homo sapiens
  misc_feature (1)...(418): n = a,t,c or g
tgctggtcaccagggcgagcagttatgggtgaagggctgaatttgcagggtcaaggagattgcctccaggccccttctggaaacacactccctgagccttgtagaattgagttgattctgtttaactgcccagtgaagaaatgacttccttgctttaaaacatttgacagctgtcttatataacttaattcttcattccagtggcttttggagcagcctcaaaagtcattttatcttcttggctctttgatattatttgtagtaatttatttaaagtaattagagacgggatcttgctgtgttgcccaggctggtctctaactcctggcctcaagtgatcctcccgcctcagcctcccaaagtgctggaaataaggtatgagccaccaagcctagccttgatattattttttaatggn

SEQ ID NO: 101782 - DNA, 434 bp, Homo sapiens
aaagagattgtcgatatggcaaaaaaaagtggagggtgaaggatttcaaggtatggatgttgggccagtttcagtggctcatgcctgtgtttccagcagtttggaaggccaaggtgggaagattgcttgaggccaggagtttgagaccatcctgagcaatatagtaagacctcatctctattaaaaaatttgaaaaatcacgcactaatagtcaccacaccagaggaattaacagaaggtgacttgaaggagatgagtgcttctgaaccagagccaaatgacgaggaggaagacatagtagaagcagtgccagaactgatgttagataatctcacagaagcgttctgattattcaagactgtttttgatggcttttatgacatgcactggacccttctatgataggagcattgaaactaaagcaagtggggcag

SEQ ID NO: 101783 - DNA, 662 bp, Homo sapiens
  misc_feature (1)...(662): n = a,t,c or g
ggctggagtgcaatggcacgatctcggctcactgcaatctccgcctcctgggttcaagtgattctnatctctcagcctcccgagtagctgggattacaggagtgcaccaccatgcccagctgatttttgtatttttagaagagattgggcggggtggggggtggggtgcgggtttcaccgtgtggcccgggctggtcttgaactcctgacctcaggtgatccccccgcttcggcctccccaggtgctgggattgcaggcatgagccaccgcacccagcggggacaggacaattttgccagctggagaaggggtggcccccaaatgtccccttcaccaccctcctgcctcttccttcagaacactttttccctgaagccctcctgggtagccccctacccacatgcctcagcattgggaggtggggagtatgggggtcccccttctcctcagccccatttggagtaatgtcctgtgcagctgagctcacaactcctcctccacctgtccctccacccggtgtcactggcaattgctcacttcctgggcctgcacccactcagctcccctatccctgggcatcagcctcagccagctcccatgtggactaatgacccttgtccctcccctcagctgcctctcttttttcttttttttttttgag

SEQ ID NO: 101784 - DNA, 450 bp, Homo sapiens
  misc_feature (1)...(450): n = a,t,c or g
attaatttttaattaatgtaattgtagtttctattaaagagattgaataggatgaattacatcttgattgtgtgtcgttcagcatagtacttacttcagaagtcacatggatcctaagttttctttcatgtcctctaagattcatttcaccgtgacaatatcactgaaaaacagcaaacaggaattacagctctcactatgttgccaaggctggtctcaaactcgtgggctcaagcaattctcccaccttaacctcccaaagtgttgagattacaggtgtgagccactacaccaagctttattaaatctttaactttcactttagtgttaaaaacagtaaatactaaggctaaaagtgacaggaatcttataggtagatcagtcaggcatattagttaacatgtgatctgngtttattctgattatctgtctctaaatcaccaggtcaaa

SEQ ID NO: 101785 - DNA, 396 bp, Homo sapiens
tattattattattttttgggtgtgggatagagttttgctctgtcactcaggctagagtgcagcgtagcttattactgattattgtgttttcattaaaaaagggagagtatgccaggtgcggtagctggtgcttgtaatcccagtactttgggaggcccatgtgggaggactgcttgaggccttgaattcaagaccaggctgcgcaacatggagagatgctgtctctaaaaaggattggttgggtgtggtggcatgtgcctgtggtcgcagctactctggagactaagctggataatctcttcacatctatatcaagagggtatttttaagcacagagtgggcattattttcttttacttatcatctgagagactacattttttaatggctttatgg

SEQ ID NO: 101786 - DNA, 382 bp, Homo sapiens
  misc_feature (1)...(382): n = a,t,c or g
gcgcaactatttacanccattaaggttggtgctaatatgcaaaaaaaaaaaaggcttttttttttaccccccccctattttttggtttgggttttaaagccttcgggccttaaataaaagtttttgaccccccccgggaaaaaaggcaaacccctttttttaaaaaaaaaaaaaaaattggctggcctgggggggggggccctttatcctgggtttacccggaccctgggggggggggatcttttggtttgggggggcaaaggcctctttgactttttaagggggcctttttttccccccggggggaaggggcaaaactttttttaaaaaaaaaaaaaggggggggggaagaggggcttcctttttttccaaaatctgtttt

SEQ ID NO: 101787 - DNA, 378 bp, Homo sapiens
cgcagaccaaaatggggggtttgtgttctaagccagcaggattggctttattctacaggaattcttacctgtcagggtgtggacaacaaatccctcagcaggtgctgacgggtacaactttctggagaagcagaaaggcactgagaaaacatcttgctctgttgctcaggctggagcgcaatggtgccatcgtaacttactgtaaccttgaacgtctgagctcaagcaatcttcctgcctcagcctcctgagtagctgggactacaggatgtattttgttttgcttggtaaacaagtaactctactaatcggaaaacgtgccttgtcagtataccccagagatgtggtttcactgtgttagccaggatggaatctttt

SEQ ID NO: 101788 - DNA, 401 bp, Homo sapiens
  misc_feature (1)...(401): n = a,t,c or g
atcaacaccctcctagccttactactaataattattacattttgactaccacaactcagcggctacatagaaaaatccaccccttacgagtgcggcttcgaccctatatcccccgcccgcgtccctttctccataaaattcttcttagcagctattaccttcttattatttgatctaaaaaatgccctccttttacccctaccatgagccctacaaacaactaacctgccactaataggtatgccatccctcttattaatcatcatcctagccctaagtctggcctatgagtgactacaaaaaggattatactgacccgattaaacttaaggagggggctccttttaattactggctacgcacaaaaanagggggggggggcctccttgaatagatacctt

SEQ ID NO: 101789 - DNA, 404 bp, Homo sapiens
  misc_feature (1)...(404): n = a,t,c or g
actttacatccaaacatcactttggcttcgaagccgccgcctgatactggcattttgtagatgtggtttgactatttctgtatgtctccatctattgatgagggtcttaaaaaaaaaaaaaaaaaaaaaaaaaaaaaaaaaaggggggggggccttttaaaaaaaaaaaattttaccccccggggggggaaaaaaaattttttttttaaggggccaaaaaaaaaaaattcgggggcgggttttaaaaaagggggggaggaaaaaaaccgggggaaaaaaaaaaaaaaagggttgggaaaaaagnnntnnntnnngnttttntnctcttctttcgggccgggggcttctctgtgggtgttgccctgctcctcctttggctggttgccttttgggctgctttctcn

SEQ ID NO: 101790 - DNA, 400 bp, Homo sapiens
cggacgcgtgggccgcagtcgggcatcaccacacccggctaattttttaaattttcgtagagataggctctctgtgtgtttcccaggctggtcttgaaatcctggactcaagcgaccctccctcctcagcttcccaaagtgctgggattagaggcatgagccacggtgcgggccaggagcacctatttcataggcccatcgggaagattaaatgaaggggctgtggaggctgtagcacggtgcttggcacgtatgtgagctctggggaaacattagttatgctataactggaccttcagccttctctaggcagccagatttcgggctccacccacaactagtcacgccattggatgaggggtgagcgcctgataaaaacagccggcgtatgcgctgatgt

SEQ ID NO: 101791 - DNA, 423 bp, Homo sapiens
agaattcatactggagagaaaccctacaaatgtgaagaatgtggcacaggctttaagggcccctctacccttactacacataagttttttgtttattgcagagaagtggctgtcctactaaaaaactgctactctcatctgtatccacattgaataatagtgaatggaagtgaagcggataaaagggaaatgtgtcttctctgcatcttttttcatccattggctgaagaacaggaaaatgtggaaaataaaagaaaatataacccctgaaaaatcctgaagaagctctcttaaccagacaaaaaaccttataggggattttttgtttgttttattattgtaccatctgcttctatgagtttaattttttttttttttttaccctttacataaaaaaaggattatgggggctggcacagggac

SEQ ID NO: 101792 - DNA, 423 bp, Homo sapiens
  misc_feature (1)...(423): n = a,t,c or g
cggacgcgtggggcctgagcaataagaataaaaccgagtagaacaaaataaaaaattcaaaaaacaaaacaaaacccacactccaaaaactaacaaagaataaataaataatataaaaataaaaaaaaaaaaaaaaaaaaaaaaaaaaaaaaaaaaaaaaaaaaaaaaaaaaaagggggggggggggtttaaaagggaaaaatttttccccggggggggggggaagggaattttttttttggggggggggaaaaaaaaaaaaaggggggggggttaaaaaaaggggggggggggaaaaccgggggcccaaaaaaaaaaaggggggggggaggggnnnnnnnnnnggntgtnncgggggcgaaacctatcttgggaggaagtgcgaaaacaaggggggaaagaacggggaggcgctcataaggg

SEQ ID NO: 101793 - DNA, 450 bp, Homo sapiens
  misc_feature (1)...(450): n = a,t,c or g
gccgttcgcctgcggtaccggtccgattcccgggccaccctcttcggcctcccaaaatgttaggattacaggcgtgagccgccgtgcccggccctccttgactcttgaactatggttgtccctctatatatccaggggattggttctaggaccctcgagtataccaaaatcctcaaatactcaagtcccaaagtcagccttccatatcttcgggtttgcatcctgagaatattgtattttcaatccatgtgtggctcanaaaaaaaaaaaaaaaaaaaaaaaagggggggcccctttaaaaaaaaaaaattttaagccgggggggggggaaaaaaattttttttttttggggccccaaaaaaaaaattcgggggggggtttttaaaaaggggggggggggaaaaaccgggggccacccaaataaaaaggggtggggaacaaacnnnnnng

SEQ ID NO: 101794 - DNA, 437 bp, Homo sapiens
  misc_feature (1)...(437): n = a,t,c or g
ctgtgttttcttaacattacctttggtttgttctccaacatgcttacaatatgtgcatttgcatcgtgaggcattatattgtctgtttagaaaaaaatttgaggtccgggtgtggtggctcatgcctgtaatcccagcagtttgggagggtgaggccagtggattgcttgagcccatgagttcaagaccagcctgagcaatgcagtgagacccatctctgcaaaaaaaaaaaagggggggcccttttaaagagaccaattttttttccccggggttgggaagatttttttttttttttggggccccaaaattaattttctggggccggtttttaaaaacgggggggggggaaaacccgggggttccccaattttaaccccttgtggaaaannnnnnnnnnnnnnntngntttttnttnttctctcgntgtctttgtt

SEQ ID NO: 101795 - DNA, 406 bp, Homo sapiens
ttttgctcttgtctcccaggctagagtgcagtgagccgagatcacgccaccactgcactccagcctgggtgacggagcgagatgccatttcaaaacaaaaacaaaatatgtactggtaccagtacacagtaggaaggtgggcaaaacttgggaagggggatattcaaaggacagggtttgggaaatgctggatcaaggtcggggaagaaggagaactgagaggctgttataatttagagaagtgcttctcagagtgggggccagcagccaggcgccgtggctcatgcctgtaaccttaacactttgggaggtcgaggcgggaggattgcctgagcccaggagttcgagtccagcttgtgcaacatagtgagatgcttgctcttacaaaaatttaaaaattagctgg

SEQ ID NO: 101796 - DNA, 403 bp, Homo sapiens
  misc_feature (1)...(403): n = a,t,c or g
tcttgctctgtcgcccaggctagagtttagtttcgcgatctcggctcgctgcaacctccgcctcccagattcacaccattctcctgcactccagcctgggaaacagtgagactccatctcagaaaaaaaaaaaaaaaaaattaaggagggggtccatatttgaaaatcttcttaactcagggaaccagttttttccaaaagaccaaggcttgatgttatgaagccctccatgggtgaaaaatctatttaaactacaaaatagacggagggattttttttttttttaaaaaaaaatttttttttttcccccaagttggagggaaaggggggaaactgggttaaatgggggctcccccccctgggttgggggggtgttaaaccctaacctcccgagggggtggtn

SEQ ID NO: 101797 - DNA, 370 bp, Homo sapiens
ccctgaggtatttgattatccaaattgatttaaaaacttatagttacacaaaacctgcacacaatgattataagcagctttattcgtaatcaccaaaacctggaaccaaggatgtcctttgacaggtgaatggataaacaaactggaatatatccatacaatggattatttagcaataaaaataaatgagctagcaaaccacaaaatgatgtaaaggacccttaaatgtatattgctaagtgaaagaagctagtccagaaaggctacatactatatgatttcaattataagacatcccagaaaaggcaaaactatagaaatagtacaaaacagtagttgccaagggcttggggaaaggcagaaagggctt

SEQ ID NO: 101798 - DNA, 361 bp, Homo sapiens
cctctgcattccccacttttaagtatcattgtctttgaatattggatggtgttctaattattgcttcaattagtatatatggtttataaaactcatgaggatacttacacgttcccatatttctgcttccttcctgatactcttaatattttagcatatcttttaacatatcttttctctttgaagaactccctttagccattctttatgcataggtctgctaatgacaatttttataattcattctctctctctctctctctttctctctctctctctctctctctctttcatctctctctcttggctctctctctccccactcctgggctcaagcaagcctccaccctcggcttcttaa

SEQ ID NO: 101799 - DNA, 385 bp, Homo sapiens
ctgtctttacttagatgtccagggtcatttcccaggctaagaaaatgtgtagagcatgtatttggctacgaaccagcctgttctcctttattccctttgatacacaatcagctacacaaagccaagtgttaggttgtgatgtaattgccaaaatctaacttctgtccgctctttcctcttcctctgtctctgcatcttaagcatcgagcatctcaagtagtcaagattgcaagacaatgcctagaaatttgttgcagtgagactgttttctggccctttccttttttttttccccttttctgagacagagtctcaccttatcacccaggctggagtgcaggggcacagtcttggctcactgcaaactccacctcctgggttcaag

SEQ ID NO: 101800 - DNA, 371 bp, Homo sapiens
cagcacatctgtttatagcgtggtttactgaatattttaagcccactgttataacctactgctcaaaaaaaaagattcctttcaaaatgttactgctcattgacagtgcacctagttacccaagagctctgatggagatgtacaaggggatgaatgttgttttcatgcatgataatttaacattcattctgtggcccatggatcaatgagtaatttttacctcctagtcttattatttaagaaattgattttgtactatagctgccatagatagtgattcctctgatgggtctgggcaaagtaatttgaaaatcttctagaaaggattcaccactctagatgccattaagaacatttgtgattcataggag

SEQ ID NO: 101801 - DNA, 378 bp, Homo sapiens
  misc_feature (1)...(378): n = a,t,c or g
aaggtatcaatgttatttcataagttttaataatgtaccacactaatgcaaaattataataataggggaattgggggaagggtaatggagtatatgggaatgcactgtaatctcagtacaattattccacaaacctaaaacttctttcaaaaatacaagctattggtcaggtgtgatggcttataccaataatctcagcactttgggaagtcaagaccctcagatcacttgaggccaggagttcgagaccagcctggccaacatggtgaaatcctgtctctactaaggattcgnanaaaatacagaaagaaaggaaaaaaaggaaggacccgataatttaaggcaagaatgggatgcaagaacggataacccaatgta

SEQ ID NO: 101802 - DNA, 398 bp, Homo sapiens
gagctgtaattgtgtcaccgcacaattgtgtcacccaattatgggctaaagtgagaccttgtctctaaaaaaaaaaaaaaaaaaagggtaaaatggttttttcccccaaagtaaaccaaaaaaaggccttttgggttaaaaaaaaaaccttaaacctttaattagggcccaaattcctccattaaaaaaaaaccaaggcccggggccaaggactaatccctgaaatcccacccttttgggaggctaagggggggggataatttgagtttagaattttaaaaccaccctggccaaaatagcgaaaccccttgtttaaaaaaaataaaaaataacctgggctgggaaccaaatttttgaatccccacttacttggaaggctaaaggggaaggatcatttg

SEQ ID NO: 101803 - DNA, 545 bp, Homo sapiens
gacagggtcttgttttgtggcatagtcatggcttactacaaccttgacctcctgggctcaggcgatcctcctgcttcagcctcccatgtagctgggaacatagatgcacaccaccacacctggctaattttttgattctgtgtgtgtgtgtgtgtgtgtgtgtagagacagggtctcactttgttgcccaggctggtcttgaactcctgggctcaagtgatcctcctctctcgatctcccaaaagtcctgggattacaaggtatgagccatcatacccagggccaaacaaaattatttaatgcttttctattgactgcacaaaactcagcctctttcgcatgacattcggggtacttcaaaaattagccaaaccttattttggtttcccagccacctcgtctcccttattctactctaccctcactctcactctcatttttatcagccataaattttagtcaaattaggccatttctcagatctgtgaggctttcatgtttctgtgccagctggaaatagctttctcttgcagttcacctctagg

SEQ ID NO: 101804 - DNA, 348 bp, Homo sapiens
ttcatggcttctgtgtttctggaaaccttctgagcaaaaggcattgacagtttgattcacagatatttgcataacagacagtcttggaaagataaagatagtgactccctgcaaagagatttggagctgcctcttcctgagatattccagggtaacagagctagagaccgtgccctttattccctgaagatttgcttacattctccagggaggggccaggcacgatggctcacgcctgtaatctcagcactttgggaggccaaggcggggggatcgcttgaggccaggagtttgagaccaccctgggcaacatagtgagaccgcacctctacttttatttaaaaaaaa

SEQ ID NO: 101805 - DNA, 379 bp, Homo sapiens
gtgtaatcctgtgccttaaatagctctttttcagacgcttataatgtttttattttccaaaagagctctctcctgaatgcccttcccatttgctcccttacaatgcttctgggcaatctcttctctatgtttatgactcccaagttctttacctgcagttgagcactctctcctgagcttcagatccagataaccaggatcactaactgtatgccccatgaacatcttgagctcatcacatctgatactaaaatctacatttctggctcacgcctgtaatcccagcacttacggaggccgaggcaggtggatcacctgaggttgggagtttgagaccagcctgaccaacatggagaaaccccgtctctactaaaaatac

SEQ ID NO: 101806 - DNA, 380 bp, Homo sapiens
cccaaaggaaataaaattcaccactttgtaaagatatctgccgataattgcagcattattcacaatagccaagatatagaaacaacctaagagttcattgctggacaaatggataaagaaactgtggtgtatatatacgatggagtattattcagccttaaaagtgatcctgacagttgtcaccacatggatgaacctggtgggctttataccaggtgacataaaccacatacagaaagccaaatattgcatgatttcacttatatgtggaatctaaaaaacaaaaacccagtcaaatatacagagagaataaaacagtggttaccagggctgtgggggcatgccaggaaatggggagatacaggtcagaggatacaaag

SEQ ID NO: 101807 - DNA, 389 bp, Homo sapiens
ctgggcatagtggacccagctcctccggaggttgaggggggaggatcgcttgaatctaggaggcggaggttgcactgagccgcgattgcaccactgtgctccattctgggagacagagccagaccctgtctaaaaaaaaaaacaggcggcccaagccaaaaactcccttttaaccgctgccttactgaagtcccaggtaaagaaggcctctgctgcatggtaataattatcgccctttgaaaaaagaccaggcctcattctttaaccttggcctcacaaggcatgtttgtggattccaaccctttccaaaaaaaaggctggttgttctttttggtcaccgaacatgaccctttttgtcagcgccgggtttttgccaccgcctggttttt

SEQ ID NO: 101808 - DNA, 599 bp, Homo sapiens
  misc_feature (1)...(599): n = a,t,c or g
aagtagcagggtatccagtagggacggagggatctgccccagtagtgaagtataaggaggtatcagaaggtttatgcctgtaatcccagcactttgggaggctgaggtgggaggatcacttgaggccaggagctcaagaccagcatgggcgncatagtgagaccctatctctacaaaaaataaaatgaaaaacaaacaaaaaaaataagatggaagctaggcaggcccaagtactaaatgctataggggaaaagaagagtggcattcgttcaacaggcgtgaggagagaagccttcattaggaagacatggttgtttggctattaatagatctctgatggatgatgaataaaacagaataagcaactacatataagcaggagtaaccataaccctaggattatagtatactaggagaaaaaaaaaatggtatattgttaacctcatcaagccaccaaatgttaatgtggaaggaaaatattgggtctggtttatgtagcttctgctatttgaccccacagttggtttggtttacttcttctattctaaagtaatacagattaagtttagaaaacaatcttgaggtaaacaaccncngga

SEQ ID NO: 101809 - DNA, 402 bp, Homo sapiens
  misc_feature (1)...(402): n = a,t,c or g
gatagtgtcaatggtaacacaacagtgtgaaaataatgccactgaactgtacacttaaaatgattaaaatgataagttaattgttttgtgttatccagaaatggttagcaatttattggtgtatattcttttagtattcctgtgtgtgcacaggggtgcttgtatatactttatctttaaaatatatccaggaagctaggcacagtggcttacacctgtaatcccagcactttgggagggtgaggcaggaagattgcctgagccccggaggtcaaggctgcagtgagttgtgatcacgctactgcactctgttctgggcaacccctgtctgggaaaaaaaaaaaaattantgaggcttatgggtgcacccctgtagtctcagctacttgagtggctgggtag

SEQ ID NO: 101810 - DNA, 561 bp, Homo sapiens
  misc_feature (1)...(561): n = a,t,c or g
ctgggacactatccacaaaataaggaagcatagaaatcactgtccctaaaaggcatatttaacatggtgaccaacaactcattctgacctgcctctccaagcagtccaacccaggttttatcaagtggtgccagtgctaacgtcttgtgggtggaactggcactgaatgtaaagaaaatcatagccaggcatggtggctcatgcctataatcccaacactttgggaggctgaggcgggaagctcacttgagctcaggagttcgagaccagcctgggcaacatcaactccgtccccaaaaaaagaagaaaaagaagaaaagaaatgatgtaaatcagctgcccttcactctgtgttgaggtgggggatgtccctaattgccagtaggagagagcctctcttttatctgggactaaaagcccttgccctacatacctcataattattttagggttaactgattcaattgtcagaaaagaacaagctgtatcttgtttctgtacatattctactttgtgagtatttttatttcattgctatgtgattggaatcaactcagntta

SEQ ID NO: 101811 - DNA, 376 bp, Homo sapiens
  misc_feature (1)...(376): n = a,t,c or g
gttctaacctagagcaaaaaaaatccaagttgatatggggactctgctattcagttacttagtattctgtaatattgctcatttaaattcatcacattaacatgtctttcctggctgggcacagtggctcacacttgtaatcccagcactgtggaaggtggaggtgggaggatcacttgaggctgggagtttacaaccagcctgggcaacatagtgagatcttgtctctattaaaaaaaaaattatgtctttccttgaactataaaatggaactctgcttctatgaggttagcctcttttattctttgactaacatctctctcaccttgtagttgcctgtttatgtttttgatttcatagcaacaggtttgttacn

SEQ ID NO: 101812 - DNA, 421 bp, Homo sapiens
  misc_feature (1)...(421): n = a,t,c or g
gccatatctggcagaggttctgtgtgcggagaggcccaagagtaaactgaaagcaaaaacaattgagctagctggtggattttgaaggcctctaatcatttaattaccttgcaagaagcttttgcatttctgctttttctttcttgtttgctcttcttgtaccaaatttctttcttttaagtatagaagaggagcctccttctgttgctcagaaagagggaaaaagaaccagaagggaataaaataaggccaggcgtggtagtaccagcactttggcaggccaaggtgggaggatcacttgagtccaggagttcaagaccagtcaggacaacatagtaaactctccccaatagaaaaatatttttttttttctacaaaaaataaaagtaagtaagtaagtaagtaagctgggcatggcgan

SEQ ID NO: 101813 - DNA, 228 bp, Homo sapiens
  misc_feature (1)...(228): n = a,t,c or g
caggaaaaatgctccacgaacttcagacttaaaaagcatcactggctcctgaccaggattccagctccatgaacctcaaactagaacaccagcccggcttctctgcaggtctccagctccaaaacctaagacatcagtggcagtacaaactcatcccaggaggctgaggctgcagtgagccatgatcatgccattgcactccagcctgagtngcagagtgagattctg

SEQ ID NO: 101814 - DNA, 322 bp, Homo sapiens
attttgaaaatgtaactcttagagagtttgctcatgcctgtgatcccagtgctttgggaggctgagatgggagaatcacttggggccaggagttcaagactagtctgggcaacatggcaagacccccagctctacaaaatatttaaaaaattagccaccacacccagctaatttatgtttgtatttttagtagagatggagtttcattgtgtcgaccaggctggtctctaactcctggcctaaactgattcacccacctcagccttccgaagtgctgggatcacaagcataagccatcacaccttgcctaaaagtacatttt

SEQ ID NO: 101815 - DNA, 369 bp, Homo sapiens
atgaaaataaggcctacagttttacaacatataaaattggcagaacttttaaaataataaatggcagggcgtagtggctcacacctgtaatcccaccactttgggaggctgaggcgagtggatcacctgaggtcaggagtttgagaccagcccggccaacatggcaaaaatacctccccttgttatgtttgcattctgttttgaggagacagacaataaatcacataccaagtagggtcatccactgagagttaggaaggtagaggagatattatatatttgacaagaaaaagagaaaatgtgaaatggtcagtatggagacgaaaagagtaaatgagctagggaaatagtttaagatcggcagatatt

SEQ ID NO: 101816 - DNA, 392 bp, Homo sapiens
  misc_feature (1)...(392): n = a,t,c or g
tcaaaaggtaagactattaatttttataaatgccttttaaaacgtctagttgttaacaacttggacagaacatcgtgggttccttcgcagatttccttgtgccacatctcttttccataataccacttataaagaattgtccaggcctgtaatcccagcacttttgggcgctgaggtgggaggatggctggaatccaggagttcaagaccaccccgggcaacatnagtggagagttctgttatatacaaaatttaaaattaaacatcaacacccctnncacaaaaaggtgctctatatgaaaaaaaaaaaaaaaaaaaaaaggagggttttttttttttggggcccccccttttttttcttttgggggggggaaaatttctgccccccccgt

SEQ ID NO: 101817 - DNA, 386 bp, Homo sapiens
tggaactccctgacctcagtgatccgcccacctaggcctcccaaagtgctgggatctattataggcatgagccaccacgcccagcccaaagtttttactttggatgtaggtcaatttatctattcttttgctgcctgcaagaggtaattctttatttggtattggaacttgttactcaggaatgtgttcttttgaccgggtacagtggctcatgcctgtaatcccaatacttcaggaggctgaggtgggaaaatcatttgatgccaggaacttgagaccagcctgggtaatatagtgagaccttgtctctgaaaaaaaaaaaaaaaaaaaaatttttattaagggggccggagcttattccctttaagggggggtaattttaactg

SEQ ID NO: 101818 - DNA, 378 bp, Homo sapiens
  misc_feature (1)...(378): n = a,t,c or g
gtttttattttattttatttttgagacggtctcgctatgttgcctaggctggccacaaactcctgggctcaagcgatcctcttgccttcagctcccaaagtccaaggtttacaggcatgagccactgctcccagcccttgaattttgtaccacatgcaagtaccttctattcaaaaattactaaaatagtagatgttactagctttaccttagtatagccttaaagctcatatactgactgtaatctttaacttttcatgactttctttgtaatttggaggcccttgggaagaatgatttagataatacagaccacttggacaaacttgaagcttaaattgttttaaaatgcacttttctgtaaaaaaaaaaaaaaan

SEQ ID NO: 101819 - DNA, 355 bp, Homo sapiens
tgtacgtcagatgttcatttattaaatacacgttttgcctaattgtaatacaagcatatctggatacacgccgcggacgagtaacagttggtgagagaatataaatattgtggagatttcagacccagggcaggggatcttgcttgtaattccagcactttgggagatcaagacaagaggattgggtgagatcaccatgttggcccaccttttgtagactctgtctctgcaaatttgaaaataattaatggggtgtggtggtgcacacctctcatcccagctacttgggaggctgaaacagaaggattgcttgagcccaggaggtcaaggctgctgtgagccgtgtacatgccac

SEQ ID NO: 101820 - DNA, 354 bp, Homo sapiens
  misc_feature (1)...(354): n = a,t,c or g
cttttccctcactgcgcccagcctaaattttcttttatatttactttttttttttaaaaaacaaggtctttttatgtcacccaggctggactcaacttttggacccaaactggactcaagctgctgggctcaagcagtcctcccacctcagcctcctgagtagcttgaactttaggggctcagcttaaattttctttagttatcatagnatattaatagaaactacttataatactggttttataacttagggctactttttatttggtttcttggaagcatttgttcaaaaagacagtataaatttatgagttttttgttgttggaggagttatgccatccctacatcgaatg

SEQ ID NO: 101821 - DNA, 429 bp, Homo sapiens
aaaattagattatataaactgtgggacaaatctagcccaaaagtgcctgttttgtttgtttggttctttgtttttccagagatgaggtcttactttgttgctcaggctgttcatgaactcatggcctcaggcaatcctcttgccttagcctctcacagttctgggattacaggccaccatgctgggctcacaagtaccagtttttgatcttggtataactttgtgcaggtgtcgctttgggaagctagagtgagatctgcctaagaattatgtattctgaggttgtgagtggacaaatccatccctcacctgcatcagcaggtatttttaagtggtaaagggaaacaccttggggataaaaactaagggtagaggaagaagaacattttgcaagccacacttctgtaggcagatttcttaatttgttca

SEQ ID NO: 101822 - DNA, 372 bp, Homo sapiens
agatcagtagtttatttgtacaactttatgatttcagatgttggttttcctttttctcaagattaacaacaaagaggccatgtgagagagaggctgcaagcactttccctgtgcttacatatgctcctcagtaatggcgtagtagtcagggcttcctagagaaagagaaccagtagcgtgcgcgtgcacgtgtgtgtgtgtgtgtgtgtgtgtgtgtgtgtgtgtgtatgagatttaaggaattggctcacatgattggggacggtggcaagtccaaaatctgtgagggcggccggcagcgtggaggcccagggaggatgttgcatctggagtccgaaggccaactctaggcaggatcccgctttctcaggg

SEQ ID NO: 101823 - DNA, 390 bp, Homo sapiens
acattttctttcttcaaggtgtgctcataagtaagccatttatcatttatgtattacactacgtgttgaaatactctgaaaaaatttttttttttttttttgggggaggaactttccccctttcacccagaaaaaaaaaaaaaaaggggttttaaagggggggggcgggggccccaggccccccctaaaaaaaaagggagggggttcccttcttaaaaaaattgggaaaaaaggggtaaggaaaaaagggtggaacccaggggggggccccccccccccgggcccttgggggtttttttttttgggggaccggccttaaacccccccaaaaaaaagggggggggccggggcctttaccaagggggggttctaacctggtttaaaaacccg

SEQ ID NO: 101824 - DNA, 385 bp, Homo sapiens
cggctcgagtgccatttcatacaagcttccaggtatatttgttttgaaaaatgcaacctcatcactggggagaaggcatcttcccactcctagcctttctttccttgagaagagagtgcaattagggtgagttctttctcccttggaccttcttccatctgccagggagatggagcacgtttccacagtaaatttagcctgggcgcagtgactcacacctgtaatcccaatactttgggaggctgaggcaggaggattgctagaggccaagagtttgagactagcctgggcaacatagtgagacccccacctcaacaacaaaaaaaaaaaaaaaaaaaaaaaattacccggccgggggggaccagcccaaccccaagtttttggg

SEQ ID NO: 101825 - DNA, 387 bp, Homo sapiens
agattttttttcactatcccgccacaatgttttccacagtttattttgagtttttagagaaggggtcttgctgtgttgcccaggctggtcttgaacccctggcctcaagccatcctcccacctcagcctcctgagttgctaggactgcaggcacaccctaccacactgggccctgttttctatagttattgtgtaagagcatagcattacttaaccttcaaaaattcctactgagaaatggtcatttcttgtgtcactgagggctagggaagtgtcaatcagatggaactcacaggggctatcatttattttggtccagcggctgaatgcctgacagacacagcactcagttgccactgttgtgctgggctcgctgatcccactgtt

SEQ ID NO: 101826 - DNA, 399 bp, Homo sapiens
ttagaacaaataaacctttaggatgatgcaaaagcagaatctacagtcactttaaagcagtgtgatgtaaagaaaagggtggcagagtctcttggtgctatgggacccaaggacatttacattggtgtggataaaatgcccggagtggtgaaaaactttattgtcattgttggaccatggtgcataatgtattgttatacctgctaataaaaaattaaacggcaattaacttagtttagtatgacaatacaactgtaagtttaagagtgaaaaatgggccaggtgtggtggctcaggcctgtaatcccagcactttatgaggctgaggtgggaggatcacttgagcccaggggtttgagaccaacttggcaacatagtgagaccccccccaccaacact

SEQ ID NO: 101827 - DNA, 399 bp, Homo sapiens
  misc_feature (1)...(399): n = a,t,c or g
tgcaatgtatgcaatacatgtatttaaaagtgtgaatttatgtgtatatatatatgtatcaaagagaatacacatgcacagatgatagtttgttgtggccatattaagccatctttgcattttaaggataatttctacttgtagaaattatctacaagtagataaacacattatctaaacacatgttgtagagtcacactctgccacattcatctaatttttcatatttttggtagagacagggtttcgccatgttgcccaggctggtcttgaactcctgggctcgagcagtctgcctacctcagtctcccaaagtgttgggattacatgcctaagttagacttaatatcatacccggcctggtatgataggatttcattcctaggaaaaccaagagtn

SEQ ID NO: 101828 - DNA, 442 bp, Homo sapiens
gaaacgggtaggattgttactgtcttgttgggcattttgctctctgcttttgtagtattacttttaaaaccaatactttccacactgtccagaattgcctgaaattgttatgaactgtttgtttatatacgtgacttgatttccccagggcagctccagggcacagagtgtgtggcttgtatgtgttgaactgatccacgtttcccattcccaggcccctatctctctgttcctcttcttttagttgttaaggcaagttgatctgtaccagtgctggccagtagaagtacagcgtgggccacacacagaattttatgttttctgctggatgtggtggctcatgcctgtaatcccaatgctttgggaggcccaggcaggaggatcgcttgaggccaagagtttgagaccagcctgggcaaaatagcaagaccctgtctctacc

SEQ ID NO: 101829 - DNA, 379 bp, Homo sapiens
gctgttagtgtgtgaagaggtttgaacaaggaattaaaagcctagaaaaacaaggcgataaggtcttctaaagggcatatcgagctttattgacgattttatttccacttgatacatgactgccagcaaactggttctcttaccttactatttcggcatctggaaaatgagtttaattatttatgtatattgcatattaatgttggaggccaaaaggtactagtcaaaaggcataaagaggctgggtgccatggctcacacctctaatcccagcaatttgggaggcccagatgggaggattacttgagcccagagtttgagaccagcctgggcaacatagtgggacccctgtggctacaaaaaaataattttaaaacat

SEQ ID NO: 101830 - DNA, 399 bp, Homo sapiens
  misc_feature (1)...(399): n = a,t,c or g
cacaactttaggagtctttaagtttttgccagttctggccgagacccatagtttaatcaaggctaccctttataagaggaattgatcaaattaagtatacctacgatcactgtacctcaagaaagacataggcaagggaaaggcagctagaatatcaaaaggattatatggttatattcatccaattatggtcacatttctgttggttaatttgggttttgttttgtttgttggtgttggtttgttttttgtttttcttagtagagacaaggtttcaccatgttggccaggcagttctcaaactcctgacctcaagtgatctacccacctcagcctcccaaagtgctgggattacagcactttgtaatgtaaaatgggattgcattttatacactttan

SEQ ID NO: 101831 - DNA, 397 bp, Homo sapiens
ggtttcaccatattggtcagacttgtcttgaactcatgacctcttgatccacctgccttggcctcccaaggtgctgggattacaggcgtgagccactgtgcccagctgatttatgtttttcaaagatctcttcagctgctgtggtgagagtggaagcagcgagatcagttgggggctttactgtggcccagatgagaaatgaggatagtctcctttggtttaatttttttttttttgaaacgggatctcattttgttgcccagcctaaagggcaagggagcaatattggttaattgaagcctttactttccagcctaaaggaccttcttgcttaagcctcctgaggaggatagtctttttattctgaatgggttgggatgaccacagcaaaaggaaa

SEQ ID NO: 101832 - DNA, 404 bp, Homo sapiens
  misc_feature (1)...(404): n = a,t,c or g
ggtctcactgtttcccaggctggagtgcagtggtgtgatcatagctcactgtagtctcaaactcttgggctcaagcagtcgtcctccctcagccttccaagtagctgggattataagtgcaagccacaacaccaggctgataggttttttttaatggaattttttcagatgtaatttacaaccatacagtttacctgctttgggtttacaactcaagatttttgtaaattcacagttgtgtggccatcaccacagtccaattttagaaaattttcaacgcccgagagaaattcctcatgctcatatgcagtcactataaaagtttttattaatgattgatgcatgtaattttcagtaataaaatcaagtattaataatacattntaatatgactcttttctagg

SEQ ID NO: 101833 - DNA, 378 bp, Homo sapiens
gagtaattgggacagactagcctccaaagcataaacttatttatgatttggccctttacagtaaaagtctgctcatcccaggttttgcttgtcaatttatatactggcgtttgttcctgatcctatttatttatttctggcatccaactctggtagttctttctgaatcagtttaatgaagtttgtaaatgatgtaattaaacgctatttattacttttatttttttctaaagatagggtcttgctgtgttgcccaggctggtcttgaactcctggcctcaagtgattctcctgctttggcctcccagagttttgggattacacgtctgaggcattgcactcagacacttttatctaaagtttatatactgttaaact

SEQ ID NO: 101834 - DNA, 386 bp, Homo sapiens
gctttccactgaaaacaactagaatgatgaataaaatataaaaagaaaaaagatccatcattttatttattttcttttgtagagatggggtcttgctatggttgcctaggctggacttgaactcctggcctaaaacgatcttcccaccttggcctcccaagtagctggcactacaggcacacaccaccattccccgtggtggtggatccatcattttaatatgtataagagatgtgaagagagaaaggaagcagtatgccaaatctaaaaacccagagggagaaacttaacataggaagccactcaagccttgagggcatatacttatcctgttgaaactgaactatggtttaacagtatcatggggctagagaatcaaagcccag

SEQ ID NO: 101835 - DNA, 590 bp, Homo sapiens
  misc_feature (1)...(590): n = a,t,c or g
ccggaattcccgggtcgagctgagactttggtgaacttggctaccaatcaagaagatgcagattcctctctggctccaggtttgggaagtggtcactgtttctagggggtgcagctcagctggtccttctaggccatgttattgaaacaagctgatgcccctcagatggcagacaggtctgttgatccaggtgtaggagatgcttcagcatcagatatggctcctacagttacatatcttgccggtgggaaaataaatacgtccaaacctctatgaaggtccatttgccaatatccataataaaaacacatatactctcggccgggtgcaggggctcacacctgtaatcccagtactttgggaggctggggcaggtggattgttggaggccaggagttcaagaccagcctggccaacatgacaaaaccttgtctctactnaaatacaaaagttagctgggcatggtggcacatgcctgtaatctcagctactcaggaggctgaggcaggagaaccacttgagcccaagaggcagaggttgcagtgagccgagattgtgccattgcactccagcctgggagactatgtttc

SEQ ID NO: 101836 - DNA, 395 bp, Homo sapiens
tttagatcacctggggtcaggaattaaagaccagcctggttaacatggtgaaacgaagtctctactaaaaataccaaaaaaaaaaaaaaaaaaaaaatttccccgggcggggggccccttccctgtatccccatttcctggaaagggtaaaaccaaaaatttgtttaatcctggaagggggggggccaaaaacccaaaatggcccccttgccttccacctgggaaaaaaaacaaaaactcctttttaaaaaaatttaaaaataaagggtttttttgtttgggcgaaaaaactggagaacacatttaagggggggtaaaatggcccaatgtctttgaaacttaaacttgaaggtcccaaaaaaaaaataaaaaagggccggaaaaaacaatttctt

SEQ ID NO: 101837 - DNA, 393 bp, Homo sapiens
  misc_feature (1)...(393): n = a,t,c or g
ttgagcaccattatggccaggctggnctcgcacccctgacctcaggtgatctgcctgcctcagccccccaaagtgctgaggttacaggagtgagccaccgcgcctggccaacagttcttatttaatctttctcatgaaagtttaattgggtataaccttattgttctgttatgtaaccttctttagtgaaggaaaaggtaatagaatatagtttgctcacactaaaatattttcaattgctaaatatagttttttttagggaatttatttttaggaatatttagatattcctaattgattaaaaaggctgaatcctgttgtcagaacttactatatttttctctagaattatatattttttagtggatttaaatgttctacattattttagcg

SEQ ID NO: 101838 - DNA, 386 bp, Homo sapiens
ttaaaggaatgaggtagataaagggaaatgatgaaaatctctatacactgatatagtggcctccaacatatattaagggaaaacaagtgaagtggaggttggtgtttattgtatatgctttttcttttttttttttttgaaaaggggtttaattttttcccccagggtggcccaaacccagtttattggaacctccccctccttggttaaagggatttcccccccccacccttttgggggggggggattaaaaacggccccccccccccccaggaaatttttgtttttttaaaaaaaacggggtttccccattgtgggaagggtggttttgaacttctaaccttgggaaccccctgccttcccctcccaaaagggtgggaataacg

SEQ ID NO: 101839 - DNA, 387 bp, Homo sapiens
attattctgccactgattattaactaagtttatataatattctaaatcctttgttggcatttcaacaatattcacagcatcttcattagcagagtgcatctcaaaagaaaccactttctctgctcatccatgagaagtaactcctcatccactcaagttgtatcatgagatatcatgcagcaattcaatcacatgctcaggctccacttctagttctcttgctattcccatgacatctgcagttacttcttccaatgaagtcttgaacccctcaaagttatccattggagttggaatctaattcttccaaactcttgttaatgttgatatcttgacctcctcccatgaatcatgaatgttcttaatagcatctagaatggtttcaat

SEQ ID NO: 101840 - DNA, 403 bp, Homo sapiens
gcgctcgagagcctagaaacgagcgcgagggcaactttactgctgagcagacaatcgctggaaactggtcatcttgaaaaactgaactgcttacccattaaacaacagactcccattccctcttcctccagtccctgaggaccagcagtaatttgaatttgactactctgggtaccttatgcaaggggaaccatatattatgtgactttttgcgagtggcttatttcacttagcataatgacttcaaggttcatccatgttagaaacatgtatgaaaacttcattccttttgagataagggaaataatattccaccctatggatatatgccacattttgtttatccgtgcatatatcaatagacatttgggatggttctaccttttgactattgcgaataatg

SEQ ID NO: 101841 - DNA, 404 bp, Homo sapiens
caaacaagcaaaaacacatcactgtccacacaactgtaaatatgcaaggaagagtttcttcttgcctgaaaactgctgtacaagcatggcaccagcatctgaggcaaaaggggagctggcatgtgcagagattacatggcaagagaggatgcaagagagagagaacgaggtgccagattcttcaaccgtcagatctcatgggaaataaggatacaaattctggagcagcaactgatttaccaggaaacactgaggagtagagcaaggttggggttttgtcatgttgctcaagctggtctccaactcctgggctcaagcaatccacccacttcggccccccaaagtgctgggattacaggcgtaattagcacctggctaaccttcatttcttgggaagaatttaa

SEQ ID NO: 101842 - DNA, 375 bp, Homo sapiens
agactaaagactaaatctcataaaataattagaaataaactaattcaacaatgtagaccacatataattttttctagctaacattatactttcatactagaaaaaaaaaaggcttaaaataaatattctattttatctagtccattctcagtcaaaaagacctcaaagtgggaacgggtccaggcgcaggggctcacacttataatcccaggacctggggaggctggaaaggcctccaggcaggaaagaggatcacttaagcccaggagttcgagaccagcctggacaacacagtgaaaacctgtctctagaaagaatttaaaaataagccaggtgtggtggcatgtatctgtggtaccagccactcaggaggct

SEQ ID NO: 101843 - DNA, 373 bp, Homo sapiens
acagaaatttgaaatgatccccatgttctctggtttaaaaacttagaaagttattcctcttttagaaatcagatagtttagaggccgggcagggtagctgatacctgtaatcccggtactttgggaggcagaggcaagaggattgcttgaggccaggagtttgagaccagcctgggcaaaatagtgagactgtgactctactaaaaatataaaaaagaaatcagatagttcatttttctctgaagtgatattatatgatgaaatctttttctcagtttgaagttttctgcacatggagtttataaaatatcatgagatggatctaagtggatttaaaaaaatttcccaatcactaaccaggtttagcaacata

SEQ ID NO: 101844 - DNA, 376 bp, Homo sapiens
catgggctataatctggtgtgccatttgctaagaccattggaaaagcgcagtagtattagggtgggagtgacctgattttccgggtgccctccatcaccgcttcccttggctaggaaagggtattccctgaccccttgtgcttcccaggtgaggcaatgcctcgccctgctttggctcacgcttggtggactgcacccactgtcttgcccacactgtccgacaagccccagcgtgatgaacccggtacctcagttggaaatgcagaaatcacccgtcttctgcgtctctcatgctggtagctgtagactggagctcttcctattcggccatcttggaacccaatcctcactggactctttttttaaaaaagttatc

SEQ ID NO: 101845 - DNA, 404 bp, Homo sapiens
aatacatctagcttcattcctctatgggtaaagaaaatactttatatgattttgatcttttaaaattaactgataattgcttataatctaacatatgatctatcctggaaaatgttttatgtgtacttgagaaaaatatacactctacttcattgggtggagtgttctatatacacctgttgggtctagtttgtttacagtatggttagttggaatagaattgatagtccaggaaaaaaaaaaacaaacatctatgatcagctgattttcaacaagggggccaagagcactaaactgagaaagaatagtcttttcaacaaatggggccaagacaagatttctacatacaaaaaatgaaaggggatccctatctcatttcaaatataaaatttaaaagggctcag

SEQ ID NO: 101846 - DNA, 403 bp, Homo sapiens
aatacagtccccagtttctagcacagtgctcctaaaacttgtaattttctaagtgataggactgataggagcatcttttgttctatttgatctttcttctttttttttttggaaaaaagaacctggccttatggcccaggcaggagggcaggggaacaaattttgcccaggggcccctccacctcccaggcccaagaaaatttcccgcctaaaccccccgagaaggtggaaacaaggggccccgcccccaccccggggaaaatttgggacttttttttagggggcgggggttccccccgttagaaaagcctggccccggaaattccggaccgggaccggggggggtcccacttttccttaagggggggggaataaaaactgggggaaaccaggggcaaaacgg

SEQ ID NO: 101847 - DNA, 401 bp, Homo sapiens
aatacatggtgtgcgtgtgtgtgtgtgtgtgtgtatgtgtgtagagatgaggtttcactatgtatgccaggctggtcccaaactcctaagctcaagcgatccacccatctcggcctcccagagtgctgagattatacgcataacacactgcacctggccatggcatgattcttatatctctcctggggctgaactccatacatttgcttacacctggcctgtaagacccaagatccccctcacaatactacttctatacccagggccaggagatgtgtcggttgagatcatgactgagctttattatgcatctcccagcacgcaacctggggcttgtgatactgcccgcgagagctgggggaatggatctgctcctgactttacacacagagagaggctta

SEQ ID NO: 101848 - DNA, 422 bp, Homo sapiens
aatacagtgtgtgtgtgtgacaaagtctcacttttgtcacccaggctggagtgcagtggctcaatcatggctcactgcagcctccacttcctaggcttaggtggatttttcccacctcagcctccttaatagctgggactaaaggcgcgtgacaccacgcctggttaatttgattttattcccttcataagaatacgagttgagggcagagactgtattttgaacttctgtctatcatctgcaaagcactcctgtgtgaaggtagtaaaaatcaatagtatttgttgaataacagtaatctactgttagtatttttcctctcttaagaaactgagtatgaactggaaatttgaataataagccacaatgagctaatgacaaatgggctttactagagaggccagttgtttcaggtattactt

SEQ ID NO: 101849 - DNA, 454 bp, Homo sapiens
  misc_feature (1)...(454): n = a,t,c or g
tatcggaatgcctgcgtacgttagcgtggatcctccagagcggccgcaatacacgggggccaaaacttattcatatttataaaccctaagttatcttcttacattgcttggtctgataatatgctaggagctatggatcaaccaagacacagagctaggctgggcatgatgactcacacctgtaatctcagcactttggaaggctgaggcaagaggatggcttgagctcaggagttcaagaccagcctagggaacatcatgagacactgtttctattanaaaaaaaaaaaaaaaaaagggggcggggtttttttttttttcaaaagcaaaaaacaaaaaagtgggggccccccaaattgggaaccggttaaaactaaacttaaggggcaaaaggcggggggcctttcccccttgaaaaaaaacctttaaaccttttcccagaaaaacaaagagn

SEQ ID NO: 101850 - DNA, 421 bp, Homo sapiens
  misc_feature (1)...(421): n = a,t,c or g
aatacacgggggccaaaacttattcatatttataaaccctaagttatcttcttacattgcggggtctgataatatgctaggagctatggatcaaccaagacacagagctaggctgggcatgatgactcacacctgtaatctcagcactttggaaggctgaggcaagaggatggcttgagctcaggagttcaagaccagcctagggaacatcatgagacactgtttctattanaaaaaaaaaaaaaaaaaagggggtggggtttttttttttttccaaggcaaaaaaaaaaaaaggtggtgcccccaaaattggggaccgcttaaaactaaccttaaagggcggaagggggggggcctttccccaatgaaaaaaaacctttcaaccttttcccaaaaaacaaaaaggccccccaaaattggt

SEQ ID NO: 101851 - DNA, 403 bp, Homo sapiens
aacagcaggaccgaacgcctcggcagctggcagtcgcacttctgtcacaaggagatggaggctcacttcgttgtccagtctggagtgcagtggtgcgatcttggctcactgcggcctctgcctcccgggttcaagtgattctcctgccccatcctcctgagtggctgggattacagtcaatgcagaccctgcaggacttgctcactgatcttcatgcactccaggtcaccatcacagccctcagaaaagaagtggacatgctgaagaacatgcttgacaaggtacacccagaaagaatggacatctttgctgaagacttcaaaatacagaactggaagatggttgcactgcagcgggaagtggcttctctccagaataagtttaaaaccatccccaaaaccga

SEQ ID NO: 101852 - DNA, 417 bp, Homo sapiens
tatacatgcctgggtgacagagcgagaccctgtctcataaacaaaacaaaacaaaaaaattaacaggacatggtggaagcatgcctgtagtcccagctacctgggactataggtgctatgcctggctaagtttttgtattttctgtagcaatgaggtctcatcatgttgcctcaactggtctcaaactcctaggctcaagcaatttgcccacctagacctctcgaagtgctagaattataagcgtgagccactgcacccagcccattattttattttccaataaagctttgcctagataataaataattttttgttgcagattatacacctcatagtaataacaaaccctaaattggtatctaggcaaaatcatccactaacaagactctagaagtataagaccagctctgtcaata

SEQ ID NO: 101853 - DNA, 434 bp, Homo sapiens
  misc_feature (1)...(434): n = a,t,c or g
atgtctctgcacgcgnacgtaagctnggatcctaaatagcggccagaatacagtggttcctcgacaccaccaccctcaataatctggcttctattcctactccatcactaaaacagcatgtttgagggatctatgaatccttaaaaaccaagggattattcattttttttttaatggaaaagggatcttgccatgttgcccaggctggcttcaaactcctggactcatgcaatcctcccaccttggcctcccaaagttctaagattacaagggtgagctatcgggcccaacacccatgcgatccttctcagtctcattttatttgaactttctatatttgacaataccattactctctccatctttctttcctctgtatagaccgaaatttataatctggctgattccattgctagaggaggccctcataactt

SEQ ID NO: 101854 - DNA, 378 bp, Homo sapiens
aatacattcattgtgtccccaaaacaggcatgcaataaatgttggtacaacaaataaatgtgggatttttagagcctttgctatagatcctttgcacgctgtgaccgcccaaaaaagggacagcatttttccaagtcctatctgcaggatgcccaatgggctaggacacttctgtcaactattgcccagaataattcagcagaacaccatttgaaaaccactgattggtagggtgcagtggctcacgcctgtaatcccagcaccccgcaaggccgaggcgggagaatcgcttgagttcaggagatcgagaccagccaaggcaacacagggagaccccatttgtacaaaaaataaaaataaaaaagttagcagggcatg

SEQ ID NO: 101855 - DNA, 382 bp, Homo sapiens
aatacagggtggcatccagcttcactttgcgattccaaggggagcctctgcttgccctaactgggtcctgtgtccactccttggccacagagggtaggacaccatgactgatggtcccacctacactgtctgatgatggacatgtgaaatgccggctgttgctgccagaaaagggggtaggtgagtggcaagtggacaatgaccacagatgtccgtggcaattcttatttcactgaaagtctcaagaatatcacgtttacagccacgcgcaatggctcacacctgtaatcccagcactttgggaggctgaggcaggtggatcacctgaggtcaggagtttgagaccagcctggccaacatggcaaaacccggtctctactaa

SEQ ID NO: 101856 - DNA, 397 bp, Homo sapiens
atacattcccccgaggttctgcatggcaaataaagagttaggaaagccaaaatatcagtgggtatcataagtgatttactctagataaatcactgaatcatagtgacaagcccttaggagctctgccttagaatttcccaagggtttcgtagatgatcctgcagcaaagaatgaattccagggtgtcagatctgacttgatggcattttagggacttggccaaggttcccacttgatatttgggactaaaatgccccacctgaaaagaagcgttctaccttgcaattaaagaaaatgtgggccaggcacggtggctcatgcctgtaatcccagcagtttgggaggccgaggtgggcagatcacctgaggtcagaagtttgagaccagcctggccaat

SEQ ID NO: 101857 - DNA, 384 bp, Homo sapiens
actacctgggcggcgagaatattacaaagttccttcttattggcgggggagcatgacaaagtatattattgctagggcggggagggggtattgtcataaggtcaattgatcagttagggtgggtaggaacagatcacaatggcggaatgttattttttgtggttcttcatttgcttcaggtcatctggatgtatatgtgcaggtcacacgagatgtgatggcttaccttgggctcagaggcctgacagattggatcctcgtctccgtaatggtgcaatgatccttccttcgcgtacggtaccatgtgtctcagggctggaggaccacctggccttgctggcctcttacaccagagcctgtgccatagctcataattttgctgat

SEQ ID NO: 101858 - DNA, 451 bp, Homo sapiens
  misc_feature (1)...(451): n = a,t,c or g
tgacagctctggaattcccgggtcccccacgcgtccgcccacgcgtccgaaaaaacaaaaactaccatgtgatccaacagtctcactcctgggtatatgcatatatgaccaaaggcagtgatcagtatttcaaagagatatctgccactcgcatatgttcattacagcattattcacaatagtcaacatatggaaacaaacttagcatccattaatggatgaataaagaaagtgtgatgtatatttaaacagaatattactcagccgtaaaaaggaaatcctgacatttgtcacatgaataaacctggtggacactataaaataaggcagacataggcaaatacttcatgatcccacttaattgtggaatattaaaaacttanactccgaggcagagggaggaacggtggttactagagtccagaaggtagggaaaatggagaaatgttgg

SEQ ID NO: 101859 - DNA, 375 bp, Homo sapiens
  misc_feature (1)...(375): n = a,t,c or g
cggacgcgtgggaaaaaattttgggtttttgtaggggctgcaggacaaaagggacactgtttcattaataactttacattgactactacatgttgaaatattccgcacgcatatgtgggattacataataatatcgaggcccggcgctgggtggctaactcctgtatacccaccacttttggagaccgaggcaggaggatcccttcagcccaggagttcaagaccaccctgggcaacatggtgagactcccgtctttacaaattttattttaaaaaaaaaaaaacataaataaaaaaaaaaaaaaaccctttannncatnnnnatggattgggggtggtttcctggcgctctcccagctagttttttcctcctgn

SEQ ID NO: 101860 - DNA, 379 bp, Homo sapiens
cctacctcagcctcccaagtagctgggaccacaggcacacaccaccacattgtacttttttttttttttgggatttttgaaaaaaagggggttttcccattttccccaggggggttttgaaccccgaaaccaaaaccaccccccggctttggccctaaaaggggggggaaaaaaggggggggccccccccccccggcccggggaatgggttcaggggttttttaccccccaccccaaaaacccttttttgttttgattgggggacaaattctttttaagggccggaccttggattttaaaaaaagggccccacctttcccccctttttctctatttttgccaaaacacaccccctccttttggataaaatgggaccccc

SEQ ID NO: 101861 - DNA, 401 bp, Homo sapiens
agcaatggtcacactgtgttgcaattgcttgttatttctctgccccctactcctcctctctaagcaatttgagggctaggcatggggtatgaggttttgtctgctattatactcatgccagtacctcatctcagacatagcacacttcagtaaagctttttttttttggaaaagggagcctccccctgccccccaggttaaagggcaggggcccaatttaagttaatggaacccttggcttcaggggtaaaggggattctccggcctaacccccaagggcggtgggaattacggccccccccccccccccccccttatttttttttttttaagaaaaaacggattttttccgggttggccggggtggtctaaaaccccggacctaaggaaacccccctgcc

SEQ ID NO: 101862 - DNA, 404 bp, Homo sapiens
cccacgcgtccgcttaaaaagaaaaaagttgaagaaaggaaaccttttgatcatctcattagatgccaagaaggtattttatctaagttcattataatttattgggtttttttatttttaatttttttacatttttaattttttcgtagagatggggtctccctatgttactcagactgatcttgaatctctgacctcaagttatcctcccaccttgacctcccaaagtgctgggattacaggtgtgagccgctgcacttggcctatttattcattctttttttaaactcttagataaatacgagtatatgaagtctttttttttttttggaaaggttggggaacccaattttttttccctttgggggaaccccttggagcttccccaaaaccttttggggggg

SEQ ID NO: 101863 - DNA, 359 bp, Homo sapiens
cggacgcgtgggccgttttcattcccatctgattttttgtatgcgcgttgttagtacagacggagtttcaccatgttggccaggaacctcgtgatccacccacctcagcctcccaaagtgctgggattacaggtgtgagccattgcgcccggcctctgttctctgtctcaagctttttacactttctaacatctgcttgctctgcctcaaatttttcaaatggacattttgtattttccatgtacttaatattttaggtagtatttaataactttacagatacatcattactcttgtataatgttccgggaatgtatttaagaagcttcagtttccccagtctccccagcactgaagct

SEQ ID NO: 101864 - DNA, 365 bp, Homo sapiens
  misc_feature (1)...(365): n = a,t,c or g
ctgttttctgatcattcagnaattcttttgttcctttcttcctgtctttttgtttttcttttgtgacataacgagattctgtggcgcaatactttttaaaaatacatttaacatttttaaaagttaattttttataaaataatagatggggtttcatcatgttgcccaggattgtcttgaacttccggactcaagcaatccactcaccttggccatccaaagggctgggcttacaggaatgagccactgtgcctggccttgaagagacatattttcattcctttctctttctcttttgggaatttactaaaagatattttctttctggttaccatggagctttcataaaacatcttatagttatt

SEQ ID NO: 101865 - DNA, 363 bp, Homo sapiens
  misc_feature (1)...(363): n = a,t,c or g
ttcaccatgctggccaggatggtttggatctcttgaccttgngatccgccagcctcagcctcccagagtgctgggactacaggtgtaagccaccatgcccggcctggtctttcttagtgatacataaaataatggcatttctcacaatcaatttgtcatagatttgaggaaacgctatagaggtagtgcccttacttgcatatcttaaaatccacattttctaaatgaacacctccaggaattcctcccatttagtcaactatgtgttgaatattttggcttcagtttcttgacttttaaaataattaaacatataaacaagttagaaaaactagtttattatgcccagagaaagtagtactg

SEQ ID NO: 101866 - DNA, 362 bp, Homo sapiens
  misc_feature (1)...(362): n = a,t,c or g
cactatgttgctcagactttttttaaactcctgagctcaagctgtcatcctgccttggcctccagcagtgctgggattacaggggtgagccactgcaactggcccacatttattattattttatgtttgctttcttggatgattcttttgatattatattcaaaagtgctattttttttgcagcgatagtatactttatttgtagtaattgaagtatattggtaattttttaaaaaacttcaaattggcttgatagcataggaaaatggacgaatgcttttctgcccgttagctgctactttgaatttctttactcttttattctgntagccttttggttgagatgtgaaactaccaatcan

SEQ ID NO: 101867 - DNA, 373 bp, Homo sapiens
ggaggtcacggctatagtgagccatgattgtgtcactgcactccagcctgggtgacagagtaagaccctatctcaaatacacaattaggttgggcacggtctctcacacctataatcccagcactttgggaggccgaagtgggaccaccactttcaggcaggagaacagggtctggagacagggagcctaaggccaacctgcagcagacttcttggaactggaccagaaggaaaaccccacctctccatgcccaagttataaggggccagaggctcctccctctacaaaatcccctctcccttaggtcacaaacagtaaatgcctctaattggtagagggccaagccttcacttcagcctttgattggttggg

SEQ ID NO: 101868 - DNA, 370 bp, Homo sapiens
atcagatttctttctgtaaagttgtagtttgaataacaaggactttgtttttctagtaacagttgtagaggcctgatgattctatccttcccacttttctttctttttttttttttttttttaaaaaaaattttgttttttttgcccgggggggggggatatgggcttgtttttccccaaccttgggggggtttttaaaattttcgggacccccggggggccgggcttttgttttaaaacccccctctttaatttataaaattcccctcccccaaaaaaagggggggagggggccaaaataaattttcccggttttctttattttttgggggggggttaaccgggtggttcattttttttagggaaaaac

SEQ ID NO: 101869 - DNA, 375 bp, Homo sapiens
caattgcaggcccttttctttatcccctacttgtttgattagacccagaaggatgtgcctacaaagactctatcaaacaggggtttttttttttttttaaattttttgggaaaaaaaccctccttttgtggctaaaacgggggggcgggggaatatttttggttaagggaaccccccccctcgggggtaaagggaattttaaggcctagcccggccagggggggggaatttaaaagggcccccccccccccggttaatttttggggttttaaaaaaaaacggggttttcccttgtgggccagggtgttctcaatccccgggcctaagggaacccccccccctggcccccccaagggggggggaaaacaggggggc

SEQ ID NO: 101870 - DNA, 403 bp, Homo sapiens
  misc_feature (1)...(403): n = a,t,c or g
tttaccaaaatgagttaaaaactttgtccatgcaaaaatctgcacatgaatgtttgtagcagctttgtttgtaattaccagtagttggaaacaaccaagatattattcttctatagaaaaatggataaacaaactgtggcacatcagtgcaatggaatattattcatcattaaaaagataggagctgtcaagccatgaaaagacatagaagaactttaaatgtggatcgctaagtgaaaaaagccagtctgaaaaggatacatggtgtttgattccagtgatatgacactctggaaagggcaaactatagagacagtaaaaagatcagtagtctctatagatacaggggaaagtgagaggaatgaatagatggagtacaaaacatttttaaggtgacagactn

SEQ ID NO: 101871 - DNA, 459 bp, Homo sapiens
  misc_feature (1)...(459): n = a,t,c or g
ccgctccggaatttccgggtagacccacgcgatnnnnaaacacaaaccgcaaaaattagccggttatggggttttgcacctgnaatcccaactactcgggaggctgaggcaggagaatcgcttgaacttgggagatggagactgcggtgaaccaagaacacgccactgctctctagcctgacacagtaagaatctgtcacacacacacacacacaaatgattttcaaagcagttggtccatgttattctagatccaggcgaggagtctaatctttttatgaaaactaccatgaataccactaatgaaagtcttggggctcacactgcaacaggatatgagtccttgcttttttctcttacccttaatacagnaataaacctggacccacaggagcaacaagggccaaggcgggttctgttcgacatgctgaatggacaagatcctgatcaggacattta

SEQ ID NO: 101872 - DNA, 377 bp, Homo sapiens
  misc_feature (1)...(377): n = a,t,c or g
ttttgaaagaaggtttactcttggtataatgctatcagaaagcttcgcatgctacagagaaatctttcatgagatgaagagtcaatccatgcagcaaactttgttgttgttataagatattgccacaaccaccccagccttcagcagtcatcaccctgatcagtcagcagaacaaaaaaaaaaaaaaaaaaaaaaaaaaaaaaaaaaaaaaaaaaaaaaaaaaaaaaaaaaaaaaaaanggggggggggcccttaaaaaaaaaaaaattttctccccccggggggggcggattttttttttttttttttgggccaaaaaaaataatctcgggggcgggttataaaaacgggggggggggagaaaccccgcccccccc

SEQ ID NO: 101873 - DNA, 500 bp, Homo sapiens
acaagccactgtacccagctgatattataggtcttaaggcaattgagaactttatttcagaagcttaagttccttagcagcaggaaaccccatagtatttatcaaatcatttctaaaagtatttagacccaaaattatatgacatgttaatctctgaagtaatttgttgttttgtataacttttctgtaatatattccatatctgacccctgttggtataaagaacaactatgcaaatctgttttttcttttctttcctcctagtctctgctggatgaaccgaatcctaacagtccagccaatagccaggcagcacagctttatcaggaaaacaaacgagaatatgagaaaagagtttcggccattgttgaacaaagctggaatgattcataatagacaactggtctgttaatctttttcatcattgttgtgtataatttacctctcattagaaaggctaacaaattttaagtgccacaggttttaaggattctgcagaa

SEQ ID NO: 101874 - DNA, 404 bp, Homo sapiens
tctttgtaaagcacttagaacagtacctactgcctaccaaacgttgagtggtgtctactacatgataacaccacaaatcatgcctccttctgttattattattaccatcatcattattattggatcataactctcttgagaatccctgcagagtttcacgttgggggaactcaaatgggtaatatttaaaacgggactataagccaggcacagtggctcacgcctgtaatcccagctactccagaggctgaggcaggaagatcacttgggctcaggagttttagaccaacctgggcaacataacgggaccccatgtctgaaaaaaaaaaaaaaaaaagggggcgcccgttttaaagaatcaaggttaacgaccccgggcttcgcaaggattagtttttttttgg

SEQ ID NO: 101875 - DNA, 412 bp, Homo sapiens
  misc_feature (1)...(412): n = a,t,c or g
acgaacaccctcctagccttactactatttattattacattttgactaccacaactcaacgggtacgtagaaaaatccaccccttacgagtgcgggttggaccctatatcccccgcccgcgtccctttctccataaaattcttcttaggagctattaccttcttattatttgatctagagattgccctccttttacccctaccatgagccctacaaacaactaacctgccactaataggtatgtcagccctcttattaatcatcatcctagccctaaggctggcctatgagtgactactaaaaggattagactgagctgaataaaaataaaccacatttattgagccctgtgtgatatacactatgccaaanactggggggggcggtttgtagacttgaaactcgctcatgg

SEQ ID NO: 101876 - DNA, 395 bp, Homo sapiens
  misc_feature (1)...(395): n = a,t,c or g
cccacgcgtacgcccacgcgtncgcccattcgtccgttgttcatgacttgttcaccttttcactaggacccagaattcatgcatcttggagtcccaacttctccagcccctgtgtcttgtttatttccatagcagttggtaggcgggacctccgcacagtctcacatggtcccttctttctagtccaggcccagctcagccctcaccagaacaggcagtcttgcctggcattcaagaccttccactgagcctaagcaacatagtgagaccccacctctacaaaaaatttaaaaattagccaggcatggtggcacgtgcctatagccccagctacttgggaggctgaggcgggagaactgctggagcccgggagttccaggatgtagtgatccatg

SEQ ID NO: 101877 - DNA, 391 bp, Homo sapiens
aatcctcaacccttagctttccaagtggttgagactacaggcacgtgccaccatgcccagctaattttttttttttttggattttggaaaaaacacctttttgttttgtgccccaggggggctttaacctttgggcctaaaccagccctttaaacccccccccctgggcctctaaaggggcgaaaataacgggggggacccccggcatggggctaattaatttggccaatggccggcccccctagaaggaaaggcctaaaaaaccaaaaattttgggaaatttttttctctccccccttccctttttccctttttaactccgcccacaacggaatcccaaaaaaaaaatattgggcaaaaagggggggtccaatatgtggaaggaagaaaa

SEQ ID NO: 101878 - DNA, 422 bp, Homo sapiens
agatagtattttcattattttacagataaggaaataaattacacattgcaaatcacataaattatcatatactggggccaggacaagtgcttgtaaaacattaacattttctcagattaacagcagtctattcataactactctcttcagttttttttttttttgaaagggatttttgttttgtgccccaggcgggggggcagtggggcaatttgggttaatggaacccttggtttcgggggttaaaaaatttccccggcctcacccccccaagaagttggaataacgggggggggcccccccccccacttattttttgtttttttttaaaaaaaaaaagggtttccccccgtgggcgggggagggctaattttttggacctggggacccccccccctgggcccccaaaagaacgggaataa

SEQ ID NO: 101879 - DNA, 376 bp, Homo sapiens
agaagttatcgttttaaatggtattaaattgctgtcaatattgagccaaggtgtctaaggggatggtttggggaagaaaactatagctaactatagctactacagaaagatcttaaaccagaactcttttggggccctgaagaactttttttttttttttcaaaacagaggggtactttgtcgctcaggccaaagggcaggggggcgatcatggctcactgcagcctcaatctccggggctcaagggatcctccctcctgagaaggtgggactacgggagcatgccaccatgcccatcaattttttttttttaaattttttaaaaaaacggggcctcgctttgtggcccaaacaattctaaaacggggggataatg

SEQ ID NO: 101880 - DNA, 435 bp, Homo sapiens
  misc_feature (1)...(435): n = a,t,c or g
tacccctgnnnntnncgtccggaattcccgggttaaaagcatttagtctgctgaggaacattattgaatcattaaatcattataactctcctacaaatggcttgctaggggtatgtagacgggctttggtaacctagaggaggaggtgcataatcttgcctagaagtgagggcatgcccttttcaggtctctgtgctgtggacttgtcataaagtataataaaaaaaaaaaaaaaaaaaaaaaaaaaaaaaaaaaaaaaaaaagggggggggcccttttaaaaaaaccaatttttccccccggggggggggaaatttttttttttttttgggggcccaaaaattaaattcggggggcggtttttaaaaacgggggggggggaaaaacccgggggtcccccaatttaatccctttggggaaaaaaaaaaaatgttt

SEQ ID NO: 101881 - DNA, 434 bp, Homo sapiens
  misc_feature (1)...(434): n = a,t,c or g
cgtttttgcaaactttgatttttatttcatctgaacttggttcaaagatttatattaaatatttggcatacaagagatatgaattcccccgccncccaataaactaatagaatnggggggggccttttaaaaaaggcacttttttccccccccgcgcgggcgggtaaggttttttttttttggcccccaaaaaaaaaccccggcgccgggccaaaacccgggggggggggggaaaccctggggctcccccctatttagcccgggggaaaaaaatttncccccgactcaccctcngggggggccggtgttgggggctccccccccaccccccggcatagtgttgatttaaaaaaaaactggccttcccctctttgtgggccgggcggggacaaaccccaacctggggggaccccccgcccccccccccaagggcg

SEQ ID NO: 101882 - DNA, 412 bp, Homo sapiens
tttaaaaacttgatataacagaagtttgattatagtaactgaaattggaagtggaattacagtgctgtattataactggaaactggaaattggtatggctctttgttcctctctagagttttagtctccagtttggtggtgggtagctagtgaagtttgaatatactgtattaccaaaaaaccgttataggctgggtgtggtggctcatgcctataattctagctctttgggaggccaaggtgggagaatcacttgagcctaggagttcaagaccagcttaggcaacatattgagatcccatctctattataaaaaaagaaaagaaaagaaattaaattaaaaaatcagttatgtaaaaattatgggttggacactgtggctcatgcctataattctagctctttgggaggg

SEQ ID NO: 101883 - DNA, 426 bp, Homo sapiens
  misc_feature (1)...(426): n = a,t,c or g
nnnnttgttgcgggcatgcaccaccacacccagctaatttttattctttgtagagaaggagtcttgctatgttacccaggttagtatcaaactcttggactcaagcaatcctcctgccttgacctctcaaagtgctggcattacaggtgtgagccaccatggccagcctatgaactgtttaagtggatgaccagcctaggcaagaaagatgccatctctaaaaaaaaaaaaaaaaaggcggggaaaaaaaaaaaggggggttgtttccccctggcttgggggcccaacccctctgggtttttgggccatagggcatccccccccccccccccttatttttttttttttttaaaaaaaggattttgcttttttcccccagtataataaaaaatcttgggataaaaaaatccttctcgtctggacatt

SEQ ID NO: 101884 - DNA, 452 bp, Homo sapiens
  misc_feature (1)...(452): n = a,t,c or g
cgtccggatttnnnnaaatacccacgcgtccgcccacgcgtccgattcccggacgtctaaaccattttactttcaccgctacacgaccgggggtatactacggccaatgctctgaaatctgaggagcaaaccacagtttcatgcccatcgtcctagaattaattcccctaaaaatctttgaaatagggcccgtatttaccctatagcaccccctctaccccctctagagccaaaaaaaaaaaaaagggggggggtttataggggaccaatttttccgtccggtctcttgccactgataattttttttatggggccccaaaatattaatactcgggggccgttttaaaaatgggatatggggaaaaacctgggtttccccaattaaatccgtgtgggggaaatttcaagaatcctatgttttatattgtcgatctagagattgtctcattgtc

SEQ ID NO: 101885 - DNA, 388 bp, Homo sapiens
tatctctatatctatctatctatcttgttatctatctatctatctatctatctatctatctatctggctagctatctagctacctagctagctatctaaaaggagatttattatgaggaatatgttcttgtgatgacagaagctgagatattccacattctgccttctccaagctggagacccagaaaagttatggtgtaattcagtcctacagcaggacaagatgagctgtcccaggtcaaacagtgaagcagaaaaaaaaaaaaaaaagggggggggggggggggatgttttttccccctccctttggccctataaaaactctgaggggaggggatatggccccccccctttgggaaggaaaacccttttttttttttcttttttg

SEQ ID NO: 101886 - DNA, 423 bp, Homo sapiens
cccacgcgtccgcccacgcgtttgctttcgcgtccgatcaaaatacagattgctttgcataagttttctttgtgccccgaatacctacagtgagcagactatttattttaaagcttatggattaggccagatgcagttgtgcctcatgcctgtaatctcagcattttgggaggctgaggtgggaggattgcttgagcccaggaatttgagatcagcctgggcaatatagtgagaccttgtctctattgtataataaaaaataaaattaaaaaaaaaaaacccttacagattatagcattttttctttgtttcaaagactgaagcaaagtaattttttgtttaaaggcaaaattggtatgtcagtggggactccgtgttggcagcagggctgttaccactttgggtgatccagccaaaggtaag

SEQ ID NO: 101887 - DNA, 416 bp, Homo sapiens
caactgcatctgcctgtgaacttccttcttaccaaggctctatatcttctggcagggacaaaggctccttccatggttggtgtgagtaggcttggacacctgcagggcagacacccaggaataatcaactgggccttcagtggtcctcttttgcagggtcaaggtgggccttagcttttagtcaatggtctaagacttctatttaccagttagtcattcagttagttttcaattcaaaaaatacttcatgtttgaagaatccagcaaaaattattcaaatctaagatataaaagagaggaaattacagccgggcatggtgactcatgcctgtaatccctacattttgggaggcctaggcgggcagatgacctgagatcaggagtttgagaccagcctgaccaacatgaagaaaccc

SEQ ID NO: 101888 - DNA, 400 bp, Homo sapiens
tgcctttgagttttgtaccttcagataattacttatgttttattattggccttttccttctgtttgaagtattcctgttggcatgtcttgtgttgatgaaatctctcaactactgttaggggtctagtaaagtctttgttactttttcatatttgaaggataattttactagatattctattttagtgtaaaaggggttttttgttttgttttttttcttcagcactttaaatatgtcataccactctctcctggcctgtaatgtttccactaaaaagtctactgtcagacatatcagaggttcattatatggtatttatttcttttctcttgctgcctttaggatcatttcttaaaatttttgatatttgggagactggttatttaatgtgttgaggcg

SEQ ID NO: 101889 - DNA, 396 bp, Homo sapiens
  misc_feature (1)...(396): n = a,t,c or g
gaaacctgtagcctagggtgagttaactttgctaaagattctatttagggatgttacgttttcttagagatttcaattgcttttaaaagtttgggaagccctctctttggttctttaatggcttaattttgagaacctgacttttattttactttgaaaggctactacttttagaatattttacttccatgagctctgccgagcttccccacctgtgctcagtggcacagtatgggtttgtgattaggataggatgtcgatcctcaggccaggtgtggtggctcacgcctgtaatcccaacactttgggaggccaacgtggaggatcgcttgagcctaggagttcgagaccagcttgggcagcatgacaaaatcccacctctacaaaaaataaatn

SEQ ID NO: 101890 - DNA, 455 bp, Homo sapiens
  misc_feature (1)...(455): n = a,t,c or g
gcctttaacaaggggcccctcctcagcatctgatgctctctcctcagggggaccttaccacccctcagagtgctgcttcacctacactacctacaagatcccgcgtcagcggattatggattactatgagaccaacagccagtgctccaagcccggaattgtgtaggtggtacacacacatcacactggggggagagggagccagcagggcctcctggagggaagcagggagtggtggtggaatggggacccccagcgtacctcccaggtgtgactacatggggagaggcagctgaggggcaatctgagcgctttctggctggagcctgcaggagccatggggaaactgaccccatggatggggagatgacagagaagggagaagaaggcaagagggcacttcctcagggggacacagagactagatgggtcctagggtcctangaaccgaagag

SEQ ID NO: 101891 - DNA, 430 bp, Homo sapiens
atttccatatgattttgtttaatcttctgtcctttgcattgcagaaacacacacacagaaattcacaagagtgtgaggtatgggactgagcatgcacaggacccattttcaatatttagcccatatacacccatgtgtgcatgtacacacacacacacacacacacacacacacacacacacacacacacactctgtgtatgtgacacacaaagtgtgtgaggagacatgtctatcttttttttacccagaaagtggcaccatctctcacgcccaagagatactgaagaggtgccttgaaaataaaacacacctaggggtgtggtgtttcacatccctcctttctgtggcaaacatagtttttttttcttataagagacaagtggcagcggcccgtggaggtctctttttttctctgtcacaggcggaga

SEQ ID NO: 101892 - DNA, 396 bp, Homo sapiens
  misc_feature (1)...(396): n = a,t,c or g
ctttggaattagatgggattctgccaccccatttcctgcttcacattgatttttataccacactggctatttatcacagcatcccctgaaagcccagcttttcaaagatatgacttcaccgaaaggaatgtagtgatctagtgttaaaactatgaactaccttaagcccgtagttcacatggtagctgacagatgttgattgtttcagtgtttgcctccnaaaaaaaaaaaaaaaaaaaaaaaaaaaaaaaaaaaaaaaaaggggggccccttaaaaaaaaaaaaaattttaacccgggggggggggggaattttttttttttttggggccccaaaaaaaatatcgccggggcgcgtttaaaaaaaccggggggggggaaaaacccccgttccccc

SEQ ID NO: 101893 - DNA, 397 bp, Homo sapiens
tattagtggtctttctgtctccctcagggccacaaaattcccctggagaagggatttacagtagcctcaaatctcagaagctactgcttttagtcagataagggaagatccaagaaagctttgtttagcacttgttgaatctaaaatgtcttcagcttaagataatcttgaaaccaatgctggagttctgagtggatccccacaacagagcagttcaatgtaaagaatactgcaaaggtgagccgagatcgcgccactgcagtccagcctgggcaacagagcgagactccatctcagaaaaaaaaaaaaaaaaaagggggggccgttttaaagaatcaaagtttacgtccgcgggctggcaaggtattagtttttttttagggcccccaaaatccag

SEQ ID NO: 101894 - DNA, 404 bp, Homo sapiens
tttgtatttttagtagaaacagggtttcattatgttggccactgcgcccgacccacggctgaggttttttgagtgataaaatgtacacaacagaaatctaccgtgttaaaacacttttaagtgtgttcgctgaattttcttaaccgctttggcattcaatttgttgcaatatgttgaaaaatgtgtagaaaatctggctttagttggaagagcattttcatagcctttttatgtgattctggatatttttctttgattctgtagaaacattcaacaagtgagtagtagtttctttttctttttctgagatggggtcctactctgtcacccaggctggtgtcaaaatcttggcctcaagtgatctgcccgcttcggcctctcaaagtgctggggttataggtgcg

SEQ ID NO: 101895 - DNA, 393 bp, Homo sapiens
cggacgcgtgggaaaataggagttttcctgtgcttcttttagatggcatatgtatctttcactcttttttttcacctaggggatctttaataccttaaaagctcaacctgggcttggtgcggtggctcatacgtgtaatcccaggcctttgggaggccggggtgggaggatcacttgagctcaggagttccagaccattccaaagcaaaaacaaaaggattttgagatcagtgtggacaacttaacaaaacaccatctttaaaaaaaaaaaaaaaaaaaaaggggggcccttttgaaaggacacaacttacccaccccggtgtgggagagtaaaaatttttaataagggcccctaaattaaaatccctgggcggcgttaaaaaacagagagaa

SEQ ID NO: 101896 - DNA, 393 bp, Homo sapiens
  misc_feature (1)...(393): n = a,t,c or g
tgcagcctccaacttctggtttcaagtgttcctcccaccttgttttttgttttttgttttgtcttgtttttttgggggagacagggttttgctgtgttccccgggctgctgtcaaactcctgggctcacccatctcggcctcctaaagcgctgggattacaggcgcgagccactatacctggccaagattttatattttctaattgcttcacatactgaatggaaaatagcatgacagttataacagaagtaaagaaagtcacatgagagtccaccacctanaatataacttcctttttctttgttctggccttggttgggccgcatgtatttgttattgtatctcttacaaaaaaaaaaaaaaagaaagagcctcttttacctgattaattt

SEQ ID NO: 101897 - DNA, 402 bp, Homo sapiens
actaaaacttatgaacaacacatatatgatattattctgaatatttacagagagctccccggagggatgattttatttattatgttaattctctatttgtttagtttgcgacctgatcttaatagtaacaagtgaatgagttatcagaggaaatcagttaataaatataagagcaacaatgcctgtgaagaagtcaccacatgggccaggcacagtggctcatgcctacgtctgtataatcctagcactttggtaggctcaggtgggaagatcccttgaacccaggagtttgagaccagcctgagcaacatagcaagaccttatctctactaagaataaaattaaaaataaaaacatgaagaaatcaccacagccttagtttagtaacgataacagtatttt

SEQ ID NO: 101898 - DNA, 527 bp, Homo sapiens
tgatttttgtagttttagtgcagatggggtttcaccatgttggccaggctagtcttgaactctgacctcaagtgatccacccgcctcagcctcccaaagtgctgggattaccggcgtgagcaccgcgcctggcgacttgtgctaacgttaaaccaaaattatggggggtcattttttgtggacggagtttctgcactaggtcctagcagaccaaagtagttacatatattaagtgccacacagttacatggaaactttacagaccagtttttcctgaaaacagaaaatcccagtctgtctgaatcagaataataaggaagtcccttcttctttaacccttaaaaaaaaagtaacccgatgttaaccaatcagttatttttcattgttttgtttccttgctctcatcttacaaaacccactattttgctgtttctcattgggagctttcattctgttttgtagaatggaggctgccccattcataagttatgaataaacgccagttaggtctgtaagtaaaaaaaaaa

SEQ ID NO: 101899 - DNA, 443 bp, Homo sapiens
  misc_feature (1)...(443): n = a,t,c or g
nacccgggtcgacccacgcgtgcgggtgcgatcaacacaccgcaacctctgccttccaggctcaagccatgcttccacctcagcctcctgagtagctgggactacaagtgcatgccaccacgcccggctaattttttctttttcttttttttttttgggattttccgaaaaaacggggtttaatttttttgcccagggggggtttgaacccctgggggaaagggaaccccccccttttggccccccagggttttggggggggggggggggaggaacctttaaaaggccccgccgttggaaatttcaaaaagatattatcccccccttggtttccaaccggggggaccaaccagaaccctttttttaaaaactttttttaaaataaactttttattttaaaaacattggaggttcatggaaggggggaaaaaaaaatggaaaaa

SEQ ID NO: 101900 - DNA, 506 bp, Homo sapiens
gtacagggtgaggattgcttcagttggcaacgggaagccattcaggtttctgatgggcttttcgggggcacgtggcagggaagagggtttgtgtcacttttagacaatcagcttctcaggggaaactgtctgcactgtgtataccagaagctccacaaatgtctcaggacatcgatgacagcccctcagtagaagacctccctgttctggcccttctgccttgcccccggaggttccagctgtagttgatgaagcaaaactttccaagccagaggaggtgttacagagatggggtttcgccacgttggccagactggtctcgaaatcctgacctcaggtgatccgcctgcctcggcctgccaggctgctgggattacaggtgtgagccaccatgcccggctgagaatttaatatttcattcgtatttttatattgatgacatgttgaaatgataaaaaaaaatttgataggttaaagtatattaaaattcatttcatctgcaaaaa

SEQ ID NO: 101901 - DNA, 430 bp, Homo sapiens
ctcgtttcatcaaagacaatgggacatgaatgtgatgagcctgttctagcttgaagccaagaagctgtcagccgggtgtggtggctcacacctgcaatcccagcactttgggaggccgaggtgggcaacagggtgaagctccatctctacttaaaaaaaaaaaaaaaaaaaaaaacccccttccctcagggggggggggggggctggtcccccaattttttgggggggggaaaacaaaaaaattttttgacccagaaccttaaacccggcccgaaaaaagggggaaaccttttttttggaaaaaaaaaaaaaaataaggcccggggggggggggcccccccggggcccccacttactgggggggggaaccaggggaatttttgggctttggaagccaagggctccaggagatttgtatacgccccactcc

SEQ ID NO: 101902 - DNA, 399 bp, Homo sapiens
agactagatgagaatgaagctgatcattagtgaacaggagttaaatcctcaagcggcccaggaactcagcagtgctaaattcttaaattgttaaggtcttgagttaagaaacaaaaaatgcctgttgagaacacatgcagttttggcaggaccagtttgctgaagctgaacagatttgatcacttacatattggttagagagcattattctaaaaattattaatagattttcaaggctgagcatggtggttcacatctgtaatcctagcattctaggaggctgaaccgggaagattgcctgagcccaggagttcacaagcaccctgggcaacatagcaagaccccgtctctacaaaaaataaaaaaaaatcaatcgggtgtgggggcatgagcctgtgg

SEQ ID NO: 101903 - DNA, 421 bp, Homo sapiens
tgaggcgggagaatcgctcgaacccaggaggcgaaggttgcggtgagccaacagtgcaccactgcactccagcctgggcgacacagcaaaactccatctcaaaaaacaaaaaaaaaaaaaagccccgggggccccccgggcccccccccgggccggtttttttttttttttaaaacctaaaaaaaggggccttttttaaaaaaacccccccaaagggggggggaccccaggggaaaaaaaaaaaggggggggggcctttggaaaaaaccggggggtaaacttgggggcccaacaaaaaaaaaaacccggggtgggggggccaaccccccccccctttggggaaagggggggggccccaaaggggccccaagggcttttccttttacaaaaaaaaaacctcccccttcggggagaaaccagt

SEQ ID NO: 101904 - DNA, 404 bp, Homo sapiens
ctcctgagtagctgggattccaggcatactaccatgcctggctgtttttttttgttgggtggttttttgttttttttttggaatttaagaaaaaatagggtttaaccatgttggccaggctggtctcaaactcctggcctcaagggatccgcccacgttggcctcccaaagggctgggatgacagccatgacccaccgtacctggacacctttaatatatttttagggtttttttattctatcaaatacttttaaaaggggattgatataacagtcttattttaatgtgtcaatatttaggatatgctgggaaacacacctttgttactctttaaaaaaagtttagttgacaccataaaaatatgtctgcgtacataagttttcaagattattttaagggaagg

SEQ ID NO: 101905 - DNA, 420 bp, Homo sapiens
  misc_feature (1)...(420): n = a,t,c or g
cgacccacgcgtccggcagaggaaacagcaaattcagagaccctatttttgttgaggaacataaagccagcctggctagagtttaaatgagtgaggtgttaagaaagacgaagttgaggaagcagctgtaaagtcataggattttattctaaatgtggtggcagtaactgggcaggtataacatcataggattttattctaaatatggtggaggtataacatcataggattttattctaaatatggnggaggtaactgggcgtggtggcttatgcctgtagtcccagctacttgggaggctgagacagaaggctcacttgaggccaggagtttgagaccagcctgggcaacataacaaattcctgtctaaaaaaaaataaatacagtggggggttttatgtgtgtaaagggtggctgctt

SEQ ID NO: 101906 - DNA, 443 bp, Homo sapiens
gagcgtcaagactgggagagcaggctcgaggccatggagtgcgccttccacctggagaagagtgtcaaccagagcctcctggagctgcaccagctggccatggagaaaggtgacccccagctatgcgacttcctggagagccacttcctgaaccagcaggtcaaggccatcaaaaagctgggtgactacctgagcaacctgtgcaagacgtgagccccagaagcaggcctggcagagtacctgtttgacaagctcaccctgggcggcagcgaggaagacacctgagccaagatgggccccacagccacggtgtgccttccctgggtcaggccaccaggcgggggcgtgcatgttgccctttcagaacgttctcttcaatttttttcctttcagtgttaccattattggcaataaagttatctgttctcaaagcaaaaaaaaaa

SEQ ID NO: 101907 - DNA, 403 bp, Homo sapiens
caggcatgagccactgctcctgtccaatgcccagctaatttttaaattttttgtagagacagtggctcactctgttgcccaggttactctcaaatttctgggctcaagcgatcctcctgccttgacctcccaaagtgctgcaatttcaggcatgagccaccactcctggccaaaaaaaatcacgtgttcatcatgagcagtttcatctatttttacaaattcagctttgatctggaaggaatctcctccttcctctcatgaaagacattcccaggaggaaagccaagtctggctcgagctcacgtttttgttctccttctggagaggaggtgggtgggctgggggtacagcaagccctccctgtgcagggagggggcttgcattctggaggggaggacaatga

SEQ ID NO: 101908 - DNA, 453 bp, Homo sapiens
  misc_feature (1)...(453): n = a,t,c or g
aaaatatgaacaaagcctccaagaagtctgggattgtgttaaacgaccaaacctaagaataattggtgttcctgaggaagaagagaaatctaaaagcttggaaaacatatttgggggaataatcgaggaaaacttccccggccttgctagagacctagacatccaaatacgagaagcacaaagaacacctgagaaatccattgcaaaaagatcttcatctaggcatattgtcatcaggttatccaaatgagaggtgacaatgtgctagtagccctcactcgctctcggcgcctccttggcctcggcatccactctggctgtgcttgaggagcccttcagcccgccgctgcactgtggaagcccctctctggactggccaaggccaaagcgggctccctccgcttgtggggaggtgtggagggagagctcgcgggccaatgagggcttggcggn

SEQ ID NO: 101909 - DNA, 428 bp, Homo sapiens
ctccttttccctgtttaaatgacctattttaaagtatgtacaattcaaagaaagagcctaaaataaaaattaaaaagaaatcatagggagcaatttgtggctcacctcttgtaagaatacaggacttaatgatacaagtattgtttcattcttttcatgctgtttgctctgattttattattttttcatttagttcagttgtgtctaaaattcttaaagtcatcttgctggtagcgttggtgcacgcctgtcaccccagccactcgagaggctgagcagggaggattgcttgaacccaggagtacaaggccagcctgggcaacctagtgagaccttgtctcaaaaaagaaaaataaaatgctaaagttattttatattatctttaggataagggaggatatatataaataaaattatatctaacattt

SEQ ID NO: 101910 - DNA, 425 bp, Homo sapiens
cttttatttcagtttcttttaagtatagcaaacacattccaaataatatgcatctgaagtttttggttttgtttttaaattttttttttagggatgggttctggctgcgtagtggctaaagtgtagtggctattcttaggtgcggtcatagctcactacagcctctaactggcctcaagcaatcctcccacctcagcttccagggtagctgggattacaggagagcaccacactgaagtttctgttaaatagaatgtttgctgtagatttttagttgatgtcctctgttaggttgaaaaccttcctttattttcttgtgaaatttctaagagatttttaaatcattaactggtattgaactttataaaatgatttttctgtgtctgagatgatcatgtgattatttttcctgtttatgccccttg

SEQ ID NO: 101911 - DNA, 401 bp, Homo sapiens
ctagaagtcccactcctaaacacatctttattactcgcatcaggagtatcaatcacctgagctcaccataggctaatagaaagcaaccgaaaccaaataattcaagcactgcttattacaattttactgggtctctattttaccctcctacaagcctcagagtacttcgagtctcccttcaccatttccgacggcatctacggctcaacattttttgtagccacaggcttccacggacttcacggcattattggctcaactttcctcactatctgcttcatccgccaactaatatttcactttacatccaaacatcactttggcttcgaagccgccgcctgatactggcattttgtagatgaggattgactatttctgtatgtctccatctattgatgagg

SEQ ID NO: 101912 - DNA, 426 bp, Homo sapiens
tttcgttcctgggtgtataaagagggttttcattgggcgttgccagtgatcaaagtctttcctgaggacgggaccgtgtttcagggatgaggtttccctacattgtctaggctggtctcaaactcctgggctcaagccatccacctgccttggcctcccaaagtgcttggattacaggcatgaaccaccgcacccggccagcaaagtaacgtattgtgggtaacagaaagcacaggagctgatttgatcatcagacaagaataaaaccatctgccatgttttcccttttttaccttggccaccaggaagctctggtgcattcaactgggtttccatcacttgcaatcaagagacctaatgaatgcagctgtcacagagctggagcttgggtgtcctgggacatgttgatggtgccttgcttcctct

SEQ ID NO: 101913 - DNA, 274 bp, Homo sapiens
  misc_feature (1)...(274): n = a,t,c or g
ccgggggtnaagggttttttttgcctcccccccccgggaggggggaaaaaaggggccccccccccccccccctttttttttggtttttttttaaaaaaggggaatttcccctggggggggggaattttttgaccttggaacccccccgcctcgcccccccaaagggggggaaataagggggggaccccccccccccgggtttttttttttttttaaaaaaaaaacctaaaccccttttaaaagggtagggggttttttcccccacccctggttt

SEQ ID NO: 101914 - DNA, 419 bp, Homo sapiens
tttcgtgttggctgacaggggaggccggctcctaagtgggctgtcactgtgtttagtaattagtgagctgtgggaggatagtgtctccctgggtccgtaagggctccagacgccacagcaaggagaatacagaaataagaaaacatattatgggctgccacggtggttcttgactgtcatcccagcactctgggaggctgaggtgggaggatcacttgaggccaggagttcaagaccaacctggccaacatagagagaccccatctttttttttttttttttttaaaaaggaattttttttttgcccccagggtggaagggaggggcccggtttaaattaaaggcaacccccccccccggggttaaccccttttttctgcctaaaccttcggaaaagggggaaccaagggcccccctca

SEQ ID NO: 101915 - DNA, 405 bp, Homo sapiens
tttcgtcgcgggctggcggtggctccacgggtcttactttgttacccaggctggcgtgccatggtgcagtcatagctcactgcagcctcaaattcatgggctcaagcaattcacctcagcctcccaaagtgctggaactacaagcatacaccaccatacccaacctgctgaaactcagcctgctgggacgagtcttctttcccccttcttgtttctgccatggaagtgtgtggacagccccattcatgatgacatgtgacactactggcttttcccggcagtcacaccccctgacccagggcctgccagcttggcaattgcttcttcattcttgaagttcctaacccccatgaatccacaaccataaccatggccacgcgggtcgaggtgggctccataacgccg

SEQ ID NO: 101916 - DNA, 430 bp, Homo sapiens
tttcgtccaagatcacgccactgcactcccgcctaggctacagagcgagactctgtctccaaaaaaaaaaaaaaaattttttttttggcccgggggggggggttaatccttgaaaccccaacctttttgggaggttgaggtaggcggaccttttggggccagaatttaaaaatcaccctggccaggggggaaaacccccttttttaaaaaaaaggcaaaataagcggggggggggggcagccccttgaaatcccagggcctgttacggggaaggttgaggaaaaaaaatctttaaaccccacgggggggaggttgcaggaaccaaaaatggccccattgccctccccctggggggaggggaaacctaaaaaagggaaaaaaaaggccccgtttttttctttgttggcggacataataaattcattcatgt

SEQ ID NO: 101917 - DNA, 428 bp, Homo sapiens
tttcgtggcatcaggtgggtatgccatgtattgtttttctacctttctttttttttgagacagggtcttgctgtgttgcctaggctgatcttgaactcctgggctcaagcaaccctcttgcctcagcttcctgagtagctgggattacagacaagtagctaggattacaggggagtgccactgcacctagcttgtttttctaaccttttattttgaaataattacagactcaaaagaagatgcaaaattggtacagaggggtaccatggatccatcacccaacttccttcaatggtaacatattatgccagatatttttggcatccatgtcaaaatactagagatagagacattttccccatgtgcatttttgatttttttttttttttttttttaaaagggatttttcttttccccccaaggggggg

SEQ ID NO: 101918 - DNA, 422 bp, Homo sapiens
tttcgtcccgcctcagcctcccaaagtgccgttattactggtgtgagccaccgcggcctggcctcctcctgcagaatttttcttaatgcgttgatttttaatcagcctctatgttcaaaattgaatttttctttctttctttctttcttttttttttttgggaaagggagtttgttttggcccccagggggggggggggggggccaattttaacttaatggaagccttggcctcggggataaacccattcctttggcttaacctcccgaggaagggggaataaggggccccccccccccccccggattattttttggttttttaaaaaaaaaggggtttccttgggggggcccggggggccctgattccctgaccttgggaacccccccccccggccccccaaaggggggggaatacggggg

SEQ ID NO: 101919 - DNA, 422 bp, Homo sapiens
tttcgttgttggccaggctggtctcgaactcctgaccttaggtgatccacccccttccccttggcctcccaaagtgctgggattacaggcgtgagccaccgtgcccggcgctccagcagctttcaatgcactcaaatacccctctttccagaaacccttcctaatcttggttttggtagcagacatggtcgaggtttctcttcccaggtccttcccgctcagtcctccagctttgatctggacttaatttctgtacttggatattgaatgctgtctcacatttcacttggcccaaacagagctcttggttttattcctcctcacctcagtaaatgggaaaatggctccactctccgctccattgtgctatctcaaatcgagggtttatcttcaaccctctcctttcctcatcctgtgagctc

SEQ ID NO: 101920 - DNA, 429 bp, Homo sapiens
  misc_feature (1)...(429): n = a,t,c or g
ctgcgtggaactcccgggcctacgatttcgtgaacactgttgtnnctgtgcggacttagttgacgatcactgtttcctaatgcaggcccagtggttacaagtagagaattaattcagtaagattgaggcctttggctgggattgtatgggccagagaggaggagggacagagagatttttctgcagaactagactaaaaatccatctatgggggtaatgtgctgttggccaatatggcatttgatgacaaagcacttgtgaatcaggtagcctaatataaaaaactgcatgtggctgggcatggtggctcacgcctgtaataccagcactttgggaggccgaagtgggtggatcacaaggtcaggagttcacgaccagcctggccaacatagtgaagccctgtctcggggaggagccaagatggctgaa

SEQ ID NO: 101921 - DNA, 411 bp, Homo sapiens
tttcgtgtgggaggatcatctaagcccaggaagttgaggctgcagtgagccatgatagtgccactgtatgccatcctgggcaatggaaatgagagacccccgtctcaaaaaaaaaaaaaaaaaaaaaaaggggggggggggggggaaaaaaaaaaaaaaaatttttttggggggggggtttccgggcgaaacaaatttttttaaaaaggggggggggggcccaccacaacccggggtgaattttaaaaagttgggggggaatttttaaatttttgggggaaaaggggttttttaattttttcctaaaaaagccctggttttttaagtcccctaaaagggggccaaaaccctaattttttttttttgggccaaaaagaatttaaaaaaacaggggtttttttgaaaaaaggt

SEQ ID NO: 101922 - DNA, 419 bp, Homo sapiens
  misc_feature (1)...(419): n = a,t,c or g
tttcgtgcccgcaagactcggtcagttagttaacaaaatatccaatattcacaaatgaatcagtgagaaatcaaatgaacactgaggttgtcgtgaatatggcatcttcttaggtgagncctttttttttttttttttttttttgggggaaaaaaaattttttttttttccccgggttggaggggaggggcccaatttgggttttttggaacccccccccccggggttacccctttttttttgctttacccccccgaggggggggaactaccgccccccccccccccccccgcggaaatatttttaaataaaaaaataatgggggaataaaaaaaaaaacggttttttttttttttccccggggggggtggatttttctgacctaaaaacccccccccctcgcccccccaaaggggggg

SEQ ID NO: 101923 - DNA, 434 bp, Homo sapiens
  misc_feature (1)...(434): n = a,t,c or g
cccacgcgtccgcagacatgtgccaccaggcccagctacttttattattattagtagagacagggntttgccatgatgggcgggctggttttggctcctgatctcaggagatccacccgcctcggcctcccaaagtactgggattacagcactttggattaatttattaaatacccattaccctctaccacaaagaagggacctaatctgaacctttaaccatctggcctctgggcccaggccctcagattgacttgatatgaatggcaaagatcccatcaccaactgggcctaggctggccttagggcccagatctgcatgggaaaagtgtggagccagggagcggaaggtggggagcctgcccaggagggtccttgcagcagcgacctcctgctctggtctctcctggccaccccaccagcccaagggaggc

SEQ ID NO: 101924 - DNA, 422 bp, Homo sapiens
  misc_feature (1)...(422): n = a,t,c or g
ctttgtgtgtgtgtgtgtgtgtgtgtgtgtgtgtgtgtgtgtgtgttcttttttgttgatggagaaagggtcttgctctgtcacccaggggggagtgcagtggcacaaacatggctcactgtagtctcaacttctcgggctcaagtaatccttccgtctcaccctcccacgtagctgagactaccggtgtgcgccccatacttggctaaactttctgtatattgatattgatgtgggtggaaaaaatgacagcttttacaaagtacatagaggcactaatactacttgtataacttctaaagagacccctagagttttctatatttttatcccagagggacgctctataacttatatataaaagcacctggcgccaggagaggaggctcatgcctgtanccctaacactgtgagagactggt

SEQ ID NO: 101925 - DNA, 829 bp, Homo sapiens
attttattttattttattttttattattttagtttttgttttgagatgggatctcgctctgtctcccaggctggagtgcagtgccctgatctaagctcattacaacctctacctcccaggttcaagcgattcttctgcctcactttcccgagtagcagggactacaggtgcgtgccaccacatctggctaagttttgtattatcagaagaagataggccgccattggccaggctggcattgaactcctgacattaagtgatccacctgcctcagcctcctaaagtgctaggaatacaggcgtgagccactgctctgggccttcctttattaatttcttaaactggcagatttagaatactaaacttccttctattcttagaataaaccctatataatcagctatttatttaaataacatggtctctgcaatttctcctggtttccattttttctcataataggcatttttttctaaaaaacaaaaatgaatgttcattagtgagacaaaactataattttggttttttcttctttctctcttccttcctttttaaaatttgtattctccagttttgctaataatgttatacaattttacaagaaaaaagtgagtaggagagctgtttttctatagtaacagattctgtgaaataggtatcatgccaggtgaggtggcacgtccccgtagtcccagctactcaggaggtgaagcagaaggaccacttgagcccaggaattggagactgtagtgtgctgccatcatgcctgtgtatagcttctgcgctacagcctaggcaacgtagcgagaaccatctcagaaaaaaaaaa

SEQ ID NO: 101926 - DNA, 419 bp, Homo sapiens
  misc_feature (1)...(419): n = a,t,c or g
ttctttgccagatagatgtaaagtgagaatattttttgggttatctattcatttttaagtgatgtctttgtttagtagacatttttaattttggtgatgtccaattaatcaatgtgtcccaaatggctattgttttttgtgtcctagctaagaattttttttttttgcctgtccaagggcatgatttatttatttattttttgcctgttcaagggtcttctttgtatttttatgaaatatttacggttctagcttttatgtttaggcccatggtctattgtgaattgatacttgtatataaaacaaggcaaggacaaagntcttttttctgctgctgcttctttctgaaaggtacccagctgttccaacaatgtttgggaaagactgttttttccccactgaattgacatggggctttg

SEQ ID NO: 101927 - DNA, 427 bp, Homo sapiens
ggctttcttcttctgagaagagtttgcttattatgaaaagggcataaagtcaggaaaggaatgtgtgagctttggtagtttgtgggtgtcagcaagcttttgatttttattttattttttttcaccaagggtcatgccagaacaagctttttattaaacatgctaatttttctgcagatatggggagaatggtttaatatcaagcaaaactttttattgtgatcacaactgtcttaatgccattctaggatgaagtgtgtgtgtgtgtgtgtgtgtgtgtgtgcgcacacgcgtgtgtgtgtgtgtgtgtgtgagagagagagatattagatatctttagagatgcttctgcccacccctctctctcttgtaagagggggaggactcccttcttttggacgctctggtgacaaaaatatattataag

SEQ ID NO: 101928 - DNA, 433 bp, Homo sapiens
aacccctggacacggaatctccctctgtcgtccaggctggagtgcagtggcaccatctcggcttaccgcaacctccgcctcctgggttcaaacaatactcctaccttggcctcctgagtagctgggattacaggaatcaaggttgctaagagaccacctgtgctgaatacactttgttctggcaagagcagaaaactgagaagccgtgttacctaccactacctgggattaattcagggagcgggataattctggatatgactggtaaaaactggatattaatttctactactactcccaaaagtctagaagatgaaattgtgggaagacttctaaaaattttgtttgttatctttgttgacttaatttctattatatatgttgggataacttcttagaaagctgacttcctttccatgtacatttcaaactg

SEQ ID NO: 101929 - DNA, 422 bp, Homo sapiens
ggatcacttgagctcaggagtttaaggctgcagtgagcagtgtttgcaccactgcgctccagcctgggcgacagagtgagaccctgtttcaaaaaaaaaaaaaaaaaccccggggatgggaatttttaaaatttgggccccttaaaaattttttcccctgggggggggcctttttttttttgggggggtttttaaaggaaaaaaggggtaaatttttaggccccccttttgttgggttgggaaatttgggtccccccaaaatttttttgtgggcccttaaccttttttggggggaaaaaaaagaccccgtttttgggggggggtttcgccccgggccctttcccttttaaaaggggattgggtcctttaaaaaaagagggtgggggggccctttttgtttttcccccggggggcccgggtgg

SEQ ID NO: 101930 - DNA, 456 bp, Homo sapiens
cggacgcgtggggcagtgagtcaaggtcatgccattgcactccagcctgggcaacagagcgagactccatctcaaaaaaaaaaaaaaaaaaaccccgcccccgggggtaaggggaaaattggggggactgcaaaaaaaaagggccgaaattttttggacgcaaatattttggggccaaattcccgcccggggggggccttttttggggggtaaaccgcccccccggggaaaaaaaggggttctcccgggccaatttttggggggggaaagggggggcctaaaaaaaaaattctttccttttaaaaggcaggggggggggccaaattttttccttccccggtgggaaccccctttttccggggattttaaaaagggaaaattcttttaaaaaaaaaaaaattctctaaaccggggggagggaacccggaaaacttgtccccaaccaatttttttttt

SEQ ID NO: 101931 - DNA, 406 bp, Homo sapiens
ttgaaaacttccttgggaaatttttctttcagcctcccctccctgggggaccccagggagggggcccacacccaggaggggaaggcggccagccccgtttgggggccgggaccgtttaaaaaattttggcggaattcctttacaactaaataccccaaatttggttttaaataaaatggtaaaaaaaaaaaaaaaaagggccccaaaaaaaaatggggaaaaaaaaaaaaaaaaaaaaaaaaaaaaaaaaaaaagggggggggcccctttaaaagaaaaaaatttttccccccgggggggggggaaaaaatttttttttttggggccccaaaaaattattttgggggggggtttttaaaaacccggggggggaaaaaccccgggggcccccaaaataaattgtcgg

SEQ ID NO: 101932 - DNA, 441 bp, Homo sapiens
ggcccggaattccggggccgacccacccgtccgttggaaacttcctcgggaaaattttctttcagcctcccctccccgggggaccccagggggggggcccccccccaggaggggaaggcggccacccccgtttgggggacgggaccgtttaaataattttggttgaattcctttccaactaattaccacaaatttggttttaaataaaatggtaaaaaaaaaaaaaaaaagggccccaaaaaaaaagggggggaaaaaaaaaaaaaaaaaaaaaaaaaaaaaaaaaggggggggggccctttaaaaaaaaaaaatttttttccccgggggggggggggaatttttttttttttggggccccaaaaaaaaaatttgggggggggttttaaaaaacggggggggggaaaaaacccgggggccccccaaaatataagggggggg

SEQ ID NO: 101933 - DNA, 464 bp, Homo sapiens
  misc_feature (1)...(464): n = a,t,c or g
cggaattcctgggtcgagctcagcatgtgctccgtacatgtagcacagtggaaaaacttgagctttgctggcaaagacagacagaatgagcttgaatctcagcccagctatggcttttctagtcctgtggctagaaaatgacttagtctcttggactttggttaacccatctgcaaaacagggatggcacccacctcttagaaagttacagtggtctnnannncataaagagagggaacggaacgcacctttccggggttaaggggggccaggccccacccattctatggggggctccaaaaaggggaaaacttagggggttaagaaatgctttggggggtttaatggaaaaaaccatggggggggggggttgcggccttgggggaccccggggggggggcccccccggaaggaaggaacccttggatttctcccagggttttgggttccggccaccccaaaaa

SEQ ID NO: 101934 - DNA, 656 bp, Homo sapiens
tgcgtgcgcagattggaaggccggccttccagggactgaggaggtggaagggggtgcaggggtcagaaaaaacagtgcggggggcggggttgggtccacgctctgggtctctcaggtctgtttttcctgggcagcctcactctagggcaggtgctccctcctaggtgttcccctcaggggaagtaggcagggtcaccgggcaagcagcgcacgctgtgggcagacactgtcccaagtcttagcctgcgtgaactcactggcgccacaaccccatcgcggttttgtgatcacccctattctacaggaaactaagacacagagaggacaagtcacttgaccaaagtcactgagctggctgggcgctaatgctcacgcctgtaattccagcactttgggaggccgaggcgggtggatcacctgaggtcaggagttcgagaccagcctgaccaacatggtgaaaccccgtctctactaataatacaaaattagccgggcatggtgctgggcacctgtcatccaggctactcgggaggttgaggcgggagaatcacttgaacccaggaggtggaggttgcagtgagccgagatcacatcattgcactccagcctgggcaacaagagtgaaactttgtctcaaaaaaaaccaaaaaaacaac

SEQ ID NO: 101935 - DNA, 420 bp, Homo sapiens
  misc_feature (1)...(420): n = a,t,c or g
gggactgcagccgggggccacctccacacttagctaattttggccttttggaaaagacggggtctaaccatgttgaccaggctggtctcaaacccctgagcttaagggatccacctgcctcagcctcctgaagtcctggaattacaggggggagccaccgggcccagttttaatttatttttaaaaggggaatggctccaaaagggttttgaacattcttagcaccagcaatttttttttttcacctttacacctgactggggtaggcctggttgccatgacatcactggggaaagcaaccacctgggggactgctgggggatcagtcaagccttcagctgaccagctttcctttttatggtctggaccaccacagggcagggacaggaaagcaccaattcttcattgagaacagaactn

SEQ ID NO: 101936 - DNA, 463 bp, Homo sapiens
ggccctgaattcccgggccgacccacccgtccgatttttttctttatgaaatagacctcccatttaaaaattaaaaagggttccccccccccccccggggggggggaaaaaatccccctttccccccgcccccattttttttttcctaacccccttggaaaaaaaaaattaccttccaaacccctttaaccggggtttttggggcccccaaaaattttaacttttgggggggttttaaaaaaattggcttttaagggaaaaaacttttctttgggggccccccttttttaaaaaggggcccaaacccttgggggggggttttcccccgttcaaaaaaaaacccccggttaaaaaccccacttttgggacttacccaaggtgggaaaacccccccaaagcaggggggggccttgttttttttggtgggggggttttggggggaaagaccctttattgtttggaa

SEQ ID NO: 101937 - DNA, 366 bp, Homo sapiens
cagcgagggcgtgcggagtttggctgctccggggttagcaggtgagcctgcgatgcgcgggaagacgttccgctttgaaatgcagcgggatttgaagttgggatatctaaagcataagccttagaaactctgcaaattatcacaagagaaggtcattcaaataaacctagatatgctgtgacatttgagtcacacgagatgggcacagtactgcatcttgttgaacaggagcataccgtgggctacataactgcaagctgttcggcactaaagtgttgaattgaatctggagggtttttgaatgactacatttgactttttacagcttgttgccaagctggatttgaaggaagaccccttgtggcc

SEQ ID NO: 101938 - DNA, 576 bp, Homo sapiens
ttttttttttttctaaaaagagacagagtctcccctttgtcgtccagggtaaagtacaagtggcatgattatagttcactgcaacttcaaactcctgggctccagtgatcctcctgcctcagattcttgagtagccaggactataggcacataccaccatgcccaactaatttttaaaaatgttttgtagagatggggtcttgctgtgttacccagggctggtctcaaactcctggggctcaagcagtccttccaccttgggcctcccagaggcactggggtttacagggtgtgaggccactgtgcagcctccttttatctaattgtccccacagcagacttgtctggtcttggctattttccggttgttaaggtgtttcaggatggaggaatcagttcctgagatagttattaagttctgcctgctagaaagggacagtaagtgggttgatatcattctagacttgttaagaaattgttcagaattttgattgtttttcatagcagcttgattaaaatacagattttaataatttccttactacttttataggtagtgctttcaaaaaaaaccag

SEQ ID NO: 101939 - DNA, 432 bp, Homo sapiens
gaagcgttcgtagcgtggatcctccagagcggccgaatacagctggagggaaattagtgagcattatattaatactcttcacaaaaaaatagggtaccaagtgataaattattatttgcattgtaaatgtatttggggagtaaaaagataaaactatctcactctataaaaccctaaaatccaataaaactggtcctacactgtgatattacaaagtaggtccttacagagtggttacaagtatacaaagaaacttgttataaagtaaccccatgacaagcaaacttgaagactagctatcattgaataacttgttttttcactgcaacctccgcctcccaggctcaagtgattattgttctcatgcctcagcctcccgagtacccgggaccacaggcatgtgccaccacactgggcttaatattggtaacg

SEQ ID NO: 101940 - DNA, 374 bp, Homo sapiens
aatacatgtgtagtaaattcttcttcttggagtgcagcggcgcaatctcagctcactgccatcttgaactcccaggctcaagtgacccccccccccccacttgaaacttttaagtaattgggactaccggcacatgccaccatgaatggttactttttgaactttttggaaagatgaagcctcactatattgcccaggttggtttcaaactcctggaaagaaacttcttgaaaaccaaaaaagtatttccctaatataccagtttaaatatttaaactccatggcattaaaattatgttatatccaccgacatactttagctttcaagaattaagggttttctgcaaaatttcccccttaaataactgaaaaat

SEQ ID NO: 101941 - DNA, 1501 bp, Homo sapiens
  misc_feature (1)...(1501): n = a,t,c or g
ttagtccacgtggtggaattccatctttaaaacaagtctattcatcactgactacaaattcaaggccttcacagcacctgttctgagaagaggcgcttcagcgggcacgtgaggaagaagagaaaaggaaggaaatcacaagccatttccagagtaccctcacggacatccagggccagatcgagcagcagagtgagcgaaatatgaagctctgtcaggagaacacagagcttgcagaaaagctgaaaagcatcatcgatcagtatgagctcagagaggagcatctggacaaaatatttaaacacagagaactgcagcagaagctggtggatgcaaagcttgagcaggcccaagaaatgatgaaggaagcggaggagcgacacaaacgagaaaaggaatatttgctgaaccaggcagcagagtggaaacttcaggcgaaagtgctgaaggagcaagagacagtcctgcaggctcagctcactctctactcaggaaggtttgaagaattccagagcacactaactaaaagcaacgaggtgtttgccacgttcaaacaggaaatggacaaaacaactaagaaaatgaagaagctggaaaaggacacagccacatggaaagcccgatttgagaactgtaacaaagctctgttggacatgattgaagagaaagcactgagagctaaagaatatgagtgctttgtgatgaaaatcgggaggctagagaacctctgccgtgctttacaagaagagagaaacgaactccacaaaaaaatcagagacgcagaaatatctgaaaaggatgaccaaagtcagcacaactccgatgaagagccagagtcaaacgtctctgtggatcaagagattgacgcagaggaggttaatagtgtccaaaccgccgtgaaaaatctggccacagccttcatgataattcatcatccagagtcaaccccgcaccagtccaaagaaacccaacccgaaataggcagttctcaggagagtgctgacgccgctctcaaggagccagagcaaccccctctgatcccttcacgggattcagagagtcccctgcctcccctaactcctcaggctgaagccgaaggaggcagtgatgctgaacctccctccaaggccagtaattctcctgccgggttgggagcagaaacccaatgcgagggtctccctgttggagcacaggctgatcaggcgtcctggaagccagaggcagaagcttccggtcaggccccacaggctcccaccgaggcctccctacagaagatggaggcagatgtgcctgctccagcatgcgcagcagaagagcacgttgcagccatggtgcctgcatgcgagcccagtaggcagcccccacgagcagcagcagaggagctgccagtaggggcctcagctgggccccagccgcgcaacgtggctganaccaatctgccaggcgtcgactaaacctcaccgggcctttaaaagctttcttcctggcttttttgatattc

SEQ ID NO: 101942 - DNA, 375 bp, Homo sapiens
attacagggatgagccactgcgcccaggccaaaatctttttaataagatagaggatccagggttagtttttgtagccttggctggcccatcagcctctgatgtgcttgaatttctggtccctggagtggacacagggcttagtgtggctatgctgggttcccagggccttgctgaaatgccagtacacttcttggcccttgtgaggcccagagagcaggatggtgccacagcctttgagggtgtccagggtcagctggtcaaaggtgagaatcttgtccccagccttggggatttggctgcaggcccaactgctcatgtgcagtgcacacaccttcagtttgggcacctcctgaacatggtccccacaatgtatt

SEQ ID NO: 101943 - DNA, 459 bp, Homo sapiens
aatacactctggctccatcttcttgatctgtactgcctgagcactgacaataatataactctctgcggcaaacatatttatctagtatctggatttgccaatgtaggggctttcatctggggctttatcaatttcagcatactctgatggataataatttagtggctcaaatttagcatcaattttataaaaggccaattcctattccagctcatattgcttctgacatgctcgcgttaattctatggtcttctgttttagcaattcattttttgtgtttaagtcactcttgagttcctcacagctctgtttctgtaacatggcctcctcttttaatgatttattcaatttatcttgatttttaatttcctcaaggaaccttgtttgtttgctcttaagctcttcagattctatcatctttttctctaggactctttccaggctttctacctcttctaa

SEQ ID NO: 101944 - DNA, 370 bp, Homo sapiens
aatacagtttggtaatatgcagacttgccgccctatattccacacaaattcaagtcactggcaaagaaacacaattgtaaagcgaagccaaatctctctcaccatttcattaggaacattaaatcaccacaggaatctgttgccccaatgaccttttctggttccaggcctctctctaagccccgagcgatatcattgctctggtataaatagaagataaagaaaggttacagcttggggaaagagtaaagaaactccctgcttctaggctcaacaaaacataacctaaggtaatatctcctgatatcatttctttcaccaattcagacaaattcttagaacttaatactaagtactgaccgtgaccatg

SEQ ID NO: 101945 - DNA, 373 bp, Homo sapiens
aatacatcggggggtggagaaccaaatggctggggaacagggatgggataaagatgtttcagtgtattgggtgggtgcagtggctcatgcctgtaatcccaacactttgggaggccaaggtaggtggatcacctgaggtcaggagtttgagaccaacctcccataatgctggaattacaggcacgaaccaccgtgcccgggctcatctttctttttcttactttcccccatgtgaactggctaagttttcatatcattgggtcatgtatatcataactatcccactcagagtcacattcctattggactaatcccaacagttaagtggactggactggaattgttgcattttgggacctgctaaactcgaaac

SEQ ID NO: 101946 - DNA, 377 bp, Homo sapiens
aatacacgtggcccttctttaatgtacacatacgcgtgcccaagcacacgcgcacacacaccatttattttactattttttatatatttttaatttttttgaagagacagggtcacattaaattgtccaggcctgtcttgaactcccagcctcaagtgatcctcctgcctccttctcccaaagtgctgggattacaggcatgagccaccatgcctggcccacatcatgtattttaaaagtgaaaatggcattatgttccatcaattgctctgcagcttgctttctctactgaacagtaaagtgatctatatagtgagcaagtccatacatgtatactggcttccttttctgtgctgcagagtattccatgggaatag

SEQ ID NO: 101947 - DNA, 832 bp, Homo sapiens
ttttttttttttgagatagagtcttgctctttcgcccaggatggagtgcagtggtgcgatctcggctcactgcaacctccgcctcccgggttcaagcagttctcctgcctcagcctcctgagtagctgggattacaggcatgtgccaccacgcctggctaatttttgtatttttagtagagacgggttccaccatgttggccaggctggtctccaactcctgacctcaaatgatccacccacctaggcctcccaaagtgctgggattacaggagtgagcccccgtgcccagccttgccctgctttctaggagatggagttttctgaatttttctgtatttaggttttctgtactattttttgtccacttgatgcaaacttcttcagctgtgtagaaactttatgaatagatgagtgcttgagtgtctccagtctctaaagtggctgcttttattctttcttcaaagttaataacatgttgcaagatttttggacaaaatattatggtgtgtcataggaaaagcaccatgaattatatttaggtatagcaagtcagatcctttgaagtgactctgtctctgttcttagaagggttcttggaattggctgtggtttgaatctttctactgtcagaggagacccattaaaagccagaatctgcataaagctttctttacttcaaacactgaagctgtaggcgagccatcccgtatcgactttatactcaaagaaggaaaagccagattgcagtgagtgggtaggacagctcacatccaaatgaaagtagggtctcaagtaacccaagggtggccgggtacggtggctcacgcctg

SEQ ID NO: 101948 - DNA, 384 bp, Homo sapiens
tacagtgtgtcaggtgcttcatatatgtcttgttcagttcgtactgctatagcagaataccacagaatgggtaatttgtaaagacgagaaatttatttctcacagttctggaggctgggaagtctaatatcaaggcgcgggcaggctgagtgtctggtgaggagcacggtctctgcctccaagatggcgccttgcttcctctggaggggaggaacgctgtgtcttcacacccgagagggcagaatatgatgagggccaagtgctgaccgaagcctcttttatgggggcttctgacacttttcttgagggagaatctcttatggccttaactccctcttaaagggagatcccctccttttagccttattacatgtgtccttttcg

SEQ ID NO: 101949 - DNA, 391 bp, Homo sapiens
aatacatgggttttctgttttgttttgctttttagagacagggtctcactctgttgttcagtcaggagtacagtggcatcatcatagctcattgtaaacatgaacctcagcttcccaagtagctaggcgtacaggcatgtgtcatcacatctggattttttttttttttttaaaatacagagaatccttatattgcctaggctgatctcaaacttctggcctcaagaaatcctgctttggcttccccaagggctgggattacagccacggccccaggttttagttgggaattcttaaaatatgccctttactaggttggggtttacttcttagtttaccaaaaactttttccaccttctattttttttttcccccttttttttttaccccc

SEQ ID NO: 101950 - DNA, 376 bp, Homo sapiens
aatacatatggggaaaaggaaaaatagtaactccacagtggagacagctggcaggcaccacctgaaccaagagatcaaggttaacatcagcagcgataagtcccattggtaccatgtacctctcgaataatgtgatgagaaggacatttcacctctgtgtggcacccagaagcataaccccagtctcatggcaaaacaccagacacacccaaattgagggacattctacagaatccctccctgtactctaatgtcagaagtcaggctgggcgtggtggcctgcgcctgtaatcctagcactttgggaggccgaggcaggcagatcacctgaagtcaggagtttgagaccagcctggctaacatggtgaaaccccat

SEQ ID NO: 101951 - DNA, 375 bp, Homo sapiens
aatacaatgccttcataactgcttgctcgggattgagaggattctaaatgctcacagatggcgcgctccctctctctgtctcttcctctctctctctctctctctctcacacacacacacacacacacacactctctctcagatttccagctcacagggacccaggccccgccccccgacatgctcacctcgccgctgcactgagaagctctcaccaaccccgtaggtgtgtctgcagtaagtggacacccggccccgcttctgctacaggaggtccttctgggtgttccaggactcggagacaggccgctccagctccgtcaccgcccggtactcccccacgtcggtggcgaagcgcaagaactcctcctgggg

SEQ ID NO: 101952 - DNA, 379 bp, Homo sapiens
  misc_feature (1)...(379): n = a,t,c or g
aatacagtggttctttgatttctaacaatttatagcaattgtcttttaatccactgataggaaagaaagtaaaactaagaactgtatttattggaaaacagttcctattccttttgggtgggggcgtgagggaggcaggggctcactctggtgcccaggctacagtgcggtggcacaacctcagctcccacgctaagcgaccctcttgcctcagcctcccaagctgtgaccacaggcacttgctaccacatccagctaatttctgcattttttggacagattagatcccgccatgtcgctcaggctgggtccagacccctgagctcaagcaattcactcaccttggactcccaaagagatgaaaccacgggcttgaacn

SEQ ID NO: 101953 - DNA, 479 bp, Homo sapiens
aatacattatcagtggtgtttattaagcattgattaccaagccagatggctgtgctaagggctttaaataaaccatctcattgaatttttaattctaaggggcaatgattattttatagatgaaatatctgaattttcagatattaaagtaactcgtccaaggttataaaactgtacatttaagtgacaggttaggatttgttccaaggctatagagtctaaatccatgttcttcaccatagaatacagactcttttcttaacaaaaaaagaaaaaaagataaaatcccttggcgggggggcccatgagtctaaccccacccttttggggggccaaggtagggggaccacctaaccccagaattttgaaaccggccggggcaacatacaaaaaccctttctttaccaaaaaaaaaaaaaaattatcccccgggggggtgcccttgcctgcgccccctatttttgtggggggcggcgggt

SEQ ID NO: 101954 - DNA, 474 bp, Homo sapiens
aatacactccctctgtaatttatttgtaggtgagataagcaaattatattaatataagcaagatgatgaagaggaggttccaagaacagctccagtctacagctcccagtgtgagccatgcataagacaggagatttctgcatttccaactgaggtatcgggttcatcccactatggcttgtcagacagtgggtgtagcccacggagcatgagacgaagcatgacggtgcatcgcctcacccgggaagcgcacggggtcagggaattccctttcttatccaaaggaagccatgacagacagtacctggaaaatcatgacactcccatcctaatactgcactttttcaatggtcttaaccaacggcacaccaggagattatatcctgcgcctggctaggaaggtcccatggccacagagacttggtcagtgcttcacaaaagcctggcatccgaattggaaggctttctgtgggc

SEQ ID NO: 101955 - DNA, 383 bp, Homo sapiens
aatacatcgccttctagtgtgccctgaacttttatccccaccagtgatgatgtgtgcttattaagactcagttttacttgctctcaaacctgtttatgccagtttcactagttaatgtaactacatttagaaataattcaaaataatgaaagagtgaagagaattttatctatggatattaaatttaccacactgaaatttcaagaaaaacaagttgccttaaaaaaattatggctggacatggtgactcatgcctataatcctagcactttgggaggccaaggcacaaggatcacttgaggccaaaagtttgagaccagcctgggcaacaaagggagacctcatttcttactaaaatagcaaataaaaacaattagcctgcg

SEQ ID NO: 101956 - DNA, 401 bp, Homo sapiens
actacattggctcttaataataataattttttggctttattctcactcttaagaagagctcaaactaatgcacactgcgattctgttttttgtctatcggaaaggtaagaatccacacactgggtaacatactgagtcggcggggctacggggaaagatgtagtctcccacactgcctatgggagtcaatctgtcttcctgtacaaagcaactaggcactacacaaaaaagtacaaatgcacataccctttgaccaagcaattccatctcggggaattctccctacagatacaggtcataaataagtaccaatgctacccataatgtgtatcccagggattccttgctctgttaacggctcgctgagcgactggctttactccctctgtccaatcccgagc

SEQ ID NO: 101957 - DNA, 387 bp, Homo sapiens
aatacacttgtgtacctcaaatgactcttgctataaagtaacaaaatctacataaacatcagtgtggtaatagtaattcaacagagttatgtaacttgtggtggaaaaatatttttaaatttacgttttctattagggcccatcaatctacattacgtacatgacaaaacatccccattgctgtatcttttttttttttttttttaaagagagtctcattttgtcccccaggctgaagggcgggggggcaatccctgttcattggagcgttaactttccaggtctaagggattttaatcccctaccctcccggaaactgggaattacggggccccccccccaacctaaccaattttttttgattttaagggacacgggatttccccc

SEQ ID NO: 101958 - DNA, 398 bp, Homo sapiens
aatacacactacctcagactgttgtaggtgacaagagacccagacacattaggagaaaccatgtttttttttttttttaactaaaactggggccttaagcaaaaaaaattttattgggcattaccaatcccgaggaagcactacggacccctttttacccatgaaaaagcggaggctaaacaccctatttaccaattacggaaaaaacggccttacctgaaaaaattttgttatcacctcaattccttcaaagcaaacccggggggcggggttaataaaaggcgggggttaatatttggaaaagttggaattcttgacctccccttttgaaaaaaacctgggccaagttccctgaaagggactccctatcagccggaaaggtagggggcgttccttcc

SEQ ID NO: 101959 - DNA, 408 bp, Homo sapiens
aatacattccttgacagtaactcataccactaagcacatacgtgtgtgtgcgtgtgtgtgagtgtgtgtgtgtgtgtgtgtgtgttaacatatagggagcccttcttcttgacagaaacttataccactaagcacacactttctctatacacatatatacacatagagtggacagaaatcccatatatgtgtacaaacgtcgctcatgtagcatatctaaattttcatatctaaactttcttagagctagagaatacattgtatatgtcctttacattctccaaaatgtatggatatgcgtgtaatacactcttaattgcttgcaatatactacaggacgtgcccttcacgagtcccacaaaggataagattttctctggagatttcttaactctagtgggaaagaag

SEQ ID NO: 101960 - DNA, 424 bp, Homo sapiens
  misc_feature (1)...(424): n = a,t,c or g
aatacattggggcatgagaattgattgaactcaggatttgggggttgcagtgagccgagatcgtgccactgcactccaacctgggcgacagagtgagacattgtcaaacgaaaagagagaaaaaaatggttttcggttttccccccaaaaaaaaaaggggaaaattcgtttttttttgagcccaaaattttttttaaaacaaaagccacccccaaggggttactttttttttaaaaatccccttttggggggggacggctttttttaaacgcccccaccgttttaaaaggggggggggggccccccaaaaaaaacccaatatttggaaaaattatgccccggaggggtgcaaaggggaaaaaaaaananttctgtccccgcaaaggtgacgggttggttttacaaaagaannatagcccttatg

SEQ ID NO: 101961 - DNA, 972 bp, Homo sapiens
gcctgcaggaattcggcacgagcggagccggggaatgtgaagagctctcggctgtgcagtggtaccgtcggggcctgggccgcgaaggatcttctgccacagctgcaacatgggcggcaagaacaagaaacacaaggctccagcggccgcggtggtccgggccgccgtgtctgcttccagagccaaatctgccgaggctggaattgccggggaggcccaaagcaagaagccagtgtccaggccggccaccgctgccgctgccgctgccggctccagggagccccgtgtcaagcaaggtccaaaaatttatagttttaattctacaaatgattctagtggtcctgcaaatctggataaatctattttgaaagtggtaattaataacaaactagagcaaagaattattggagtgatcaatgagcataaaaagcaaaataatgacaaaggaatgatttctggaagacttactgccaaaaaattgcaggatttatacatggctttacaagcattttcatttaagacaaaggacattgaagatgccatgaccaatacactctttatatgggaggtgaccttcattctgccttggattggctctgtttaaaacccttcaggtgatgcacttcctgaaggattcagtcaggaatttgaagagcagcaacctaaaagtaggcctaaatttcaggtctcctcaaatacaagccactatttcacctccattgcaacctaaaacaaaaacatatgaagaggaccctaagagtaagccaaaaaaggaagaaaaaaatatggaagtaaatatgaaagagtggattttacgatatgctgaacaacaaaatgaagaagaaaagaatgagaattctaaaagtttagaagaggaggaaaaatttgaccctaatgaaaggtacttacatcttgcagcaaaactgctggatgcaaaagaacaagcagctacctttaaactagaaaaaaaac

SEQ ID NO: 101962 - DNA, 502 bp, Homo sapiens
gcgaacaagcttgattctctagagcggacgcatacacctcctgtctaactgaaactttgtacactttaactaacaactccctattttcttccttaacccactcccagcctctggtaaccaccattctattctctactatgagtttgactttttcagattccacatataagtgaaatcatacagtatttgtctttctgttgattaagaaaatgtggtatatacacaatggaatacagttagttttttgtgggtttttttttttttttaaaacaggattttgtttttttccccacccggaagtgcaggggggagattttgtcctcccaggctaaagtgactctccccccccacccttttgagttgtgggaaccacgggttggtcccattaccccaagatatttttggcttttttttgaaaaaacgggttttcccctttttgcccgggttgtttttaaccccccagggcaaaggaatctttttgccttaacctccaaaagtgttg

SEQ ID NO: 101963 - DNA, 395 bp, Homo sapiens
atacatggggcgagtcgatatattcattttacaaaattttagcggtcagctgggctgaaggtagtgagttatctcatttgattgttcacacacattacagatcaaacaccttattctattctttcccccttctcactactacacttgactagtcttaaaaaatatttagcctggcgaggctgaggcgggaggaggatcgctttagcccaggagattgaggctacagtgagctgtgattgcaccactgtgctctagcctgggcgacagagcaagaccctgtctcaaaaaaaaaaattggggggcgtgtttgtcctttgagaaactcttttagctctaacctgaggattaacggacattctatattaggtggtggagccgggccactgaccgtaacc

SEQ ID NO: 101964 - DNA, 409 bp, Homo sapiens
  misc_feature (1)...(409): n = a,t,c or g
aatacagggcctcagcactagttctctttctcctgcacagtattggctccccggagacgaccagaccggcggacagcaatgagacccactttgcggccagcaggggcatatatgcggatggcggagggcttgccgatgcgctggaggatgccacctccaaaaggatgctccacaggattcatggccacaccccgtactcggggccagcagttcctctttgccttatatttgnaggacgcccggccagccttcaagatgggtttgtcaaatcagccacctgcagccaccacaccaaacacaggtctgttggatgatgagataaccttcttggagccggagggcagctttacacgggtcatcttgagcccagggctgggggaaactaaggtgggataaattcctaagaccc

SEQ ID NO: 101965 - DNA, 448 bp, Homo sapiens
cacgcgcacgtatgctcgaaagctgtacagcgacccgagaattcatgaccgacaccgtggggcttatgcacgatcactcccggcgaggaactctgcctgactcctcactccagcacccccttcttccaaggcaggggacacggagggcgtggtacggcgggaggacgggactctccacttctttgtcaatgggatgactcagggccctgctgcctggaacgtgcccccgggcgtctatgctgtcgtcgatctctatggccaggcggcccaggccaccattgtggacgacgtggaggtggctccagttcctgaaccactccctgaggggaacaaccaggtgtctccaagctctccgtcctcaggggcccggggctctgacctgcgcttccatcaactggccggcaggaacgcaatcattacttacgggggccgcgcccgccttcggccg

SEQ ID NO: 101966 - DNA, 477 bp, Homo sapiens
gtccaccaagcagaccatcactgagagcagcagcctcctcctgtcgcagttcaccagtctggacccccaggggcccccccggaggcctccccctcacatcctggatcaagtgaaaagcctcaaccagtccctccgcctcgggcacctcttgtgccgcagccgaaaccctgactttctcctccacatcatccagcggcaggcctcctcgcagtccatgccctggccggcggacctggtacagtccagcgagggctccctggacgtgctgcccgtgcagtgtctgtgcgagttcctgctgcacgatgctgaggacgatgctgcttccggggaggaggacgacgagggcgagagcaaggagcacaaggccaagaagcggcagaggcaacagaaacatgcggtagctgctgggccgcctgcaggaactgctactgggcccgaaggctgatgagcaaaccacgtgtgaagggccggaactcg

SEQ ID NO: 101967 - DNA, 375 bp, Homo sapiens
aatacgcctccctatattcgaacttctggcctcaagagctcttcccgcctcagccttccaaagggctgggatcacagttatgagccaccgcgcctagccaatggtagcttgtaaatactttgtatctattggcctggctgggtggctcacgcctgcaatcccggcagtttgggagggagaactgggaggatagctagagcccaggaggtcaagacaagactgggcaacatagcaacatagcaggactccatctcttaaaaaaaaaaaaaaaaattacccacccggggtggggcacgtccgggataccagttacatggaaggctgaggcaggaggatcccctgaacccaggaattaaaaggctgcaatgagctggg

SEQ ID NO: 101968 - DNA, 374 bp, Homo sapiens
tgatgccactaagcagaaggagctggagtattcctactggaaggacaacgaccatcacgtcatgaggaaagagcagtgctgggacgcagaatgataatcggtgcctccaccagttggaacgtacgaaggagacgcagcgcctactggaggaggaggactccctgctctagggcggtaaggcgccgcgggtggccacgtccagcaaggtcacccgggcccacatcgaggacacgctgcgccgaaaccatcagctcagggaggccccggacacagccgagaatgcctagagccatctggaggtgccgctggtggagaacgtgaaccgccgcgtgctggaggagggcagtcgtggatgcgcgcaccatctatgacct

SEQ ID NO: 101969 - DNA, 1874 bp, Homo sapiens
gcgtccgcagtgctgcgtccgtgcgccgcgggctggggcggtctcaggtgtgccgaagctctggtcagtgccatgatccggcaggagcgctccacatcctaccaggagctgagtgaggagttggtccaggtggttgagaactcagagctggcagacgagcaggacaaggagacggtcagagtccaaggtccgggtatcttaccaggcctggacagcgagtccgcctccagcagcatccgcttcagcaaggcctgcctgaagaacgtcttctcggtcctactcatcttcatctacctgctgctcatggctgtggccgtcttcctggtctaccggaccatcacagactttcgtgagaaactcaagcaccctgtcatgtctgtgtcttacaaggaagtggatcgctatgatgccccaggtattgccttgtaccccggtcaggcccagttgctcagctgtaagcaccattacgaggtcattcctcctctgacaagccctggccagccgggtgacatgaattgcaccacccagaggatcaactacacggaccccttctccaatcagactgtgaaatctgccctgattgtccaggggccccgggaagtgaaaaagcgggagctggtcttcctccagttccgcctgaacaagagtagtgaggacttcagcgccattgattacctcctcttctcttctttccaggagttcctgcaaagcccaaacagggtaggcttcatgcaggcctgtgagagtgcctattccagctggaagttctctgggggcttccgcacctgggtcaagatgtcactggtaaagaccaaggaggaggatgggcgggaagcagtggagttccggcaggagacaagtgtggttaactacattgaccagaggccagctgccaaaaaaagtgctcaattgttttttgtggtctttgaatggaaagatcctttcatccagaaagtccaagatatagtcactgccaatccttggaacacaattgctcttctctgtggcgccttcttggcattatttaaagcagcagagtttgccaaactgagtataaaatggatgatcaaaattagaaagagataccttaaaagaagaggtcaggcaacgagccacataagctgaagtcacctcgcgttgtttagagaactgtccacatcaatgggagctgtcatcacttccactttgtaaacggagctatcaacaatcctgtactcacttgaagaaatggggccttgctgggaggaacagcatgtaaaactggaacttctaaccccgtcccaaaagaggcggtgtagagcctaatagaagagactaatggataaacctacaagttatttaaatatttaaattattaataaactttttaaagagctggccaatgacttttgaatagggtttgtagaagatgcctttcttcctgtttggttcattgtattgtattaggttaagctctactagggtaatgaaggctctacgtttcactttttaaaagtggacaaaagagtgtgattttctttttccaaaaattcctgagtatcaagacgtgacaggtccatgctttggagcctatgcactgtacacaaaggcaaaaccctatgactttggcatcatctgcccattgatgtccagcctctgacatgctctttgatttgttaaatgttaaatgagactttaaggcctactagaaactagtaattaagtttcttaatggactgagtagccacctacttgtccggctagaatgtttgttgatgtatgagtttagattaacactcaaaagcactaggacagatgtacatagaaggtgcctactcattgtattttgatgatttcattaacaggtaaataaaagttaatacaaaaaaaaaaaa

SEQ ID NO: 101970 - DNA, 437 bp, Homo sapiens
aatacatggtgtggtcattctttctggaggcctggtattttcctgtctacactatgatttgcagggtgcctacccgcctgaagctgaacattattttatttaatgcattgctttccctgaaatgttggggatcaaatatgaagtggggaaatgtccttctggcctgaaaagtcttaaaattctgaaaaatacacacacacacacacacacacacacacacacacacacacacacacacacacatacgcacgcactctatctgataagagaaggcaggaagaagtagtgtgtgtgtatgagaaagacagacagcacatgcgtgagctgattatatgatctcatagagtggtgtggaaaccacgggacagaggagttgagacaaagctataagcgcatctacattttgacgaatggattctgcccacgcgagaatctag

SEQ ID NO: 101971 - DNA, 437 bp, Homo sapiens
aatacagtgatggaaatgttttatatggtagccactagtcacatatagctattgaacctttgaatcatggctagttttagagttttatattttaatttaaattaaatagacgtgtctagtggcaccatattgtacaatgcagttctcattcaataaatcttaagtacttaacaatgcatcgtgtactcttctatgtactgggtagacagcagtgagcaaaacgaagtccccgttctcatggaactaatgttctaatgacaactattaattacataccatgaaatgtctcaaactcctgggctcaagtcatcctcctgccttagcctcctcaagtgctgggattataggtgagagccactgcacctggccagaagcacgaacttctaacttaggcttttattaattatcttccttgcagaataatcaacagaagaccg

SEQ ID NO: 101972 - DNA, 1140 bp, Homo sapiens
ggcacgaggtggtggggggtcgccagcaggttccctctccccggccccagctctggacgctcaccccagtgcaacgccctgagtgacggaaagaggtctggcggcttctctgttgacaactcagctggttccacaccctggcaattgtgaagagttggccaaatgtttgtccactgagctgatctcctctctggagcaccggggccaccaggagggagccaagacaatgcaaactccagtgaacattcccgtgcctgtgctccggctgccccggggccctgatggcttcagccgtggctttgcccctgatggacgcagagcccccttgaggccagaggttcctgaaatccaggagtgtcccatagctcaagaatccctggaatcccaggagcagcgggcacgagccgcccttcgggagcgttacctccgcagcctgctggccatggtgggtcatcaggtgagcttcacgttgcacgagggtgtgcgtgtggccgcccactttggagccaccgacctggatgtggccaacttctacgtgtcacagctgcagactcccataggtgtgcaagcagaggcgctgctccgatgtagtgacattatttcatataccttcaagccataaagatattgtgttcacttttctgcttgaggctaaggcactgtatcccaggcctcccaatgttcccgagccaggaactctgggccccatggagttatgagctcccttggaattttgagccaagctttaagcaagtctggactcctgagacctcctgggtctagtcagtaaaattctgcaactctaggaattctaagatcccattggaaggaatgctctacctcacagaactctgaaccctacagaaatatgggcctgctgccatttcctgaagaccggggcatcggggtggggtgataaaggatacaacctgcacagggggaagttattaaagaggctgcaaagtccagccaccctgaagatactccccagtgctcccctcctgctaaagaaccagttaccccaggaaaattcgactcctgtttttctttaattaactataccgacaaggaaggagtcatctttaggggctggtagggtggttatccaagggctgagtccacttaactaagaatgaccga

SEQ ID NO: 101973 - DNA, 421 bp, Homo sapiens
  misc_feature (1)...(421): n = a,t,c or g
aatacatccgctgtttcaagcaagggctccctgacttctgttaggagcacacgatggagactgtgcagccttattcagtcctcagtgaaccctgtgacacccactctatgcctgtggagatccaggctccggggacacagcaaggacaggacagggagtaagaagcagatgtcctgcagactggcacggtcaccacctcagtgcagctgctccgtcccctgcagtcccctgtctcccaaaggctccatgtccccttgggccaggaaagaggaggcactgccatgtcccactgtctacaaagtcctgtgcaggctgcacgccaggcagggcacagtccctcctcaactcaccagcagacgctgtggctcctctggcgactctacagtcacacctgttagctctgccagctcctgaccttggn

SEQ ID NO: 101974 - DNA, 433 bp, Homo sapiens
gtcgttgtctggacctccgagcggccgcatacacctgggcaaagagggcagagtgcaggtcttgtggggagctgggcgtggcggcagaagaaggagcacggcacagtgtgtccccagtgggcatggcctgggtctcgggccgatcctgtggctttccctcaggctgggttcctacaggtttctatgtgtcccgggagccacggcacagggtcgggaggcttctctcccgaacatgggcctcttgccgccgggctactttgagtcttggagctccttggctttctgcaggatctggcagacatctgtgatggggtagtcctgcatcagccgcatattcacagtgaagtgcccttccagcaactgctcccggatcagcatgagcatggcgcatcagacgaggaggaggaagtcaaagcggctgtcatcggcgaag

SEQ ID NO: 101975 - DNA, 442 bp, Homo sapiens
ccgtttgtgggaggatccgcccggccgcaatacaccacctggggcaaggtagccaggaccttgtggagagggaggccacatcatcagggaagagcaggcctgtgggtggccgagaggacacagcggcccctggaggcacccccaggcggggccgctgcagctgggacaatggaggggcaagggggccgggcagggggcccgcaggagcccacagggctcccttgagagccgcccacccactctcagtgccgcacccccggccattcacatttgcagcgtgggaggagttcgccttcactgttactaaagcttctgtcttcatcaaatccacaccggagagtgtggcagagtctgagagcccagctcgctcctgtgaatcacaagctacgaagtccagcgtgctggtgcccattaaagacactgccttagacgaagctcccgg

SEQ ID NO: 101976 - DNA, 430 bp, Homo sapiens
  misc_feature (1)...(430): n = a,t,c or g
atacatgctctaagatttctgctttaggttgtttataacaatcatggatgcagcgtcaagaatgggtgggggaggggggtggagaccangtgggaggcccctggagtcgccctgcagcttccttactaacgtgtccttctcctcccggcccccacccgccaccaggccgagctcaggagcttggcaacaacatgggaggggagctcgggtccccttacagacctacccaatcccaatttacattaaagctgagcccaggaggtctagtctgcagtgagccgtaatcgcgccactgcactccagcctgggtgacagagtgagacctcatctcttaaaaaatttcaagtccagctcccccacccccgacgattcgtaagcccctttaagtgagaagcactgatgtggaccggtggtttccgcttgtgccgag

SEQ ID NO: 101977 - DNA, 405 bp, Homo sapiens
aatacatgtgcgcctgtggtcccagctattcaggaggctgaggtgggaggatctcttgagcacaggaggtgggagctgcagtgagccgtgatcatgccactgcactgtaacctgggcgttctttctagaaagttgtttgaggtgtgcccacgtggtatacgtgacactcctcactgccctgctgggatcactgccctgtgcaaaccccaggcagactgcggtgtccttgccacaagcccagttagtgtgagtcctgtcaatttccctgctgcttgcttctgcttccacttggcttgaacttgaaggacaacttggcattttcacatttggatgctatcactgaccggtctatcagttctatcttgtaacatgtatttgatcctaagcctcattgactctctcatc

SEQ ID NO: 101978 - DNA, 387 bp, Homo sapiens
atacatttggggggaagcgagctctttatttagacatagcgctgctgagtggaaagagggcaccaaccccattaatgcttgctggctggtggcttccaagcacgccccactgccaaggctcagctctgcagttttggcactgcaggttcctagcacagcccccagggcccttactaggcatcatcatcacagatgtcacggtacacgtcgaaagcctctctgtggcagcgtccatcatgagtgaagacatatttgtgggaggacccatctacgcagacggcaatgacagagttgacgctcttggaaaaattgtgaccgatagcgcagatgcaagctgactcgacaggcacagcgaagctcggcatgcatcactgagagtcccagtac

SEQ ID NO: 101979 - DNA, 443 bp, Homo sapiens
cgccgttgcttgatcctcagagcggacgcatacatgtgggcaaaggtcaattaaaaaaaggattaaaaataactttagaaaaaaaatcaacatgcaattgcatagaatgaaaaagactataattcgagtcagctttaaagagaattctattgccaaacctaacaagcctggtgcaaatcccctcacttttcgtaaccaagggtgcagggagaagccacctgcatagacccttgctggccgtaacaaaggcttcctccccaacacccagtagatatgtggcttttaaagaaaacaggcacagatataacctccaaggaagcagagtcatgtttcatgaagcacactgtagagggacaaaaaattatccgggcgtggtggcggtcacctgtagtcccagctactcctgaggctgaggcatgagaatggagtgaacctgggaggcg

SEQ ID NO: 101980 - DNA, 560 bp, Homo sapiens
  misc_feature (1)...(560): n = a,t,c or g
tttcgtctccggagcgtcgtgggcatcggggtgtcgggccagatgcatggagtcgtgttttggaaaacaggccagaggctgtgaatggacagagggagggattaccccggtgttcgagccccgagctgttagccacctggtcacgtggcaggatggccgatgtagcagcgaattcctggcctctctgccccagccgaagtctcatctcagtgtggccacgggcttcggctgtgcaaccatcttctggcttttgaaatatcggtacgggcaactgcactttcactcgggtgctgggtttccgggagaatgagaataggccggggctgcgtcagcatcaccccgcctgctgggctgtgccgcagtgagtgtgtcctggcaggacaggatgcagcatggcctggacctcgattgggtccagaaccacgtccttttgcagagggctctctattggttatccagttcccacccacatagggaaaggagggaacagagagggcaagtgacttgccgagggtcacggngagagttcgcagtgtgttcaggcctgcgaggctgctgag

SEQ ID NO: 101981 - DNA, 417 bp, Homo sapiens
aatacatgacctgatttgcatttcataagatcactctggcaatggaaaaggccactgaagcacaaactgggggtgctaaaaaagcctgtcagggtacaaataatattatgaaatttttaaaaaagaaatgtattcctactaccatattttgcatttcttttttttcttttctttttttttttttgaaacaaaacctaactctgttaacgggcctgaagggaagggccccattttgggttaattgaaaccttggctccttggttaaaagcatttttgcctaaccctcccgagtggcgggaactacaggcacgtgctaccccccccggttaatggctttttttttttttttttttttaaaaaaaaaaaggtgttcccctttgttgccccgagaggtgtctaaaccccgtatattagggg

SEQ ID NO: 101982 - DNA, 408 bp, Homo sapiens
aatacattccagcctgggtgacagagcgagaccccatctcttagtgactgggaacagttctcagtctgaggaaggtcagctgaagtccttactgtacaagtccaaaatttaaggaaaatgagtcccacgatgagttttctcatgctttggccatgcgtggaccagtcagcttctgagtgtgactggagcagggcttgtcatcttcttcagagtcactttgcaggggttatctaggcttggtctcacctcccaggtctcaggtgctgcaggttttacctggctgtgttggatccaggctgggattccctctatctttacggctgtgggagtggtcaagatgatggtctggggtccttttcaccgtggccgcaaggagcctatgttccaatccttgatccacacctgatc

SEQ ID NO: 101983 - DNA, 431 bp, Homo sapiens
tactgctgccctctttttagcagtaaggcgctgacccaagagaactcaccttattcttcatttcgcctggtgaatcctccaggcctttctctacaccctgaaggggagggaggaaaatggataaatgagagagggagggaactgggcccaagcgctgggcctctccttctcttccttcactttgcagaggctggaagacggcagccgccggactgggcagattctgaagcagacctacagcaagtacgacacaaactcggacaaccatgactcactgctcctgaaccactgtctgatttactgctttacgaaggacatggagcacgttctgacatactaggcatgtggcagtactagttttggtagcctccgcgggcgtactagggctccatgcgctccaggcaccttcccatctgcggtactgtcgcccg

SEQ ID NO: 101984 - DNA, 434 bp, Homo sapiens
gaaagattgcaaggtgaataaagaagtggagcgtgtcctgagggagttccaccaggccgggaagcccatcgggtgtgatgcttccacgagcctcccggcacctgctccttggtggtcctggaacgcggcgctgtgctgtccaggtctcagctgcgtctggtgctggcagggcgagagccgcacttgcgtgggtgaacatcagtgaggcgcactcgcgatggccgctcactaccgagttctgtcagccgaacaaggatgaggatctatcggaatcctctgtctccccatccacagtcactcacttaaggacctgcctggtcactgtccagggaggcccctaaagtggagcctcaggaagaggtgcaggctcagagctcctgaaggaggtccctgctgcagccgtgtcacagccgggggtgaaagtttcgcccatg

SEQ ID NO: 101985 - DNA, 502 bp, Homo sapiens
ggaaggtcaccgtcaagtatgaccgcaaggagctacggaagcgcctcaacctagaggagtggatcctggagcagctcacgcgcctctacgactgccaggaagaggagatcccagaactggagattgacgtggatgagctcctggacatggagagtgacgatgcccgggctgccagggtcaaggagctgctggttgactgttacaaacccacagaggccttcatttctggcctgctggacaagatccggggcatgcagaagctgagcacaccccagaagaagtgagggtccccgacccaggagaacggtggctcccacaggacaatcgctgccccccaacctcgtagcaacagcaataccgggggaccctgcggccaggcctggtgccatgagcagggctcctcgtgcccctggcccaggggtctcttcccctgccccctcagttttccacttttggggttttttattgttattaaactgatgggactttttgtgtttttata

SEQ ID NO: 101986 - DNA, 414 bp, Homo sapiens
gagacagggtttcaccatgccggccaggatggtctcgaactcctgacctcaggtgattgcccttccttggcctcccaaagtgctaggatcacaggtgtgagccactgcacccgggctcaacttttaaccgagcaagaatattttaaaaaccaaaaccatctaccatcggcacctttttataaaagagcattttaatgacacatatgtgaaaagactaaatctcagaatgaaatataatgtgaaatcagataaataaatgaaagatgtattgcttacttttctcacatcctcatggcaaactttgttagccacttgcacctgtccatacacagatctttgggaatcactaatttagaccacttcatgcccacccttaccctgcccccggcttcattgagcatttttatcacaata

SEQ ID NO: 101987 - DNA, 405 bp, Homo sapiens
caggtgactcaaccccttcctctatgcctttttagacccgcgcttccgccaggcctgcacctccatgctctgctgtggccagagcaggagctcaggcacctcgcacagcatcaggggggagaaatcagccagctactcttcggggcacagtcaggggcccgggcccaacatgggcaagggtggagaacagatgctcgagaaatccatcccctacagccaggaaacccttgtggttgactaaggctgggagcagagagaagcctggcgccctcgggcctccgcggcctttgcccttgctttctgaaaatcatagtcaccttctctgcccagagctgacctgaaagcatccagtgaacactggaagaggcttctacaagggaataaattgggccttttacgcccgcc

SEQ ID NO: 101988 - DNA, 428 bp, Homo sapiens
cagctgcctcaaccccttcctctatgcctttttagagccccgcttccgacaggcctgcacctccatgctctgctgtggccagagcaggagcgcaggcaccttgcacagcagcaggggggaaaagtcagccagctactcttcggggcacagtcaggggcccgggcccaacatgggcaagggcggagaacagatgcacgagaaatccatcccctacagccaggaaacccttgtggttgactaaggctgggagcagagagaagcctggcgccctcgggcctccccggcctttgcccttgctttctgaaaatcagagtcacctcctgtgcccagagctgtcctgaaagcatccagtgaacactggaagaggcttctacaagggaagaaattgtccctctgaagcctgcgcgggtgacctgcaaagactttct

SEQ ID NO: 101989 - DNA, 410 bp, Homo sapiens
gattcataatgcaactggcagaatgcctatttaactgttgtgagatgtgcccaggattgtgaggactattttgctgaacgtctgtacaggtctatgaagggtgcggggaccgatgaggagacgttgatacgcataatcgtgaccagggccgaggtggaccttctggggatcaaaccaaagttccaccagaagtatcagaagtctctctctgacatggttcgctcagatacctgcggggacttccggaaactgctagtagccctcttgcactgagccaagccagggcaataggatcacccgggggaaccacctttgtcaagagcacattccaaatcaaacttgcgcatgagactaccggacgaaaacccttatgagtcccggattactttcttggcagcttaagtggcgca

SEQ ID NO: 101990 - DNA, 415 bp, Homo sapiens
taacattttaatcataaactatctgtgtggccagtgccatgggtaaacaagaggaattttttttttttttttaaatacaaggtctcactctgtggcccaggctaaagggctgggacatgatcacagctcactgaaacctcagcctcccaggctcaagcagtcctttaacctcagcctcctaagtacctggaactacgggggtttgctaccacactcagcactttggaaggctgaggcggccaaatcatgaggtcaggagatcaaaaccatcctggttaacacagggaaaccccatctttactaaaaatacaaaaaaaaaaaaaaaaaaatttagccggccttgggggaacccccttagagccctgaagcccaacttattgggggggctgtccaaaaaaaggcgttaaccccgggg

SEQ ID NO: 101991 - DNA, 1124 bp, Homo sapiens
tttttttttttgaattttagcatctggtgaatttattcagcataaccacaggcattatcttcatgctgtcacacacagacacaaacacagatacagcacaatatccatatttagcccaagtgcattccttctgaggctcatttatatgtcttcatatgccacagcccatcatttaaataatggatattttcaatgccaattcctttgttgactttctcaatgtcttctgcagacatcttcatgactccaacacatagagcatgctgttttccttctgccatgatagcaacaatggtatctactgcagcagggtaaagcttagctccaggagaagttaagcctggacacatgatatttgctccactgagtacaaatttgatggctcctttatcaacctgctggtgtggcaggataaaaggatatttgtgaagtaatcttagggttggataaaaaggcccttctctttgtctaaaaaagagtaattctccatttactgtaaggatttctatatgttcatggcatcggactattttgacaggatctttcttaggcatgatttgattaagccatggttcaatacctggaaattgctctatcaattgattcttaatacccttaataactgaagttttcaactggatgcagttggacacattttctttttcatcaaatttcttgaacatgatccaaggtgaagggggcgacgatagggaagggcccggaatgggaaagaaattgaatttgcaggggtccggcagatcccctcacacgaggaaggccggcactgacagtcggagctgtagtcgttatccggaaaacgagagccagccgcgctttacggctctcagtcaaatctgactacttccgctcctctggactccacgtaggcgcttttgccggctccttttaggcaaccggttcctcagcagttggaggtagctgaaagggcccggaggaaagccaggtacttcaacttgtttctgtagaaattgccagaaatgttgatgccttcacagcgtccgaccaccaccttccggcccagcagtacctgtttagccccgatggccgccaggcggcccaggagatggcctcgaccatcaagcaccaggacctgcacctccgcc

SEQ ID NO: 101992 - DNA, 495 bp, Homo sapiens
ctccccacgaggccttcctggcctcctgtctgaagtgggtccctttccttactggtccctctccaaagccctggctgtaagactcggggaccccagcatctgcacatctggcagagtggacctcctatgagaactggctgtgagctgtggagcccagggccggaggagcagtaagggtggcatggggaccatgacaggctgctgcgggccgggggcaaacacgtcaggcctggcccccggtccgctgctgcccctccctttcaccttccgtccagcactaagggagtctggccacggcctaatataggagggcttgtgggaggagacacccaccccctctttctgcacctctcccctcttccatgccacccccaggccaggagccaccacagccctgtctgtgactctcagctcccgaggctgggctctttccccagggaagctgcatgaccatggccacatacaggaggtaggagacagaggcctccacggtgg

SEQ ID NO: 101993 - DNA, 362 bp, Homo sapiens
  misc_feature (1)...(362): n = a,t,c or g
atttgacacttctcgcacattgcagaatgatggcagcagcccatatggggggcccgcccatgatgccaatgatgggtcctaatactcctgggatgatgccagtgggacctgctcctggaatgaggccgcccctaggaggccacatgcccatgattcctgggtacccaatgatgagatctcctgcccgtctcatgatggtgcccagtcagcccagaatgactcggccagacagataaggatagaggggaggcctcattgcatcagtgttgttttgttgttgttattgatgtgtnnnnnnnnnnnnnnnnnnnnnnnnnnnnnnnnnnnnnnnnnnnnnnnnnnnnnnnggnaaatttganntc

SEQ ID NO: 101994 - DNA, 409 bp, Homo sapiens
  misc_feature (1)...(409): n = a,t,c or g
gtctggtgttcagtgtggacgttggcctgttggctcacaccaggcagagggggttaaaaagatcaagtggcatgagcagccttttggggaaaattggtgccaagaagcagaaaatgagcacccttgagaagtccaaactggactgggagagcttcaaggaggaagaggggattggtgaagaactggccatccataatcgagggaaagagggatggattaaaggagcccagcccctaggccagtgaagggactggagctctgttcttcaccttggatgagcatgagaatcctctggtgacattttccaaagttcaggtgaccacctctgtacagagctgctgaatcaagagtctagaacaggtacattgaacggaaagccttcctcgaccgagtggatcacaggcagttn

SEQ ID NO: 101995 - DNA, 1737 bp, Homo sapiens
ccaggcacaaagttgctacatctgatggcaatgtttttaatgagtctgaattcgttaatgaaggggaaaatttattatttttttttcccaatgactcccaagtcctactcgcaaacaaatacattgtagaaaaaagtttaattgctggttattgtttgaatcttgaaatacaattcttcactgatgatactggtataaaatggtggttattaattcatgctagcacaaccaaaactaatttaacattattggtaaaaatgagtcatttttgaatctctattaaaatctgaacacataaacaaatctgtgctaaaactggaactgccttctcactctacatataattaaacttccagcttcaaccatctgatgttgaaatctaaagcacctccatgagttaaatgtccccgacaaaccatgtagatggacaaacaagattggtggtctttaattgctggcgacagaaaaggctgcagtttagtacttaaacctgcagttagtggtcaactttctatccaggcagagtaaactaaggagagctatgaaatatcaaaagaaaactagaggccaggacaaagaggcaatgtcagccaagccactgcaagatggtatgcacccctgtatttcagccaagggcaggcaatccaaaattacacactgctttccttaacttgaccaaacagtgtatttttcctctgaaaatcttgtcaaaggttgtattccattgtacctagtgaaatacaaagtccactctcataaaaatattatatttttcaaaagaaatataatacattgaaaatcactgattgctgcttcttcgtctttttttccgtgaatgtgtaggtgtttgagtctcttgtatttcttcttttacacaggatatgggctgtttgaaaactatttcatcatctttatcatcatcattcagttcagccacttgagattttcgcctctccaaaaatgttggtgtacaaactggtgtggggccctggctatccacagtcttctcaggagtgtcaagagtacctgaaacttttttcttcttcttacgtaaaacctggccttttgtagacgtctgacgattagtttttgaaatactttccgttttctgtaaaatcaaagaaggaaaatcatagtcaattccttttttagctaatttcttcctgagtaatctttctttctttttaaatcgctcctccatccgtagcttttgtgttagtgtccgattccgattataccgtttcactgatggatatgatggctgcttaaatggaatattccagtctttaaagagttctttatgtactttttcaggtggcataaaatgacactccaagagtctttcaccaaacaggtagttgttcattgtttcagcaactattttggcaacatcctcagactcaaactccacaaatgcatagcctttgctatttccagtccttttacttctggacagcctgaaccgtgtcacagtgccaaactgggagaaatatgaaaagatctgggtttcgtcaagtaggttaggtaggtggcgcacatagactactccaggagtaagttgttcttgtttttttcgctgggttatgcgcttgcgaacctgcgccacctccttttgaaactcgacatcttcctgcggattaagcgacaggattggcccagccgggccagaaaaagtcgccatgccaaaagccgccgacgctaaccacgcggcgctcccggaaacgtcgggctcccagc

SEQ ID NO: 101996 - DNA, 399 bp, Homo sapiens
ctgcctcagattcccctcttcccctgcaatgggactcctgcggagcggtactaagctcatcttccgccggaggcctaagcagaaggaagctggcctgagccaatcacacgatgacctctccaacgcaacggccactcccagtgtccgaatgaaggccggcagcttttctcgccggcttatcaagcgcttttacttcaaatccaaacccaaggccaatggtaaccccagcccccagctctgaggacccagctttgaaagggcacgagttctctcaacccattccccaactccccttccataccccttactggatctccagtgcctaggccaagaaagccctttgggttccggaaatcccctgccaaacctgttcactgggcccgtttgaaaggatacttg

SEQ ID NO: 101997 - DNA, 439 bp, Homo sapiens
aactggttaagtatggattctcaaactagggctttaagtatcctgcgagattttttttggcatgaaaacttgtaagaccactggtgggctctgtacaaagtcggctaccccctcattctatatcttcctctgcccactttcctcccagctattaaaaatgaatgtaagctgggcacagcatctcaagcctgtaatctcagcactttgggaggccaaagcagaaggaaagcttgagcccaggagtttgagaccagcctgggtaacgaagtgagaccctgtttctattattttctaaactccatacataattgactggttgcactatggtattcatcaactcggtataggttgtatcctttgcttcgatcgactcttaattttctaaatttcgctctttcttgtagtttaattaatactctttagcctagctcttacttcg

SEQ ID NO: 101998 - DNA, 438 bp, Homo sapiens
cggcacgagaacagagaggaactgcaagtaattgctgacctttgcatcaaatatgacacactctgcatcagtgatgaggaattcatgaatggggttgaatatatctggaaaggaccctgcttctgccttactacattcaccctttatctgaagggggacatttttccaagaccacccagtggatgcctgaacctgtggatagtactgaaccctatgtatcctgttattcatctgataaccagctgctaagtgactagtgggcaggtatacagcacagatacgccaagcaaagggatgattcacctccgagtgggacagtgcatgatgtcatcacactattcaaaacagtaggtagtttacaacttatgaattggttgactctggaattttccatttaatattttcagaccactgttgaccacggataactgaaacccg

SEQ ID NO: 101999 - DNA, 423 bp, Homo sapiens
gcaggatcctacaccttacacatcataaagggagatgatgggactagaggagtaactggacgtttcaccttcaccttacaccgcatccaaacctcagaggagtgagagcaaatggtcagctgattagtctgcactccagaactaaatcacctgcttcaaccatcagagtcagtgcaaaaaaatgaccaggcctcctcctcagatcttaaccaccatcactgaacctgaaatcctgtgtttcccaaagtgtccttgtcactgtcatgagaggatcaaggagaggaccttgatttctttccccactcacactctacaccaccacaggcccagcgagagagacacacactcaggagctctcacatgacaaatgaaggaatggaatgaataaatgagtgatccaaaacctctttagagattggatct

SEQ ID NO: 102000 - DNA, 876 bp, Homo sapiens
ctctacccacttcgctgtagggtttgtaattatctctcgatctatctgtgactttgcacagagtgctagcaaatggcagcccttgggagtggcagcaggggtgctccagtgtcccttgtccctcctgttcctctgtgcttcccagccatcctctcacatgtggttgggaaaagtcttcaaggctcacctgagacctcccctccttcaggaagccttgctagtgccccgcatgacctcctttgcacctgctaatgtctggctcccatactctcgtaggacttaatgcatgccagtggcctccctgcccgcctctttgcccccatcaccaggtggcaggaaactcactcattcattcaataaacttggtccagctgtctgaggctgccagaactggctgtgctgggtcctgggaggcggcaagaaaggtgcccaagggcttacccctgataggagagatatgttggctgaaggatacaatgtggggacaaggacaggaatatatgtgggttccgctctcctctgccgggagagaggggcaggaagggctcagggcagagcccagccttgaaaaatgagtgttgcttggacggacgcttggctaatgcttgtggtccaagcgttttgggaaggctaaggcgtatggatcacctgcggtcaggagttgaagaccggcctggccaacatggcgaaaccccatttttactaaaggtacaaaaattggccaggggtggtggcgggctcctgtagtcccggctactcggtaggttgaggcatgagaattttttggggccgggggccagagactgcagtgagccgagatcaccccacttcactccagcctgggtgacagagtgagactccgtctcaaaaaaaaaa

SEQ ID NO: 102001 - DNA, 421 bp, Homo sapiens
cgcatgctgaacgacaagactctgaggacagacattggggggaattttccaaagaatggctgggctgcaatagcaactcactcctttgaatttgcacagtttgacaactttcttgaggaagccacacgctaatacttaacagggcatcatataatactctggattttattcccttctttccggttctggatcagagccaattattgtttcattggaacagtatatgacgcttttgacactaataatagtgcaaagtagcaggctagaaaaatctatctttaatttaccctgtgaaagattttattaaaattaattccaaggggaaaactggtgaatctttaacattacctggtgtgttccctaacattcaaactgtgcattggccatacccttatgagtggatcgagtagtacagacctcg

SEQ ID NO: 102002 - DNA, 485 bp, Homo sapiens
gcggccgctgagcgcatcggagggcgggcgcgccgaggcgccgggtgggagcggagcatcttcacttctgcggggacctagtttgcccccacctgatgcaacccagaaaatggactgactgcgagtgccttggggcggagaatgtgtcttgctacgtgtaaagcacctagaaccctgccagattcaggggacacagcatcctgccgttttcctgccgtcccccgcccgccacacagtaggcgctccagtggctcggggcatctaccaggcaggccgcgctgtcctgccctgccggggctggagtggagcaaccctccggggccacccacatctgggtaccttttccccactttttccaccccagccgcgcacagtcaccagaaaactcttttaggtatctgaccttcatttgaacctatgttccctcacttgaacttctttttcctcattcatgagattctaaaggaaatatatgggattgggac

SEQ ID NO: 102003 - DNA, 516 bp, Homo sapiens
accgccccaccactggggccctcctgctgctcactgcggttcagctctgtgaccaggtaaggctccactgcagctgcagaaatacctggagaaacagctcctgggctattcctgggcctgttcagcataggacagtgcatgggctgggtgcccacatctgctgggaaagagggtgggcatgagtatgggtgcatgcagttatgcgtgcgtatccagggacctgcacccagacccctagggacggagccagggaaaagaacccccacccctcaacacagaattagccatgagaagaagcctgggcaacagcaactacaggccgtgtttctcctccaaccgtgatgtaagtgagtgcttatggcttcatcactgagggccatgagcgcttttctgatcactactatgatacatcatggaagcggctgatcttttacataaaccatgacttcaagctggagagagaagtctggaagcggctacacgatgaagggataatccggctgtaccagcgtcttg

SEQ ID NO: 102004 - DNA, 1283 bp, Homo sapiens
ctaagccctatattagggtcccccttctcttccttctttctatgaatgatctgtattccttgcattcctggctttctaatttccatgtttgttctggggctgagaataatccaaatcatgctcctgagcctatatatttttaatgcttgcttaaaacttagttctctgactttacaggttgagaatattgaacctatatacaaatcttcacacatttgcaaaaggttcctagccaatgtaacctagggaaataaactagataaactcctgaagtcatttcaaacccactcaaatttatcccacagacattccaatttctagaaagctttactctctcacctagattctcttccctccaaagcttgctgtcctcctgcctatacaattctggatgggcttcaaatacttaccagtccagaattctttgctcctcaaggctgtacccagctggcaacagataattacggtagttctggagctggttggcatggcaactatcatggacccagacatgagacacacaaggaatcccactggcaaggcacaggaagtacttccgggttcgacaatgctgatccgcaattagaagacactggtaagctgtgttacactgcaagaaaagaagcagagccaatgggtttggtgacttctgtggaaagctcctaagcagcagccataatgagccatgaagagcagatctgaagactcccaactactacccaaaatgtgatttagtctatcctgcccaaggccactcttctcactggaaggcccaagtaatttccatagatgttctctctgcctcacctgcagcatactgaggacctaaatcctcaacggacaaccaaaacctatgaactcagcctttcaggctaaaaatcagcaaccctaataggggtttctactactaaacataaacatcaatcttcttttgtcccagcaacagaaccatagccattaactaacccaaggtcctaccttctcttccctatacccaacttaaattctatttcatgcaaaaacattttggcagtttctcagttcctgaaatctctggctactttatccaggttccccaacccctcccaggcctcttctcaacacagcaagttggctcttatcattgccactatattaggttacacaaagaaactcctcacctgggcttcattgaaatcttcaaggatatagccagctcctgctcgaagctgggattctgtatactgcttgttgaaaggaggaatttccaaaaattctatattaaaaaaaaaaaccaagataat

SEQ ID NO: 102005 - DNA, 419 bp, Homo sapiens
cgggcatgacccccaagaccggcttctagcccaggactcagagcacaaccacagtgaccggaactggcagcgcaaccggccttggcccaaggatagctactgacagcctcctgctgccctaccctggcaggcacaggcgcagctggctggggggcccactccaggcagggtggcgttagactggcatcaggctggcactaggctcagcccccaaaaccccctgcccagccccagcttcagggctgcctgtggtcccaaggttctgggagaaacaggggaccccctcacctcctgggcagtgacccctactaggctcccattccaggtactagctgagtgttctgcacccctggcaccttcctctcctgccacacaggaagctgccccactgggcagtgccctcaggccaagatcccctt

SEQ ID NO: 102006 - DNA, 1251 bp, Homo sapiens
  misc_feature (1)...(1251): n = a,t,c or g
ttctactttgaaaatgctttgtccaaaagcaataaaccaatccacactattattctaaaccctcatgtacatctggtaggggatgatgccgcctgcatagcatatattaggctcacacagtacatggatggcagtggaatgccaaagacaatgcagtcagaagagactcgtgtgtggcaccgccgggatggaaagtggcagaatgttcattttcatcgctcggggtcaccaacagtacccatcaagccaccctgtattccaaatgggaaagaaaacttctcaggaggcacctctttgtggcaaaacatctaaggcctgaaaaccattcacatatgggtcttctaaatttcaacagtgccacttctgcattctctgttctcaaggcacctggatggtgaccctgggccgtcctctcctcctcttcatgcatgtttctgagtgcatgaagttgtgaaggtcctacatgtaatgcatatgtgatgcatcatcttatcatatattccttcctatacattggttacacttcaactacggggatgttccacacaaacttaaattactgttggcaaaacaatagggggagattagacaaaaaaaaaaatccacaatattccaagtacaactcttcatcaagtttctctgttaatgccaagatttaacagacttaaaaactattgttctctgaatgacagttgtaagagaaatgtaaattttttaaaactctttgctgttaatctgttttggttggtttggtttttttttttctttttttaaggtaaaaaaaaaatacacccttcagtttcctggtgtgatcctggttaaaatggatgatttttcattgaaagttttgctgattaacaattaaagtgggatgatatgtgggcaaaatcacttatgaaagtagaagcaagaatcagttggtttgctaccacataaagccatgctgtttttggtcaaactgtgtaaactggaaaaattcacatcatttctgagtttaatcactttaggatatattcacattgttttggtgaatttgctgaattgaattgtttttctttctcaaatctgtgatctccttttctttatccctgtttctttgttcctttccgtttgctttcttatttttcttttgttccattcttttcttacttttttcccttttcccntttttggggaggctggctagtagtgtgtgagaaaagaatagaagtgaaatttgcataatgaatgtaaaagggaaataaaagtctt

SEQ ID NO: 102007 - DNA, 474 bp, Homo sapiens
ctgcacgagcgctgaccaacgccgcgtcgcacgtggacgacatgcccaacgcgctgtccgccctgaacgacctgcacgcgcacaaacttcggttggacccggtcaacttaaagctcctaagccactgtctgctggtgaccctggtcgaccacctccccgacgagttcacccctgtggagcacgcctgcctggacaatgtcctggcttctgtgagcaccgtgctgaccttcaaataccgttaaactggagcctgggtggccatgcttcttgccccttgggcctctgcccagacgcttcttgcgttcctgcacccgtacccccgtgcgatatgaatacagtctgagtgcacggcccacaaagggaggtcacctgggggcagctggtgccgggtcttcacccagaccacgctgggtcctctctgttgggggcttggggtccgggtctcctagcaggcacttgttcctcctgggcccc

SEQ ID NO: 102008 - DNA, 710 bp, Homo sapiens
ctaagataattggttttactaatgtggaacaattaatgccagccataaaatgtataattaaacattttattattacaaattcaaatttgttctcttttccctatatcaccatttaattgaacaacaatacaacgaaaactggtcgccttaaaaccaatttgaaacaggttgttcaggagcaacaatacaaaaacaaagtgtagactggaatgtattacattttggccaaacaaaaagatttgattcattctggttcatgaagttagataatggtgtttatggttttgaaagttcactgaaacttcttcactgaactggtttctttctgatgcattttcttgagttctagccatgactgccacagtagcagtcctgggatcagaacccacacaccgttaaaaaaaaacaggtaaagccaacagtacagccagttgctggtgttgaggttggggcttctggtgagccactctgggaggaaggtcatccagcagccatacagctcgcacacgcacagggtgatctgcaggaaatgccggtaatatttttctttgactatggcataaatgaggaacaatgccagagacccatccagggcgacggtcagaatttccacagacacaatggttggatcaaaataaacccatcttgcatcagctttgccatattctttccataaagaagcaatcaagccatcggaatttgcaacgttt

SEQ ID NO: 102009 - DNA, 173 bp, Homo sapiens
cctttgtggtctcctctctctgcaacggcctcatcgccgcccagctgctcttctactggaatgcaaagcctccccacaagcagaaaaaggcgcagtagagccagctactggagtcatctccgccccttatgatttggtatccaatttgtcgttcttctacccagtagtagtac

SEQ ID NO: 102010 - DNA, 432 bp, Homo sapiens
  misc_feature (1)...(432): n = a,t,c or g
ggctgcggcatcgccgacctcgctatgtctgccattttcaattttcagagtctattgactgacatcttgctgcttatatgtacctgtgcttatattccatccttggcacccaacctcctggacagaaataaaactggattgttgggaatattttggaagtgtgccacaattgttgaacggaagagtccttatgttgcagtatgctgtatattaatggccttcagcatcctcttaatacagaaactggtgaaaatgccccaatgtatatgccataacatttgattgtgaacaaggactgactgcataaaataatggaaaggatgtttaactcttttatctcccaacattgaatgagataaatttccagatgctgatctctattttaatgaaattggaccaaagttctgcataaacacttaagactgtaccatn

SEQ ID NO: 102011 - DNA, 447 bp, Homo sapiens
cggcacgaggttttcatagagctgaatcacattaaaaagtgcaatacagttcgaggcgtctttgtcctggaggaatttgttccggaaattaaagaagtggtgagccacaagtacaagacaccaatggcccacgaaatctgctactccgtattatgtctcttctcgtacgtggctgcagttcatagcagtgaggaagatctcagaaccccgccccggcctgtctctagctgatggagaggggctacgcagctgccccagcccagggcacgcccctggccccttgctgttcccaagtgcacgatgctgctgtgactgaggagtggatgatgctcgtgtgtcctctgcaagccccctgctgtggcttggttggttaccggttatgtgtccctctgagtgtgtcttgagcgtgtccacctttctcctcttcactcccagaagaacaaactg

SEQ ID NO: 102012 - DNA, 498 bp, Homo sapiens
tttctgaggacacgggggaagagcaagtggtgacagcagagttcatcaaccggggagagtatgagattgacatcgcgggataccgcttccaggccaaggccaagctctaccctgtcgcctccctcttcacccagaagcgccgaaaggatgacatggagctgagtgacttacatgggaagtgatgccaccagggcagtctcacctcctccccatcatcttgtcctaaagtgggcgtcaccttggagcttctcttccttccgcctctgttcctcttctggagcctttgcctcccatctcttatctccttgatataattttgaacttgacctactttaaacttttttgctctgcagccttccttgcccttccacctcctcctcctaatattcactctgggctctacttcccttcccaccccttactcagctgctcgtggtggcagaagtatgtttgcatgacataacctggcttcactgttgacatgaatgatgaggccgg

SEQ ID NO: 102013 - DNA, 439 bp, Homo sapiens
gtgcagttcgtgtttgacgccgtcaccgatgtcatcatcaagaacaacctgaaggactgcggcctcttctgaggggcagcggggcctggcgggatgggccaccgccgactttgtaccccccaacccctgaggaagatgggggcaagaagatcacgctccccgcctgttcccccgccgcttttctcctctttcctctctttgttctcagctccccctgtcccctcagcttcagacgtaggggaggggttgccacaggcctccctgtttgaagcctgcccttgtctgagatgctggtaatggccatggtacccccttctgggcatctgttctggtttttaaccattgacttgttctgtgatgatgggaggggggcacatgctgagtctcccaaggctgcgtctggaggggcccctgcttctccagcctggacccccagcta

SEQ ID NO: 102014 - DNA, 465 bp, Homo sapiens
  misc_feature (1)...(465): n = a,t,c or g
ggagacaaccgcctctagttgtaccccagcctcgttggagagcaggaggtgctgtgcgccttgtagaatgccgcgaactgggttctttggaagcagccccctgtggcggccttccgggtctcgcagcctgaagcctggattccagcagtgaatgctagacagaaaccaagccattaatgagatgttattactgttttgggcctccatgccccagctctggatgaaggcaaaaactgtactgtgtttcgcattaagcacacacatctggccctgacttctggagatggatccttccatcttgtggggccaggaccatggccgaagccccttggagagagaggctgcctcagccagtggcacaggagactccaaggagctactgacattcctaagagtggaggaggaggaggagccttgctgggccagggaaacaaagtttacattgtcctgtagctttaaaaccan

SEQ ID NO: 102015 - DNA, 2260 bp, Homo sapiens
cgcggacgcgtgggtccgggtggagaacgactggtaccgggtgtacctggtgcggaagctcagcagccagcgggggatggagttcgtgcagggcctctccaagcccggccgcccgcaccagtgggtgtttcccaaggacgttgtcaagcagcaggggctgcggcaggaccacccaggccagatggataggtacctggtgtacggcgatgaatacaaggctctccgtgatgctgtggccaaagctgtcctcgagtgcaagccactgggcattaagactgctctgaaggcctgcaagaccccccaaagccagcagtcagcctacttcctgttaacactgtttagagaggtggctattttgtacagatcccacaatgcaagcctccaccccacgccagagcaatgtgaagctgtgagcaaattcattggcgaatgcaagatcctttcacctcctgatatcagccgttttgcaacatcgctcgtggacaattctgtgccattgttgagggcggggcctagtgacagcaaccttgatggaacggtgacagaaatggccattcatgctgcagccgtccttctgtgtggacagaatgaactcttggagcccctaaagaatctggccttctccccagccaccatggcgcatgcttttcttccaaccatgcctgaagacttgctggctcaagctcggaggtggaagggtctggagcgagtccactggtacacttgtcccaacggccatccttgctccgtgggagagtgtggcaggccgatggaacagagcatctgcattgactgccatgcgccgattggaggcattgaccacaaacctcgggacggctttcatctggtcaaagacaaggcagacagaacgcagaccggccatgtgctgggcaacccgcagcggagagacgtggtgacatgtgaccgagggctgcccccagtggtcttcctccttatccggctactcactcacttggctctgcttctgggagcgtcccagagttcccaggctctgataaacatcattaagcctccagtgagggatccaaaaggctttctgcagcagcacatcctgaaggacctggagcagttggccaagatgctgggacacagtgccgacgagaccatcggcgtggtccacctcgtcctgcgcaggcttctccaagagcagcaccagctctctagcagaaggcttttaaattttgacacagaattgtcaactaaagaaatgaggaacaactgggaaaaggaaatcgcagctgtgatttctcctgaactggagcatctagataaaacccttcccaccatgaataatctcatcagccaagataagcgtatcagctctaaccctgtggccaaaataatatatggtgacccagtgaccttcctgccccacctgccccggaaaagtgtggtccattgctctaagatttggagctgcaggaaaagaattacagttgagtacctccagcacattgtggaacagaaaaatggcaaagaaagagtgcccatcctctggcatttcctgcagaaggaagcagagctgaggctggtaaagttcctgcctgagattttggccttgcaaagggatctagggaagcagttccagaacgtccagcaagttgaatacagctccatcagaggcttcctcagcaagcacagctcagatgggttgaggcagctgcttcacaacaggatcacagtctttctgtccacatggaacaaactgaggagatcgcttgagacgaacggtgagatcaacctacccaaagactactgcagcactgacttggatctggacactgagtttgagatcctcttgccacgccgacggggcctgggcctctgtgctaccgctctcgtcagctacttgattcgcctacacaatgaaattgtctacgccgtggaaaaactctccaaggaaaacaacagctattccgtggatgccgccgaggtcactgaactgcatgtcatcagttatgaagtggagcgggacctgactccactgattctctccaactgccagtaccaggtggaggagggcaaagagaccgtgcaggagttcgatctggagaagattcagcggcagatcgtcagccgctttcctccagggcaagccccggctgagcctcaagggaatacccactctggtgtacagacacgactggaactatgaacatctctttatggacatcaagaacaaaatggcacaggactccctccccagcttcggtcatttagttgccattcagtgggacag

SEQ ID NO: 102016 - DNA, 518 bp, Homo sapiens
tactgattccggcacaggcgctccatacacctgagggaatgccctattacctttatttcttctcttctcttccctgataagaaaatgccttattgcctttatcatctgtctccctggtatctatccagcacagtgctcagtgtgtggttggccttgaatcactgtttgtttgaagaatgaataaatgcaggaataggatcacacaacgaagtgccaatgacatggccatcaatccagaccacaccctagttcagtgctctttccacttgcctatggggtggccttgtgcagtgaggacttgctgcaaataactccagaagtcagtaaaatgccccctagtttgtgtatatagcctgaatctctccccccatctcaacatttggaccctaaatagccactgctggtagagctagaccctcactgatgtgacccacagctttgcctttcagtccagcactcaccgattgccttcatgaaggcttcaaagttttcctggctctgcagttggtacttgccgg

SEQ ID NO: 102017 - DNA, 792 bp, Homo sapiens
  misc_feature (1)...(792): n = a,t,c or g
ggcacgagtgggactagaggagtaactggatatttcaccttcaccttatacctggagactcccaagccctccatctccagcagcaacttaaaccccagggaggccatggaaactgtgatcttaacctgtgatcctgagactccggacacaagctaccagtggtggatgaatggtcagagcctccctatgactcataggtttcagctgtccgaaaccaacaggaccctctttctatttggtgtcacaaagtatactgcaggaccctatgaatgtgaaatacggaactcagggagtgccagccgcagtgacccagtcaccctgaatctcctccatggtccagacctccccagaattcacccttcatacaccaattaccgttcaggagataacctctacttgtcttgcttcgcgaactctaacccaccggcacagtattcttggacaattaatgggaagtttcagcaatcaggacaaaatctgtttatcccccaaattactacaaagcatagcgggctctatgtttgctctgttcgtaactcagccactggcgaggaaagctccacatcgttgacagtcaaagtctctgcttctacaagaataggacttcttcctctccttaatccaacatagcagctgtgatgtcatttctgtatttcaggaagactggcaggagatttatggaaaggtctcttacaaggactcttgaatacaagctcctgataacttcaagatcataccactggactaagaactttcanaattttaatgaacaggctgataccttcatgaaat

SEQ ID NO: 102018 - DNA, 454 bp, Homo sapiens
ctatcctgggctgcaacatccttcgagttgaatattccttagtgatctgtgttagcgttcctggatccaagaaggtcatccttgacctgcccctggtaattggcagcagatcaggtctaagcagcagaacatccagcatggccagccgaaccagctctgaaatgagttgggtagatctgaacatccctgataccccagaagctcctccctgctatatggatgtcattcctgaagatcaccgattggagagcccaaccactcctctgctagatgacatggatggctctcaagacagccctatctttatgtatgcccctgagttcaagttcatgccaccaccgacttatactgaagtggatccctgcatcctcaacaacaatgtgcagtgagcatgtggaagaaaagaagcagctttacctactttgttctttttgcctctcttcctggacactag

SEQ ID NO: 102019 - DNA, 404 bp, Homo sapiens
ccaacggcacccatgtgatcatcctcttatgtctcaagacatgtggtacagtggtcaatgtggcgaatgacatgattgtggccagcaacctcgggacaggtgtacccaatcagacccctgtgagcagcggggacttactcatccgatccaacgggctgctgatcccggggacctgcgagattacacgcctgtacaccatttctgaatgatacgtttccaaccttcgaaactccccactggaaatcatgatccgaaatcatgggatcttaccattcactctggagatcttcaaggacaatgagtcctaagagccttaccgagaagctctgtccaacctcaagctacgagactccctgtactttggcattgaccccgctgggtacgtcatcggcttggaaagcttg

SEQ ID NO: 102020 - DNA, 1422 bp, Homo sapiens
  misc_feature (1)...(1422): n = a,t,c or g
acctaccgacttcccgcgtcgatccacgcgtccgattggacagaatgaaaaaggaccaagaagaggaagaagaccaaggcccaccatgccccaggctcagcagagagctgccggaggtagtagagcctgaggacttgcaggactcactggatagatggtattcgactcctttcagttatccagaactgcctgattcatgccagccctacggaagttgcttttactcattggaggaagaacacgttggcttttctcttgacgtggatgaaattgaaaagtaccaagaaggggaagaagatcaaaagccaccatgccccaggctcaacgaggtgctgatggaagcagaagagcctgaagtcttgcaggactcactggatagatgttattcgactacttcaacttactttcaactacatgcctcattccagcagtatagaagtgccttttactcatttgaggaacaggacgtcagcttggcccttgacgtggacaataggttttttactttgacagtgataaggcaccacctggccttccagatgggagtcatattcccacactaagcagcccttactaagctgagagatgtcattgctgcaggcaggacctataggcacatgtaggtttgaatgaaactgtagttccctttggaagcccagtcataggatgggaaagtgggcatggctctattcctattctcagaccatgccagtggccacctgtgctcagtctgaagacgttggacccaagttaggtgtgacacgttcacacgactatgtagcacatgccgggagtgatctgccagacattctaatttgaaccagatatctctgggtagctacaaagttcctcaggggtttcattttgcaggcatgtctctgagctgctatacctgctcaaggtcagtgtcatctttgtgtttagctcatccaaaggtgttaccctggtttcaatgaacctaacctcattctttgtgtcttcagtgttggcttgttttagctgatccatctgtaacacaggagggatccttggctgaggattgtatttcagaaccaccaactgctctttacaattgttaacccgctaggctcctttggttagagaagccacagtccttcagcctccaattggtgtcagtacttaggaagaccacagctagatggacaaacagcattgggaggccttagccctgctcctctcaattccatcctgtagagaacaggagtcaggagccgctggcaggagacagcatgtcacccaggactctgccggtgcagaatatgaacaatgccatgttcttgcagaaaacgcttagcctgagtttcataggaggtaatcaccagacaactgcagaatgtagaacactgagcaggacaactgacctgtctccttcacatagtccatatcaccacanatcacaca

SEQ ID NO: 102021 - DNA, 469 bp, Homo sapiens
  misc_feature (1)...(469): n = a,t,c or g
ggacggtgacaatatactggtgacaactttcatatacatcaagtctgtgaccgaacttaacggcgacataatcaccaatgcaagctggaggtgctctgagcgtgtggctcccagcgcttgaagccagaggggaggtgaatcatggtgagtggcttacataccctaatgtcaccccttcaccctccaacccccaaacttctttcctgtggtcagtatctgtcagcacttactgaggatccatcatgtgccatgcagtttacacacattatcactaatcctttctgcttatcgcaaccaaccagccacagaggcctacacctgccctgcatgcccagggtgcttcataaatgcctttgcccatttaccgtttataaagagaatcccattcatggtcatattatggcagcttacaagcctggcacagtccagttatgcagtcagccttggtgcctggctgccagccacatcn

SEQ ID NO: 102022 - DNA, 1706 bp, Homo sapiens
cccggtcgacccacgcgtccgagagccttcgcgggtgaggcttaacgcgcaggaggtctcacgagagtggaagcaactctcgcgaattttaaaatttatctttttgcctagcgactgacaacaggctggttgcttggcgtggaatcctaaagtggcctggctttgagactggagtgagaccccagccctaggctggggttctttccattatagaggagacggattcagaagggctacagaccaaggttgttgaaaaccagacatatgatgagcgtctagagattaacgactccgaagaggttgcaagtatttatactccaaccccaagacaccaaggacttcctcgttctgcccatcttcctaacaaggctatggctgataacagcagtgatgagtgtgaagaggaaaataacaaggagaagaagaagacctcacagttgacacctcaacggggctttagtgaaaatgaggatgacgatgatgatgatgatgattcatctgaaactgattctgattctgatgatgatgatgaagagcatggagcccctctggaaggggcctatgaccctgcagactatgagcatttgccagtttctgctgaaattaaggaactcttccaggtcaatcaactgaggtgtgtacctactgatgtactggaccacaaactgaagcctttcattcctgattttatcccagctgtcggggatattgatgcattcttaaaggtcccacgtcctgatggaaagcctgacaaccttggcctattggtattggatgaaccttctacaaagcagtcagaccctacggtgctctcactctggttaacagagaattctaagcagcacaacatcacacaacatatgaaagtaaaaagcctagaagatgcagaaaagaatcccaaagccattgacacgtggattgagagcatctctgaattacaccgttctaagccccctgcgactgtgcactacaccaggcccatgcccgacattgacacgctgatgcaggaatggtccccggagtttgaagagcttttgggcaaggtaagcctgcccacggcagagattgattgcagcctggcagagtacattgacatgatctgtgccattctagacatccctgtctacaagagtcggatccagtccctccatctgctcttttccctctactcagaattcaagaactcacagcattttaaagctctcgctgaaggcaagaaagcattcactccttcatccaattccacctcccaagctggagacatggagacattaaccttcagctgagacacttcccaagctgctgtttcaaggctgagctggcccctctgccccagctgagatggacagatcgttgtcagctacttgatgtccttgcccatgccacagcttggctcaggggcagtgcatgtcctgctgccctctctgccagagggcacagaacatgtttgtttaatgaacctgcctgcctcagattgctgtccccggggagttaatgcatctacaccactgtggggatttgagttataagaattggaatttctgagatcccatggaggttagattgggaggaaagcttaaaagatgtcctttttgtgagagggatggaattgttttctttcattcgtaaagttagtgagtaaagattttataaatcaaatgctctattatattgtcagattattctgctatttaatatgaaagaga

SEQ ID NO: 102023 - DNA, 555 bp, Homo sapiens
agactcttcaagctgatcatttcaacactcgcctcagctgtggagatgcagctcagacactctgggctcggacaggataccttggttttgtccgccggaccgagctcacagcggccactggagagcgtcatgatgcattgtatgtggtgggagcgctggatgaaacactggagctgagaggattacgataccacccaattgatattgagacctcggtgtcccggatccacagaagcattgctgaatggtaactccctcagcatacactgtgcttcccacttcagctttagtcataatctcaactgatctaattaattggtcattgggaccacatacctaccttgaaacatagagctccatgggaggagtaaggaaatagactgattcttgtcttgggtgtgccaatctgctgtggccaacaaagcctatccacaggagccagatgaggccatgaggcccctggggaatactctgataccttctgtggaatgctggaactgagtccttttttagtgatagactctcataatgggaagggactaacagatcattgat

SEQ ID NO: 102024 - DNA, 408 bp, Homo sapiens
cagacgttcaacctggagggatcccagatctatgaagactccatcgtcttacagtcagtgtttaagagtgcccggcagaaaattgccatagaggaagagagtgaggatgaaagcaatgaagaggaggatgaggacgacgaagaataccatgagtggaagagatatgaccgtcttggagaaaatatgtgtcttaattgtatctggaacggaggtggttatattgtttagtcggacctgttgagatcggttgtaatcaggatttgtttgtgctgtggtccttattctgtgggtacagatattggcgttgtggtatatcgtgaggtcgatgcggagagagtgcatcgatggtacttcagcgtacgtccgatggttgttgtttatctacttttgtatggtggaatatgatag

SEQ ID NO: 102025 - DNA, 1608 bp, Homo sapiens
tttcgtgccgtgacaagcccaaccggacggctggagagggcgagaagggcagacgggacatgcagcctcttccgcctgagccccggaagggtgatgtggctgcggcatcgccggcctcgctatgtctgccattttcaattttcagagtctattgactgtaatcttgctgcttatatgtacctgtgcttatattcgatccttggcacccagcctcctggacagaaataaaactggattgttgggtatattttggaagtgtgccagaattggtgaacggaagagtccttatgttgcagtatgctgtatagtaatggccttcagcatcctcttcatacagtagctggggaaaatgccagaatgtagttgccatcagatttgattgtgaacaaggactgactgcagaaaataatggaaaggatgtttaactcttttatctccgaacattgaatgagataaatttccagatgctgttctctattttaatgttattggaccaatgttctgtataaacaattaagatgtaaccatttaatagtctgtaacaatcaacctcagtactgtcactacaatattacattctgcaaatgttattctgttgtatcagatacaaaattttagtgaggtatctctaaggcacatagtagaaaacaaaattggttaattactcaagttcctttcactgtgatttggaaatgatttaatctttatagaatgagaaccttttttggactagcttttttattaaaatggctcaatttgtgttgataaggattgcattaatatttaatagtgcttgcttttcctctgggcacaccattttgatcattaaccagagtacctctactcttagcaaactctagtttatgacaagtatttaaaatatttaaaacaagcttatgcagttcttaaggacgaaggtaaatgagatgtaacttaaaaatagtattgggaaaatgttgatagttaacattagtggatttagactagccaaatgacatagtaggctctgaaacatcttgtcaagtatatgtattttgtgcatgaatttttgctggaaagactgtctttctctgaaaaacacaacgttcttagaatgaaaagaacaattataaaataattatcctatatgtgtttttcattctttttagtgtcatggcttcaaaaatgaaacatttattttaattgccgtaaaggaactgtatttttgttttgttttttaacacagcactttaaatccagtttgtgttttgtcaacttgaactggaatctcttttgttactttggaggtgataaatagttttcaaatctgctgatttgtatactgtggcacaagtatctttgaactttgatagtgaaaggagaccttcaacaatttttagtctaggtgagaggaatattaggaatgtgacttctaaattttacaatagagcagttattttaaggtcatggttaacatttcttaaggttcaactaaaattcagttaaaatttcagagctacgaggaacttaaatcttagctaaaaattacctgttgtagatagtattaattagattgtttgcagctattaattcatcattaaagataaaatgaagaaactctcccttttt

SEQ ID NO: 102026 - DNA, 410 bp, Homo sapiens
ggacccaaacccctggtccgcaccagccgggagccagggaaggacgtcacgacctcagggtactcctccgtcagcaccgcatgtcccacaagctccgtggacggaggcttgggggccctgccccaacctacctcagtgctgtccctggacagtgactcgcacacacagccctgccaccatcaggccaggaagtcatgtttacagtggcgacccccaagtcccccggagagcactgtttcccagcaacaggtgaagcggataaacctatgcatacacagtgaggaggaggacatgaacctgggccttgtgaggctgtaagagtgtcagcacatttgccgcagtggatgtgtactgagggggctggaagcgaagggtgggagcatagcataggaacgctgcatataccatgg

SEQ ID NO: 102027 - DNA, 392 bp, Homo sapiens
ggattagaaccacaggactcctccaagtctgtaggggtactttctctatgagaatcgtcatgttagtccatctaactgacctcatctctctttcaatgcaggtatcactaccattaaagttaacattcgtaatgccaattccctgggaggaggcttccattgctggacctgcgatgcccggcgccgaggcaccctacagtcctacttggactgaacaggcctgatggagcttgtggctggcctcagatacacctaacaagcttaggggcaagggtcattcttctgctttaaaaagtgcatgaactgtagagctttaaacaatcatctccttaacaggggtcgtaggcctgggttgcttctattaccttttctttgacataacgaaaataact

SEQ ID NO: 102028 - DNA, 975 bp, Homo sapiens
ggcacgaggataacattaaacagctgaaagagatgaaatttacttatcttattaattatatccaagatgagatcaacacaatcttcaatgattatatcccatatgtttttaaattgttgaaagaaaacctatgccttaatcttcataagttcaatgaatttattcaaaacgagcttcaggaagcttctcaagagttacagcagatccatcaatacattatggcccttcgtgaagaatattttgatccaagtatagttggctggacagtgaaatattatgaacttgaagaaaagatagtcagtctgatcaagaacctgttagttgctcttaaggacttccattctgaatatattgtcagtgcctctaactttacttcccaactctcaagtcaagttgagcaatttctgcacagaaatattcaggaatatcttagcatccttaccgatccagatggaaaagggaatgagaagattgcagagctttctgccactgctcaggaaataattaaaagccaggccattgcgacgaagaaaataatttctgattaccaccagcagtttagatataaactgcaagatttttcagaccaactctctgattactatgaaaaatttattgctgaatccaaaagattgattgacctgtccattcaaaactaccacacatttctgatatacatcacggagttactgaaaaagctgcaatcaaccacagtcatgaacccctacatgaagcttgctccaggagaacttactatcatcctctaattttttaaaagaaatcttcatttattcttcttttccaattgaactttcacatagcacagaaaaaattcaaactgcctatattgataaaaccatacagtgagccagccttgcagtaggcagtagactataagcagaagcacatatgaactggacctgcaccaaagctggcaccagggctcggaaggtctctgaactcagaaagatggca

SEQ ID NO: 102029 - DNA, 450 bp, Homo sapiens
cagcactgaggcttacattttaacctgagtttgggagaggaggaattttggagcatatcctgtagattctaaagcaaaatattctgggtctcctgcttgtagaatggttgtgagtgtgacttcctttttctatttttattttatttttttgaaacagagtctcgctctgttgcacaggctggagtgcaatggcactgtctcggctcgccgcaaccttcatctcccaggttcaagcgattctcctgcctcagcactttgggaggccgaggtgggtggatcatgatgtcaggagttcaagaccagcctggccaacatggcgaaaccccatttctaatgcaagcagggcttaaaacctagatgacgggttgatggctgcaggaaaccagcatggcacatgtatacctatgtaacatacctgcatgttctgcatatgtatcttgcaacttaaaa

SEQ ID NO: 102030 - DNA, 428 bp, Homo sapiens
  misc_feature (1)...(428): n = a,t,c or g
gaaaactctatccactgaagatagtatttggaatgaatggaagagtatgggttaagggaaaaaccgtccagcagactttaattttggcaaatgttttagaagcttgtgaactcatgacattagatcaaagaatactaatgttcatattggcagaaagttgatataggtggacttttttaatgggtccgttgagccaagaaaccatgggtttcctggggaaaacttttttcaggtgaacttctccccatttagttattcagaagacaaggtatgaaggtacatattatcttattggagtcctaattaaaatatttttataagtaaattactgattttcacccatgctcttgtgggagagaaaatcattacagaatcatgatgtatttttttattctgtacaataacatttactaaaacattttttttan

SEQ ID NO: 102031 - DNA, 457 bp, Homo sapiens
cgcagaagacgggtgatttctgcattttccatctgaggtactggggtcatctcactagggagtgccagacagtgggcacaggacagtgggtgcagtgcaccgtgcgcaagccgaagcagggcgaggcattgcctcactcgagaagtgcaaggggtcagggagttccctttcctagtcaaagaaaggggtgacagatggcacctggaaaatcgggtcactctcaccctaatactgcgcttttccgacaggcttaaaaaacggcgcaccaggagattatatcccgcacctggctcagagggtcctacgcccacggagtcttgctgattgctagcacagcaatctgagatcaaactgcaaggcggcagccaggctgggggaggggcgcctgccattgcccaggcttgcttaggtaaacaaagcagccaggaggctcgaactgggtggagcccaccacagc

SEQ ID NO: 102032 - DNA, 365 bp, Homo sapiens
gcggcaaggaaacatgacagctgccctacaggcgactctattgaacccccctatcaacaccaagagtcaggcagtgaatgaccgggcacgcggcattgtcttgaacgtgctcatctcttttaaagctaatgatatagaaaaggcagttcaatctctggacaagaatggtgtggatctgctaatgaactatatgtataaaggatttgagagcccgtctgacaatagcaatgctatgttactgcaatgtcatgaaaaggcacttgctgctgaaggagtaacgtccattgttcgtgtctcgactgccttaatacctgcgtagactggcaggaagaacatcatctgcctcgggaggggaatcgccggcc

SEQ ID NO: 102033 - DNA, 390 bp, Homo sapiens
ggtcaccccattccctatgtcctgtgacctacaaggtgactgtgcttgtcggaacccccaggcccaagaacacagccggaaagacctccggggatacagccatggctaaggaaggacaagaagttgtcaaagaattcccaacgccaggacccacatccctttggtattgatttcacagtcagctgctcaacggaatggcctctccacaccagggatccttagcacccaaccggtctgcctttaattatacctaggatggactcacattgggacgatagaacgctgttactagaagctggatgatgataaggtctactaagcgacatgggatatagtaggataacaagtatgtagttaatattctttcaaacgtgatgattgtgacttccg

SEQ ID NO: 102034 - DNA, 327 bp, Homo sapiens
ctggtcttgaactcctggcctcaggtgatccggcggccttggcctcccaaagtggtaggattgcaggtgtgagccaccgtgcccgactgaaacgtactatctatatatatgtatatatttaatcatattaccataggtaaacaaattcccggtaattctttcatcatcacatacccagctagtgttcagatttcctacactggctcctaatttttttttcttacagattatttgaattcgatccaatccaggtattgtaattggctgttaaacttaagtatcctttaatgtataggttccccttaatctcttcctttttttaatttc

SEQ ID NO: 102035 - DNA, 370 bp, Homo sapiens
ccatcggaaaagcacaatatttgggtgggagtgacccaattttccaggtgccgtctgtcaccactttctttgactaggaaagggaactccctgatcccttgcgcttcccgagtgaggcaatgcctcaccctgcttcggctcgtgcacggtgcgtgcacccactgacctgctcccactgtctggcactccctagtgagatgaacctggtacctcagatggaaatgcagaaatcacccgtcttctgcgtcgcttacgctgggagctgtagaccggagctgttcctatttggccatcttggctcctcccccgatttctcttttttttttttttttggaaacaaattttaattttgcccccaagtcgggaggga

SEQ ID NO: 102036 - DNA, 366 bp, Homo sapiens
ggccaggctggtctcgaactcctgatgtcaggcgatcggcccacgtcggcctcccaaagtgctgggattacaggcgtgagccaccgcgcccggcccagctctatatctttcattctagagttgaggggatccgtcagaaagaaattctgattattccttaaagaactcaagtgatctgatagaccacacaaggccagaaatcaggtaacctcaaatagtgctgtccaatagaattttctgcaatgacggaaatgttctaaacctgaactgtccaataaattacccaccacgtgacaatcgagcatctaaaatgtagctagtacaacagagaaactacattttttacttaatagttaaataactccg

SEQ ID NO: 102037 - DNA, 981 bp, Homo sapiens
ttttttttttttgtggtttggaatatttttatttaatcagaacttccagagggttcctagaaacctgcatttttaacaaggactgcagatgattcctaggttttgattaaaagtgtggtttggggaagcaactttacccctttattgggtgttaaattaccatatacaataaaaccaaaaagtcaccgtaatggaacaaaaaattgctttatacaaaatattagtagatacccaaatataatatggtcttaaaaataaaatcatatgtatatagttgtattcctaagtacagtaggtgcccccctcatccaaaggtttcccctttctgtgggttttggggttacccggtaggtcaaccacattctaaaataggtggagtactgtacaagaagatattttgaaaagcaagaggagaccaaccacattcacgctaacttttattataggtatgttatcattggtccgattaccatattattaaatctcttgctatgcttaatttataccattatactttatccataggtatatatatatggaaaaaaccagtgtataaaggtttggtactgtttgaggtttcaggagttcactgggggccttggaatgtatctcccgaagataagggggaactactgtaagcaaaatcgaaagctatacaacaatcagaaatgggaagagagcaaatccaagtataagtgaagacattcctctgaattcccagcattcatcgagcatcaaaaacgaccaatcttttagtccttttcttgtacattattctgtatccacattctctgcatctgattggatccctagattttatttcattttctgtgtgacactctccacagatatatatcattggttgctgctttggaggttgaacgtccttctgggtgtccattgttagcccctacacagcacggaaaaactcactccgcgtttccaaatacaacccggctagttcaggtgtcgagtccaact

SEQ ID NO: 102038 - DNA, 394 bp, Homo sapiens
ggaaaactgcagaaaccctgtttctgttaaaacttacattagccccgtttcacagatgagaacctggagatgtgtactgtcatacagtcagttcagtgctaccaccgctcctggcatcctcctcgccccctgaacctgccccccaccaccagagccccccagcccactcacctgtgctgtgttggttccgcagactcggcggtggcgaggactgggctccctcttccggagggcgtgctgtgtggcgctcccactgcagctgcttctgctgctgttcctcctcctgctgttcctgctcccaatcagggaagaggaccgcagctgcaccctggccaacaacttcgcccgctccttcacgctcatgctgcgctacaatggcccaccacccacctaa

SEQ ID NO: 102039 - DNA, 341 bp, Homo sapiens
gaatcacttgaacccaagaggcagaggttgcagtgagccaagatcacgccactgctccagcctgggcgacaagagcaagactccatctcaaacaaaaaaattttgaggtgctgtctcaccatgttgcccaggctggcctcagactcctcagggttcaagagatcctcccactttagcctccctactagctgggattacaggcattcgccaccacccctggcctctgtcccctttttactgatgtgttagctgaggctctaaatggacaagacagttgtccaggatcagttaggagcactgtaacctcagaattgactttggccctgagcctcagattctct

SEQ ID NO: 102040 - DNA, 365 bp, Homo sapiens
tgctgttaaattgttgctggagtcactgtagtcatctgttttgaaatgcacagaggtttttcccttgctgggggccagtgcttataaagagtggaagaatgccaaaacctggtctttccttttcctcaaattgaagtttagttactggcttctagtgccttatttcccagagatttttagtggaacaaaatgggatgtcttgatagtatcttttagagtggatattggccgggcgcagtggctcacgcctgtaatcccagcactttgtagggccaggacaggcagatcacatgaggccaggagttgaagacgggcctggccggcatggcaaaaccctgtctctactaaaaatacaaaaaaattag

SEQ ID NO: 102041 - DNA, 371 bp, Homo sapiens
gggcaaacggatggctggaggccctgagatgatgcagcttaggctggatgggaaccgcctctacatcaccacgtcgatgttcagcgcctgggacaagcatttgtaccctgatctcatcagggaaggctctgcgatgctgcatgttgatgttgacacagcattaggagggctgaagttgaacccctacttcctggtggacttctggaaggagcccctcggcccatcccttgcccatgagctccgctaccctgggggcgattgtagctctgacatctggatctgaactgcaccctgatcacccacactcgctattgtgggccctcagttacttggggacctggcttcattatgctctctcttggcacccgacc

SEQ ID NO: 102042 - DNA, 370 bp, Homo sapiens
tagcaccatgacttccatgcccaatccctcttagccaatatagagcgtattgccatactagtctttgccgcctgcgaagcagcggcggtcctatccctactagtctcaatctccaacacatatgggctagactacctacataacctaaagctactccaatgctaaaactaatcgtcccaacatttatataactaccactgcactgcagcctggctgaccgggcgagactccatctcggaataaaaccagaaacaggccttggccaaggacaaggcacttgagatcattgcaaaaaaactcctggattgggcccatgggctaaggcttggagccctcagcttgggggcggccttgggggcagaatgcctag

SEQ ID NO: 102043 - DNA, 373 bp, Homo sapiens
  misc_feature (1)...(373): n = a,t,c or g
caaaaaaacaccttttgtcctctttaagccataaatttatattaataatatccaaatccatgttgaaccagtatttttgaagattgaccttcaggataaactaatagcacaatcttcatgccctttcattcataactaactgaaaaggttgacttttgtaccaggaacccaacgaagaaaacttgtatcttgtcagggttggtaacctggctgccattgactgagaccaaaatatcccaacagtttgtcctcagctgctaagctgctgtggttagaatcaaacgtagagtttctggcctggtgcggtggctcatgcctgtaatcccaacactttgacagtcctaggtgggaagattgcttgggctcaggagtn

SEQ ID NO: 102044 - DNA, 342 bp, Homo sapiens
ggccgaataggaacagttccagtctacggctccgagcatgagtgacgcagaagacaggtgatttctgcatttccaactgaggtactgggttcatctcactgtgacttgttagacagtgggtgcagcccatggagtgtgagctgaagcagggtagggcatcacctcacccagaaagcgcaaggggtcggggaattccctttcctaggcaagggaagccgtgacagatggtacttggaaaattgggacactcccaccctaatgctacacttttccaacggtcttagcaaacggcacaccaggagattatatcctgtgcctggcacggagggtcccatgcccatg

SEQ ID NO: 102045 - DNA, 331 bp, Homo sapiens
atggggtttctccatgttggtcaggctggtctgaaactccctacctcaggtgatcccccgacctcggcctcccaaagtgctgggattacaggcatgagccaccgcgttcagccttattatgtgctttctatatgtcaaacactacactcagtatgtatatgccttctcatcatactcctcactacagtcctatgagataacaccaggatgagcaagtgaatatgaagattagagaaaaagacaagagtaagagtgaaagttgtttccttggaatggccagaagcctaggaaatatttctctgttttgttggccctcaggtcccaatgccat

SEQ ID NO: 102046 - DNA, 341 bp, Homo sapiens
gatgaaatccatttcttgttgctatttgaaatggggcattaactagattttgtattttgagaccttaagagttaaataaaaggagctaagtttccagctttatgcaactgcttatttaacagttctccacacgtgactctggcatggtgatttcaacaggaagggaggatgtcctattcatattattttttaattgtactttccttacctgtagaaatcggtgccaccatttacctagctgtgcaagccattgtgttgcttaagcaggtcttgaactcctgagctcaagtgatcctcctgcctcagcttcccaaagtgctgggactacaggcctgagccac

SEQ ID NO: 102047 - DNA, 303 bp, Homo sapiens
tgactattgtgctcctttataattctgaagactaatcagcactttttaacaatgtttataatcctataagtctagatgtatccaaaggtgaagtatgtaaaaagcagcaaaatatttatttcaaagacttcacttctgtttcctgaatctaaagaaagacaacatgctgctttttaatcataggatggagaattttaaagaactgtttgggccaggcacagtcgctcatacttgtaatcccagcactttgggaggccgaggcgggtggatcacaaggtcagcagatcgagaccatcctggcca

SEQ ID NO: 102048 - DNA, 336 bp, Homo sapiens
tttatttaaagcatttatgtatgtatgtatgtaagtatttaagacagggtctccttatgttgcccaggctggtcttgaactcctgggctcagaggatcctcctgccatggcttccaaaagtgctgggattacaggtgtgagccactatgcccggccataaagcatttccatattaacttttaaagacataagattaaattggatagatttccaaactctgatttctccttttcttgttttgaaaatgtgtatttgtcatgttgaatgtgatgtgatagctactgatgtatctcatagtacagtaaaagtagtctataaacacaggaagaaaagatg

SEQ ID NO: 102049 - DNA, 326 bp, Homo sapiens
aatttactgagtttacctgaaggggactaaatagggactgtatgtctaacgttctacctctacataagttgaatgctgataaaaggaactagtagacaactatgtatattgataagcactgttaacaaaatgcaaaaatatttctaaacacttttccaaacgtttactactttaagttaaaaatagttacatatctgaaaattacccctatttactctgcactttaaaggttgggagcatagtctcatgcctgtaatcccaatactttgcaaagccaaggcatgaggattgctttaggccaggaattcaagaccagcctgggaaac

SEQ ID NO: 102050 - DNA, 327 bp, Homo sapiens
ttgggtagggacacatatttaaactatatcaatggataagaattatttaagccaaggattcaagacaaatggaccttagaatagcatacacaaaagtataaagaaagagggcatatttggaaatactgaaagaatgggtgtggggtatgtgcctgtagtgccaaccactaaggaggcggagtcagggggatcgcctgagcccagaagttggaggccacattgagctatgataatgcccggcactcctgcatgggtgacagattgagaccctgtctctttaaaaaaaaaagaaaggtaaataaagaaagctagaatgaatggaatact

SEQ ID NO: 102051 - DNA, 363 bp, Homo sapiens
taccctgttgatcttctgcttagttttatccattattaaaagtagtatgttaaggtctccagctgttgtttttgaactactgctctcttccaatctgttagtttttgcttcatgtattttttgggggctgtttttggatgcatacatgtttataactgttgtatcttcttgatggtttcaccctgttattatcaaatatccttattttgctctgataacagtttttgttttaaagtctctccagcttttttggctgggtggtggtggctcatgcctgtaatcccagcactttgagaggccaaggcaggcagatcacctgaggccatctgagaccaacctggccaacatgctgaaaccccatct

SEQ ID NO: 102052 - DNA, 376 bp, Homo sapiens
  misc_feature (1)...(376): n = a,t,c or g
atggaaatgtaaatgcataaaacataagtctttgaaattgtaagccattaatattttgcatcatttgttaccacagccaactgagcctaaggtgactaatgccttctacttctaagtatttctaaattatctgaacctttaccacttttcacaggtgtactcattctgtattgattgtctaaatgaggaagtgttcttggaattattctttaggttaggacagtacacttgaaggtgaactaaaaaaaatatatatgaaacgtgtcttaaagaaatggtgtctaggctgcgcgtggtggctcacgcctgtaatcccagcactttgggaggctgaggcaggcagatcatcagaggtcaggagtttgagaccagcctn

SEQ ID NO: 102053 - DNA, 378 bp, Homo sapiens
ctgaaatatttatggatgaaaatgattgaatctctagctgttgcttcaaaataatctagtgtgagtgggcagagggagttatcagggaaaccagatgttttctaatcattgttgaagctagtaatgggaagacaggagtttattaaactattatctacttttgtatctgttttatggtttcaataatagtcaaaactatcatgtatttgcatttttaaagtcattgttggttattgaagaggaaaatgcttcgtacaagcatttctctacaaagagtgttctggcggccaggcacggtggctcacacctgtaatcccagaactttgggaggccgaggtaggtaggtggatcacttgaggtcaggagttcgtgaccagc

SEQ ID NO: 102054 - DNA, 366 bp, Homo sapiens
gttaaaaaaatttctgtatatggatttgtctgcatctttgtagttctgtcagtttctgttttatatgttttgaggccaaattaggtacatacaaaaacttagatttattatatctgtaggtaaatggaatcttttatcattaagaagaacccctttttacattttgttatgggtatagctatagaagcttgctttttttaaaaaaaaaacaacaaccggtaatcaatttattaaaatagtcaactttaaatatctgcaatggtgacttccacctcaactcctggctcaatactgatggaagtaatctgcttaatctcagaaggactgtggaggtcaatgagccacttgtggattctcatctggaag

SEQ ID NO: 102055 - DNA, 366 bp, Homo sapiens
gtgcatctgtgtgacgtgttaaaattgcttcctgccactgctcgtgtttggtcagatagtaggttaggctgaaggaaagagaggtagtagccacaggacagataagctttgagaagccagagtggttggtaaagtatttggctttcatttagtatctctcatatatatatatatatatatatatatatatattttttttttttttggtaaaaaggaggttttgctgtgttgcccaggctggtttagaactccggggataaagcaaccctccccaatgggcttccccaattgctgggattacaggtgtgacccattgtgcccagcctagaatcatattttatacaaaataaattttaccaaaatttc

SEQ ID NO: 102056 - DNA, 367 bp, Homo sapiens
ctttctcttacacacatctgtatgatacactaagacctttttccaaattgcacagagagagaaaaagggattgagttgcttccatatttttgctgctcattgtcctcttttcagtactattttattttcagaattttttctagccacacttttcttctcaagcacagcaggtagcctttgcatagctatgagagtgacaggattcttgtcaaccagaccatagacgcctacccagccaggtgtaagaaggtccgctgtgggcagagaagttgatgagccagcactttgagagaccgaggcaggtggatcactcgaggtcaggagttcaagaccagcctggccaacatggcgaaaccccatctccact

SEQ ID NO: 102057 - DNA, 361 bp, Homo sapiens
gtctcctaagggcgttttaagagttgctcagattcctgatggtacctttttgggtctggaagactaaggcccatcttcttttgacaaagattctacagaaaggaggctttataacatagtagaaaatcacgtaggatctggagtcaccctgcctgggttcgaatcctagctctgcctcttctgtgacctcagataagttatttaacacctctgaatctacattttctaatttgtaaaatagggttaaagtggtgcctctggccgggcacggtggctcacacctgcaatcctagcactttgggaggctgaggtgggcggatcacctgaggccaggagtgcaagaccagcctggccaacatgg

SEQ ID NO: 102058 - DNA, 387 bp, Homo sapiens
ccctgatttgatcattacacaattatacatgtatgaaaacatgttggaccccataaacatgtacaattattatgtcaatcataaatttaagaaaataaaataaaatggacataagatatgagaattaataagtgtattactaaagtatagtaaacacatcacacaagctattagcactggcatctctatatcttagcttgttttggaaatgatatgcttattcctcattttaaaatagacacaataattcctactttccatagttgctgtaaagatcagagagaatgtttccaaaatgcctaccataagaattagcatgtcatcggccgggcacggtggctcacgcctgtaatcccagaactttgggaggccgaggcgggcggatca

SEQ ID NO: 102059 - DNA, 387 bp, Homo sapiens
  misc_feature (1)...(387): n = a,t,c or g
agtttgtgtatatcgtgctgattcagaagagaatgaaggcattggtcaagagataatgtcagactaatcagacatgttccaatcgattaatgcatttggaggatttccaaatatttgctgatctaaggacggtgaggtatatgatgggaaacaaatctgagaaaagaaggatggtagatgctttcccattgtgacctgtgatcattttgacaatcaggacaagatgtggaggtggaagacagtgatgttaatgctcctgacacctggcttgaaagaaaaggtcaagtgtggtggctcatacctgtaatcccaacatgttggggggcagaggcgagaggaccacttgagaccaggagttngagaccagcctgggcaacatagcaaggn

SEQ ID NO: 102060 - DNA, 380 bp, Homo sapiens
ctggtttctttatgaataaacaaaatttagatacttagagtatgtcagatgggtacattgctagtagaccagtttattttatggcagggttttcggacactcttctttactcaggcttacccagcgtaatgctagacacggaggtggcactcgataataaactctagatgatttttctaacattgccttaattttctcgtgaccctctccatctggaggaatttgttgttacatgctaatgtttggtacacaatggcaaatatatatatatacataaaaaaaaaaaaaaaaaaaaaaaaaaaaaaaaaaaaaaaaaaaaaaaaaaaaaaaaaaaaaaaaaaaaaaaaaaaaaaaaaaaaaaaaaatttattttttttggg

SEQ ID NO: 102061 - DNA, 380 bp, Homo sapiens
tttttttggtagatatggggattcaccatgttagtcaggctggtctcaaactcttgacctcaggtgatctgcctgcctcggcctcccaaagtcctatatttttttttcttttttttttttttgaaaaacaaattttggcccaggcgggggggtaaacccttgctaagccccaccatttgggaacttgggtttacttaaaattccaaaaatttccccaaactgggggggcaatccttgaatccccactttttgggagggttaggccggaaaatggttttgaccccttaacccaaggtttccagggacttaaaatcggcccattgcattcaatttggcaaattggccaaaattttgtttccaaaaaaaaaaaaaggggtctg

SEQ ID NO: 102062 - DNA, 349 bp, Homo sapiens
cagggctttaccatgttggccaggctggcctcaaacccctgacctcaggtgatccactcgcttcggcctcccaaagtgtcaggattacaggcgtgagccaccgcacccgacctaaaattatttttaaattaattttcttccttttttttttggtcgcttaggagataatctgagctgagcaaatacgtgagtggtcagagcgtgtggggacaatgtatcctcatgggaaggagctgcgggggggaactggaggagagaggagcaatgctggaacactctccacggatccacgaggatcatacatctggccgcgtagccacggattgattagtcgatccactgagactcg

SEQ ID NO: 102063 - DNA, 367 bp, Homo sapiens
catttatgaagtggattggaaaagaagaaattctgaattcctcaagaacaatggaatgtagattttgattatcatgcagagccttacaagagactcaataaatcaaaatatgcctctcttaaagacttctggccagaagcagtggctcacacctgtaatcctatcactttgtgaggctgaagagggcagatggcttgagctcaggagtttgacaccagcctggacaacatagggaaacctcatctctattaaaaatagacatagttataacaattatgccggcatgatggcacaagcctgctagctcagttacttcatgaggtttacggtggcagtggggctctgcgcgtgtggtcaactctgtgcg

SEQ ID NO: 102064 - DNA, 361 bp, Homo sapiens
gccattataacaagaaaatgcccattaatgtaattaactaatgtaattaattgatttattgactaacacgtataaacacttgggtgttggtcctgattattaggtgtatacccaacaatgcagtataaatataataggttcatagactcttcagcagataatgattttatataaaatgagtaaaagagactattggagaataaattaaaacccttgagtatttttcaaaattatgctttccagcttggcataaccccatctctaccaaaaatacaaaaattagctgggcgtggtgtcgtgcacctgtgatcccagctgctagggaggctgagatgggaggattgcttgggcccgggaggcg

SEQ ID NO: 102065 - DNA, 319 bp, Homo sapiens
aagaagttgattcctaccctcatggatcatggggcggggttcaagagttcagtgaaggaaataactacagctgtggtggaaatggcaagagaagtagaattagaagtggagcctgaggatgggaatgaattgctgcaatctcgtggtaaaacttgaattgttggaaagttgcctctaatggatgagcaaaaaaagtggttacttgagatggaatctactcctggggaaaatgctatgagcattatggaaatgacattgacggatttaaatacttcccaaacttagtaaagaatggcttttaaaaggcttgaaagaacca

SEQ ID NO: 102066 - DNA, 368 bp, Homo sapiens
agagtcattaccaatccctaatctcaagtaatcatggacacaaacactgtggaaggcctcagggtcctctgcctaggaaaaccatagacctttgttcactagattatcagctgaccttccctccactattgacccatgaccctgtcaaatccccctctgtgagaaacacccaagaattatcactaattccatgaagagcaaagaaaaacttttacccttgttacatttgccaaaaacgttagtgaacatcccagctaattttcattagccaacattcaagggggggaaaatgaagctttactttttgaaggggggagtgtaaatgaaaacggggccaaattaaaaggtggcacattataaatataacg

SEQ ID NO: 102067 - DNA, 408 bp, Homo sapiens
agtataccacatacggttaatgtatagtacataatacttggtaataactgtgttacttgtttacatatttactatttatcattattttagaatgtactattacttataacaaattgtggcccaggcatggtggctgatgcctgtaatcccaacactttgggaggctgagacgggaggatcagttgagcccaggagcttgagatcatcctgggcaacatagtgagatgccatctttacaagaaaaatacccaaaaaaattagccagacatggtggtgcatgcctgtggtctcagctacttgagaggctgaggcaagaggatcgcttgagccagggagttcaaggttgcagtgagcagtgatcacaccactgcattccaccctggatgagagagtgagacgagaccctgt

SEQ ID NO: 102068 - DNA, 405 bp, Homo sapiens
  misc_feature (1)...(405): n = a,t,c or g
tttttttttaaagaaaaaattatataaaaatttaaaaagaagagtagagaanaagtaaaatgtgaacacatgtctctgtctacacacacacacacacacacacacacacacacacacacacacacacaattattttaaagagactcctatacatcaatacatatagatttaacaactgaagttcaaatgattttcagagcgtacgccttagttttttgagtataatatttattgactgttatcatagatacagaagtagggtgttcatgagtctagtttgacacatacagaatttgaagtgcctgtaagacatccaactgaatatacccaaccatcttttgggtttgtaggtttaaaagaaaaggttgatactcaaggtatacactcacgcattgtatgctcaca

SEQ ID NO: 102069 - DNA, 409 bp, Homo sapiens
catgccttattcaaccagtcccctattaaggacatttggactctttccagtctttggctgttataaatagaagcagtgtactttttgccttacagtataaaaaatgttataaaaatgtaaaatagtgttagcaagaagtgggtgcagagtttcaattaaaaaaaacgttaaactcctggacaggaaagacagccaataccaaaatgagtgagaggggtgctgttctcctctttctggctaccattaaaagttaggccaagggctgggcacagtggcttacacctgaaatctcagcactttgggaggccaaggcgggcagatcacatgagcttaggagtttgagaccagcctgggcaacatgacaaaaccctgactctaataataacaacaaaaactagccaggtgtggt

SEQ ID NO: 102070 - DNA, 379 bp, Homo sapiens
gagagctgcaccatgagcttcaataccctgcatgccagcctaggtaactgcgtctcaaaaaaaaaaaaaggttaaaaaatccaaatggggctttgggaaaattaaaggcaaattaaaataaaaaatttggaccccatcctactttatgactttgcaaaattggaaggggactttaaaatagttaaagggcccaggcccaaaagttaatgccggaaattccagcattttggaaacctgaggcggccacatcatttggggccaggagttcaaaaccaccttggcaaaatgggcaaacccccagttttattataaaattccaaaaatcacccgggcttattggcacacccctgaaatcccagcattttgggaggctaaagca

SEQ ID NO: 102071 - DNA, 366 bp, Homo sapiens
gccagggcttttttgttggtggtgcggtcaccatggttgccacatctcaaggacatggttatttccttgactacctatgctgccttacctccaaaactcatatgttgaagtcctaacctccagtgtggctatatttggagactgggcttcgagggaaataattaaggttaaatgaggctataagggtggggccctgatcccatagaattagtgtccttataagaagagacactctccctttctctctccctttttctctctccctctccctccttctttttctctctgtccctctctctctctctctccttctttctctcactctccctcccactcctcccaccgagccctgaggaaaggccacat

SEQ ID NO: 102072 - DNA, 325 bp, Homo sapiens
  misc_feature (1)...(325): n = a,t,c or g
gctgagcccaacttggggttgacaatccagaagcagaggcacctgataatagaatcagtaacacaataggtgccagtgatcgaaggcttacattctgccaggccctgtggacacctgaacttgcactgaattctcaaccccgtcccaatataattcccactaaacagatgagaaaatttaggcttaaaaatgaagtagtcatttgagaccagctcgggcaacatggcaaaaccccatctcgacaaaaaatacaaaaattagccaagtgtggtggcatgcgtctgtagtcccagctactcgggaggctgaggcaggaggatcgttn

SEQ ID NO: 102073 - DNA, 318 bp, Homo sapiens
ggagaacgtcgctatggaacctgcatctaccagggaagactctgggcattctgctgctgagcttgcagaaaaagaaaaatgagctcaaaatttgctttgagagctacagggaattgctattactcctgtaccttctgctcaatttcctttcctcatcccaaataaatgccttgttacaagaaaaaaaaaaaaaaaaaaaaaaaaaaaaaaaaaaaaaaaaaaaaaaaaaaaaaaactcaggcgacgaatactgtgtcaccatacgacctgttcgccccgtcctaacctatatcgtcccactctacggctgcccccgcc

SEQ ID NO: 102074 - DNA, 374 bp, Homo sapiens
acagaaatagcgacttgtgcatagatatggataagggtggttgttgcggtttttttggtggcaatggaaaaatggaaacaacctaaatgtctcactaattgatggatggttaagttatgatacattggggtataatggaatactgaactgccatatgtatatactgacagagggagactctcaaaaaaaaaaaaaaaaaaaaaaaaaaaaaaaaaaaaaaaaaaaaaaaaaaaaaattgaccctgccggaaattccaaaatttataaccgaaaaatctttaaaaccccccggggtttctttaaatgggcacttggcccccttctaattctttttttttaaaacttggtttgcccttttttttggaaaaaaaccg

SEQ ID NO: 102075 - DNA, 349 bp, Homo sapiens
tcaacacttactggtttggtttttgaattggatcatgtaatatgtactctttggttctggtctcatttgctgaacattatgtctgtgaagttttttccatttttttttttaaaacagagtttcgctgttgttgcccaggccggagtgcagtggcacgatcttggctcactgcagcctccgcctcccaggaaaatggcttgaacctgggaggcggaaattttagtgagcaaagattgcaccactgcattccagcctgggcgacagaggaagacccgtctcaaaaaaaaaattaagggccaagggttgaaccttgaaaccccgggcctttaaataccagagggggtttttg

SEQ ID NO: 102076 - DNA, 348 bp, Homo sapiens
cctgcctcagcctcttgaggagctgggacgcgcaagcaccgccaccacacccagctaatttttttttaatgtttaatttttgtagagttggggtcttgctatgttgcccaggcttggcttcaagcgatcctcctcccttagtttcccaaagtgctaggattacaggcatgagccactgcacttggacaatctttttatcttttaaataaccatatagtgattcctgcttcagtctataatggaagagttttaaaattaaaacaaaatccacaataattcaaggtttgtatcatactacaaataatttctagatgaggaagagtagctggactagttggacttaaagtg

SEQ ID NO: 102077 - DNA, 337 bp, Homo sapiens
ctggacagtcgatcaccgtctcctgcactgctaccaacagtgatgttgggagttctaaccttgtctcctggtaccaaagttctaaccttgtctcctggtaccaacaacaccccggccaagcccccaaactcatcatttatgaggacaataaacgtctgagcagtgaaaaaaaaaaaaaaaaaaaaaaaaaaaaaaaaaaaaaaaaaaaaaaataataaaaaaaaaaaaaattaaaatatttttttttttttttgtttatgataatatattattatattttttttatttgttatatgtttaatgttatatattttttttatgttgttttttttttttt

SEQ ID NO: 102078 - DNA, 325 bp, Homo sapiens
catgaacccgtctctataagaaaatttaaaaaaaatatgccaaagtgaaataaagaatcaggatgacagaaactctttcactgtttttattttatttttattgagatggagtttcgctctcgtcgtccaggctagagtgaagtggtgggattttggctcactgcgacctccgcctcctgaggcaggagaattgcttgaacctgggaagcggagcttgcagtgagctgagatcgcaccactgcactccaacctggtgacagagtgacactctgtcttaaaaaaaaaaaggaaaagaaaaaaagaacctatgctaaagtaggctggg

SEQ ID NO: 102079 - DNA, 347 bp, Homo sapiens
ctccagtgcagggattggccggacgggctgcttcatcgccacgcgaattggctgtcaacagctgaaagcccgaggagaagtggacattctgggtattgtgtgccaactgcggctagacaggtgggtctgtgggtgtaaacaaggccaacaacgttaacggatggcatcagtgcctctgggccccagagttctgctaggcccatcaccatcaagcactcctgcaagaaaggaagaaaccctttctgcttagagctgtttattttacaactaacaaccaggaaaaaatatctatctggatggccgggtgcggtggctcacacctgtaatcccagcactttgggaggctg

SEQ ID NO: 102080 - DNA, 401 bp, Homo sapiens
ctggctaattttgtattttaatagagatttagtgctgccaatccccatgctgttgaaaatacatatttggtatgttatatatattatatattgtattctgagtacaagaaagtaagctagagaaaggaagattttgcagtagttaaagctgtagtttccttgtagttcgatgcttgaactactatcaatctagtgtaaggtgttcacccatccacggtaaaataaagtaaatttactccatttactcattttaaaaaaaaaaaaaaaaaaaaaaaaaaaaaaaaaaaaaaaaataaaaaaaaaaaaaaaaaaaatataaaaatgaaatgtttttaagtttaattattaacttatttgttattttattgtttattgttttatttcttttgttatttttttag

SEQ ID NO: 102081 - DNA, 312 bp, Homo sapiens
gtttcgccgtgtgggccaggctggtcttgaactcctgacctcaggtgatctgcctgcctcggcctcccaaggtgctgggattacaggtgtgagccaccgcgcccagccaacatttcttaaaagctgttaaaatccatgtgactgtcttgggctcctttttttaaatggatgaattgtgttttgggtgaatttggttgtgacttttggagtaaaaggcaaaaatccactcctgagtagctgcaattacaggtgcatgccttcacgcccagctaatttttgtgtttttagtggagacggggtttcgccgtgttg

SEQ ID NO: 102082 - DNA, 458 bp, Homo sapiens
  misc_feature (1)...(458): n = a,t,c or g
cccacctccccgccgagttcacccctgcggtgcacgcctccctggacaagttcctggcttctgtgagcaccgtgctgacctccaaataccgttaagctggagcctcggtagccgttcctcctgcccgctgggcctcccaacgggccctcctcccctccttgcaccggcccttcctggtctttgaataaagtctgagtgggcggcnnnnnnnnnnnnnnnnnnnnnnnnggccaccgggcccgaaattccaaaatttaaaattggaaaatctgaaaaacccccgagggtcctttaaatggggccttgggcccccttcaaattttttttatttaaaacagggttggcctttttttaaggaacaaaaccccctaaaggttaaattttggcccttgaaccctgggattaaaaaattttttaaagggccaaaattaaggccccatttttttttggccccaaag

SEQ ID NO: 102083 - DNA, 327 bp, Homo sapiens
gttataagactcggatgatacacaggatttgtatcctgctgtctttttaattccctgaagaaaacattaaaatgttaaataaaagcggtggacaaagaagggaactatcacaaagggattcctgcaggaggggaaaggtgccagctgataccaacaatgttcttcgatgctgtggaaacttctagaacccagaccaaaataaggataaagaggccaggtacagtggctcatgcctgtaatcccagcactctgggaggccgagacaggcagatcacttgaggtcaggattttgagaccagcctggccaacattgctaaaccctgactt

SEQ ID NO: 102084 - DNA, 219 bp, Homo sapiens
gaacaaccaagacagtatttttttaaaggataatgaaagagactggccctgggtggggggaattttttttaaaaagccactaataaaaaataatagccaggcacggtggctcatgcctgtaatcccggtgttttgggaggccaaggtgggtggatgacttcaggccaggagttccagaccagcctggccagcgcggcaaaaccccggtcgacgcggccg

SEQ ID NO: 102085 - DNA, 381 bp, Homo sapiens
tcgggatccggcgcggggagatcctggaggtgatcgagttcaccagcaatgaggagatgctgtgccgggaccccaaaggcaaatatggctacgtgcccagaacagcgctcctgcccctggagacggaggtgtacgatgatgtcgacttctgcgatcccctggaaaaccaaccactccccctgggacggtaagaccggtaggcgtggggccaggacagccagccagcccagcgcccgctcacccaggagccctggatcccggcgcgggaaagtcacagagctgcctgggcttgtacctggccacataaagccccagtttaaagcagaaaaaaaataataaaaaaaaaatggtctacccggccgcaaattccaaattattgag

SEQ ID NO: 102086 - DNA, 395 bp, Homo sapiens
  misc_feature (1)...(395): n = a,t,c or g
atttgacacattttatttataaaaccacacggattaagctaattctatatttctaaacaaggtatttgtgtcagtttttattaacaaaaagcctgaacggatagttctcagataaccattcatgtgcacccatcactgattaaagttatttctatgaagaaatactattctccacagtcataaaaaagaatgcaattgtgtctttcacagcaacatgggtagagttggaggcaataatcctaagtgaattaacgcaggaacagaaaaccaaataccacatgttctcacttgtaagtggaagctaaatattgagcacatgtggacacaaatgtggaaaacatagacactgcggactactgggggtagggggtggggactgaaaaactacccactgn

SEQ ID NO: 102087 - DNA, 290 bp, Homo sapiens
gctcaccatcctggtcctggccatgtggaaggtcggcttcttcaagcggaaccggccacccctggaagaagatgatgaagagggggagtgatggtgcagcctacactattctagcaggagggttgggcgtgctacctgcaccgccccttctccaacaagttgcctccaagctttgggttggagctgttccattgggtcctcttggtgtcgtttccctcccaacagagctgggctaccccccctcctgctgcctaataaagagactgagccctgaaaaaaaaaaaaaaaaa

SEQ ID NO: 102088 - DNA, 330 bp, Homo sapiens
ccgagtagccaggactacatgcatgccccaccacacctggctaattttttaaacaaattttttgtaaagtggtgtctggctatgttgcccaggctgatgtcaaactggcctcaaaccatcctcttgtctcctcccaaagctctgggattacatgtgtgagccatgcgcccagccctcaaatgctgtatttttttgtaggtgaaatacttctgaatatttggggatttaaaataagagaactatgtatggttaactatcagtgagttcttccttattgttcagaagaccatttcttcagtttgaaaggacaggagtttgaaagataggata

SEQ ID NO: 102089 - DNA, 319 bp, Homo sapiens
atttggtaacgggcagaggggcataataatgctgtagcacagtcaaaaacaagggagacatgataaaagctaatgtcctttggcccaactctgctctctgcgcgctgtgtaagcactgggcaaatttgcatgaatgaattgaatctcaatatagatgctatgtcagtagcagccaccataaataacgagatcatgtcctttgcaaggacctggatgaagctgaaggccattacccttatcatacttacactggaacacaaaaccaaatactgcatgtgctcacttataagcgggagcctaaggatgacaacacagggac

SEQ ID NO: 102090 - DNA, 387 bp, Homo sapiens
ttgagacagggtctcactgtgttgaccaggggggagtgcagtggcatatctcggctcactgcagcctggatctcctgggctcaagtgatcctcctgcctcagcctccagagtagttgggattacaagtgcgcaccatccccttctttggtctatttcttctcttccacctcttctgctccatcctcacaacttacttaacctcttgttgcttcttcttcccagtctttcgatcgtcctcaatctccatatattaccacctcttctcccacctctgcgcctcctctgctctccctgttaaactctctcttccctgttaaaccccctgtccccactctctggcacccccgacctccaggtgtcctccctgctgaggttctccctcttgc

SEQ ID NO: 102091 - DNA, 391 bp, Homo sapiens
aattcgttcatttttcctgttatgttttatataatatatggactaaacaaaataaaataacagtgcaaaaaagaaaaaaaaaaaaaaaaaaaaaaaaaaaaaaaaaaaaaaaaaaaaaaaaaaaaagggggggctgccttttaaaagatatgggggggggccaaagccaaagtctaagaaaaatatgtaacttgatatagaaggggggggtaaaaataaatgcgcttctgggcggtataaataaaaccatctgtggggaaatctttttccagagaggcttggtgaaaacagcctttctggggggggggaaaatttggggaacatatcactaaataagtttaagcatcatggggaaactgaaactgctattgggctttggggtcaccaacag

SEQ ID NO: 102092 - DNA, 484 bp, Homo sapiens
tggagataaatagacttccgtagtaccgagcttagttcccgttcgacccacgcgtccgcttctctcttagatggctatagatctacctttgagaaatgagaaatttctgaaaaggggtgtgaagttacatatattttatagacaaagagcatggccaaggcaatgtttgtaattcaaagtgttgctcacaaactctagtttaatgcttttcctttaagtgtggttatttgtttttgtatctttgtgtgagtgagagcgagagtgtaaaaaaatgaagagaagggggaaaagagatatcaagcaaatataaaagaagagaaggcaaacgggaaaggtctgaacctttactttttaaaattatattcagcaggctgggcatggtggctcacacctgtaataccaccattttgggatgccaaggcaggtggattgcctgaactcaggagttcgagaccagcctgggcaacacggtgaaaccccgtct

SEQ ID NO: 102093 - DNA, 403 bp, Homo sapiens
atgaaagctgcatctttactagttagctaccatgcgtcattatttatcaaaagatatatgctgcttaaacgcaaatacgttttaaaatatattttaggcagtagggttttgggtttttttttttgcaagtttttttggggagtaaatttagggataaaggattttttttttttttgaaacagttggttttgtcgcccaggatggagtgcagggcaggggcgcaatcttgcaacctcggctttttgagttaaagcgattttcctgcctaagcctcccgagtagctgggattacaaacgcgcgcaacccaacccaaatgatttttttaaaaggcaaatggccttcgacccaaaaattcaaagaatcagcttaggttccaaaaaaaagaaaaaccacccaattgaa

SEQ ID NO: 102094 - DNA, 349 bp, Homo sapiens
gagactggcatatcgcttacgttctactctatgggcctcgcagagttgaaataatggaagaggaaagtgaacagtaatcttcattttagtatttatgcttagatgtgaaaataaatgttatttgttgatcatttctataatccagagctttagaggaagacacataggtgggtttatgtttcacctcatttggaacaaaagaggacagaagcagaccactctgtgcaccaacctaaaaaattacagagaagagaaaattatctttggattgtgctgccctatataaaggtggcagaaagacttttttaaaaggcttattatttgttgcattattttaaaaagttaagag

SEQ ID NO: 102095 - DNA, 404 bp, Homo sapiens
ggttgaaggtcggtccggacatcggacccagtcagttcccagactgtccgggcggcagcggacgccgctgccgccgccgcctcttcgtcgcctcagcctggcgttttgttccgagagacgggagaggcgagcggagctgacagtgattttgacagtgatttaaacccgcttttgttgttgttggcttttcgttgtttggttttgtgtgctgtgcgtgtgtgtggcggtttttcccccgtggtgcattttattttttatcgttgtgctcttttttttctttttttttttttaacccaggggggggtctttttcttggtttttctttttctgggggtggctcccaaagtgctttggatgagtatggtgccccccacggtgtggtttcgctgtagaagaccgggaag

SEQ ID NO: 102096 - DNA, 370 bp, Homo sapiens
actagttcatgatcacgccctcataatcattttccttatctgcttcctagtcctgtatgcccttttcaaaaaaaaagaaaaaaaaaaaaaaaaaaaaaaaaaaaaaaagggggggccccttttaaaaaacccccggggggggcccactttccccgggggggcgaaaaaaaaattttccccccaaagggggggtaattaaaagccccgcccggggccggttttaaaaaaggggggggggggaaaaaccccttgggggggtttttggggagaaccccttttttgggggggggaaaaatgggggacccccccccccgaaaaataaaaccccttgggggaaaaaaaaattttagggggggaaggggggcacacg

SEQ ID NO: 102097 - DNA, 363 bp, Homo sapiens
tatgcatgtttctgtttttatgtatgtgcatgttggtggaagaggttgctgaagaatgcatgacgagggcacggcaagagagacacagaaagagcaaatacaaggcaaaatcacagcactcatggtgctaaggaattccatggagaatagtactgatgaaaagtacaatactggtcgggcatggtgactcacgcctgtaatcccagcactttgggcggctaaggtgtacggatcccttgagcccaggagttttagaccagcctgcgctacatgttgaaaactctacagattactaactcacatccaccctacagatcccccccccaccacaaacccaacatcccaatcttacgacagcggggc

SEQ ID NO: 102098 - DNA, 398 bp, Homo sapiens
gagccagggaagactggaaatgctgccgccttctgcaatttatttatttttttcttttgagagagtgaaaggaagagacagatacttgaaaaaaaaaaaaaaaaaaaaaaaaaaaaaaaaaaaaaaaaaaaaaaaaaaaaaaaaaaaaaaaaaaaaaaaaaaaaaaaaaaaaaaaaaaaaaaaaaaaaaaaaaaaaaaaaaaaaaaaaaaaaaaaaaaaaaaaaaaaaaaaaaaaaaaaaaaaaaaaaaaaaaaaaaaaaaaaaaaaaaaaaaaaaaaaaaaaaaaaggggggggggaaaaaaaaaaaagggagggggcaaactttgtctgaagggcgggcaaaaaaaaattatttctttaagagggagaaaaaataaagaagagacggggggtgtaa

SEQ ID NO: 102099 - DNA, 419 bp, Homo sapiens
cagctctcagggaggctaagaggcgggaggatagcttgagcccaggagttcgagacctgcctgggcaatatagcgagaccccgttctccagaaaaaggaaaaaaaaaaaccaaaagacaaaaaaaaaaaaataaggggaaatttccttaaaagaaaaacccccccccaattggaatggcaaaattttcggttttccccgggaattttataaaaattttttggattaaaaagggaaattaaaccccccttgggggatgggaaaaaaaaaaaaaaaaaaaaaaaaaaaaaaaaaaaaaaaaaaaaaaaaaaaaaaaaaaaaaaaaaaaaaaaaaaaaaaataaaaaaaaaaaaaaaaagggggggggctttttaaaaaaacccctggggggcgcaaattttattggagcaggtaataattt

SEQ ID NO: 102100 - DNA, 330 bp, Homo sapiens
cggctctgcccgtagccctgagaattaaacgccggctctccctgcagtggtttgggctccgggctgtgagaaaaaaaaaaaaaaaaaaaaaaaaaaaaaaaaaaaaaaaaaaaaaaaaaaaaaaaaaaaaaaaaaaaaaaaaaaaaaaaaggaatgcgtaaaagggagcaaaaaaataacatctaagtagaaattttaactccatcctgaaagaaggactaaaaattaggattattgtcaatgtagtaaaaaaaactgcatatataattaaatatataaaataaacagtctgtggtgatggggaaagagattgttatagtgattggtaat

SEQ ID NO: 102101 - DNA, 389 bp, Homo sapiens
cccacgcgtccgatttactgtgtggtgtaaataagaaagtgtttctttgaaaatatgtcatcataggaacattatttcaaagaaacactttcttatttactgtgtggtgtaaaatgttgctaaatgtgttgttacattatgtcactgctgaaagtaatttgcactataataaaggaattttctacaaaaaaaaaaaaaaaaaaaaaaaaaaaaaaaaaaaaaaaaaaaaaaaaaaaaaaaaaaaaaaaaaaaaaaaaaaaaaaataaaaaaaaaagggggggtccctttataaaatttcttgggggggccccttttttctgggtgtgactagattaaattttttccctttaatggggttcttttattatttctcgcccctccccttttg

SEQ ID NO: 102102 - DNA, 1247 bp, Homo sapiens
tacactccacctccctcaactccttcaaatttaaagtgagcttgttattcaacaacaataaaaactaaatttcttcaaaatacagaagagaaaaagcagtgtttaaacccaaacaccattaaaaattttttcttttaagtttttattatttaaatacaccatactagagcaaatgtctctgaaaatatcacaaataaaagattttttttttttcttcattcagcaaattagaagtagggggaattttttacacagtagctgctatgagcctgatttttttttccaaatttttttctttttttcattcttttttttttctttgccatgggagtagcaacattaggacaaaaacacttacatgcatacatacattgtattttacagagatacaataagtgtttgtgatagaatatcacaaaagccacatctctttcctttatctcatggtcagttttgattgaaacacgtttccttacaacacttaaatatacaaagagcaaatagaatgttgttaaggtaaaacacagggtacaaactctggccagtgccctgctaattgttaatgagggtagaaagcagatttgaatgcttcttttaattagcttcattagtcatttccctcccccccagctccctccccctccccaagatgtcctctggtggatcttttttcattttctctacagtctcccattagcccaggttcatggagtccttaatgttcatattcagtcattttaatacaccaataaatgcgggaagggcaatcaagactaaagaaggtgcaatggcatggagctggcactggtgctagctacaaaggtgacttgtctactgaagacacatgggatccacctgtgatgaacaaatctgagatgaaggcacgcattctgcattactctgaccttttagcagaccttctggtctggcagtagtggattgctctgaagtgaattcaaatggccattgatgagagctgtaggtctatcatgttcacaaaataaactgccattgatgtagtgaaaccgatctcccgggaccaggcgattccggcaggtagagcatgtaaaacacttaagatgatacacattgccttgcgccctcatgacgagttcactcgcaggaatcgactgtccgcaagcgcctgcagcaccgctatttccaaataacctaatgtagtcatttctgcaaaggatcatgccacttttggtgtaacaggacgtgccgatgtcgcccagctgcgcctg

SEQ ID NO: 102103 - DNA, 365 bp, Homo sapiens
agtgaattaacttaagggcactgtgatgggaagccttgcccccctctttttttttttttttaaaaatctgcggaataaccccaagggtaaatttttgaatgaataaaaggtttttgttgaataaaaaaaaaaaaaaaaaaaaaaaaaaaaaaaaaaaaaaaaaaaaaaaaaaaaaggggggcccctttaaaaaaaaccctgggggggcccaaattttcccggggggggaaaaaaaaatttttttccttaaaggggggttataaaaaaaccaggcccggggccgtttttaaaaaccgggggggggggaaaattttttcttggggattttttggaaaaacccttttttttgggggggaaaaaaaaaa

SEQ ID NO: 102104 - DNA, 330 bp, Homo sapiens
atctcctgacctcgtgatccacctgcctcggcctcccaaagtactgggattacaggcgtgagccactgtgcccagccccatccttagtgttagatgatttttatataacatgctagaatgttaaattattgcatgtactatgtgcactgttttctatatagtatttacccagcatttgcctaattttaatgttgtatctagcacatgtatgcttaatctcttaaggacagagtttgaattctattattgtagattaatagaattaagatttatgagtgacttttttaagggactggggtctcactctgtcacccaggctggagtgcaatg

SEQ ID NO: 102105 - DNA, 666 bp, Homo sapiens
acaccggtccggaattcccgggcacaaacataatgctgagaaaataagaaattgcagaacacacatatagtatgtaaccaagtatataagtttagaagtattgatacattatgttttatttaatgatatatatgtatatagtacaattttatacatatacttaaatcataaacaccaaattaactatgccatgaaggtaaagggacttggctgtgatcaaagggtgttaccaatagattttaagtttttgcagtgtttaatttcttaggttgggtgatggatatgttaattaatttggctgtggtaatcattttacagtgtgcatgtatatccaatcatcatgttgtacaccttgaatatatacaatttctatttgccaattatacctcaataaagctgggaaaaaaacctagtaagtctgtctaggttatttgtcagtggtgacaaacaaagcaaagcagaacaaaacaaaaccagaaaaaagtgattttgacttcttacaggttctgtgtttataatctaataaaagcaagtcatcttaaaaataatcctgaatgaacgtctctcctttctccttataaggacattgccacttgtttatctatttacacatagtaaaaccatcttacattgtaaaagaaataatcaggattatttttaagatgg

SEQ ID NO: 102106 - DNA, 289 bp, Homo sapiens
gcaagattaacggtgaggacaaacagaagattctggacaagtgtaatgaaattatcaactggcttgataagaatcaggtttgtgttttttttttttttttcttccccatttaattggggggaagggttgaggtatgctcttttaacccgggttttacggcaatggcgtgatctgttacctatgtcctcagggttcaaaccataataccgcctcaggcttccgagtaggtggcattacaggtgcttcgccatcactcttggctaacttttggatacttagtttagacggg

SEQ ID NO: 102107 - DNA, 458 bp, Homo sapiens
ttacagaggaaagtacagcttataaatggtagacccaggatttgaattcatagagtctgcttctagaaggtgtgttcttagctccaatgctatgctgtcatattgatttcctgcctgccttctccttccttccttctcccctccctcccttccttccttcctttccttcttttttttttttttttttttttttttttttttttttttttttttttttttttttttttttttttttttttttttttaacccccccccaaaaaaaaaaatttaataaaaaaaaaaaaaaaaaacccccccttttttttttttctttgggcccccccccccattttttttttttttttaataacttttttttttttttttttaaaaaacccccccccctaaaactaatcttccccctaacacccccctaaaaaaaaaatttttttaaaaaaaaaaaaaccccccctttttt

SEQ ID NO: 102108 - DNA, 163 bp, Homo sapiens
tcccgattaccgggaagaagcagacgcagaagcaggggcagaagaagaagaagaagaagaagaagaagaagaagaagaagaagaagtagagtattgatatttccatgggaccagaatcttgatctaaacattgtatatataattgaagacgtcgacgcggccg

SEQ ID NO: 102109 - DNA, 312 bp, Homo sapiens
tgcaatataaaaaaaattatagccaggcgcggtggctcacgcctgtaaccctggcattttcggaggccgaggcaggcagatcatctgagggcaggagctcaagacaagcctgaccaacatggagaaacactgactctattaagaataccgtgacagtcgcccatgcatccacatgagtggtaaaccttcaatctgttactccgtgaattagtacttatcttctcctggatggctgtgtctggaaatctgactccttagcctgttatccgctaattctggcgatcctaaagtgatgatatgtctaattaaacg

SEQ ID NO: 102110 - DNA, 326 bp, Homo sapiens
ggcagctgcaacctcgcaggcgtggtggtgcatgcctgtagtcccagctacttgggaggctgaggtaggagcatcacttaagcctgggaggttgcagctgccattaactatgattgcgttagtgcacttatcctatgctatatagcaactctctgtctctctccttcatacatacgtacatacatacctacatacttacggtacttacgaactatcacatatatacctagcacttagttttaaacctagaataaaacattatcatgtgcatccattttaagggggttatacgttaacgcggacgtgaattcctgatctatgaatcg

SEQ ID NO: 102111 - DNA, 89 bp, Homo sapiens
ttttttataagattattagtattaaaggggagataggtaggagtagcgtggtacgggcgatgagtgtggggaggaatggtgtgggcttt

SEQ ID NO: 102112 - DNA, 304 bp, Homo sapiens
ctggacttgagctcttgtcctcaagaaatcctcttgccttgacctcctaaagtgctggaattataaacatgagccactacacctggccttgagtgaaatactaatgtacagactctgtctatgaatattcgacatctttttttattgggactctatagaactagattggaatattgcatatggattcttgttcttattgttggggcctgggggaacattctcaatccttctgatcactagaagtccatcggtgatttttacgtcgacgctgccgcgaattccacagctatgaatcctaaatact

SEQ ID NO: 102113 - DNA, 328 bp, Homo sapiens
ctgaccttgtgatctgcccacctcagcctcccaaagtgctgggattacaggcgtgagccaccatgcccagcctattttatcccattctctaacaaaagttgtaagactggctggctgtagtggctcatgcctgtaatcccaacacttcgggaggaatagaaagggccaggccagttatgcacagcattcaagtctccatgaaaatttatgacccatatggaagcagtaagttaatattaagacagttttgctctccagggctgtagcaccaggttgtttcagttacttcgtcacattaaggaaaagatccagagttaggacactaacg

SEQ ID NO: 102114 - DNA, 322 bp, Homo sapiens
ctgcctcatccctagtagctgggactacaggcacatgccaccacggccagctaatttttgtattttttttttttttttaggggaccatgttagtcaagtgggtctaaaactcctgacctcaaaggatccacttgcctggacctcccaaagggctgggattacgggctttagccaccacaccaagccacaaggatttttttaaggggctggaaaattaaattggctagaattttttttaggatttttgcatttttggccatcaaaaatattggcctgaagttttattaaaagggtctttgcctggctttggaattaaagggaa

SEQ ID NO: 102115 - DNA, 339 bp, Homo sapiens
ctccttctccctcctcttccctccctccttctccctccttctccctcctcttgcctccctccttctccctcctcttccctccttctccctactcttccctccctccttctccctcctctcccctccctccttctccctcctcttacctccctcattctccatcctcctccatcccaccttctcccacctataccctccttcgccctccttcatctaactacactcctctaacatccaatcatgaccatgtatcacctgacacaaaaaaacttttaaatgactacaattaacgcccatctatttaacgcacaaaacatctacatgcaaaaatataaacga

SEQ ID NO: 102116 - DNA, 332 bp, Homo sapiens
aatacgcgggctaaggccattggaaaagcgcggtattagggtgggagtgtcccgattttccaggtaccatctgtcacggctttcctttgctaggaaagggaattccccgaccccttgtgcttcccgagtgaggcgatgcccctccctgctccatgggctgcacccactttctgacaagccccagtgagaggaacccggcacctcagttggaaatgcataaatcacccatcttctgcgtcgctcacgctgggagctacagactggagctgatcctattcggccatcttggaacctcttaactgtattttgttttttaatccattcagccaacg

SEQ ID NO: 102117 - DNA, 325 bp, Homo sapiens
cctgcctcggcttcctaagtggctgggactgcaggtgtataccaccatgcctagctaatttaaaaaaactttttgtagagatggggtcactcttctggcctcaatggattctcccgccttggcctcttaaggtgctgggattacaggtgtgagccaccacacttggcctgtaaaagaaggttttagtactatgaactcaatagtctgttttaagtttttccatagcaatttttgtgaggtagggagtttttaatcacatgatccattcaaaaaatataaaattgttggatgattaccagaggctggaaagaatagtagggggtta

SEQ ID NO: 102118 - DNA, 388 bp, Homo sapiens
acggaccgcagtacatacctttatactggtgctccaggtatgcgtgtgcaggtggcatctatcactagctgcactgacacccgctcaccttgtctgttcatcacatcgcatcctgtcctacctttctatccgaggtagctgggaccacaggtgtatgaccaccacacctggcttagttatatctattttttttgttgagatgaagtatcgctatgctgtccatgctgggcacatactcctgggctcaagctatcctgcttcagcctaccaaagtgctgagatcacaggcgtgagccactgggcctggccaacggattctttgtggcaaaaacctcacatggtaatttggtgtatttcatgtttcctcaacgtattgatagggacaatg

SEQ ID NO: 102119 - DNA, 395 bp, Homo sapiens
atttttactgggatgagggatttgtgatttgcttttaatttcttaaaatgttaccacataattcatctaaagtataaaaaggaatagcaaattttagatgttgtgcagatatataatgcttgtgtcagaattattataatattgataataaactttagatattgcttcaaaaaaaacataaaaaaacagaaaaaaacaaaaaaaaaagaaaaaaaaaaaacaaaaaaaaaaaaaatccaaaaggagctgacccatcctttaaaccatttacttactttgattgaaatacggtatcattaaagtattctaaagttaatattcgagactacttctcggagaagctcacaaatcttccgtggtgtccaaggaaatggaggttcaccttagtatataac

SEQ ID NO: 102120 - DNA, 345 bp, Homo sapiens
  misc_feature (1)...(345): n = a,t,c or g
ctcctgccttggccttccgagtagctgggactacaggggcacgctaccatgcctggccaatttttgtatttttaatagagatggggtttcgctatgttgccaaggttggtctcaaacgcctgggtctcaagtgattgatgaagctgtatatagtatatacgcttattatattttagcccttttaatagtttatgtggcacaatgggaggtatggttaaagcacttctgctgcatactaaagtatactggnggactggaagaaaagcactggtgaggttgcttacactgaaatacttgctttttatttcttatagaaattatttttacttgaagatattactgacg

SEQ ID NO: 102121 - DNA, 383 bp, Homo sapiens
  misc_feature (1)...(383): n = a,t,c or g
gtttcaccatgttggccagactggtctcgaactcctgagctcaggtgatcttcccgcctcggcttcccaatgtgctggtattacaggtgtgagccactgcacctggccgtcaattctttatagaatgaattttaaaaatttatctgcagtgttcattgcttgggttattgagggaaattacacaaataaaacttgtatatgaatacttcatgtctctttgcaatctttaattcactgaaagcctcagagtctttaaaaaacctggggttttaggtgattcacataatgggcaaatgagtctatctacaagaggacagccaaaatgggggcaggttctggaaaataagtcctgtgaagaagaattcaggagaaatggatatatn

SEQ ID NO: 102122 - DNA, 318 bp, Homo sapiens
ttccaaatctgctgatctcttgtgtagcattctatgggtgggtttagcttattaattcctgtctcattatataaaaggatggcaaggttggggagcatgcctaggactggactcttttcaagtctaaaattcaatgttgatgaataacagcggcttataaatacataaaaatctacgtgtaggccaggtgccgtaactcatgcccataattccagaacttttggaggttgaagcaagcaaattgcttgggcccaggagtttgagaccagcctgggcaacatagtgagaccccatctctgcaaaaaaaaagtaaaagtt

SEQ ID NO: 102123 - DNA, 336 bp, Homo sapiens
  misc_feature (1)...(336): n = a,t,c or g
ggagaaatgatttaacctgagcctaacctgctggggttttaacagagccttatttacatgaggtaagggaaatacccaactacaggtcattcaagccatcctgggggtgaggcgctgagaaacaggatatagttcaaaatccataaacaagctcactaaaagactgagaccttggctctggtggctcatgcctgtaatcccagcactttgggaggcataggtaggcaggtctcttcagcccacgagttcaagaccatcctgggcaacatgacgaaacccattctttacactaaactatgaacacttagccaggcatgtacacacatgcctgtgatn

SEQ ID NO: 102124 - DNA, 331 bp, Homo sapiens
tgctgggattacaggcgtgagccaccgcacctggcctcccttgttttattctaggtgtgtaaaggttaggtgaccactcaactgctgggcttggacgttgcagagtaagaagtaggaattagactacaatctatagacccagacatttgtctcatatcatcaccagtcatatataaatgaaaaactatgagaaaaaagtgaaaagcaacatatgcatacaactttcaaaaataagaaattaagaaactacttacttctacaatgtcgtcatcaaacaacaaccaaaaatcatgactcttaactattgcaatataatggcctcgattgggaa

SEQ ID NO: 102125 - DNA, 326 bp, Homo sapiens
  misc_feature (1)...(326): n = a,t,c or g
ctcccccatcctcgctgctgccttgcagttggatcttggactgctgtgctagcaatgagcgagactctgtgggcgtaggaccctccgagccaggtgcgggatataatctcctggtgtgctgttttttaagcctgttggaaaagcgcagtattagggtgggagtgacccgattttccaggtgccgtctgtcacccctttctttgactaggaaagggaattccctgaccccttgcgcttcccaggtgaggcgatgcctcgccctgcttcggcttgcgcacagtgcgctgcacccactgtcctgcagctactgtctggcactccccagn

SEQ ID NO: 102126 - DNA, 326 bp, Homo sapiens
ctcaaaaagaataattgggcagggcatggtggctcatacctgttatctcagcactttgggaggccgaggcaggaagatcgcctgagcccaggagttcgagaccagcctgggcaacatagtgagacctcatctctattaaaataatttctaaaaaaaaaaaaagaaaaaaaaattttacttggaactctaccaaatttactaaaaaaccaagtttttaaaggattgaataaaaaagaaaatactgccactcttgtcaaaacactatgcccttttacctttcccttaaagatgaatgaaaaaccagggccaaaacagttttttttacg

SEQ ID NO: 102127 - DNA, 136 bp, Homo sapiens
atcttgccttgctgaggtgctaggaggccgggcgccttccacatgtggcccacacctgtgatcccagcactttgggaggccaaggcaggaggatcgcttgaggccaggggtttaagaccagccgtcgacgcggccg

SEQ ID NO: 102128 - DNA, 136 bp, Homo sapiens
atcttgccttgctgaggtgctaggaggcctcacgccttccacatgtggcccacacctgtgatcccagcactttgggaggccaaggcaggaggatcgcttgaggccaggggtttaagaccagccgtcgacgcggccg

SEQ ID NO: 102129 - DNA, 330 bp, Homo sapiens; identical to SEQ ID NO: 40260

SEQ ID NO: 102130 - DNA, 329 bp, Homo sapiens
attacaaaaaggaggaagaaaatagagaggaggaaataagaaaatagtttagaaaatttccccaaactcaaaacatgagtttgcaggttgaaaaggtcccctgagtgcttagcatgctggctgaaaatagacctgcaccaaggcctagcatcatgaaatactgagactctgagagaaaatcaaagagtttacaggtttctgcaataataataataataataggaagaaagaaagaaaggaaggaagaaaggaaggaaggaaggaaggcaggcaggcaggcaggcagacaggcagacaggcaggcaaagaaagcaagccatttacagaag

SEQ ID NO: 102131 - DNA, 336 bp, Homo sapiens
aggtgatccacccgcctcggcctcccaaagtgccgggattacaggcgcgagccatcgtgcctggcctatcttttatttcatttttaaagtaaatcttgatttttgctaggcctcttggattttttactgttgataacctgaaacacaaattgtctggatttgtctttaaatgtggcaaaagtcaggggtgacagatgatgacattttctctccagctaaagctgggtgcaggagcttgctaggtgaagcagacactacttcagcagtcagtcctgtagtgacctctcaatcttgtaagagaaggaaaatggtttttcctaactctttttttttcgg

SEQ ID NO: 102132 - DNA, 304 bp, Homo sapiens
ccaggctggagtgcagtggcgcgatctcggctcgctgcaagctctgcctcctgggttcatgccattctcctacttgggagggtaaggctgaagggttgcttgaatctgggaggcaattttagtgagccaagcatgggtgacagagcgagaccctgtctcaaaaaaaatgaattctaataacttttgaatgaagatctttctccttcattctcatgtttgtactatgtagctgaagtaacaaggttggagagtttcatgtggattacctaaggccttgcatagagaagtattaattgaggcaggg

SEQ ID NO: 102133 - DNA, 292 bp, Homo sapiens
cttaagcaaaataggaaatttattaaaagggtacaaagggcagttagacctcatcagagactggaaccgaactaaaaagccatcagaatccaaggttgctaccttcccattctctttgtttccagggttcatggtatcctgtctttgtttccagtttggggctattatgaacaatattgctatgaatattcttgtacatgtctcctggtacatggatttacaagtttcttgagaatatatagcttgaatttcaacttctggggcatttactaaatagtgccaaactgttttg

SEQ ID NO: 102134 - DNA, 313 bp, Homo sapiens
ggaaaatgatgaggtggaaaagagtgtgacactggaaatcagacagcagaatatagtcccaaaatttctactggtgtgtgatccaagctgttacacttgtcttgaatttatacaagattaaaaggttttatagttgcagatgatgggtctgccctgtatttgtgtggaaatgttatttttaaaatccaccggctggccgcggtggctcacagctgcaatcccagcaccctgggaggccgaggtgggcggatcactccaggtggggagttcgagaccagcccgaccaacatggagaaaccccgtctctactaaa

SEQ ID NO: 102135 - DNA, 314 bp, Homo sapiens
ggaaaatgattatgtggaaaagggggtgacactggaaattagacagcacaatataatcccataatttctactggtgtgtgatccaagctgttacacttgtcttgaatttatacaagattaaaaggttttataattgcaaatgatgggtctgccctgtatttgtgtggaaatgctatttttaaaatccaccggctggcccctgtggcttacaactgcaattccagcaccctgggatgcccaagtgggcggatcactccacgtggggatttccagaccagcccgaccaacattgagaaaccccgtctttactaaag

SEQ ID NO: 102136 - DNA, 374 bp, Homo sapiens
gtggaataatggcaacagaaagactggctaactacaccggaggcatctatgccgaataccaggacaccacatatataaaccatgtcgtttctgtggctgggtggggcatcagtgatgggactgagtactggattgtccggaattcatggggtgaaccatgggtaagatgttttcattttcttaaggtcattcctagaaaaaaaacgtcctggtactcctctcgcttgaatggttctgtttacgtttagctaaaaactggggccttgacagagggttccttgctccagctgtctcagccaccgcgcgagtggcttttggggccagacccttctctgacatgcgcggctgccgccatcctgtgcactttgggtgtt

SEQ ID NO: 102137 - DNA, 289 bp, Homo sapiens
cttagataatgtgaaataaacattaaagacaaggtctatttttaataaaaaaaaaaaaaaaaaaaaaaaaaaaaaaaaaaaaaaaaaaaaaaaaaaaaaaaaaacaattaatttttaaaaaatttgaaaaaaaatccccttttaaaaccagggaaaaccggaaaaaaaaaacaaaaaaaaccccaattttagggaaaaaaaaagggaaggaaacaaaaatttgggggaacccaaagggaccccgaaaaaaaattgggggcccatttttgaaaaatttttcccgcctttg

SEQ ID NO: 102138 - DNA, 291 bp, Homo sapiens
ggaactacaagtgtgagccactgtgcccggccccgagagttctttttctgtattctgcatagaggacctttgtcagatatgtgatttgcatttctttttctcccagtccctggcttgcctttccctcttcttaacagtgcctttggagatcgaaagtttttaatcttgatgaactgccaatttatcagtttttcttttttttgttttatgaattgtgcttttggtgttacgtctaagaattttttgcataacttaagtttgcaaagggtttctcctattttttttttctag

SEQ ID NO: 102139 - DNA, 290 bp, Homo sapiens
aaaagaaatcttagactttaagtacctacttactagtccaaggtaacaaattataatttctcaaatgagaggctagttaatacaaggatgttttgataactgtagaaggcacttaatacactttcctaaacagaagacagagtgagaacgaagtacatcaatttgaaggcctgatatatatttatttatttattgatggagtcttgttctgtcacccaggctgcagtgcagtggcaccatctcggctcactgcaacctccacctcccagattcaagggattctcctgcct

SEQ ID NO: 102140 - DNA, 432 bp, Homo sapiens
ggcacgaggtaaacttaaaagaactgtgtcatttggggtaatgaaaatgtggcatgggtaaaggttgtacaattttgtttatatactacaggtcactcaactatacactttaaaagggtgaatattatgctgtgtgaatttgatctcaatttaaaaacttaaggctgggtgcagtggctcatgcctgtaattccagcactttgggaggctgaggtaggagaatggcttgaggccatgagtttaagaccagtctaggcaacatatatgagatccccctcccctcatctcttcagataaaaataaatattatatcttcttacttaatagatggtattatttaacatatttataatagatatgaatatctcgaaatcaagtttaaactgttagataagcctctatctcatatattaaatctggcggaatatttcc

SEQ ID NO: 102141 - DNA, 398 bp, Homo sapiens
  misc_feature (1)...(398): n = a,t,c or g
antcggcacgagtagagatgggtgtttcaccatgtttaccangctgatctcggagtcctgacctcaagtgggcctcctgcctcagcctccctgtaatcccagcactttgggaggccgaggcaggcggatcacaaggtcaacgagatcgagaccatcctggccaacatggtgaaaccccggcggtacccggggcgcacccactaactgcaaaatatggtgaagatttgcagccccagggggtaaaaacgctgaggcacgaggggtggttgactctgggactttgataccgcccgaacccgattcacaaaagggtgggcaaaaatcaagactgggacccaaaaagaaatccagtgggagcatttaaaaaaaaccgggttgcagtgggacacactcctttg

SEQ ID NO: 102142 - DNA, 424 bp, Homo sapiens
ttcgggaggttggggctcgaggccaataattcggcacgaggtactatgtttaatagaagtggcaaaagtggacaccttgggcaggcggggtggctcacgcctgtaacctcagtactttgggaggccgaggtgggaagatcgcttgtgctgaggagttcaagaccatcctggaaaacatagtgagaccttgtctctcaaaaaataagtggatatctttttcttgatcttaagggaaagcctttcagtctttcactggtgagtatgatattagctatgagttttcataaatggcctttattatgctgatggttccttctagaatctagtttattggtttttcattacagggtattgacttgtcaacatttttttgggatcagttgcagtgggtatggggtatgttgaagtggccctgatgtcgtgg

SEQ ID NO: 102143 - DNA, 406 bp, Homo sapiens
aggcccgaaaatgggcacgagagttgaataaacatgggatcggttcacagaggatatgcaagtagacaataagcacaggaaaagatgttcaacatcattacctattacagaaatgcaaatataggccaggggaggcggatcatgcctgtaatccccactactcagaaggctgaggtaggaggatcgattgagcctaggaggaaaaggctgcgtggaggcatgagcatgaccatagactgtagcttgagagactgagtgagaccgaggcgcgcgagcagaacagatagagaacactaggggctctgaataaccccgtttggacttctagtcacgtttacactatgggtggggggggtgcctgtagttcagggactgtggagccggcgggaggagaatcgttggaccg

SEQ ID NO: 102144 - DNA, 444 bp, Homo sapiens
ggcacgaggcacatttcacagtgaaccttctgagagtgttgacagatcacagcttttctttttgtctaatgaaaagggcttgctggccattgggtgttgtaatctcttaggagagtaaactcttagtaactatctaaatcattcttaatgattctctctactaaaaatactaaaaatacaaaaaaaaacaacaacaaaaaaaattagccgggcatggtgacgggcgcctgtggtcccggctccttgagaggctgaggcacaccaatgcgttgaacccggcaggcggatattgcatggaacccacatgctacaatcactacagtcgggcgtaaatagaatttgccttactgaactcctcagaaaacatatatattaccctattcttgcgaaacaaccctctatgagattacttgataaaataggccccccatacactgcgagctt

SEQ ID NO: 102145 - DNA, 421 bp, Homo sapiens
ggcacgaggagaaatgcaaattgaaacaaggtgccatttttggactctagttagtgatggtagtgaaaaccagaatggtcctttctaaaacagcctgtgtgtcaaaaccataaaaatgcttctacctctttttaccctgttaattctacttctgagagtttttcctaaagaaataattcaaaataggaaaaagctaaaagcagaaaaatgttgaacatgacattatttatagctgtggaaagattggaggctgggcacagtggcttatgcttgtaatctcagcactttgtgaggccaagttgggaggattgcttgaacccaagagcttgagaccagcctgggaaacgtagtgagaccccatctcttacaaaagtggtaataatttagctgatacgtgtgtaatctttcttgatccgcagca

SEQ ID NO: 102146 - DNA, 668 bp, Homo sapiens
  misc_feature (1)...(668): n = a,t,c or g
gaaagaaatagtcttagagatcttcaataaagttaaaaaatgtaaagggatgttagaccccaaaagattgagaatttctagtttagaaatattcagagtaagccacatacaacttgctacttgaactannnnnnnnnnnnnnnnnnnnnnnnnnnnnnnnnnnnnnnnnnnnnnnnnnnnnnnnnnnnnnnnnnnnnnnnnnnnnnnnnnnnnnnnnnnnnnnnnnnnnnnnnnnnnnnnnnnnnnnnnnnnnnnnnnnnnnnnnnnnnntatctcaagtcagagccttttggctctgcagcccttgcaacccctcagccgtgcagtggggtttgcgtcgctgggaatgaggagacccctgcccggtgttgttgcctgactaatcagtgttttaaaacatatattaatcggggtgggcgcggtggctcacacctgtaatcccagcaattagggagacccaggcgggtggatcacctgaggtcaagagttcaagaccagccttgccaacgtggcgaaactccttctctactaagaaaatacaataattagctggacatggtagtgggcacctgtagtcccagctacttgggaggctgaggtgggagaatcgcttgaacctgcggggtggaggttgcaatgtgctgagattgcgccacttcactccagcc

SEQ ID NO: 102147 - DNA, 352 bp, Homo sapiens
ggcacgaggaacgggcgatattggtgagtcctttataattttctgcaaatggcacgtttgtgctttatttaatccacttttgtttcgttttgttttttgagacaagttctggctctgtcacccagtggcacaatcagccaactggagcctcgacctcctggtgagcgatcttctcacctcagtcccccaagtagctgggactacaggctggcaccaccgcatctggctattccactgtcattttggggggcatgttgaagcctagaagctgggcatggtggcctgtggtcccagctactcgggaggctgaggtgggaggatcgcttgagcccgggaggtcaaagctgcaggg

SEQ ID NO: 102148 - DNA, 343 bp, Homo sapiens
ggcacgaggatgatttaaagtatatgagaaggtgtacataggttatatgcaaatacttcaccatttcatataagggactttagcatcccctggagccctggaaccagttgcctaggaataccaagggacaactgtacacacatatatatagcaactttttcattttaaaaattgacctaatgtaaggaagggatccatcaattacctgaaacaggctataaatgaatacttttgaaaagatttagccagccgtggtggctcatgcctgtaatcccagcactttgggaggccgaggcgggtggatcacaaggtaatgagatcgagatcatcctggccaacatgg

SEQ ID NO: 102149 - DNA, 388 bp, Homo sapiens
gttcttttgtgattcttcagttacttcaggccatctgggcgtatacgtgcaagtcacaggggatgcggtggcttggcttgggctcagaggcctgacagtttttataagtgacctagtggggaggcagtattttacctacatagggtgtgaaaaaacagttaagaccaggtgtgccatcagcatagagtgcgaatctctggcagcccccatcccagccttttattatggaggcgggtcctttgcctgagctactccatgttgctttcctactgtgcaggtgcaaaaaaaagaaaaaaaaaaaaaaaaaaaaaaaaggtcaacccggccggaaattccaaatttataaatcgaaaatcctgaaaacccccgaaggttcctttcactgggc

SEQ ID NO: 102150 - DNA, 324 bp, Homo sapiens
ggcacgagggacttgtagaggcttcagggtcacactttcgaaacccagagttttagtatctccttatagaatatttgtaatttaagaaaaattatacaaggttgaattttcaaaaatatatttttaaaatatatttaaaaaagtatttttaaatatagtcctccggaatgcaaaaggacaatactactttcagctagtactttttaagtgattattttccgccacgtattcttttgaaattatgcatttaggccgggtgcggtggctcacgcctgtaatcctagcactttgggcggccgaggcaggcagattgcctgagcttcg

SEQ ID NO: 102151 - DNA, 327 bp, Homo sapiens
  misc_feature (1)...(327): n = a,t,c or g
ggcacgagggcgtgagccgccgtgcctggccagaattgaacatctttggatctttcttcttagtttagtacaaaactgaataatatttgcaggcagcagaattggatcgggaatttctcaaactgccaaagatgaaattagaatgagtgatttttggctggcagcttgaagtacatatatatcagtttgtgtatgatacgtgtgagtatgctgtggttnttngtgttttttgtggtttttggtgtgtgtgtgtgtgtggttgtgtttttttttggttgtggtgggtttttgtggtgttggttgtgggtggtgttttgtggtgtgtgg

SEQ ID NO: 102152 - DNA, 326 bp, Homo sapiens
ggcacgagcacacacacacacacacacacggacacacacacacacacagacacacacacacacacacattgtgtgccaggatgtgagactctgcacacaacttttttcaaggattttttgtctagtctaggtcatttgcttttatatatatattttaaaatactcttgtcagtttctgtaaaaaaatgcccactgacacattgtgtgtaattacattgaatacctatttcattttgggagagaataggctttgataatattgcatcttataatctattaatatggtatatctgtccatttatatagagtttacacatctatgtttt

SEQ ID NO: 102153 - DNA, 338 bp, Homo sapiens
ggcacgagataggcacataccaccttgcctgactaatttttctgtattttggagagacgggggtcttgccatgttgcccaggctggtctcaaaactctgggctcaagcagtccacccaccttggcttctcaaagtgttgagattacaggcatgagccaccagcctgaccctgcctcttttgcatttgtaaaagcaaacctagatgtataatttcacttttgaaaattttaatgtgtatctgtaaaagataaggatgctgtagcaccaattcctttgtcatacctttaaaaggttaacagtgagtcttcctgtatccagtaagaattcacattgccttg

SEQ ID NO: 102154 - DNA, 350 bp, Homo sapiens
ggcacgagtagggtttcactatgttggtcaggctggtctcgggcgtctgacctcaggagatccacctgcctcagcctcccaaagtgctgggattacaggcatgagccaccgtgcccggcctatgtctagtcttacacttcacatcctacaagacacgtggagagcttatgcaggttgaagggagagccataaagaatgatcaagatccctaaagaaatgctctgccttctaaggagactcagcataaagcaggggaggcagaaaaaagctgagaagtggaatgcaggccctaagaaaaagccatatgagtttcataatgatatccattccaatgatagccctcacagatg

SEQ ID NO: 102155 - DNA, 352 bp, Homo sapiens
ggcacgagcagctagctgcgagaattaatgtgagctcttgcaggactttggaggctctctaaaagtgcaagggaatgtggtcaacagcagatctttgatgtgatccaatttacattttaagtggctactctaacatctagtaaaggtactattggatcagtgggagaaagaatgaagtaaattttgatcacataattggctaaactattagaaaagaataaaagctgtagacttttctggatgggcgcagtggctcatgcctgtaatcccagaactttggcaggctgaagtacgcggaccatcctgagtcacgagttccagaccagcccggccaacatggcgaaaccccgcg

SEQ ID NO: 102156 - DNA, 377 bp, Homo sapiens
gttacgacgattagcgataatttttcccattctctggattatcttttcattctcttagtagtgtcatttttttaagaattaattttttgtagagatgggggtctcactgtgtttcccaagctgatctcaaacacctggccttatgcagtcctcccactttggcctcccaaagtgttgggattacaggtgtgaaccaccgtacctggtggatagtctcatttgctgcgcaaagagtttaaaattagatgaaggtcaatttatctgcttttgaccatgattcctgtatctttatggctatactgactacatactgtccctaacagatattctttaattacccatgaatgctgtcggtcacctgtaatcccagctactct

SEQ ID NO: 102157 - DNA, 361 bp, Homo sapiens
  misc_feature (1)...(361): n = a,t,c or g
ggcacgagggggtttctccatgttggtcaggctggtctcgaactcccgacctcaggcgatccacccgccctggcctcccaaggtgctcagatgacaggtgtgagccactgcgccagtcaaaaaaaagaattcttagaatggtagatcaaattccattattggtatgtcctcattaaagttaggcatttgataatctcgcacagtggctttttggagaaatgtatactgaatgtttaattggttgaataaccatacccaaaggctacatgttagcaaaatgggttgaagttcccttaaccatggacatacaggcagtggttatcactcttggctgcacattggaataagctggggagctttn

SEQ ID NO: 102158 - DNA, 339 bp, Homo sapiens
ggcacgagcttcaataccctgatattatatataaccacattaatctgagatgtaggaggcctaaagagaaagtatgcacccagcacagtggctcacacctgtaatcccaacactttgggaggcaaaggaaggaggatcacgtgaggcctgtagctggagaccagcctgggcggacagagcggggagaggccggctgctcgcagaggaagatgactcggtgggagcggaaggggagcgcgagaggcagactaggtgcgggcgcgcgtacgctcggtgggggacggccgggtgggcggtgggggagacgactgcagggggtaagggagcggatggcggacg

SEQ ID NO: 102159 - DNA, 350 bp, Homo sapiens
ggcacgagcacacacacacacacacacacacacacacacacacacacacacacgggcacacacacacacacacacacactctagtcttggtgtattctttgtgtgagcatatttggagatttatagttatatctagggcgcgtgtgtgctgtatatatgtggtggtgttttttgagtgtgggtatgcagataggcgtgtggcggataaatggttgtggatacattagttttaagggtgtgtatgtgtgtgtgattggcaccagcgtgtttataagacacatgtgcaggggctgtatgcggtggcttatgtgtgtaatcgcatctctttgagaggccgtggattttctcaa

SEQ ID NO: 102160 - DNA, 351 bp, Homo sapiens
ggcacgagagggctcggcgtgggagttagtcacttagtgagtaagaacacacacacacacacacacacacacacacacacacacacacacacacatacagcaactgcaagtcaattatctgtattcaaaatttgggctttccaaagatctctagataagggtctgacatatatcagtaactcatattgctcctcaaagttctacttatataaccactaaataaccagagttctatctgaaaaacttgcaaactactactttgggaattgaatttgtattggccttaaactaaaaaaaagaacacacttatgctaatttttttccttacataaggaaggtaactatatgtag

SEQ ID NO: 102161 - DNA, 356 bp, Homo sapiens
ggcacgaggatgagagatagagactaaacaaaatattgaacaaaagagatatgaaacaacttgatattagaattataatctgtgataaaggccttaaagaaaaataagatatttctaagagaataatgaagacctactttaaaatggcctaggagtaacccaggcatccaccgacgaatgaatgaataaacaaaattggtgtacccatatgattaggatgtttctcagccttacgaaggaaggaaattttcgctgagcacggtggcttatgcctgtaatcccagcattttgggaggccaaggctgggggataacttgaggccggaagttcaagaccagcctggccaacatggtgag

SEQ ID NO: 102162 - DNA, 329 bp, Homo sapiens
ggcacgagtagagatgggggtttcatcctgttggtcaggctggtcttgaactcctgacctcaagtgatctgcctaccttggcctcccaaaaggctgagattacaggcatgagccactgcgccaggccttctttcttttctttttttctttctttttttttttggaaacatctttaatttgctttaagggctttataaatggctccctcacaaaagtactctcattcgcctctatgcctaatacatcactgatttatggataaattcgacattaatacctaaaccctctatgtcctgctggaagatagtgtattgtcgaatcataggtgc

SEQ ID NO: 102163 - DNA, 337 bp, Homo sapiens
ggcacgaggacggggtttcatcatgttggtcaggctgatctcgaactcctgacctcaggtgatccgcctgtctcagcttcccaaagtgttgggattacaggcgtgagccaccgtgcctggcctgtaggactgtgtattatcgctctcattagcaatgagtactagggtcacgattgagagttcttctctgttcctatgcggatttgtagagcagccgcgacttgggtggggtgacctacctgattggggaatagtacctatagtgagatgggttcggtatctgctgtatttggggcgggattactatgttagttgggaggtacgggttctatggtcg

SEQ ID NO: 102164 - DNA, 343 bp, Homo sapiens
ggcacgaggtcaactctggtattcttagagactctgtttgggaaggagtcctgagccattttttttttcttgagaatttcaggaagaggagtgcttatgatagctctctgctgcttttatcagcaaccaaattgcaggatgaggacaagcaattctaaatgagtacaggaactaaaagaaggcttggttaccactcttgaaaataatagctagtccaggtgcggggtggctcacacctgtaatctcagtattttgggatgccgaggtggactgatcacctaaggtcaggagttcgaaaccagcttggccaatgtggcgaaaccctgtctctactaaaaattca

SEQ ID NO: 102165 - DNA, 337 bp, Homo sapiens
ggcacgagggattttatgtcattctgggactttcaaacttgatagtagaccgagcatggtggctcacacatgtaatcctagcactttgggaagccaaggtgggaggatcgcttgcggccaggagattgataccagcctgctaaaggtagcgagacccagactctacgggcaaattttttgaaatgtgttaggatgatgctgccctgtttatacaataaaactttgggctctgttttgttttagaaacaagtctcatttctcccgaagggtactgaattgcttggagttgattttttgtgtaataaaacatatagcttgaggaatccattgttttttt

SEQ ID NO: 102166 - DNA, 343 bp, Homo sapiens
ggcacgaggggtttcaccatgttgcccagggtggtctcagactcctgggctcaagtgatcctcctgccttggcctcccaaagtgctggaattacagatgtgaggccaccgagccaggcctgaaaaattattttttaagcaaaattatttcttattaattggcttgtttcctttctattatgctctgtagtgataaaagcccttagtcttacttaaaagcattatttccacctgatgatgatagctttcatttattaattgattaattgttgatttgttcaatcattcattcgtggatgcctgaaacatttactgagcattgcagtcaatagcaggaacacaag

SEQ ID NO: 102167 - DNA, 349 bp, Homo sapiens
  misc_feature (1)...(349): n = a,t,c or g
ggcacgagcggcacgagattctatctatctatctaactatctatctatctatctatctatctatctatctatctatctatctgatttatctacctactatcactagaatataagctctgtgagggcaattactttcatttttcacctgtttaatttattgtcttgtctgcaaccctagaagagtatgaatggttcattcaccagcatcctcagcaccacctgggagcttgttagagatgctaactgatgggcttcaccactgaataggaatctttggtggtagggatcaggaatctgttttaaaattctccctgtgatttttttttttcatgacagcctaccattgaan

SEQ ID NO: 102168 - DNA, 360 bp, Homo sapiens
ggcacgaggccctgccgaatagaactctacagagtcgtagagagtttagccaaggcacaggagacatcaggagaagaaatttccaaattttacctgccaaactgcaacaagaatggattttatcacagcagacagtgtgagacatccatggatggagaggcgggactctgctggcgcgtctacccttggaatgggaagaggattcctgggtctccagagatcacgggagaccccaactgccacatatattttaatgtacaaaactgataccagatgaaataatgttctgtcacgtgaaatatttaagtatatagtatatttatactctacaacatgcacatttatatatatctgtatatg

SEQ ID NO: 102169 - DNA, 362 bp, Homo sapiens
ggcacgagcggcacgagtggaatactgggattttatttggaaagggaagacaggttattacagatccgtactgataccattaccctgagccatggatatagcacattctccctgaaccggtgcgactcgaggcatcacatgaatcgaatgtttcagatgttataccaatctccatttctgggatatattcaacttagtcatgaggtattagcctttggcatatcttatatctataatactgaatgagagtatcatactctttacatgtatttgaagccatgtcattaagtgcatacaatttttattaaatttttaattgacaaataattgcatttatttatggggtacgatgtagagatttg

SEQ ID NO: 102170 - DNA, 1530 bp, Homo sapiens
ggtcgacgtcttcacttcaagagggccacactgcaccctcagcttaacatgaataacaaagactggctcaggagcagggcttgcccaggcatggtggatcaccggaggtcagtagttcaagaccagcctggccaacatggtgaaaccccacctctactaaaaattgtgtatatctttgtgtgtcttcctgtttatgtgtgccaagggagtattttcacaaagttcaaaacagccacaataatcagagatgggagcaaaccagtgccatccagtctttatgcaaatgaaatgctgcaaggggaagcagattctgtatatgttgggtaactacccaccaagagcacatgggtagcagggaagaagtaaaaaaagagaaggagaatactggaagataatgcacaaaatgaaggggctagttaaggattagctagccctttaaggattaactagttaaggattaatagcaaaagatattaaatatgctaacatagctatggaggaattgagggcaagcacccacactggtttttgttaagacctcatcagtcctgggtgcttgccctcaattcctccatagctatgttagcatatttaatatcttttgctattaatccttaactagttaatccttaaagggctagttaatccttaactagtcccttcattttgtgcattatcttccagtattctccttctctttttttacttcttccctgctacccatgtgctcttggtgggtagttaccaacatatacagaatctgcttccctttgcagcatttcatttgcataaagactggatggcactggtttgctccatctctgattattgtggctgttttgaactttgtgaaaatactcccttggcacacataaacaggaagacacacaaagatatacacaatttttaagtagaggtgggggtttcacccatgttgggccaagcttggttctggaactaactgaccctccggtgatccacccatgccctggggcaagccctgctcctgagccagtctttgttattcatgttaagctgaggttgcagtgtggccctcttgaagtgaagactggttggttgggaggaactgaattgtgaacaaagaagctagttcaaatttgcataaatcatccctgctatagcttagattctcctaggtagtagtttctttcagaaggaaaatgagctgtgcaggtcatatgagggtcttcttatcctattatgatatctctagtaactctggcagtaacagaagcaaagtaaatctggacatgacagacatttagacgaatctggcagtacactgagttttaactggacaccaagcaggcaaggctggaaggttttgctctctttgtgctaaaggttttgaaaaccttgaaggagaatcattttgacaagaagtactgtgtagtctgctgcagtcttctcttgggtccaactggcactgcctgttagtctattgggaggcccagcaggtcacaactgacgtcccacagccgccttgctatagtctcattacgagcttgg

SEQ ID NO: 102171 - DNA, 358 bp, Homo sapiens
ggcacgagagagacggggtttcaccgtgttggccagtatggtctcgatctcctgacctcgtgatccgcccgtctcggcctcccaaagttccacttttatgaagtatctagaatagtcaaatttatagaaacagaaagtagcataatgactaccaggggctggagtgggggagaaataggaggtaattgtttaatgtgtaaagagtttcagtttctggagatggatagatgtgatggctataaaacaacgtgaatgcatgtacttaatgccactaaaatgtacacttgaaaatggttaaaattggctgagtgcggtggctcacgcctgtaatcccagcactttgggaggccgaggcctg

SEQ ID NO: 102172 - DNA, 355 bp, Homo sapiens
ggcacgagggcagggtggtacagtcgagagtgagccagactccggtgtggggctgtgattgctgagcgacttctggcaagtcactgccccctcctgtggggagatgcatggatgagcttggtatgttctccaaagccccaggtattctggggccacacaggcagtgatgacaggggtacaggcccaggtttcctcctcctgctggagcagctcctgtggtctcaagcacgtaggagattctgactgcttaaaaaacaagtgtgggccgggcgcggtggctcacgcctgtagtcccagcacttttggaggccgaggcgggcagatcatctgaggtcaggagttcgagaccagcctg

SEQ ID NO: 102173 - DNA, 343 bp, Homo sapiens
  misc_feature (1)...(343): n = a,t,c or g
ggcacgagccggtatatacccaaaagaatataaatcattctattacaaagatacatgtatgcgtatgttcattgcaggactattcacaataccaaagacatggactcaatccaaatgcccatcatggatagactggataaagaaaatgtacaggcagggccccattctatcgcccatgttggagtgcagtggcgaggtctctgggttcaagtgattccccttcctcagcctcccaagtagctgggaatacaggggcccgccaccacgcccagctaatttttgtatttttggagagancctttccccccccctctttccctctccccccccctcctccttcccc

SEQ ID NO: 102174 - DNA, 353 bp, Homo sapiens
  misc_feature (1)...(353): n = a,t,c or g
ggcacgaggcaattctcctgcctcatcctcccgagtagctgggatcacaggcgcacaccaccacgcccggctaatttttgtgttttttttgtttgttcgtttttttttttcttttttaaaaacaggttttaaacttgttgcacactccaatttccaacctcttaccttatttgctccattacactttaaataaaataccttaacttggtttttttttgtgcctttggctttttctcactcctttgctttttcacccaaaatggagatcctttacgtgaatttggataactggaactcttgcctccagaacctctgaaatttttttttttttttttagcataaagacccccttn

SEQ ID NO: 102175 - DNA, 383 bp, Homo sapiens
ggcacgagggatccatgacttgacttgctaaaaacttgctttctggccaaccttggtgactcacacctgtaatgccagtattttgggaggccaagataagaggatcgcttgagcccaggagttcgagaccagcctgggcaacgtaacaagacactgtctcttaaaacacacacacacacacacacacacacatacacacacaaacttgctttcttttttttttttttttggaaaagggagtctccttttgtgccccagcctgaagtccaggggctaaatctgggttaattgaaacttttgcctccagggttcgggcttttttccggcttaaccctccaaagtactgggaagcccgggcccccattacccccctgggttatttt

SEQ ID NO: 102176 - DNA, 395 bp, Homo sapiens
ggcacgaggctagcaccatgagcttcaataccctgtcttaaaaaagaaaaaaaaaaagggggggacattagaagatattaaataagaaaatactaagatcaacagaatccgatgttgatattcaataggaatgtaaccatataaatatatatgcatataaacaagcattaaaagataaagtccaaaaataaaaataaaaatagttggggtagttgatataacataaaattctttttttcttaacatagaattcttattcaaagtcttacagcattattgctacctcatcttctaaatgaaaaatatgtaacccacacatatttttttaaaactacttcagccaggcatggtggctcacgcctgtaatcccagcactttgggaggccgaggtgagg

SEQ ID NO: 102177 - DNA, 392 bp, Homo sapiens
ggcacgaggtaagatttggggaaacagaaataaggaaataaaaacatcccaagtgtgtctggtgcaggttaagtggcttagtgtgtggtaaggagtatagaaaatagtttgcaactagtttgtgaaaatcctgctaagacaactagataggccgaccactgtggctcacacctataatcccagcactttgggaggccaaggcaggcacatcactcgaggtctagctttatagaccatcctatccaacttgggcataatcttatctctgttaagaatactataattaattgtacttggatacctctatctagttagaataattactatctctactatacctataactaaatatattcttaatcatcttatattatccatagtctaatattacg

SEQ ID NO: 102178 - DNA, 420 bp, Homo sapiens
ctcgacgctgcagtaccgtccgttctgacggctcgacgccacgcgtccgcccacgcgtccgcccacgcgtccgaatttaaaagtaggaaagtataagaaaataaaagtgcctctaattctatccaaacacaactgttaatttttcttttcttttttttttttttaacgaaacttaagggaattgggggaatttttttttttttttttttggttttttttttttttttttttttttgtggggaaattttctgtttttttattagtggggaatctgtttttattttttgggggaggaatttttgggttgtcgcgggtaatgtgttttaaggagtttcgttgttttagttaatatagtgttggtggtaggaagttttattgtagttttgttgtggggaagtttggtataggctgttcttatcg

SEQ ID NO: 102179 - DNA, 373 bp, Homo sapiens
ggcacgagcaaaaataaaatagagtaaaaaaacaaaagtaacaaattgggatgtcataaaaaaatgacagagcagggaactccaaaggtccattctgccactaaagtgaggaaaaaactggtaaaaatgtcagaatcaacctttttggaactctggaaactaaccaaagtttgcaacaaacagaggaatgcttaatttaaaaaagaaaaacaaaaaccagggccaggtgcagtgggtcatgcctgtaatcccagcactttgggagaccaaggcaggaggatccctcgagcccagcagtttaagaccagcctgggcaacatggtgagaccctgtctaaaaacaaaacaaaaccagctgaatcttgataagagaa

SEQ ID NO: 102180 - DNA, 346 bp, Homo sapiens
ggcacgaggagagagctagcaccatgagcttcaataccctgactcaaataataataaaaggtaaaaaaattatatttaagttgaaattttgaaaacagcccaaattattataagtcaaagcacacacaatcatttgaaatttttgtttatttctctgaatgaacacattgatgctgggtaactgctcttttagcattaaaaatttgacacttaaaaacgttttgcggaaggctgggcgcggcggctcatgcctgtaatctgagcactttgggaggctgaggcgggtggatcacttgaggccaagagtttgagaccagcctggccaacatggggaaatcctgtctca

SEQ ID NO: 102181 - DNA, 338 bp, Homo sapiens
ggcacgagggcaaaatgagtcttaatatttctgtcctttaagttaaaaatggtcaaaatatgctttcagaattacttctctatattcattagtaatttttagtataatttagcctgggcttgccttaccatattctgatggtgtagtttgagtattaagaaaatagaatttatttattgatttatatttatttatttttgagaccctggccctgcaaaaatatttaaaaagtagccaggtgtgttggtctttgcctgtagtcccagttacttgagaggatgaggtggcaggatcgcttgagcctgagaggtagaggctgcagtgagctgttctgtgca

SEQ ID NO: 102182 - DNA, 390 bp, Homo sapiens
accacacgtccaatgggaggtaaaggagtgttccagatgctcctgatcactccctttatagccattactgtcttgcatcttgtaactcaggctatgttgtggtctctcttgctccactgcaaaaaaaaaaaaaaaaaaaaaaaaaaaaaaacccaaaaaaaaaaaaataaaaaaaaaaaacctccacccaaaaagggggggttttgaggagatacttttttttttccccaaggggggaaaaaaccttttttaaagggcccctaaaaagcccccaaaattagggggggcacaattcttaaaaaaggccctataccaaaacttttaccccaaactttaaaaccccgggggggggggaaaaactacggaaaaaattaaggggggcccctttca

SEQ ID NO: 102183 - DNA, 385 bp, Homo sapiens
tggggttttgccatgttggccaggttggtctcgaactcctgacctcaggtgatcctcctgccttggcctcccaaaatgctgagattacaggtgtgagccaccgtgcctggccaccagttcttttttttttttgaggcaaacccttttttttttaccgggctgtgaaggcttggacaaatctaggtcaattgtaagttcagatttaccgatcctggcaattttattgcctctgtttctaaataacttggaattaatgggtcccagatgggttactgataaatttttttagctttcttggatagaaccgaggatttatagtattagcccaataggttaaaacctctgcacctcagttcccccactttgggcccctaaagggcggaag

SEQ ID NO: 102184 - DNA, 384 bp, Homo sapiens
cccacgcgtccgtaccatctcacttctaggaatactagtatatcgctcacacctcatatcctccctactatgcctagaaggaataatactatcgctgttcattatagctactctcataaccctcaacacccactccctcttagccaatattgtgcctattgccatactagtctttgccgcctgcgaagcagcggtgggcctagccctactagtctcaatctccaacacatatggcctagactacgtacataacctaaacctactccaatgctaaaactaatcgtcccaacaattatattactaccactgacatgactttccaaaaaacacataatttgaatcaacacaaccacccacagcctaattattagcatcatccccctg

SEQ ID NO: 102185 - DNA, 386 bp, Homo sapiens
cttccataccctattcctggggagaaaaggagggaatcccttgtatggccccaccccaaattcagggaacttctagacttaatgatttcacagctttaagtttgcatttgaacacacacacacacacacacacacacacacacacacacgaaattcagcatctcccacctcaaggtatcacagctctcatcttaaactcacttctgagacattactgcccttctctggcatttccttctctgtctcccaaacaaaatctaacagttagacattgcattctatcacgagacacttggctagcaacagctagtaaatgagagaagtgaattctactagttataggagttaatggactgagggttgcaagacgatcacgccagattgtc

SEQ ID NO: 102186 - DNA, 385 bp, Homo sapiens
acaaatgagcagggccgcggtgggagtgggcgcagtgcgctgctgccactgaggtgttgtgcatgatgtttggatgctagactagttgcatctgacgggagaagtttgtgttgtaccagcgcatgccttggaaagacttaagtaatgcaaaaggttgtccttttttttttttttttttttaaattaacggacaagtggttttagtaccccaaaaaagggagggaaaaggcatttgcttaacggcccaaactttgattggtcaaaaggtttaatggcctatggatccattaaacccccaaaattttttttaccggtttaaaaaaaaaaaaaaaaaaaaaaaaaaaaaaaaaaaaaaaaaaaaaaaaaaaaaaagggggggggcctt

SEQ ID NO: 102187 - DNA, 437 bp, Homo sapiens
cccacgcgtccggcagtgagccgagattgcaccattgtactctagcctgggcaacaagagcgaaactgcatctcagaaacaaaaggagctataaccattattttcaaaattaatgaaaccgtggtgatgagagaaactgggtttcacaagctccgtcctgcaatgtcacagtcagcatcaaccctctcccatccccctgcatcaggtttgagaatgtccagagtcaatggaaactcacttctctgtttcccgctggtggcagtttcatatctgaggggttcaagtcctcaaactcctgacctcgggtgatctgcctgccttggcctcccaaagtgctgagattacaggcgtgagccaccgcgcccgatgaagggttattattattttttttaaactttaccgaggaaactttcaaacatgagcaaaataagaggata

SEQ ID NO: 102188 - DNA, 346 bp, Homo sapiens
  misc_feature (1)...(346): n = a,t,c or g
ggcacgagctttttaatgttcattttatttgaaagattcctcaaagtggtcagcaaattagtggaccatagtgagagctaaacttcagttctcttgagttcattatgaagaatttatgtgtgtgtgtgtgtgtgtgtgtgtgtgtgtgtgtgtgtgctggccaagagtacggggagtggacatgaatcctgtggagcatccttttggaggcggaacccaccagcacatcggcaagccctgcaccattcgcagaaatgcctctgctggccggaaagtgcgtctaatggctgccctctggactgtacgcattgggggaaccaagactgtgaccttacggaaaactagn

SEQ ID NO: 102189 - DNA, 326 bp, Homo sapiens
  misc_feature (1)...(326): n = a,t,c or g
attaaaagagtggtcaggatgcaacatgttatgttgttccttcagttgcttccatttccactctctgaatttatttccatcttgacttcttttaagatacatttcaattactgtgtgtttcctatttttgtctttcattttggaaattcctaatggtcagcagataaccaaacaaaacacaaaacatatttatcttttaaaaacatgggaggccaaggcaggcggatcacctgaggtcgagagatcgagaccagcctgaccaatgtgaagaaaccccatctttactaaaaatacaaatttagccaggcttggtggcacatgcgtgn

SEQ ID NO: 102190 - DNA, 612 bp, Homo sapiens
  misc_feature (1)...(612): n = a,t,c or g
tcatgttgacgtcgtcatgggcacctttgccatactgagtgagctgcactgggacatgttgcacgtggatcctgagaacctgaggctcctggacagcgtgctgaactgtgagctggccaatcactttggtacagacttcaccccaccagtgcaggctgcctatcagaaagtggtggctgatgtggctaatgccctggcccacatgtatcactaagctcactttcttgctgtccaatgtctattaaaggttcctttgttccctaagtccaactactaaactggcggatattatgaagggccttgagcatctggattctgcctaataaaaaacatttattttcattgcaaaaaaacagaaatggagatatcaagtaagacagtctttggagaagtctgcatagagagggagaaggaatcctcaagagggggaggtagttaaaagagttttttggggttgacattatgatttcctttgannnnnnnnnnnatgaaacaagtgatgggtccccaagccggaatgacaatgttaaattcttggtgaattggaacactggtctccgttttcaagaatattggattgccattaccggaagaatgcctggaatacacgct

SEQ ID NO: 102191 - DNA, 414 bp, Homo sapiens
atgactatgggccatgagttctcgaggcggaaattcgacacgaggcgatagatgagccagactgaccctgataagaaggacgggttgaggcctgaggcacgagaatcgcttgaattcgggaggtggaggttgcagtgagccgaaattatgccactgcactccagcctgggcaacagagtgagactctgtctcagaataaaataaaatcatagcattaacaaaaaaaaatttcctgggggaaaaaactggggggtgttggcacacaaaaaattctctggttttaatccgagagatttgtaaggggaagggcattttttagatgaaacaggtgatctttaaaacttttttggatatatgtccctttctttctggctaaataaatggggggtttttcttctattaactcatagggag

SEQ ID NO: 102192 - DNA, 338 bp, Homo sapiens
ggcacgagtcaatgtgaggctcaagaaccttcttaggctgggctcggtggctcatttctgtaatccctgcactttggaaggctgaggcaggaggatctcttgaggccaggagttcaagacaagcctgggcaacatagccagacctctgtttctatcccccccaaaaagaaccttcttaaaccggaattgagtcctacaacctcgataactcacaaataagcccgtgtggcctctcgcagacttgggaagttctccaagtgtccagggagatgtgccaggcgctttcctgccgtgaccaccgtcctctgcctgctccatttcttggtggccttccttta

SEQ ID NO: 102193 - DNA, 328 bp, Homo sapiens
ctaaaaagaaaacccacatgctctgaacactagtcaaccccaaccttccctcacaaacacagtgatccccacggtcagcatgagagagaaaagccaaagaacaaatgggaagagacaggcacaggaacctacattctagctagtatacttagagacacttgagaagaactgcatccataaaataagactagatagctatgaaaaagagaaaacggccgggtgcagtggctcccgcctgtaatcccagcgttttggaaggctgaggtgggcagatcacctgaggttagaagtttgagaccagactgaccaacatggagaaaccccgtcc

SEQ ID NO: 102194 - DNA, 544 bp, Homo sapiens
ggcaagtttcttaatttctcagtgcttcaatttcctcattatcaaagtggggataatagtagaccccattttggtgctgattttggtgagaattaacgaaagggaatatagagagagctgcctcttggctagatatatgctttaggacagtacctaggacacagaagtgctacgtaaaaggtacctctatccctgatactcaaaacgtgggcccagccatatatggcatccgttggaagcttgctagaaatgcaggatcggctgggcacaatggctcaaagtgctgtaatcccagcactttgggaggctgagatgggaggattgcttgagcccaggagttcgagaccagcctgcgcaacatgatgagaccctgtttctacagaagaataaaaaattaaccaggcatggtgatgtgtacttgtggtcctagctactcgggaggctgaggtgggagaaacacctgagcccgggaagtcgaggctgcagtgagccatgatcatgcatatgcactccaacctgggtgacacagtgggacctggtctca

SEQ ID NO: 102195 - DNA, 334 bp, Homo sapiens
agaatcgctttaacctgggaagtggaggctgcagtgagccaaggtcgcaccactgcactccatcttgggcaacagagcaagaaacttgtatcacatatttagaatattgtttccctccagtatcacatacaaacttggtttattttaaaccactgaatgttacaataagatcagactattgtatattgggattacatgctagcagtataggaggtagtgattctttgatcatagactgctgggattgagtgttgttagtaaatagggtagtggcagataaacagtgggagctgagaccattggttacatgttttgtactttggaatactggtct

SEQ ID NO: 102196 - DNA, 324 bp, Homo sapiens
aataaagccattgcacctagttaagtgggcatttgaaacgaaaaacgaaaatgcagccaagtttaaattttgtttgcctgccactgactccaagatccttccaatgatatcaatttttgccttagaaaaattaagtttcatacagttcaacaatttaagttatccaatatcgtaccaatattctgcacctacatttatgtgaagtgttagttttctggtttctgccttattttttcctaaagaaaacatacactggtataggccagatgcggtggctcacacctgtaatcccagcactttgggaggctgaggcaggtggatcac

SEQ ID NO: 102197 - DNA, 333 bp, Homo sapiens
ttctcttctttcattcttgtatctcaggtcatctgagatacaagaatgaaagaagagaaaaaaaaggtgatatgtggatagatgtaaatgaacactgtataaacaatgataaagtcttgtggagttaaattagaaggacaatattagaatattaggccagaataacataaaaggcactaggaaggataaattgagatatttaaaaaatatatgacttccagccaggtgcagtggctcacccctgtaatcccagcactttgggagcctgaagtgggcagatcacctgaggtcaggagtttgagaccagactggccaacatgggggaaccccgtg

SEQ ID NO: 102198 - DNA, 278 bp, Homo sapiens
ctttatagagtttacaggttcagttccagaccactgaaataaagtgaatatcacaacagaggaagtcacaccaaagttttggtttcccagtgcatataaaagttatgtttatattatactgctgtctattatgtgtgtaattgtattatgtctaaaaaatgtacataccttaatttaaaatacttcattgctaaaaaatgctaatgaccatctgagccttcagagaggtgtaatctttttgctggtggagggtcttgtctcaatgttgatggctgttg

SEQ ID NO: 102199 - DNA, 234 bp, Homo sapiens
gtttgttcaaaaaagactctatattgaactgctccactttaaaaaatatatatataaatgtttactttttgtagacacggggtctcaccatgttacccaggctggtcttgaactcccgacctctgctgatccgtatgcctcggcctcccaaagtgctgggattgcatgcgtgagccaccgtgcccgacaatagatgtcttttaattttctggaggaaaaaggtcgacgcggccg

SEQ ID NO: 102200 - DNA, 335 bp, Homo sapiens
ggaagatacatcactagctggtttctagggaaaacaggtcatggctttgcattgttttatcttttttcattttttttttagacggagtcttgccatgttgcccaggctggtctcgaactcctgggttcaagagatcctcccaccttggccactcaaagtactggaattacaggcgtgagcccatgcgcccaacctcagctttgcatttttaatacaatttcagtctattctatcaacccaaatacataatattttccaaataagaaaaatctaaaatatgtttttaaactcaacttgaaatcagagaatttaaagttttgaataaaattgacaaa

SEQ ID NO: 102201 - DNA, 329 bp, Homo sapiens
catacttccagaactctttttgttcatttacgtttaaaaaattttaacaaataccttatagagtggggtcttagtatgttgcccaggctggttttgaactcctgggcccaagcagtcctcccaccttggccttccaaagtgcttgggattacaggcatgagccactgcacctggctctatttacatttaagtactgatttattgaagctttgctagaatgtgtcagtcaccactgggtctttttttggagggggaatattagaacattttgactactagaatttcttctactcagtatttctttatttttttttttttttttgaaaacg

SEQ ID NO: 102202 - DNA, 293 bp, Homo sapiens
ggctgaggcacggtaattgcttggacccaggagaaggaggctgcagtgagccgaggtcgtgtcactgtactccagcctgggtgacagagtgagactccatctcaaaaaaaaaaaaagggggttttcccttcaaaaaacctcctgcccaggggcccttgggaaacagggttgattccaccatttaaaaagggagtgggttttccccgtgggaggaaagggcttgaaaggggccttaggtaaaaggaagaaaagtagtgcagggcccttggataataagcctttccaaaacggat

SEQ ID NO: 102203 - DNA, 313 bp, Homo sapiens
atttaccatctcacttctaggaatactagtagatcgctcactcacccaccacattaacaacataaaaccctcattcacacgagaaaacaccctcatgttcatacacctatcccccattctgtcgacgcggaagcagttggctatacaacatctcagtcgactggagtaactgcccatctttcgaggggatccaatctccccgtgagcagattattcgtgggtttagtctgaagcttgggagttcgtcgctaaaggtgaggtggcagtagagaggtggagacgtcggcttgctctctaacaatgaagaacgccg

SEQ ID NO: 102204 - DNA, 622 bp, Homo sapiens
tttttgtattttagtagagacggggtttcactgtgttgcccatgctggtctccaactcctgagctcaggcaatccacctgcctcggcctcccaaagtgttgggattacaggcatgagccattgcaccagtcctaacctatctcttttgactcaatctaaaagtttctgtcttttaatacaaaaccacaatccatatgcattcattaattcacaactgacatttagtatcttatttctgttatcctatttcatattttatgattccttgtttctgctcttttgatatataaattatgttttatttgcccttatcctttcatgtgtttctaaagtatatagcctacgtgtaattggcccattagctaactttatgtttttgaaagcattctctctcagaattcccattttagtggtgcagcacacatagaaaggcttagactttctggagctagataagctggataaaggtgtgcatgagccactggtcaatggcttgtgcgggccgtgagtgcatttcaggtatgtcatacgctattgatctggcagccaggtattcagatagggtataaccaggttcatcaggctcaaaacataatcaagtattattgagacatagttaatg

SEQ ID NO: 102205 - DNA, 347 bp, Homo sapiens
  misc_feature (1)...(347): n = a,t,c or g
caaacagcctttcccttcatcatttattcattcaaccagcatgcatagaatgtctgtggtataccaggtactagaaggaatgccgtcacaaacttaatctcccttttcctgttaagagttatttatactcaccatttattttaaaaagcttatttaaaattttatagaggcagtcttgctatgttgaccaggctggtctggaactcctgggctcaagcaatcctcccacctcagcctcccaaagtgctgggattacaggcgtgagccaccaggcctggccttatactattttgatgacgagcaacttgtggcaggnggaactgagacttatccaaggtcacccagtt

SEQ ID NO: 102206 - DNA, 377 bp, Homo sapiens
ggcacgagcttggcatttggtactatgactttttaatgtatattcaaaagatgattatattctatttgttggtttgtaaagacagttaagaagaatgtgtagtttggtagtggtttggggacacttcagtggtgcttccgaataatacctctcatatttatctgtctcaatggtttctactgggtcagcatcagtagaagtttaagaaggtgatattggccagacatagtggcttatacctgtaatgctagcactttgggaggctgaggtaggaggattgcttgagcccaggaatttgagaccagcctgggcaacatagtgagatctcatctctacaaaaaaaaagtttatatattttttggttgtttggttgcttg

SEQ ID NO: 102207 - DNA, 712 bp, Homo sapiens
gctttcaatacaacaatgatattatctcaaaatactgagcatgtctaacaggcctcttttaaaagctcagcatgtttaatgtagatgttgctaacgtccaagtggctcctataagttaagggtccattgatttagaagttctaaaagagactaacctaagggataccaagaacagatatttttaaagaatttcatagaggagatacacattagaaacccagaactctaagatgtgcatttgctaagtcctgtaaacagacaggaaaacacatttacattagtttgccctttaaagattatttcctacttgtctcttatcaatgtgagtacataaaagagaccttattacaattaaaaacaatgatggtttagcagcagatttagataccttacattctctctttaagagagagaatgtaaggcctggcacggtggctcacacctgtaatccagcactttgggaggctgaggagggtagatcacctgaggtcaggagttcgagaccagcctggccaacatggtgaaaccccgtctctactcagaatacaaaaattagctgggcgtggtggtgcatgcctgtaatcccagctacttgggaggctgaggtaggagaactgcttgaacccaggaggcagaggttgcagtgagccaagatggtgccattgcactccagcccgagcaacaagagcaaaactcttatctcaaaaaaaaa

SEQ ID NO: 102208 - DNA, 365 bp, Homo sapiens
ggcacgagctttataagagattctcctagatgattatcaatacctataggtacacaatagatgtttaagtgaatggaaataattaaatacttagttttaggtctgctgtttatgtgctaccttagagcaagtcacttaactactttgagctcaagtcacttaaccactctgggctttttttttttccctgtgaaataaggtatttgactcaatggcctctaaggggtcttttcattataacttttgccaggtatgggggctaatgcctggagtcccagcagtctggaaagccaaggtggaagtattgcttgagcccaggagtttgaaaccagcctgggcaacatagtgagactttgtctttatag

SEQ ID NO: 102209 - DNA, 337 bp, Homo sapiens
ggcacgaggtatcatgggtgaaaaggaaacaagatgaatggattgagtttgatgatgacacagtcagcatcgtagcaccagaagatatcttacggctttctgctggtggagactgccatatcgcttacgtgctactctatgggcctcgcagagttcaaatactggaagaggaaagcgaacagtgatcttcattctagtatttatgcttagatgtgaaaataaatgttatttgctgatcatttctataatccagagctttagaggaagacacataggtgggtttatgtttcacctcatttggaacacattaggacagaagcagaccactctgtgcact

SEQ ID NO: 102210 - DNA, 341 bp, Homo sapiens
ggcacgagtttttgtagagatggaggtctcactgtgttggcccagctgggctctagcttctggcctcaaaggatcctcccgccttggcctcccaaagtagtggaattacaggcatgagccactgacccctgctgagccaggctgttttcaacattcaatggtcattgactatctttggcgtttaggagggccctccagggaccaggcgtatgggcatcagccaccccagcctcacaccccaacctgcaatcacacttggatcattcccactggctagcccgtctgactcagcagcaccttccgaggaaacttggcccagattagctgtctacaccactgcg

SEQ ID NO: 102211 - DNA, 368 bp, Homo sapiens
ggcacgagttgggctcggcgtgggtgggtgggaggatggatggatggatggatcgatctcagaaaagtaactggctccaaagtttcagctaaatacttgacagggcaatctatgatggactgcagaatccatactcttactaaatgcaaaagcaagaatgcactagaagcaatatatatctcactcaactttgtaaggataaatccaatccacaagtggctcttttaaaactgaagcgagtccggtagcggaggctcatgcatgtaatcccagcactctcggaggccaaggcggacaggtcacctgaggccaggagttcgagaccagcatgaccattaccgataaatcccatctctagtgagtacatg

SEQ ID NO: 102212 - DNA, 325 bp, Homo sapiens
  misc_feature (1)...(325): n = a,t,c or g
ggcacgagcatcatttaactcacacttgtgagaatatgtggtatttggttttctgttcctgcattagtttgctaaggataatggcccccagctccatgcatattcccacaaaagacatgatcgtggtcacctcccaatttttcttgtccttttttctctcctgatagcagatcacaggcatgaaatagaaacctaatatatattatttcttttttttctttttttattttgagacggagtctngctctgttgnnnnnnntgnnnnntnnnnnnnnnttnnnnntgnnnnntgttnttttttttgngtntnnttttttntnttttt

SEQ ID NO: 102213 - DNA, 385 bp, Homo sapiens
  misc_feature (1)...(385): n = a,t,c or g
tgcatttgtattattagtttgtgtttgtaagtgtttctgcttacctctttcctaagcaatagtctgttggatacataacttattagcactgtgattaagctgatgatcatctttgagaatgtaatgtagcaatagcagtgagaatctttttgtcccatgaagtacttgattaacttttgcaagattttttattaaacatacagtgttttaacttggtcatattttcccagccttttagggcctacgctacatgagcagtaaaatgaagttgaatatataattgctttaacttttttttttgaaacagagtctcactctgttgcccaggctggagtgcagtggcacaatctcagctcactgcaacctccgcctcccaggttcgagn

SEQ ID NO: 102214 - DNA, 212 bp, Homo sapiens
aaccagagacctttgttcacttgtttatctgctgaccttccctccactattgtcccatgaccctgccaaatccccctctgtgagaaacacccaagaattatcaataaaaaaaaaaaaaaaggggcggccgttttaaaggatccctcggggggcccaagtttacgcgggcatgcaacgtcatagctttttccctatagggagccgaattataa

SEQ ID NO: 102215 - DNA, 407 bp, Homo sapiens
  misc_feature (1)...(407): n = a,t,c or g
cccacgcgtccgcattcgaagaacccgtatacataaaatctagacaaaaaaggaaggaatcgaaccccccaaagctggtttcaagccaaccccatggcctcaaaaaaaaaaaaaaaaaaaaaaaaaaaaaaaaaaaaaaaagggggcggggtttaaaaaaaaaaaaaaaaaaacacaataaaaaatttaaaaaggggcaaaaaaaatataactttgggaggggcgctttttaaaaatcaaaatactcttaataatatttcattataatcaatcgacatcaaccctacaataaacaaacaatcaatgaatactagaaagaaactcaaactaatacaactatcaatataaaacatataaaataataaactaactattaacacagatatcacaacccatagaacactacn

SEQ ID NO: 102216 - DNA, 373 bp, Homo sapiens
caaaacatcagattgtgaatctgacaacagaggcttacgaccccttatttaccgagaaagctcacaagaactgctaactcatgcccccatgtctaacaacatggctttctcaaaaaaaaaaaaaaaaaaaaaaaaaaaaaaaaaaaaaaaggggggccccttttaaaaaaacccctggggggcccaaattttaccggggacggaaaaaaaaaattttttcccaaaaaggggggcattaaaaaaccccctggggaatttttgaaaaaaaacctttttttgggggggaaaaaaaatgggaaaaaccccccaaaaaaattaaaccctttaggggaaaaaaaaaattttaaagggaaaaaggggaaaaaccccccgt

SEQ ID NO: 102217 - DNA, 241 bp, Homo sapiens
gcgatatggatgccccccaccctaccacacattcgaagaacccgtatacataaaatctagacaaaaaaggaaggaatggaaccccccaaagctggtttcaagccaaccccatggcctccatgactttttcaaaaaaaaaaaaaaaaaaggggcggccgttttaaaggacccctcagggggcccaagctaacccgggcatgcaacgtcatagctttctccctaaagggagccgaataaaaac

SEQ ID NO: 102218 - DNA, 286 bp, Homo sapiens
cggacgcgtgggcgggaacacacacttatgggtgacgtgtagagattttagttagttagttagttagttagttattatgtgcgcggggaggtggcgggacggagtctggctcttgctgcccctgctcccccgtcctcgcctccgtgcacttcggggccgccctttggcttctcctcctcccccctctccccggcccgtccgcctcgcctcgtgctcctccccctccttcctctcgctgcccccccctccgtttctctctcccttctgtgtcctcccctcttctccc

SEQ ID NO: 102219 - DNA, 364 bp, Homo sapiens
aatttttgtatttttagtagagacaaagtttcaccatgttggccaggctggtcttgaacttctgtcctcaagcaatacgcccacctttgcctcggagcatgttggaattacaggcatgagccactgcacctggtcaagtgtccaaattcttactccaaaactgaactttgggctgggcgccatggctcacacctgtaatctcaaaagtttgggagtctgaggtgggaggattgcttgagcctaggagtttgaggccagtctgagcaacatagtgagaccctgtctctacaataaataaaaggaaattgaggctgtaatgagctgtgattgtaccactgtactctagcccgagcaaaagtgaaac

SEQ ID NO: 102220 - DNA, 355 bp, Homo sapiens
ctagcctttctattagctcttagtaagattacacatgcaagcatccccgttccagtgagttcaccctctaaatcaccaaaaaaaaaaaaaaaaaaaggaaaaaaaaaaaaaaaggggggggccctttaaaaagacccctgggggggccaaattttaccgggggtgggaaagtaaaaatttttcccctaagggggggcttataaaaaccccctggggaatttttggaaaggaccctttttttggggggggaaaaaattgggaaaaactccctaaagaaattaaaacctttaggggaaaaaaaaaattttaaaggggaaaggggggaaaaaaaagggaaaaatctgggggggaaaag

SEQ ID NO: 102221 - DNA, 376 bp, Homo sapiens
agcatttaccatctcacttctaggaatactagtatatcgctcacacctcatatcctccctactatgcctagaaggaataatactatcgctggtcattatagctacggtcataaccctcaacacccactccctcttagccaatattgtgcctattgccatactagtctttgccgcctgcgaagcagcggtgggcctagccctactaggctcaatctccaacacatatggcctagactacggacataacctaaacctactccaatgctaaaactaatcgacccaactcttcatgaaactatgaagtacctatctccacacaaaattcacggggggcccctttaagaagctccctgtcgggacctagatctagccctcg

SEQ ID NO: 102222 - DNA, 390 bp, Homo sapiens
ctcacccaccacattaacaacataaaaccctcattcacacgagaaaacaccctcatgttcatacacctatcccccattctcctcctaaaaaaaaaaaaaaaaaaaaaaaaaaagaaaaaaaaaaaaaaaaaaaaaaaaaaaaaaaaggggggggccctaaaaaaaaaacccggggggggccaaaattaaaggggggggggaaaaaaaaaaccttccccaaaaaggggggaaaaaaaaaacccccggggggattttggggaaggaaccctatttgggggggggaaaaaaaggggaaaaacccccaaaaaaaaaaaaaagcccaaggggaaaaaaaaaattttaaaggggaaagggggaaaaaaaaaccgaaaaagccggggggggaaaaaa

SEQ ID NO: 102223 - DNA, 97 bp, Homo sapiens
agtcctagaaatcgctgtcgccttaatccaagcctacgttttcacacttctagtaagcctctacctgcgcgacaacacataaaaaaaaaaaaaaaag

SEQ ID NO: 102224 - DNA, 714 bp, Homo sapiens
  misc_feature (1)...(714): n = a,t,c or g
gtgtttcaacaggacaaagttactgggaaggaaatccccaacatgaaagaccagctctgaagacaattctacttcatgccttatgtctatttctctgttttctctgaatttcctatctattgaactgcttaatttacaataaaagtacaatgccttctaaaaaaaaaaaaaaaaaaaaaaaaaaaaaaaaataaataaaaaaaaaaaagggggggccctttaaaaaaaaccttgggggggccaaaataaaaccgggaaaagaaaaaaaaacttttttacccaaaaggggcacaaaaaaaaggcacatgggtacttttggaaaaaaactttattttgggggggggaaaaatggggcacaaccccccaaaaaaattaaaagccttaaggaaaaaaaaaaatttttaaggggaaaaggggaaaaaaaaactaaaattgctctggggggaaaaatttttcttcccgggttttttgaaaaaaaaattttttccccgggcgcgtttgtgttnnnnnnnnnnnnccnnnncccccccccccnnnccnncccnnnccccgggggccggggccccntntnggggcgcccgggggggggggggccnncctttctcccttgggggttgcccggggtttttggttccngggggctggggnnnttttttccccccccctgtgtccccttttttttnccccggggtggggggggcccctctccccggc

SEQ ID NO: 102225 - DNA, 389 bp, Homo sapiens
agaaaagttaaataccagataagcttttgatttttgtattgtttgcatccccttgccctcaataaataaagttcttttttagttccaaaaaaaaaaaaaaaaaaaaaaaaaaaaaaaaaaaaaaaaaaaaaaaaaaaaaaaaaaaaaaaaaaaaaaaaaaaaaaaaaaaaaaaaaaaaaaaaaaaaaaaaaaaaaaaaaaaaaaaaaaaaaaaaaaaaaaaaaaaaaaatgggggagagggagaaaaaaaataatattattgggggggtatgtttgagaagaagattaaaattgaggaagaaaaaaaaagagagtgatgagaaaatatagaaaaaaaaattaatgtttaaaaaaaaaaatataattagaaaaagaaaagagaaaataaa

SEQ ID NO: 102226 - DNA, 359 bp, Homo sapiens
tgtgcgcacattaggcttacgaacagatgcaattcccggacgtctataccaaaccactttcaccgctacacgaccgggggtatactacggtcaatggtatgaaatctgtggagcaaaccacagtttcatgcccatcgtcctagaattacttgccctaacaatctttgaaatagggcccgaatttaccctatagcaccccctctaccccctctagagccaacatagacaaagaagaggtgcatgatttgctggcttctctaggggggcctccctttgatgcataccttgatgccatgattaatgacttctcgggggccatctatttgaccatgttggtgaccatgtaagggaacattttt

SEQ ID NO: 102227 - DNA, 105 bp, Homo sapiens
cccacgcgtccgctagaaatcgctgtcgccttaatccaagcctacgttttcacacttctagtaagcgtctacctgcacgacaacacataaaaaaaaaaaaaaagg

SEQ ID NO: 102228 - DNA, 152 bp, Homo sapiens
cattaaccttgcctctacacttatcatcttcacaattctaattctactgactatcctagaaatcgctgtcgccttaatccaagcctacggtgtcacacttctagtaagcctctacctgcacgacaacacataaaaaaaaaaaaaaaaaaagg

SEQ ID NO: 102229 - DNA, 370 bp, Homo sapiens
cctattcttcatagccgaatacacaaacattattataataaacaccctcaccactacaatcttcctaggaacaacatatgacgcactctcccctgaactctacacaacatattaaaaaaaaaaaaaaaaaaaaaaaaaaaaaaaaaaaaaaaaaaaaaaaaaaagggggggccctttaaaaaaaaccccgggggggcccaaattaaaccgggcctgccaaaaaaaaactttcccccaaaaggggggcaaaaaaaaacccccctggggaattttggaaaagaaccttaatttggggggggaaaaaaatgggaaaaaatccccaaaaaaatttaaagccttaagggaaaaaaaaaattttaaaggggaaaag

SEQ ID NO: 102230 - DNA, 375 bp, Homo sapiens
cacagaactaatcatattttatatcttcttcgaaaccacacttatccccaccttggctatcatcacccgatgaggcaaccagcaaaaaaaaaaaaaaaaaaagaaaaaaaaaaaaaaaaaaaaaaaaaaaaaaaaaaaaaaaaagaaaaaaaaaaaaaaaaaaaaaaaaaaaaaaaaaaaaaaagggggggggaaaaaaaaaaacaaactagggggaaaaatgagaataagagagaataaaaaaaagattagactgaacaggaaagataaaaataaaaaaaatagggggataaaaaaaaaaaaacacaagggggggataaaaaaaaaaggaaagggtaggaaaaaaagatatgccaagggagagataaaaataaa

SEQ ID NO: 102231 - DNA, 345 bp, Homo sapiens
tagaggtcaggctaaggctgacgatgctggctaagcgggggcgcacgtctgggaaggggtcctcttagggaccgatgggcgtgaccttccacaggtaatccacccgccttggcctaccaaagtgctgggattacaggtgtgagccaccatgcccagccatagactgtcgcttataaaccatcatatctcattgctaactacctcgctattacgaaaaccgcatgaagtaaaccacccccatgatatgatgacctcccaccgggacctgccctcaacatgggaagattaccatggagaatacaagtgggatccagatgcagatgcagaccctatctggagccttgg

SEQ ID NO: 102232 - DNA, 395 bp, Homo sapiens
gacgcgtgggtgacagagcgagactccatttcaaaaaaaatgttaacattatgatttaaaagtgcattaaccttaatctagataataaaagctttttggggcaacctccagaactgtgaaaaataaatttgttatttaaaaagaaaaaaaaaaaaaccataaaaaaaaaaaaaaaaaaaaaaaaagggaaagaaaaaaaaaaaaaaaaaaaaggcaaattttccaaaaagggggggggccccttgaaaattcccctttggggcccccaaagttcccggccttaaaaatggtttttttttttttttttggaggctgtaaaaaagccccagggggagattttaaaaaaaggccctttttttggggggggccatttgggggacaccccctccagcgtg

SEQ ID NO: 102233 - DNA, 365 bp, Homo sapiens
agcagactgtaaggtctttagagattttttttttaaggttcaggccgtaggttcctcaaggaatctcttaagttttgcccaaagactgggacttcctttcagtagggcgctaatgtatacacattaatgataagttgataacattaaaaatgtagctgacttatcctattaaacctcctctgctatgttcacaaaaaaaaaaaaaaaaaaaaaaaaaaaaaaaaaaaaaaaaaaaaaaaaaaaaaggggggggcctttaaaaaaaacccctggggggcccaaatttaacgggggggggaaaagaaaaattttccccctatagggggggctataaaaaaaccaggggggatttttggggaaaaaaa

SEQ ID NO: 102234 - DNA, 361 bp, Homo sapiens
ctgcatcactgtcatactcacaacttcgtgaataaagttgtgtgctttattcgtaaaaaaaaaaaaaaggggaaaaaaaagaaaaaaaaaagggaaaaaaaaaaaaaaaaaaaaaaaaaaaaaaaaaaaggggggggccctttaaaaaaacccccgggggggcccaaattttccgggggggggaaaaaaaaaattttcccccaaaggggggggtataaaaaacccccggggggatttttgggaaaaaccctttttttggggggggaaaaaatgggggaaaacccccccaaaaaaataaaacccctaggggaaaaaaaaattttttaaggggaaaggggggaaaaaacccctttttttgggg

SEQ ID NO: 102235 - DNA, 368 bp, Homo sapiens
  misc_feature (1)...(368): n = a,t,c or g
cccacgcgtccggtgggtgcccgcaccttgcacgagccgaagcagggcgaggcattgcctcacttgggaagcgcaaggggtcagggagttccctttccgagtcaaagaaaggggtgacggacagcacctggaaaatcgggtcactcccacccaaatactgtgcttttccgacgggcttaaaaaacagtgcatcacgagattatatcccgcacctggctcagagggtcctgcgcccacggagtctcgctgattgctagcacagcagtctgagatcaaactgcaaggcggcagcgaggctgggggaggggcgcccgccattgcccaggcttgcttaggtaaacaaagcagccgggaagctcgaactgggn

SEQ ID NO: 102236 - DNA, 383 bp, Homo sapiens
tttgaagataagaggaaaagtagaacttaaaactccaaactagagtacgtaacattgaaaaatgaagcaaatctcattggatatttttaaaggtctccacagagtttatgccatattggaattttgttgtataattctccgtgccacctatcacaccccatcctaaaaaaaaaaaaaaaaaaaaaaaaaaaaaaaaaaaaaaaaaaaaaaaaaaaaaaaaaaaaaaaaaaaaaaaaaaaaaaaaaaaaaaaaaaaaaaaaaaaaaagggggggggggggcaaataaaatacacgctggggggccccctttttatggggggggaaaaaatttttttttttttttatggggggggtataaaaaaaaccctcgtggttttttaaaa

SEQ ID NO: 102237 - DNA, 351 bp, Homo sapiens
cccacgcgtccgcggacgcgtggggtagcatccgtactatacttcacaacaatcctaatcctaataccaactatctccctaattgaaaacaaaatactcaaatgggcctaaaaaaaaaaaaaaaaaaaaaaaaaaaaaaaaaaaaaaaaggggggcccttttaaaaaaacccctggggggcccaaatttaacccgggcttcaaaaaaaaaactttttcccaaaaagggagccaaaaaaaaaccaacttggaaatttttgaaaagaaccttttttttgggggggaaaaaaaatggaaaaaactcccacaaaaaattaaaaccttaagggaaaaaaaaaatttttaaggggat

SEQ ID NO: 102238 - DNA, 352 bp, Homo sapiens
ctgaaatctgtggagcaaaccacagtttcatgcccatcgtcctagaattaattcccctaaaaatctttgaaatagggcccgtatttaccctatagcaccccctctaccccctctagagccaaaaaaaaaaaaaaaaaaaaaaaaaaaaaaaaaaaaaaaaaaaaaaaaaaaaaaaaaaaaaaggggggggcccttaaaaaaaaccccggggggggcccaaatttaccggggggcggaaaaaaaaattttttcccaaaaaggggggtaaaaaaaaacccctggggggatttttgggaaaaaccttttttttggggggggaaaaaatggggaaaaccccccccaaaaaatttag

SEQ ID NO: 102239 - DNA, 457 bp, Homo sapiens
taaatacatttttcactttttaagatccaggtactacttaaatattcagaatcaagatatgaaagtgcttcctaagactctccttcagatacccatgtcaggaaattcagatgttcacatttcactgtatattgttctggggattttccccatgccttcaaatatgtctatcatgtcttcttaagtttttctaaatatctgtatctacacaaatatatatcttttcaatgagctcacatgatatgtaccattttaaaacttgcatttttcatttgataatgtctgaatttacttcagcattgaaacatatagttatccttaattattaaataaataaaaaataaagcaaaatagaacaaaaaaaaaaaaaaaaaaaaaaaaaaaaaaaaaaaaaaaaaaaaaaaaaaaaaaaaaaaaaaaaaaaaaaaaaaaaaaaaaaaaaaaaaaaagaagggga

SEQ ID NO: 102240 - DNA, 383 bp, Homo sapiens
ctcagctcttgcaacgtagctagttgataaccctcgaaatatagcgaattgagatgtgctatattgtaaaatacgggacttagtacgaaaaaactgatgtaaaaattatctcaatactttttaatactgattacatgttggaatataatgttttgcatatattgggtcaaataaaaatgttattaatttcaaaaaaaaaaaaaaaaaaaaaaaaaaaaaaaaaaaaaaaaaaaaaaaaaaaaattaataagttcttttggggaggcctaatattaacactattgggaatagttctttattctcctttggaagctttgaaaattagcccctcttttggctttttggaaaaataatttttatttggggtgggagaaaataaagaa

SEQ ID NO: 102241 - DNA, 383 bp, Homo sapiens
taacaacataaaaccctcattcacacgagaaaacaccctcatgttcatacacctatcccccattctcctcctatccctcaaccccgacatcattaccgggttttcctcttaaaaaaaaaaaaaaaaaaaaaaaaaaaaaaaaaaaaaaaaaaaaaaaaaaaaaaaaaaaaaaaaaaaaaaaaaaggggggggcccttaaaaaaaaaccccgggggggccaaaaaataaggggggggggaaaaaaaaaattctccccaaaaaggggggaaaaaaaaaaaccccgggggaatttttggaaaaaaaccttttttgggggggggaaaaaaaggggaaaaacccccccaaaaaaaaaaaacccctaggggaaaaaaaaaatttttggg

SEQ ID NO: 102242 - DNA, 338 bp, Homo sapiens
cggcagcagcagcagcaacagcaactgcgaaacctgcgtgacttcctgttggtctacaatcggatgacagaactctgcttccagcgctgtgtgcccagcttgcaccaccgagctctggacgctgaggaggaggcctgtctgcacagctgtgctgggaagctgatccattccaaccaccgcctcatggccgcttacgtgcagctcatgcctgccctggtacagcgccgcatcgcagactacgaggctgcctcggctgtgccaggcgttgctgctgaacagcctggggtctctccatcaggcagctagccatacccatccccatgaaggaaggccttggg

SEQ ID NO: 102243 - DNA, 443 bp, Homo sapiens
ggcacgagagaaggaaacacaaaagttaaaaaaattgctcacaaagggcagaaggaaaaaaagtaagactaaaataaaaataaaataaatgtttaagattcacaaatggtaaatcagctgatccttaactttctgaagtcctgtatctgtttcccccaaagaagaaaagactgatcattctttgtttgtttttcaggaatcctgggagcagtaatttacagaaaataaccaaggaaccaataattgactattttgacgtccaggactaagaagatcatgatgcacttagataaaagaatgattaggtatagtggagacttatttgccagcagataaatcatgcccgttcccctctgcctggcagaatcacagtctcacatactgtcttgtactgacacatccaaagcatgagtgtgtcagaaatcccttgtctattcctgtcg

SEQ ID NO: 102244 - DNA, 339 bp, Homo sapiens
ttcattttgtacgttttggctgcaaacaaccacaacccagtctttaggttttcactgagggatttttgttttagcccaattattgtatgacatgtatctgctccagaggttcttataggtgaaatgagatttttatgtatctgtattcaaacacatagatagatagatagatagatagatagatagatagcgaaacatatagacatacctctgaaaatacaaccagccatataatgtaagcctgtagtgtgttaatgaatgatagggtaataatacattatgttcctgtcctgtaaaggagttcgagtattcaatacagaggaccagaatgattggtcg

SEQ ID NO: 102245 - DNA, 361 bp, Homo sapiens
gcgacctgcacgcgcacaagcttggggtggacccgggcaacttgaacctcctaagccactgcctgctggagaccctggccggccaccttccaggcgagtttacccctgcggggcacgccttcctggacaagttcctggattttgtgagcaccgtgctgacctacaaataccgctaagctggagcctaggcggccatgcttcttgccccttgggcctccccgcagaccctaatacccttgctgtacccggacccacgtgggctttgaataaagactgagtgggcggcgaaaaaaaaaaaaaataaaggggaacgcgcgggggattgcccattttgtaattcctaaagccggaaaacacgccg

SEQ ID NO: 102246 - DNA, 364 bp, Homo sapiens
tacgtcgacgcggccgcgctcactgcagccttgatctcctgggctcaagaaatccccccgcttcagcctcccgagtagctgtgaccacaggcacacgccatcttgcctggctaattgttgttggtggttttttgttttttgttttaagagatgtattagtccgttttcatgctactgataaagacatacccaagactgggcaatttacaaaagaaagaggtttaatggacttacagttccacatggctgggaaggcctcacaatcatgacagagagcttatgcaggggaactcctcttcataaaaccattagatttcgtgagacttattcactatcaccagaaaaggatgagaaagatccgccc

SEQ ID NO: 102247 - DNA, 121 bp, Homo sapiens
tttttttcataagattattagtatgaaaggggagataggtaggagtagcgtggtaagggcgatgagtgtggggaggaatggggtgggttttgtatgttcaaactgtcagtcgacgcggccg

SEQ ID NO: 102248 - DNA, 254 bp, Homo sapiens
  misc_feature (1)...(254): n = a,t,c or g
agcgtgcctccggagctgncgtgccgattgagcacgatgttccggtcccgaattcccgggctgagctgctgaagatgtttggtatcgacagggatgccattgcacaagctgtgaggggcctcatcaccaaggcctagggcgggtatgaagtgtggggcgggggtctatacattcctgagattctgggaaaggtgctcaaagatgtactgagaggaggggtaaatatatgttttgagaaaaaaaaaaaaaaaagg

SEQ ID NO: 102249 - DNA, 410 bp, Homo sapiens
ctagtcacagccctatactccctctacatatttaccacaacacaatggggctcactcacccaccacattagcaacctggaaaaaaaaaaaaaggggaaaggtaaaaaaaaaaaaagggggggggccctttttaaaggaatttttggggggtcccacttttttggggtttgggaacttttatttttttttcttaaggggggcataaaaaaaaccattctggggtttttgggaaagacccttttttttggggggggtttattgggggcccccctcccccggaaaattaaagggttacgggaaaaaaaaaattttaaaggtgaattgggggtaaaaaaccgtgttttttttttttttgggaacttttcttccttgggtgtatatttaaaaaaatattaatccccgcgggtttt

SEQ ID NO: 102250 - DNA, 405 bp, Homo sapiens
cggacgcgtgggcggacgcgtgggcggacgcgtgggctgacgcgtgggaaaaaaaaaaaaaaaaaaataatgaaaaaaaaaaaaaaaaaaaaaaaaaaaaaaaaaaaggggggggcctttttaaaaaatccctgggggggcccaattttttggggtctccccaaattttattttcttcctaataaggggtctttttttaacctcattggggattttttaaaaagaccctttttttgggggggtgcctattttggataatttctccaagagttttttacgttttatggaaaaaaaaatttttttaagggtcataaggtgaaaatcccgtttaatttcccggcttataaaaatttttcttcctggtgatggtttttaaaattttttttcccgggggctctgtcttat

SEQ ID NO: 102251 - DNA, 418 bp, Homo sapiens
attttaagctatttgtctgttaagtatataataccaaaacgcaggttgtttaaattaggatttccaagtaatttacgtcgtcttcaaaattcctggggtctatcaatcagaaacgccagaaagtttgtgtactagtttcacattgttaagggagtatctataataaaattcaaatgcgttattttaaaaaaaaaaaaaaaaaaaaaaaaaaaaaaaaaaaaaaaaaaaaaaaaaaaaaaaaaaaaaaaggggaaaaaattaaaaaaaaaaaaaggggggaaaaaaaaaaaggggggggggaaaaataaaatttttttttgggttgggtttttttataaaagggtgtgggggtatttttgaaaaaaatatattttttgggggggaattatttgggatatttttgaaaaaatatattttt

SEQ ID NO: 102252 - DNA, 402 bp, Homo sapiens
  misc_feature (1)...(402): n = a,t,c or g
cttttaagagagtactgtttaaatagtttttactaaattctgtctgagaggctcctgcaagaccacttagggagtgagaagaacagagagagatgtgaataatggagcaagtagaataagctaataaggtagcaatggaggcttattattcggagtgctatgaaaatatctggagaagagtaattttaggactttagcttataaatttagttcaattcacttgtatccttggtacgttgttaggcattttgtttatttatttatttttaagacgggctatcactatgttggccaggttggtcttgaactcttggcctcaagcagtcctactgcctcagcctcccaaagtgctaggattacaggcgtgagccaccaagcctggtcagttgttaggcattttan

SEQ ID NO: 102253 - DNA, 407 bp, Homo sapiens
tatattttaaaattcccaaacaattcattgttaaataaatcacagtgacaattaaaaatgaatgacaaaaacactacctatcaaaacccatggggccagtaaacagtgaaacaaacaaacaaacaatcctcagttttattaataaaagaaaaatgcagggctgggcacagtggctcaaatgtataatcccagcactttttttttttttttttaaaactgagcctaactttgacgttaaggcaaaggttgcagggacctgaaatcgccccattgcattgcaccctgggcaacaaaaaaaaactccgtctaaaaaaaaaaaacccaaaaaggaaaaaaaaccattggaagggctctttttttataaaaaatcttttaaaagggggaaatcccaaatggggtaaaaattt

SEQ ID NO: 102254 - DNA, 419 bp, Homo sapiens
cttaggagatttcaacttaacttgaccgctctgagctaaacctagccccaaacccactccaccttactaccagacaaccttagccaaaccatttacccaaataaagtataggcgatagaaattgaaacctggcgcaatagatatagtaccgcaagggaaagatgaaaaattatagccaagcataatatagcaaggactaacccctataccttctgcataatgaaaaaaaaaaaaaaaaaaaaaaaaaaaaaaaaaaaaaaaaaaaaaaaaaaaaaaaaggggggggccctttaaaaaaacccttgggggggcccattttttacggggggggggaataaaaatttctttccctatagggggggataaaaaaacgcccagggggaatttttgtggaagaccttttttggggggggggacaa

SEQ ID NO: 102255 - DNA, 401 bp, Homo sapiens
agagccaaggctaaaagacgaaacaccaccgtatcttgtcgaatgaggcacctaaaaattgtataccgcagattcaggtacagattgtatgtggggatcataattggtccagggggcttgaatgaaaccctagtgtttacttgtaaaaagataacagtaccctgatggttactggggacgagatgttggaagctttatatttattgttgtttttgaagcagggtttcactatgttgcccaggcttgagtgtagtggctcgatcacggctcagtgcagcctcagtctccccagccttaagtaatctcatctcaaccgaccgagtacccgggactacaggtgggcgctgccacatgcccagctaatccttggatttactgtagagaaagggatatcggtatgc

SEQ ID NO: 102256 - DNA, 403 bp, Homo sapiens
cgttcagatggctatataaaagtccatcaaatatcatagtttattcaagtgttttcctatttatgaaagattctagttcttttcagtttttcttcattacaaataacactgtgaaaaacacactgatgcataaaatccatttgggaggtggaggttgcagtgagccgagatcacgccactgcactccagcctgggcgacagagtgagaccatgtcttaaaaaaacaaaaacattttactcttttatatatagacagagagagagagagagtacatatatgtgacatatatatgtactatatatgacatatatgtactatatatggtatatatgtactatatataacatgtactatataacatgtgtgtactatataacatgtatgtactatatataacatgtg

SEQ ID NO: 102257 - DNA, 466 bp, Homo sapiens
cattaaccttccctctacacttatcatcttcacaattctaattctactgactatcctagaaatcgctgtcgccttaatccaagcctacgttttcacacttctagtaagcctctacctgcacgacaacacataaaaaaaaaaaaaaaaaaaaaaaaaaaaaaaaaaaaaaaaaaaaagggggggggcctttaaaaaaaatccttgggggggcaaaaataaacgggggggggaaaaaaaaaatttttttcttaaaagggggggaaaaaaaaacctcctgggggattttggaaaaaaaacttattttggggggggggaaaaatggggcaaacccccccaaaaaaattaaagcctcaagggaaaaaaaaaaattttaaggggaaaagggggaaaaaaaaccccaaatccctgggggggggaaagttttttttctggggtttaattaaaaaaaaaataaaccccgggcgcg

SEQ ID NO: 102258 - DNA, 424 bp, Homo sapiens
  misc_feature (1)...(424): n = a,t,c or g
gcaactggtcctgggggtgctcaggcctgcctttttgggactcagatggcaggaggtccaccccgcagcctggtcctcggctctcccacaggtgggcaccccccactttggtgctaatagctctccaccaggtggtgtgagcgcgggggctgccagaagcgggaggggtcactgccggaagagcagctgccctccgacccctcactttgtgcctttagtaaacactgtgctttgtnnaaaaaaaaaaaaaaaaaaaaaaaaaaaaaaaaaaaaaaaaaaaaaaaaaaaaaaaaaaaaaaaaaaaaaaaaaaaaaanaanaannnanaaaanaanaannnnnnnnnnnnnnnnannaaaaaaannnnggggnaaaaaaaaaaaatataaagggagaaaaaaaaatttaattttttataaataatt

SEQ ID NO: 102259 - DNA, 432 bp, Homo sapiens
gaaaggtccattaccttctacagaaatgttgaataacataatgttagtggctactggtaaactgtgttgtgggtgtgactgtttttcagtttttacctgcttgcttttcccattttgtcagctgtcccacccatcacaatagttaacagatttgctgtataaccctgcagataattgctagattctgcatctttttatatacaagagatgtcatttactttctcggtctttagttattatttagttcacagcttggtgggtgcagagcttttggtctttccattttcttgcctttaattattttataaattttttgagacggagtctgcctcttgcccaggctggagtgcagtggcatgatcttgggtgactgcaacctccacctcccaggctcaagtgctgcttctgactgaacctgcctagtatctgaga

SEQ ID NO: 102260 - DNA, 373 bp, Homo sapiens
ctcaaactcctgacctcaagtgatctgcctgcctcagcctcacaggttgctgagattacaggcatgagccactgtgcccggcctctctccagaatttacatgtgttaatatatttatgttttcttcaagttgttgttttacaataaaaataataaaacaggagagaaaattgaagtacctgtcactactccattgtacccccacatggaactacatgttgatattatgttttttcgggtgtttttgtttttttgttttttgagatggcgtctcgctctgttgccaaagtggagacacaatataccagaatctgttgaacacatcttatcattggttaaagggaaatttatagccctatatgcccacaggagaa

SEQ ID NO: 102261 - DNA, 381 bp, Homo sapiens
agactctctcacattctcaagtaaattatcacctttattgaacctcattttccagatctaaaaactgagcaaaatcataataccttttttgcatggatgttgggggagattaaattagctaaaccttgcagtatttctttttttatggtaactggcagctagtaaagggctggataaatgttagctcttatcacttcaagaaaattatcgggagaaccgaaggagcttgttgggattcagtttgaggttaccagtgaagttgctgttgaagaaagcaaaaccagcagccgggcggatcacctgaggtcgggagttcgagaccagcctgaccgacatggagaaaccctttctctactgaaaatacaaaattagccgggcatg

SEQ ID NO: 102262 - DNA, 558 bp, Homo sapiens
  misc_feature (1)...(558): n = a,t,c or g
agagtgccnnnnnnaatgaaagctgacaacaatcccgnaanncatgaggacaaggctggtgggcactggagtggcaccttcagggccaggagaggcactggggaggggtcacaggatgccacgcgggcccctaaaagccacagctgccctccacagagcggaactgcaccatgcgcaggaatgtctcgaccttgtccatgtccttcctgaagcaggggagcagcccgtagttcttgagcagtgcgtcatggttgtgcgagtttgtgtcaaacttgctgtaggtctgcttgagggtctgcccagtcaggtggctgccgtcttccaccctccccatcagcatttggatgccttcctctaggtcctttaggaggtgatattcatcactgtccgaggtgtcatacaccaggttgttggtgaaggtactcctgaggaaccgcacgggctccagccgcgactcgatgagcagcagggagatgtggagcagctctaagttggatttctgctgcgtttcctccatgttggaggatgtcggaatagagtccattccccaagagctna

SEQ ID NO: 102263 - DNA, 409 bp, Homo sapiens
atctcttttgatgtgtgtacataggtgtgagtgtgtgtgtatgcgtgcctgtctgtgtgcgggtgtgtgtatgtgcatagcctcatgcttaggactacccatgaatgttgtggaatgctacacctggagagttctggttttccaccagtttcaagatgaagaactacatgatacagtggacctggagaccatccccttggaaagacaacccagagatgttcagcatcctgtatctacacgcatcctgtatctacacgtgtattttgtagctgtcacactaaccttaataagaattctacagctttggacagaggcattttcaccttaatggtgaagtaatttaaaatataaatccattcaggtgacaacccatcatcaaaattacaaattttctgattgaactcatctg

SEQ ID NO: 102264 - DNA, 414 bp, Homo sapiens
ataacacttggttctatccttgtattgctgaaagaggcacagagagattaaaaaaaaaaagtcttgaaacaccaacatcactcttcctccatcccacagcagtggcaatatgggctggagagcatttctgtgtgctggggtagggagagtaaaaaaatgtgaggcattgaactcagtgttgtcttcttaaagcagaaaaaaaaaaacccaaaaaaaaacccaaaaaaaaaaaaaaaaaaaaaaaaaaaaaaaaaaagggggggcccttttaaaaaaacccttggggggcccaaatttacccggggggggaaaaaaaaaattttttcctttttgggggggcattaaaaaccccccgggggatttttgggaaaaaaccttttttttgggggggaaaaaaatggggccaaccccccg

SEQ ID NO: 102265 - DNA, 409 bp, Homo sapiens
taggatcataagtcattcccctcccattaaacacaaactactatatacagacaacctgactggtttggctggagtcccatgaggatgtgggccctttaataaaggatagcaaacaggaaaaaaaaaaaaaaaaaaaaaaaaaaaaaaaaaaaaaaaaaaaaaaaaaaaagggggggggcctttaaaaaaaaacctggggggggccaaaatttaagggggggggaaaaaaaaaattttttttttttaaggggggaaaaaaaaaacccccgggggaattttggaaaaaaaacttttttttgggggggggaaaattgggcaaaaccccccccaaaaaaaaaaagccctgagggaaaaaaaaaaattttaaaggggaagggggggaaaaaatatcttaattttctgggggaaa

SEQ ID NO: 102266 - DNA, 421 bp, Homo sapiens
agatacctggtgagctcagatagtctttttctctgtttctgtgtaagaagctgtgaatattcctaacttacccagatgttgcttttgaaaagttgaaatgtgtaattgttttggaataaagagggtaacaattggaaaaaaaaaaaaaaaaaaaaaaaaaaaaaaaaaaaaaaaaaaaaaaaaaaaaaaaaaaaatgggggggggcccttttaaaaatctccggggggggcccaattttcccgggggggggaaaaaattttttttttttttttggggggggattttaaaccccccttggggtttttgggaaaaaaccctttttttgggggggggctttttggggcccccccccccccaaaaatttaaggctttggggaaaaataaatttttttaggggtgtgggtggcaacctcccctctt

SEQ ID NO: 102267 - DNA, 430 bp, Homo sapiens
  misc_feature (1)...(430): n = a,t,c or g
atcattggacaagtagcatccgtactatacttcacaacaatcctaatcctaataccaactatctccctaattgaaaacaaaatactcaaatgggcctaanaaaaaaaaaaaaaaaaaaaaaaaaaaaaaaaaaaaaaaaaaaaaagggggggccctttaaaaaaaacccttggggggccaaaaaaaaaccggggaaaaaaaaaaaaaatttttttcttaaagggggggcaaaaaaaaaccccctggggaattttgaaaaaaaaacttttttttgggggggaaaaaattgggcccaccccccccaaaaaaattaaagccttaagggaaaaaaaaaatttttaaggggaaaagggggaaaaaaaacctaaaattttttggggtggaaagtttttttttctggggtttatttaaaaaaaaatttacccccggg

SEQ ID NO: 102268 - DNA, 432 bp, Homo sapiens
aacgagcaccagccgggccaacatggtgaaatgccgtctctactaaagatacaaaaaatcagctgggcgtggtggagtatgcctgtaatcccagctactcaggaggctgagatggaaaaagaatcgcaaataagcataatgtgaagagcatgagctttggaataagcaagcctggaattacaattttcttttattagctctgtggctgtaacactcaacttttgcaagcttcagtttcctcgtctgtgaaatggaataatagcacttacctcattggctgttgtatggattaaatgagaccatgactatggatgtatggcatttggtacccaataacccctcaataatcggcagctataattattcataataataatgggggcagcaacaaacccagcccaaacatctgaaggaccgatcactaaaaagaag

SEQ ID NO: 102269 - DNA, 498 bp, Homo sapiens
  misc_feature (1)...(498): n = a,t,c or g
ggcgcggggnatacgaccgactaagaacgtcctgagaanccgcgncgacccacgcgtccgcacaaaggcatcttcagttcattaaaatatggtcatgtaattaggacccattaatataaattaaatataaatataaattaggaaaaaaaaaaaaaaaaaaaaaaaaaaaaaaaaaaaaaaaaaaaaaaaaaaaaaaaaaaaaaaaaaaaaaaaaaaaaaaaaaaaaaaaaaaaaaaaaaggggggggggggggcccaaaaaaaaccccgggggggcccccccccagcgggggggggaaaaaaaaaattcccctttagaggggggggataaaaaaacccgcggggggggtttgggggaaaacccccccccgggggggggggggcgctggggcaccccccccaccaaaaaaagaaacccgggaggggaaaaaacactggttttggggggggggggggagacacaccacaccttttcctgcgggagaaaaaaaacacaccc

SEQ ID NO: 102270 - DNA, 402 bp, Homo sapiens
  misc_feature (1)...(402): n = a,t,c or g
aggacgcgtgggatgatagtgtagttagacctacatgaaacatataaacacctgcttgaaaacagacgaaatatatcaaagaaataaccaaacacatatgtacctggcaggggagataccatgatcatgaaggtggttttcccagggtgaagcttatccattgtactccggatatgctgacccctgtgatttccccagatgtaggaaactcaactacagtctaaaactagtacctcaattacccatgtatccatacacttgaaactatacccattaaacactaactccctggccgggcacggtggctcctgcctgtaatcccagcactttgggaggcccaggcgggcagattacgaggtcaggagatcgagaccataaaaaaaataaacaaaattggtcaan

SEQ ID NO: 102271 - DNA, 407 bp, Homo sapiens
  misc_feature (1)...(407): n = a,t,c or g
cccacgcgtccgaaaaacccaagtatgtccatgtgtttcttataaggtacacttgaaactagtgagtgtttgtcacatttcactttcatggtatataaaatgcagtttgcatatataacttgaatatctggtactagttttttcacgcctgcaatcttggagtctaggttgccttgtctctcctatttttaaataagtgaaatttgggagattgtaaaatctgtaaagtttgttttgtgaaaataaaatgttcacagtngaaaaaaaaaaaaaaaaaaaaaaaaaaaaaaaaaaaaaaaaaaaaaaaaaaaaaaaaaaannggggggggggccttttaaaaaatttctggggggggccaaatttaacgggggggggaaaaattttttttttctcttttaggggggag

SEQ ID NO: 102272 - DNA, 405 bp, Homo sapiens
  misc_feature (1)...(405): n = a,t,c or g
attatgatgacgtgagaagccttaagattaaaacaaacattcataatactggagtaactatatgtatgcctggaacgataatatacgatgccacagaaccctaccacatattatatgaacccgtatacataaaatctagacnnaaaaaaaaaaaaaaaaaaaaaaaaaaaaaaaaaaaaaaaaaaaaaaaaaaaaaaaaaaaaaaaaaaaaggggggggggcaaaaaaaaagggggggggggggggaaaaaaaaccccgggggggggaaaaaaaattttttttgggggggggggtttttttttttttgggggggggattaaaaaaaaaaacattttttttggggggggaacattttttcccggcggcccccaaaaaaaaaaacaccctcccgaaaaaaaaaattt

SEQ ID NO: 102273 - DNA, 406 bp, Homo sapiens
ctctactattttttaaccaaatcaacaacaacctatttagctgttccccaaccttttcctcccaccccctctaccccctctagagccaaaaaaaaaaaaaaaaaaaaaaaaaaaaaaaaaaaaaaaaaaaaaaaaaaaaaaaaaaaaaaaaaaaaaaaaaaaaaaaaaaaaaaaaaaaaaaaaaaaagggggggggggccaaaaaaaaaaacaaggaaggggggggggggccaaaaaaaaaaaaaagggaggggcccggaaaaaaaccggggggggggggaaacaacccccggggaaaaaaaaaagaaaaaaaaaaaggggggggggggaaaaaaaaaaaaaaaaaaaagcggggggggaaaaaaaaacgggggaaaaccggggcgggggggggggggggggagaa

SEQ ID NO: 102274 - DNA, 391 bp, Homo sapiens
agtccacaaatcactatataaataatcgatacccttcaaagtctacccttgattggtcatcgactatttgttattcagtttactaatagacggaaaagtgtataattgtgtagcctgtctccagtgataaactctaaactcatgtgacgttttacaaaaatgcataattgagagaaggaattaagcccaacaaagaacggaacagagataacactggcagataaattcacagtcagcgtaaatggggttatagaagaaatcactaggctgaggaaggagaatcgcttggacctgggaggcagaggttgcagtgagccaagatcacaccactgcactccagcctgggcaacaagagtgaaactccatctaaaaaaaaaaaaaaggggcggcc

SEQ ID NO: 102275 - DNA, 401 bp, Homo sapiens
agacacagccctatactccctctacatatttaccacaacacaatggggctcactcacccaccacattaacaacataaaaccctcattcacacgagaaaacaccctcatgtgcatacacctatcccccattctcctcctatccctcaaccccgacatcattaccgggttttcctcttaaaaaaaaaaaaaacagaactaaaaagaaaaaaaaaaaaaaaaaaaaaaaaaaagggggggggggccgaaaaaaaaatcctttgggggggcgaccatgctgggggcattgacagaggatattttttttttttggggggggatataaaagcactgcgggggaatttttggagagcaccttttttttggggggggaaaccggtgggcaccccccccccccagtgttg

SEQ ID NO: 102276 - DNA, 477 bp, Homo sapiens
  misc_feature (1)...(477): n = a,t,c or g
attgacgccctgcggattggtccgcctttcgtaccgcgcnccaagcgtccgggagacgacgcatactcttacctagaagngacagactttgctcctcataaccttttacacagatccatcatctagcatgactgagtatacggagacttgtcataatctgacatttaatatgagcgttttggtaaggatggggctatgccagaatatcttgattcatttgcatatgcattaattaaactgaaaccaagacagcggctccctactatccagtgaactctaggttgagtaccactaatttgaaagctcagtgattgcagacatttatgactgtgcctacacagtcatagtaaaggacaggagttcatagacacgaccagcctggccaacatggtgaaaccccgtctctactaaaaatacaaaaattagcggccgggtgcggtggctcacgcctgtaatcccagcactttgggaggccga

SEQ ID NO: 102277 - DNA, 421 bp, Homo sapiens
  misc_feature (1)...(421): n = a,t,c or g
ctcatagcagccttaaattactgagctcaagtgatccaatcctccctcctcagccttccaagtagctgggacaacaggtgtgcgtcaccatgaccaattaactttttttttttttttttttttggggggaacgggtcaaattttgtgccgggggggggattaaaattttgggcctaaaaaaaacctctggcttgggctttcaaaagggggggaattttcctgggggcccccccccccaacaaaatattggtttttaaaaccttggttgggtttaaaaaaccgggggttaaaaataaaaaattcccccccccttccccccctttaaaaaacccggtttccttaaattttaaacaaaaggggggggatcggacccccccaagggggttttaagccaacccccggggcccctttgatttttaan

SEQ ID NO: 102278 - DNA, 419 bp, Homo sapiens
  misc_feature (1)...(419): n = a,t,c or g
acccaccacattaacaacataaaaccctcattcacacgagaaaacaccctcatgttcatacacctatcccccattctcctcctatccctcaaccccgacatcattaccgggttttcctcttanaaaaaaaaaaaaaaaaaaaaaaaaaaaaaaaaaaaaaaaaaaaaaaaaaaaaaaaaaaaaaaaaaaaaggggggggggccttaaaaaaaaattcggggggggcccaaaaaaaccgggggggaaaaaaaaaaatttttttttttaaagggggggaaaaaaaaaaccccggggggattttggaaaaaaaacctttttttgggggggggaacttgggggccccccccccccaaaaaaaaaaagccctggggggaaaaaaaaaatttttggggggggggggggggaaacccccgcctcca

SEQ ID NO: 102279 - DNA, 421 bp, Homo sapiens
aaatattatactagcatttaccatctcacttctaggaatactagtatatcgctcacacctcatatcctccctactatgcctagaaggaataatactatcgctgttcattatagctactctcatttaccccacacccagtttctcctgttattagcatctcacattaatatgtggtatatttgttacaattaataaaacacattgatatgttaatattattaaaaaaaaaaaaaaaaaaatagaaaaaaaaaaaaaaaaaaaaggggggctcaaaaaaaaaaattttggggggggcaaaaatgtgatgggggcgaaagagaaaaacctctcccctttaggggagtgttttactcaccattgcgtggtttttggggggactcttctttttgggggggggaataatgtggcgaacctcaacaag

SEQ ID NO: 102280 - DNA, 541 bp, Homo sapiens
gttttcccacttgggattgtgttagaggtagcagcagggagaagaatcaacctctggttgccttggtccatagaaccctagactagccatttgtcagaatgtctggtccctggagaagctggggagagctgggcatggggtaggggtaggggtggaggtggaaagcatggagcagccctgtttcctgatctttgcagattttcttttgcaaataagaaagtttctgtaagagccaagttgtgatttgaatacccagcaagtcatggtggcttatgcctataatcccagcactttggaaggccgtggctggcagattgcgcaagttcaggagttcaagaccaccctgggcaacataatgaaaccctgtctctgcaaaaaaaaatacaaaaattagccaggcatggtggcgaatgcctgtggtcccagcaactttgaaggctgaggcaggaggatcacttgagcccaggaggttgaggctgcagtgagctttgattacaccactgtactccagcctgggtgacagaaactgtcttaaaaaaat

SEQ ID NO: 102281 - DNA, 121 bp, Homo sapiens
tttttttcggctctagagggggtagagggggtgctatagggtaaatacgggccctatttcaaagatttttaggggaattaattctaggacgatgggcatgaaactgtggtcgacgcggccg

SEQ ID NO: 102282 - DNA, 383 bp, Homo sapiens
gtaacctaagatggacaggattgtaaaaattgaaaataacctgagtattcatcaattttatcattaaataaagttatttattgctaccgttaaaacaataaaaagaaaaaagaaaaaaataaaaaaaaaaaaaaaaaaaaaaaaacaataaaatataaaaaactacaaaaaagaaggataaaacaaaaaaatccctcccctttgggacgccccaggcggggggattacaacgccccaaaataaaaaaaaaaactggctcacacggtgaaaccccttaaatactaaaagcgcctctttttttccaagaagagggggcgttcccctttaaagcgagctaattgtgaagctgggcgtgcgggctgtaaaaacaaaaaaaaaaaaaa

SEQ ID NO: 102283 - DNA, 380 bp, Homo sapiens
gtttcatgcccatcgtcctagaattaattcccctaaaaatctttgaaatagggcccgtatttaccctatagcaccccctctaccccctctagagcctaaaaaaaaaaaaaaaaaaaaaggggggccgcggccggaaatcccaaatttataaacggaaaatccggaaaacccccgcgggttcctttaaagggggcatggggccccatttaaatttttttttttaaaacacggtttggcctttttttaggaaacaaaaccccttaaagttaaaatttgggccaggaacccttggatttataaaatttttaaaaggacaaaaataaaggcccatttttttttgggcccaaaatttttcatgaaaatatttaacaggggcttat

SEQ ID NO: 102284 - DNA, 381 bp, Homo sapiens
  misc_feature (1)...(381): n = a,t,c or g
cgatgggctcgatctcctgacgtcgtgatccgcccgcctcggcctcccaaagtgctgggattacaggcgtgagccaccgcgcccggccgtggcgttgacttctgaggcacagctccaacagatgtactgagttagaggtgtccctaattccagtctttgccaaccactcccgctccaggtggtagggaagggaagggtggccaggatgtgaggggattcctgatcctcaagtgggactcttgagcagaggtgctgatagcctcgtaattggtagctgggtggggggaggatggccaaatggttcacccactagagaacattttcttcgcagaaacttcgtgagggtaaagtgagctcaatgaaaagtctttattgttgccn

SEQ ID NO: 102285 - DNA, 399 bp, Homo sapiens
tttcctctcaaagtcctttattgtacaatgtcatctgtttcggggtcggggaaggactaacaggtacacagcgaaatagataaatatgccaagctcttttctttttaaatcaggcatttataaacaagaaagcatacattaattacataaaaatagtttccgagtagcagagtaagcatcatactgtcgttagcagcagcgtggggcacgggcaggggcgggggtctgggtgatgttaaaggtagagatggagctttttccttaattgaaaaaaaaaaaaagtcatttgtgactcctgacttaaagcgagaacgaacatctccctggaccctggtgggctgagggaggggtgggggggccggggttcggacccacagggaggagggggtgggggggggg

SEQ ID NO: 102286 - DNA, 391 bp, Homo sapiens
gaaatcttacaagtatgatattgtctttgtcaatacctcatttgtaaaacagacccattagtcgtgaatttccagctctttcaaaaataaatgtttatgtgagaaaaaaaaaaaaaaaaaaaaaaaaaaaaaaaaaaaaaaaaaaaaaaaaaaaaaaaaaaaaaaaaaaaaaaaaaaaaaaaaaagggggggggggggcccaaaaaaaaaaaatttgaagccatttttgggaaaacccccgggggggtctctcagggggggggcccccccccccttaattttttttttttaaacccggggcccccttttttttaaaaaacctctcccctaaatgttcatttgggggcgcacccccccgagaaaaaaaaatttttcaacaacaaaaaaaccg

SEQ ID NO: 102287 - DNA, 353 bp, Homo sapiens
ctcacctgagcctccctcgagtagctgggattacaggcatgcaccaccatgcccggctagtcatgtttttaaagcttctcaagtgaattccagtgtgcagcctaggttataaaccatggctgcacacagcttttacgtcgacacagccagcatattcatacttgtgaaccatggaatctgacacaccccccacctctttttgaaatgcgctttgcacagcatctgtgaatatttcacctatgcatcgggccaccttatttactgacacgatactccggatcctgttgatcttagcacttacaccctctgtagtatagaagctttcactgacttcgaataatgtgccctttttg

SEQ ID NO: 102288 - DNA, 199 bp, Homo sapiens
atttttagtagagacagggtttctccatgatggccaggctggtctcaaactcctgatctcaggtgatccgcctgcctcggcctcccaaagtgctgagattacaggcatgagccctcacgcctgtaattccagcactttgggaggcagaggcgggcggatcacttgagcctaggagttcaagaccaggtcgacgcggccg

SEQ ID NO: 102289 - DNA, 371 bp, Homo sapiens
  misc_feature (1)...(371): n = a,t,c or g
ctctgagcctatgatccctcattggtaacactggatgggacactaactgcacttaacatgatgtctgttgcatgataaacactccccacatgggggctgaggttcccaccatgtcctcccctccctgaacccaccctttcccatctttttcaccaagtgaccctatgtgcctccagtcatagccctgtagcctcctgactctaggtgggccattcaggggggccatttggagctaacacctactactcgtcaagacttggctcaggctcccagaaggaagcttgccctattagaaggaagttttcaaggccaggctcagtggctcacgcctgtaatcccagcactctgggaggctgaagcaagtggatcan

SEQ ID NO: 102290 - DNA, 421 bp, Homo sapiens
  misc_feature (1)...(421): n = a,t,c or g
ggcacgagcagggctttaccatgttggccaggctggcctcaaacccctgacctcaggtgatccactcgcttcggcctcccaaagtgtcaggattacaggcgtgagccaccgcacccgacctaaaattatttttaaattaattttcttcctttttttttttttttttttttaaaaaaaaaattttgggcggggccccccaggtgggagggcgggggggaaatttaatttaattgaaccctttgcctccagggttaaaggaattttttttactttaccccccaaagggggggaaattatggggcccgccccccagcccgggttatttttttggttttttaagaaaaaacggggttattttatgtgggcggggggggtttaaaattcctagcctaaggatcaacctcctttggcctccaaaggn

SEQ ID NO: 102291 - DNA, 454 bp, Homo sapiens
  misc_feature (1)...(454): n = a,t,c or g
gagacagccctcgtacccatctatagatgaatggaaaaatataatgtccatccacacagtggaatattacgcagccatgaaaaggaacaagcagctttattcacaatagccaagaggtggagacagccctcatacccatctatagacgaatggataaatataatgtggtccagccacacggtggaatattacacagccatgaaaaggaacaagcagctttattcacaatagccaagaggtggagacagccctcatacccatctatagacgaatggataaatataatgtggtccagccacacagtggaatattacacagccatgaaaaggaacaagcagctttattcacaatagccaagaggtggagacagccctcatacccatctatagatgaatggagaaatataatgtggtccagcctggnggacgagagcaagacttcatgtcaaaaaaga

SEQ ID NO: 102292 - DNA, 427 bp, Homo sapiens
tgctacaggagctgagagaccctaccctcactttccgtctgcttggctcccccaggcctgtagtggtggagacacgcccagtggatgatcctactgctcccagcaacctctacatccaggaatgagtccctagggggtgtcaggaactagtccttgcaccccctcccccatagacacactagtggtcatggcatgtcctcatctcccaataaacatgactttagcctctgaaaaaaaaaaaaaaaagggggggccgctttaaagaacccctgggggggcccaagtttacgcgggcttgcaaagtattagctttctccctatagggagccgtattaaaacctacctgggaatctttggaaagaacccttacttttggggggggacatattgggccaacctccctacaaaaatttaaggctctagggta

SEQ ID NO: 102293 - DNA, 438 bp, Homo sapiens
cccatatgttacggaggctttattcattcattcagatgttctgaggaaaacatttatcctaaggcttaaaagatgagttagaggggtggaaccaagatggccgaataggaacagctccggtgtacagctcccagcatgagcgatgcagaagatgggtgatttctgcatttccatctgaggtaccgggttcatctcactagggagtgccagacagtgcatgcaggacagtgggtgcagcgcactgtgtgcaagccaaagcagggcgaggcattgcctcactcgggaagtgcaaggggtcagggagttccctttcctagtcaaagaaaggggtgacagatggcacctggaaaatcgggtcactcccactctaatattgtgcttttccaatgggcttaaaaaacggcacaccaggagattatatcccgcacatggctcgga

SEQ ID NO: 102294 - DNA, 429 bp, Homo sapiens
tagatttggtcattccacaatgtatatgtacttcaaaacatcatgttgtacatgagaaacacagttttatctgttagtcagttttaaaaataaaaaatattccaactagaaactctgttgtagtttttgaaattacaacttggaggctttgaggaactgattagaagtctcctttctgtttcaggctttcatatccaaaccatagatctttagaagtaacatctgttaattaattattaataaatagtttgagtctttattaattcatggataacttgaccattttctctctccttttgcttagataatcccagatcatggccgggcacagtagctcacgcctgtattcccagctacctgggaggctgaggtgggaggatcgcttgagcctgggaggttgaggcttctgtgcgcgatgattgctccagg

SEQ ID NO: 102295 - DNA, 427 bp, Homo sapiens
  misc_feature (1)...(427): n = a,t,c or g
ttctagatcgcgagcggccaccccctccccaataaagctaanaaaaaaaaaaaaaaaaaaaaaaaaaaaaaaaaaaaaaaaaaaaaaaaaaaaaaaaaaaaaaaaaggggggcccctttaaaaaaaaccctgggggggccccaaattaaccgggggaaaaaaaaaatttttttttttttttagggggggaaaaaaaaaccccccgggggtttttttaaaaaaacccctttttttggggggggcaaattttcccccccccccccccaaaaaaataccccctttaggaaaaaaaaaaattttttagggggggggggggaaaaacccccccctttccctcgttggaaaaaattttttcccccggggttaaaaaaaaaaaaattttccccccgcgccctcgtggggnnnnnnnnnnnnnnnnnnncnccct

SEQ ID NO: 102296 - DNA, 408 bp, Homo sapiens
  misc_feature (1)...(408): n = a,t,c or g
aagcacccgcgagggggcagcttcggatactgcttcgccctggcctgggtggccttccccctcgccctggtcagcggcatcatctacatccacctacggaagcgggagtgagcgccccgcctcgctcggctgcccccgccccttcccggcccccctcgccgcgcgtcctccaaaaaataaaactttaacggcggaaaaaaaaaaaaaaaaaaaaaaagggggggggccttttaaaggaacccttggggggcccaaatttaacgggggagggaaagaaaaagtttttttcttttaggggggcgaaaaaaaacccacctggggaattttgggaaggaacctttctttggggggggggaaaaagggggccaacccccctccaaaatttaaaggcttaagggaaaaaaaaan

SEQ ID NO: 102297 - DNA, 420 bp, Homo sapiens
  misc_feature (1)...(420): n = a,t,c or g
agcagatagaaggccatacgattagcgctctgggtgacggggccgcctggcctgtgcagggtctgatccgccactttcggccggagctcgaggagcggatgcagcggtttgcccaacagcatcaggcccggcaggctgcctcttagcccaccaccctggcctgctgtcctgcgtctatccatgtggaatgctggacaataaagcgagggctgcccaccctccaaaaaaaaaaaaaaaaaaaaaaaaaaaaaaaaaaaaaaaaaaaaaaaaaaaaaaaaaaaaaaaaaaaaaaaaaaaaaaaaaaaaattggnnngggggggggggggtaaaaaaaaattttggggggggccccaattttggggggggaaaaaaaatttttttttttttttttggggggggaaaaaaaaaggggggggggg

SEQ ID NO: 102298 - DNA, 190 bp, Homo sapiens
actagtcctagaaatcgctgtcgccttaatccaagcctacgttttcacacttctagtaagcctgtacctgcacgacaacacataaaaaaaaaaaaaagggggggccgttttaaaggatccttggaggggcccaagtttacccgggcatgcaacgtaatagttttttccttatagggagccgtattataac

SEQ ID NO: 102299 - DNA, 324 bp, Homo sapiens
  misc_feature (1)...(324): n = a,t,c or g
cggcctctgagcaagacagtgcgcttcaacgtgctcaaggtcaccaaggctgccggcaccaagaagcagttccagaagttctgaggctggacatcggcccgctccccacaatgaaataaagttattttctcattcccagnnnnnnnnnnnnnnnnnnnnnnnnnnnggggggggccgttttaaaggacccctgggggggccaaattttacccgggctggcaaggtaaaatttttttccttatagggggccgaataaaaacctacctgggaatttttggaaagaaccctttttttgggggggggacaaattgggccaacctccca

SEQ ID NO: 102300 - DNA, 444 bp, Homo sapiens
ttagccaggatggtctcgatctcctgacctcatgatccgcccgccccggcctcccaaagtgctgggattacaggcgtgagccactgcgcacagcttttttttttttttttttaaaaaaagcctcttttttcccccagggtgaaaggaaaggggcctttatttctcacccctggttgttcgatcttcaggcgctattatttttacatgcatcctcctccgaagaacctgtttatttttcccccaccgtgcaattttgaaaaaaactaccttttgtttattataaaaagttttcttgtttcacctatgccactagtaataaatattatacctttagtcaacaatattttgttcacttaactccattttggctttacttataggtctccattaccgtcgtcccttgtataagaaaccacctctactctatacataactgtttgttgg

SEQ ID NO: 102301 - DNA, 439 bp, Homo sapiens
cggacgcgtgggcggacgcgtggggggaaaatatgttttaggtctggctcttccagaaggggaagagaagttttaagtcaggcttttctagaagaggaaaatagattttagatccagctcttctagaaacggaagatatgttttaactctgccttttctagaaggagaagatacgttttaggtcaggctcttccagaaggggaagagacgttttaggtctgcttttttctagaagggaaagatatgttttagatcaggctcttctagaaagggaagataggcttttgatctgcctgttctaggctgggcgtggtggctcatgcctgtaatcccagcacttcggaaggctgaggcaggaggatcacctgaggtcagggagaccagcctgggcaacatggaaaacccgcgttcaactaaaagtacaaaatagctgggcgtg

SEQ ID NO: 102302 - DNA, 415 bp, Homo sapiens
acacacagtacacacacagcatcccagctggctacacacacacacacacacactgtgtccacaaagggcctaggaaactacgtgcccttaagccatgcacccgaccatgggcccccaggatcaggggcacacggggggcctgtacgctcacacacccttacaccctcactctcacacacatgctaacacacttattcattctcacatatatgctcatgctcattcacacacaatcccggccacctgccctaaaggccccacacagccctatctttgccttttgtccccccacatagagttgtaaaccacagcacccccactaggcctgcttcctcccattccaggggtccctgagcccttgggccggcctgaatagggggtgggtttccttcccaaaccttaacattcccacctg

SEQ ID NO: 102303 - DNA, 420 bp, Homo sapiens
aaaaaaaataaattctttttttagtcagggtctcacccaggctaaagtgcacgggggcaggcctagctcactggggcctcaaactcctgtgctcaagcgatcctcttgcctcagcttcccaagtagctgggactataggcatgagccactgtacccagctaattaaaaaaaaattttttagagatgttgtccaggctggagtttttgtgtttttgtttttgtttttccaatttaattttaagttctgggatacatgtgcaggacgcgcaggtttgttacataaataaacatgtgccatggtggtttcctgcacccatccacccatcacctaggtattaagcccagggggcattagctatttatcctgatgctttcccttctggggtttctttattttaaaaaatcatttccaaaaaagcg

SEQ ID NO: 102304 - DNA, 477 bp, Homo sapiens
  misc_feature (1)...(477): n = a,t,c or g
ggttttcgccatgttggccaggctgatcttgaactcctgacctcaggtgatctgcccgcctcggcctcccagattgttaggattacaggcgtgagcccctgcgcccagcatgaattttttaaatctaattaatctttaaggagaatgaggttttctttttaaaatgctgtttagagattctaaaatctctgcaggtacagttgatcattatttttattcttgaagatagatcctaactctccccattactcctctgctgggttatatgtgataaggttttcccacttgatacgaaactttcaatgcttctattactctacagatcaaataaaatttctgactagaatcatttcagaatctgtgttttaggaagttggttttaattnttaagattttttcctatcatgcttgtttcctaatgagttgaattntttaaagggaaagttcaagatatgaagataaaagggatagtgtgct

SEQ ID NO: 102305 - DNA, 379 bp, Homo sapiens
  misc_feature (1)...(379): n = a,t,c or g
cggggcggccgggcagagacgctcctcacatcccggacggggcggcagggcagaggtgctccccacatctcaaacgatgggcggccgggcagagacactcctcacttcccagatgggatggcggccaggcagagacgctcctcactttccagactgggcagccaggcagaagggctcctcacatcccagacgatgggcggcctggcagagacgctcctcacttcccagacggggtggcggccgggcagaggctgcaatctcggcactttgggaggccaaggcaggctgctgggaggtggaggttgtagcgagccgagatcacgccactgcactccagcctgggcaccattgagcactgagtgaaggagactccgtctgn

SEQ ID NO: 102306 - DNA, 411 bp, Homo sapiens
  misc_feature (1)...(411): n = a,t,c or g
acgaggacgcgtgggtactagatcgcgagcggctgcccttttttttttttttttttttttttttggtttttttgtttttttttttttttttttttttttttttttttaatttttttatttttaaaaaaaaaaaaaaaaaaaaaaaaaaaaaaaaaaagtaaaaaaaaaaaaaaaaaaaaaaaaaaaaaaaaaaaagattgttaaaaaaaaaaaaaaaaaaaaaaaaaaaaaaaaatattttgtttaaaaaaaaaaaaaaaaaaaaaaaaatggggggggggggggagcccaaaaaaaaaaaaaaaaaaaaaaaagaaaaaatataaaaaaaaaaaaaccaaaanncccccgagaggaggaaggcagggggcaaaaaaaaaaaaaaaagaggggggggcgggttgttttatt

SEQ ID NO: 102307 - DNA, 407 bp, Homo sapiens
  misc_feature (1)...(407): n = a,t,c or g
ttttttttttagaaatgtaaaagggtagctttattttaatctttactcaagagggatattgaaacaaagctcttactacaacaaccaggttaaaaaaacaaggggaatcaatgctattgtatgtctgtgaactaaaaatttcttacttatggagttatgctcaggaaacaatacttaaaatcttaaactgtaaactcttagcttggaacattttcatttttcctgtatcttgcatgtttctcagggccattaaatatattatcttctatttcttcttaaagaactagggttcataaaaggatcatcatcatcatcctcacttgattcaaaatcaacccctttcgatacttgactctgggacatgattttgctggatgatgtgctggaccacctttgatctgtctttn

SEQ ID NO: 102308 - DNA, 375 bp, Homo sapiens
  misc_feature (1)...(375): n = a,t,c or g
taaagaaacatgtcaaaagagtactcagtcatctaaaagcctcctgcccagaagagttgttgcatttttcttcatggccccaactgctagaattacaattaatgggtggaggaagccacacacacatggaccaacacacacatacacacatgcacccacacatttacacacacgcacacacacacacagttgtggcaaaattgaatgagctaccttgggtggaaatgaacctcctttcactgggggcatttcaacaaagacttccatgactagtgtgggcaagaagggttgaccagaacattaagaccccttactgtgctaggattctctgcctcttangggaagagtgttgaagctgggaagtcagaataatgt

SEQ ID NO: 102309 - DNA, 431 bp, Homo sapiens
  misc_feature (1)...(431): n = a,t,c or g
gttctgcctttgccactgagatgcatatctgttttacagaatagntttttttctttctttctttctttgaagacggagtcttgctctgtcacccaggttggagtgtggtggcccagtctcagctcactgcaacctccacctcaaaaaaaaaaaaaaaaaaaaaggccaccccgcccggaattccaaaatttttaattggaaaatctggaaaacccccgagggttcttttaattgggcattgggccccatttaaattttttttttttaatccccggttggcctttttttaaggaacttatcccctttaaggttaaattttggcccttgaacctttgaatttaaaaattttttaaagggccaaaattagtggcccttttttttttgggcccaaattcttttggaaaattattacaaggcctttttcaaacttt

SEQ ID NO: 102310 - DNA, 391 bp, Homo sapiens
ggcacgaggagccttgaactctgttctttgcatttcaatttcaccgtcaagcctttcaccttcctcaaaatgaggcataatcttatccccagaattgaggaggggttgtgttaaccaattagttaaccaattatgttaataatttatttaatgagtggtatggaaaccaattgatttttttagataaaagaatatgttttagagttggatgattttggaaaacaactctggcagaattgtatataagcttcagtaaagttcaaaaagcgggccaggtgtggtggctcatgcctgtaatcccgacactttgggaggccaaagcaggaggatggcttgaagccagtagttcaagaccagcctgggcaacatagtaagaccccatctctatgaa

SEQ ID NO: 102311 - DNA, 479 bp, Homo sapiens
  misc_feature (1)...(479): n = a,t,c or g
ggcacgaggtatttttagtagagacagtgtttctccatgttggtcaggctggtctcgaactcccgacctcaggtgatctgcccacctcagcactttgggaagctgagtggggaggattgcttgaggacaggagttcgggaccagcctgggaaacatagtgagatcttgtctcttttnnaaaaaaaaaaaaaaaaaaaaaaaaggaaaaaaggggtcttttttttgggggttaagggcaaaatacccccgggggggaaaaaaatttttttttttttttttaaggagttttaaatggaaaccggttggaccaggggggggctttccaaaaaaaaatggaccgaagttttaatttgttgccccttggaaaatgggggggaaaccccaaaaaaaggggaaattttttgggaaaaattcaaaaaaaatattccgggccgggcgggggggccacccttgaaacccccccctttgggaaggtgagg

SEQ ID NO: 102312 - DNA, 500 bp, Homo sapiens
ggcacgagggcaaatattataataggctcatcacatgaaagaggtgagactgtgtagctacttctgaccttaaatccccattggggatttcatatctacatgggtactacagtttcagatctgaggaattagaggctcttctggataaaataatctctcctacatctttttctgcctccatcatgatccattcctgttgggccatataagatcaaaaaaaaaaaagggcccggggggggggtttaatctttgaacccccaccttttgggggggccggggcggggattcccaaggccgggatttgaaacccccccggccaattaagggaaaccccttttttttcaaaaaaacaaaaaataatttggttttggggacccttccctcattcccaacttctttggggggccgggcggaaaaatctttaacccccggggggcaaaggttcctgagacccaaaattgcccttttctccccaccctggggggaaaattaaacctctt

SEQ ID NO: 102313 - DNA, 442 bp, Homo sapiens
atggaggggggaccccgccattccctggagtttgggggaaggggaatggaggggggaccccgccagccaaaacattgcccccattcccgagccccctcttcttttttagcccatgcccttccccgggggagggagggagcagggagcccttactctccacgccccttgcttgcatctgtatatagggggagcagaaagtaacccttttcctccctcccccctcccccctactaaatgtaggggccttggatatcctgtttgttaataaagacaattcaaccagctcccaaaaaaaaaaaaaaaaaaaaaaagggggggccccattaaaagactcctgggggggcccaattttaacgggggatggaaattgaaattttttctctcaatggggggtctttaatagcccagggcgcgcgccgtgttataaaccggggggagttgt

SEQ ID NO: 102314 - DNA, 499 bp, Homo sapiens
atggggccgtcatagacgccgtggaccggccggaatccgggtgacccagcgttcgggcggcggatcacaatgtcaggagattgtgaccatcctggttaacagggtgaagccccgtttctattaaaaatacaaaaaattggccgggtgtggtggcccacgcctgtaatcctaccactttgggaggctgaggtaggtggatcacgagatcaagatcctcctggctaacatggtgaaaccctgtctctaataaaaatactaaaaatttaaaaaaaataaaaaaaaaaaaaaaaaaataaataaataatataaaaaataaaaaaataaaaaatatggggggggcccccttataaaaatttttggggggggcaaattatttcgggtggggggaaaaattaacttttttctttttggggggggtttttataataagaggcgggggcgtgtataataaacctggggaggggaaaaacttctatttggtggtttttaagaaaaacct

SEQ ID NO: 102315 - DNA, 966 bp, Homo sapiens
ggcacgaggtctttgcatttaagacatccaatcaataatgaaggaaatttttttctgaatgtaggtttgagtgaggggcacctctgctttcccttagcaaccctcatatacctccctgcaccgttacgctgtgatggcaactggggatagaaaaaaaatggggaaagacaggaatcctaaaagggagagttattactggccacaagccctgtattctcaacagggatgcaaattggttcttcagtaaggataaaaaaaaatcacaagcagttgtttgtggccctcctaaggcccacagcacatatagtgtgtctgtgatattccattttcatggcagggagtgatcaggaagaaggcttcctaggggactggcgatttaaaccagttgagaaacactgccatcagcaggcagtttcagactcactcaagttgtctcttgacagtcacttctaaatgggttctaatgtgacaatggcctccaaaactacagccttccctgaagtttaagctgtgaccttagattttagaaggacagtggggctgtacctagaatagtggttctcgaagaatgcggcctgcagatcctgggagtcccaagaccctttcagggaggatctgtgaggtcaactgttggcactgtggcatgaatcaaggtggtggcagcaaacttctagtagttttgatatgtccttgatagaacaaatagcaatggttaactattaaatgttgacctagccagtcgcggtggctcatgcctgtaatcccagcactttgggaggccaaggtgggcggatcacctgaggtcaggagttcgaggctaacctgaccaacatggagaaaccccgtctcttctaaaaatacaaaattagctgggcatggtggtgcatgcctgtaattccagctactcgggaggctgaggcaagagaatcgcttgaatccggtaggtggaggtttcagtgagccgag

SEQ ID NO: 102316 - DNA, 461 bp, Homo sapiens
aagaaccctccagggcgcccagaggatctggctatcgccgtatccagagacggttggcttgatctggccttcctccccttctaacacatgcattcttttgcacacgagttacacacattcctacacactcacacaaattctcacacaaattcccagaatcaatctcccacatacacatccaagtcacacactcattcttacatgcgattcacagattcacacgattcacagatgcaacagactcacaggcattcactcttacatatgacacagttgtacacttgcacacacacacacacacacacacgcactgtaatccccttgcatctccacagtgtcaaaggctggctgaacaccaaggtggctcttggtggcaggacttctcatgggagggaaagccacatagctggaaggttactagcttagggacataattcccttattgactataatccccttag

SEQ ID NO: 102317 - DNA, 393 bp, Homo sapiens
  misc_feature (1)...(393): n = a,t,c or g
tgcgagaacactggaaatgtaaaggaagcagttacttaagacatatttgaatcgagtaacccttaaaagactctattacgtattcgccatgaccttagaaggtggaaaaacagttataaattattgaaaagaaaacgtgccagtcccacttcctggagctttttttttttttttttttaaaaaaaaggggggacaagggcaaagccgggcancctgccccccggaatactttgactgtgctccaaatggaaaatggggaggggggggggcactttcgataatataagggggaacggggggattggcatttccccaagagttccaatgggactttgggcccggggggcccccacttgggggggactggaaaagttgtggctcccctgagcccaa

SEQ ID NO: 102318 - DNA, 469 bp, Homo sapiens
  misc_feature (1)...(469): n = a,t,c or g
ggatggagagcaacttgttcctgagctgtgcaaccaatcagagtccagtggagaaggagcttgcagtccccccaggagcagatcatcttggcgccgtccctggctaaggttgacatggagatgactcagctcacccaggagaatgcagacttcgccactcgggatcgctaccaccactcctccctcgtgaaccgggagcagctgatgcctcactactagatgcagtgctgggaccttcctcttttggagctgtcccatgtacagtggacccaagcccaggaccttcgtggagctgcttctccaacctgagaaactcaagacccatcctcccgctgtcactttggacaatggaaatctacattttcttttcccnnnnnnnnnnnnnnggaaaaaaattttccccttgccccccgggggggagccagggggcaaattttggttttatggcacctttggtttccggggtaaa

SEQ ID NO: 102319 - DNA, 1322 bp, Homo sapiens
  misc_feature (1)...(1322): n = a,t,c or g
cctgggatcttctattctgcactcctcagcctggataccagcatcctgaaccagctgtgttttattatgcacagatatcgtaaaaatttgactgccgcaaagaaaaatgagttggtacaaaagacaaaatcagagttcaatttcagcagcaagacttatcaagaatttaatcactatttgacatcaatggttggttgcctgtggacgtccaaaccctttgggaaaggaatatatattgaccctgaaatcctagaaaaaactggagtggctgaatataaaaacagtttaaatgtagtccatcatccttctttcttgagttacgctgtttcctttttgctacaggnnnnnnnnnnnnnnnnnnnnnnnnnnnnnnnnnnnnnnnnnnnnnnnnnnnnnnnnnnnnnnnnnnnnnnnnnnnnnnnnnnnnnnnnnnnnnnaagcccagaagaaaggacagtaaatgtgagctctattcggggaaagaaatggagctggtatttggactatttattttcacaggggttacaaggcttgaaactttttataagaagtagtgttcatcattcttccattcccagagcagagggcataaactgcaacaatcaatattaaatgaatgttgacataaactgaacacactggactaaactcactcctcattgctagagcaaagtggctcatcttgagttcccattttcatttcactgacagactgccatcctcaaggagtactcagactggccttctgttcatggcttaggagagcattggtgtgcctaactgatttttcaaaatttagatttttttagcctaccagtgaaaaatgaccccttcatcatcaggctctgcgttctaccaatttgtatgtaaaaagacacatctgttttgtggtaggattttttcacatttttgggtactatgagctgcattgatggaagacagcaggcaatatgtggtgacagttaactcacagacataaacatgcaaaatactttgctgtctctggggatattgccatttttcttactgtgagcaacagcaccaacaccaagttaacaggatgcaacatgtgtatgactctaaaagccctaagtagttggtagcttcctgggccttcaatcatagcaatttgatgagggaaggaaggggagaggatttgttgggtaatcaagacattcccgtatatgtctgatttcatggaactgctctattttgtttgtgtgtattgtatatgtatatgtgtatgtgtgcgtgtatgtgtgtgtctgtagcttcagtttttaagtgtaaggactaaataaactaactgaaattttactttc

SEQ ID NO: 102320 - DNA, 403 bp, Homo sapiens
agaagccagtgcctctgttttcacacagaggaatctagggggatgcgtggactgcagggaacaggttgcacctgagcggcatcctgagttgcgatgggttttggagggagggactgtgagttgagaaaacacaggcgagcatcctcggctgcaagtgcagcacacccagggcagccctgggcttcagagagcgcacactgcctctgaggcgctgcccgtgctgtggtcctccggaagcacagatggagctagaaaaaagagctctaggtagccaggcgcagtggctcatgcctgtcttcccagcactttgggaggccgaggtgggagaatcgcttgaggccaggagttttgagaccagtttgggcaacatagcgtgaccccatcttataaaaaagccaggtgc

SEQ ID NO: 102321 - DNA, 421 bp, Homo sapiens
  misc_feature (1)...(421): n = a,t,c or g
agtatatgtgtgtgtgtgtgtgtgtgtgtgtgtgtgtatgtgtgtatgtagggcaaaagtaggaatgtaatgatattggtaccatttttttaagagaccttgggaaaagaagaggaaaaaagctttatttaaaaggatgtaaagacttcaacattccaaggggaccgcagagattgaatttatttatcctataacatttctacattgattatttgaattttctagttaaaaatttcctagttagttctacactagtgtaaaaaggaaaaccatcataatttcaacctgtcattacaaagctctggtggtttagaggagtttgcttccgtgaaaatgggggtagccaccctcttccttaactctataagattctcttcaaggtgaaatattattagggtacagttagttacctgagggtttn

SEQ ID NO: 102322 - DNA, 413 bp, Homo sapiens
  misc_feature (1)...(413): n = a,t,c or g
ctttatttctgccttcatttcgagatgaatggtcaaatctaattaagtacattttccactgtactccaatataatttaatgtatctttgaatataaggagtaaagtatggcataggtagtcaagaagagttttaatgtttgcttgtaaaatttatttgtataaatccatatgcaagaatgccataaaggattcctgagtcagagggtagctgaatgacttggtgacctacaagatttggagattctaggatcttataatgaattaaaaatgagagctggacatggtgactcatgcctgtaatcccagctctttgggaggctgaggcaagaggactgcttgagcccaggagtttcaagatgcagagagctatgataatttcactgaacttncagcccgcaacagagagaccttg

SEQ ID NO: 102323 - DNA, 478 bp, Homo sapiens
  misc_feature (1)...(478): n = a,t,c or g
naatagaaaaccctgcaggnaccgcgcatgattccgtgtcgacccacgcgtccggtgcaataaataatctttcgcaagtgattttagctaattgaagagattattttcctatgtaatttcacattctaatatactaaatgtttatattccttagagaactattttatattgtgcgctgggggcttgtgatgtttgtgtgctgttttaaaattcatttcaaattggactcgatttctttatatctaatatatatctgggagaaaaggctgcttgaaaatatcttttgattcagtgatttttaacattgggaagttgagtttattaaaaggtagtctgaaaaaaaaaaaaaaaaaaaaaaaaaaaaaaaaaaaaaaaaaaaaaaaaaaaaaaaaaaaaaaaaaaaaaataaaaaaaaaaaaaaaaaaaaaaaccccccccccaaaaaaaaaaaaaaaaaaaaaaaccgtagagggggggg

SEQ ID NO: 102324 - DNA, 445 bp, Homo sapiens
  misc_feature (1)...(445): n = a,t,c or g
tgaggcggggggtctaaaacagtgcctggcacatagtaggcgctcaataaatacttgtttgttgaaaaaaaaaaaaaaaaaaaaaaaaaaaaaaaaaaaaaaaaaaaaaaaaaaaaaaaaagaaaaaaaaaaaaaaaaaaaaaaaaaaaaaaaaaaaaaaaaaaaaaaaaaaaaaaaaaaaaacaaaaacaaaaaaagggggggggggaaaaaaaaaaaagggaatctttgggaaaaaaccttttttttgggggggggccaatctttgcccaattccgaagaaaaaaaaaaaaaccctatgggaaaaaaaaaaaaaaaaaaccccttaggggggaaaaaaaaaagaaaaccccccctcccttggaaattttttttcccggggggaaaaaaaaaaaaatataaccccgggggccgccgcccnnnnccccgcgccgccctcnaaaaa

SEQ ID NO: 102325 - DNA, 186 bp, Homo sapiens
ttctagatcgctgtcgccttaatccaagcctacgttttcacacttctagtaagcctctacctgcacgacaacacataaaaaaaaaaaaaaaaaggggcggccgttttaaagaatccttgggggggcccaagttaacccgggcatgcaacgtaaaagttttttccttatagggagccgtataataac

SEQ ID NO: 102326 - DNA, 415 bp, Homo sapiens
taattttggacttttagcagagacggggtttctttatgttggacacgctgggcttgaggtgcggagctcaggtgatctacctgcctcagcctcccaaagggctgggattacaggcgtgagcactgcgcccggctttaacagatatttttataagcaaaccatttataagtatgggtgactattctttacaaatccatttgcgaggcagaggtaatttgggggcactgcaattatggccagcattgaaaattataaaataattgcctgaggaaccaagctcatgtgcactaaaaagaagcagggattcttagaagattcttagaagtatagagtagtgatttttttggggatggaatcttggtcttgccccccaggttagagggcaggggtgcgagatccgctcactacaacctcg

SEQ ID NO: 102327 - DNA, 409 bp, Homo sapiens
  misc_feature (1)...(409): n = a,t,c or g
gtaatcgcataaaacttaaaactttacagtcagaggttcaattcctcttcaaaaaaaaaaaaaaaaaaaaaaaaaaaaaaaaaaaaaaaaaaggggggggcccttttttaaaaattttttggggggccccaattccccccgggcggccaaaaaaattttttttttttttgggggggggtaaaaaaaaccttctgtggttttttggaaaaaccccctttttttggggggggccattttccccccccccccccccaaaatataaaccctttgggggaaaaaaaaaattttttggggtaaagggggtaaaaacccccccctccctccccccccggaaaattttttccccccgcgtttttttttaaaaaattttccccccccgctcgggggggtgnnnnncctcccctccccg

SEQ ID NO: 102328 - DNA, 416 bp, Homo sapiens
ttgatatgagggattaaaaaaattacacatgcaagcatccccattccagagagggcaccctgtaaatcacaaaaaaaaaaaaaaaaaaaaaaaaaaaaaaaaaaaaaaaaaaaaaaaaaaaaaaaaaaaaaaaaaaaaaaaaaaaaaaaaaaaaaaaaaaaaaaaaaaaaaagagggcgctctcggggggaaatttttggcacagacatcctttaagggggaaaaacaaaaagtttttattaaatattaaaagggtttatattttgaatgaaatgtgtatgaaagggaacacgaaatttgggttgggaggttttttatttaaaaaattttaaaagaggggccgggggggggggggttttgggactggtgggaagggaaggggttaataaatcgagataagctggggcggaggaaag

SEQ ID NO: 102329 - DNA, 580 bp, Homo sapiens
ttttttttgagacagagtctctctgtcacccaggctggagtgcagtggtgtgatctcagctcactgcaacttctggccttccaaggttcaagcaattctcccacctcagcctcccaagtagctgggatcacaggtgtgcaccaccacatccagctaatttttatatctttagtagagacagggtttcaccatgtggcccaggctggtctcgaactcaacctccagtgaaccacctgcctcagcctcccaaagtgctgggattacaggcgtgagccaccgtgcccagccaagatttggggaattaagaaaggaaatacaaacccaactgagccaaggaaagaatctgactgataacatcactgcattcagcatccaaagaaatccattacttttacaactttgtatttctttttaaaatacaggcaggcaaagaagataacaaatatttttaaatggatgcttaacagcacagtgttaataaccatcttcagaaattgtacagtattaaacatgtcttcagccaagctccaacactcagaagacaaaagacttgaggtcaaaagctattaatccctttttt

SEQ ID NO: 102330 - DNA, 456 bp, Homo sapiens
tgagacggtctcattatgttgcccaggttggtctcaaactcctggcctcaagggatcctcccgccttggccttccaaaatgctgggattacaggtgtgagccactgcgcctgatttgaacgtttggattttatagtcaaggtctgctgactctctgtcattggtccacactggttaaaatctggaatgtctgtgtgtggggtacatgagaagtagcctgagtggtaaatgttgactgttatcctgtccctgcactccatatgtggtactcacccctaagcatcagctttctgccaagggcacaggatgcctcttgataaatattatatggcagagaagagtgcaggagaaagggtctactttggataggattttagggaaagcaactcaaaagaggtgtttcagcctaatgacctgaaaggtaagaaggagccagaaggcccgggtgcagtttttt

SEQ ID NO: 102331 - DNA, 406 bp, Homo sapiens
  misc_feature (1)...(406): n = a,t,c or g
gagaggggtcagggttgattcgggaggatcctattggtgcgggaaaaaaaaaaaaaaaaaaaaaaaaaaaaaaaaaaaaaaaaaaaaaaaaaaaagggggggggccccctttaaaaaaaatcgggggggggccccaattttccggggggaaaaaaattttttttttttttttttaggggggttaaaaaaaacccccctttttttttttaaaaaaaccctttttttttggggggggaattttccccccccccccccccaaaaaattttccgctttaaaaaaaaaaaaaaattttttgggggggggggggacaacacccccccctttccctcggggggaaaaatttttcctctcgggtttaaaaaaaaaaaaacttttccccccgggctgtgttgatttggcnncncc

SEQ ID NO: 102332 - DNA, 402 bp, Homo sapiens
cacttttcctccatttgattaacagtgctgcacttacaatgattacgggaaagcgcaaataaatacggaaaggggtgcttattttgactactggaagagctttgctgggtctcagcgcaacttttgttttttattcctgagaaggtgatctctccatgcggttctctcacacaaggattctttaaaagaggaagagagacaagcagaggggggaggacagtctttcactttaagaacggctgggctcaaagataaaaggaagggaaaagcagcagcagcagcagcagcagcagcagcagcagcagcagcagggaaaccaacgctgcagcacttccgaaaggcatttttgatccattttttagggttgcggcccgtttctccaccgaagttggcttcagctct

SEQ ID NO: 102333 - DNA, 438 bp, Homo sapiens
  misc_feature (1)...(438): n = a,t,c or g
aacttacacttaggagatttcaacttaacttgaccgctctgaccaaaaaaaaaaaaaaaaaaaaaaaaaatttaaaaaaaaaaaaaaaaaaaaaaaaaaaaaaaaaaaaaaaaaaaaaaaagggggggcccctttttaaaaattccttggggggccccatttttcccgggggggggaaatttatttttttttttttttgggggggttttttaaaaccccctggggattttttgaaaaaaaccttttttttggggggggaaatttttggcccccccccccccaaaaatttaacccctttgggaaaaaaaaaaatttttaagggggtaggggggaaaaaccccccccttttccttcgccggaaaaaatttttttccgggggtttttttaaaaaaattttctcccccggccttgggtttttnnnnnnnttctccccccccc

SEQ ID NO: 102334 - DNA, 462 bp, Homo sapiens
cctttctggtctccatcctctctgtagatatgtagatctctttgaaacgaagtaagcacccatccctcccagctcactcggctccaccgtggggacctgctgggggagccgctggctccctgaggaaagtgaaagccaataaaacatctcccacaaaaaaaaaaaaaaaaaaaaaaaaaaaaaggggggggcccctttaaaaagatccctgggggggcccaaatttaccgggggggggaaaaaaaaaattttttcctttagggggggggaaaaaaaaccccccgggggatttttggaaaaaaacctttctttgggggggggacaaagggggcccccccccccccaaaaattaaagcccttgggggaaaaaaaaaattttaaaggggaaaggggggaaaaaaacctcgaattttctgggtaaagaatttccttactgggttttttttaaaaaattttcccccg

SEQ ID NO: 102335 - DNA, 455 bp, Homo sapiens
cccacgcgtccgaccacattttaaagatttaccgtttccatatatttaacattcctggttacataatggacatttgtcttttaatgttttttcaatgttttaaaataaaacattttgtcttctaaaaaaaaaaaaaaaaaaaaaaaaaaaaaaaaaaaaaaaaaaaaaaaaaaaaaaaaaaaataaaaaaaaaaaaaaaaaaaattgggggggggccctataaaaaaaatcctggggggcccccaaaaaacgcggggggaaaaaaaaaaattttttttttttatgggggggaaaaaaaaaacccccggggtttttttaaaaaaaaaccctttttttgggggggggtatttgggcccccccccccccaaaaaattattcgccctggagaaaaaaaaaatttttttcggggtaggggggaaaaaaatcctttaactctttttgggaaaaaaatatta

SEQ ID NO: 102336 - DNA, 512 bp, Homo sapiens
cgcttgaaacgttgcagatcgatcacgttgcccggcccgacccacgcgtccggagggctgtctccacctcttggctattgtgaataaagctgcttgttccttttcatggctgtgtaatattccactgtgaggatggacattatatttctcccttcatctatagatgggggtatgagggctgtctccacctcttggctattgtgaataaagctgcttgttccttttcatggctgtataatattccactgtgagactggaccacattatatttctccattcatctatagataggcacgagggctgtctccacctcttggctattgggaataaagctgcttgttccttttcatggctgtataatattccactgtgtggctggaccacattatatttctccattcatctatagaaggggatgagggctgtctccacctcttgggtattgtgaaaaaagccgcgtggtcctttcaagggtgtgagaatttcaccgtggtgggggagcacatttattt

SEQ ID NO: 102337 - DNA, 441 bp, Homo sapiens
cggacgcgtggggccgtttacgcggccctggagcgcatggggctggacggctgcgtggaagacttgcgcagccgcctgcagcgcggcccgtgacacggcgcccacttgccacctaggcgctctggtggcccttgcagaagccctaagtacggttacttatgcgtgtagacattttatgtcacttattaagccgctggcacggccctgcgtagcagcaccagccggccccacccctgctcgcccctatcgctccagccaaggcgaagaagcacgaacgaatgtcgagagggggtgaagacatttctcaacttctcggccggagtttggctgagatcgcggtattaaatctgtgaaagaaaacaaaacaaaaaaaaaaaaaggggggggccgttataagaggtccttgggggggccaaagtttacccgggcttgcaaagataa

SEQ ID NO: 102338 - DNA, 445 bp, Homo sapiens
  misc_feature (1)...(445): n = a,t,c or g
cccctccccatacccaaccccctggtcaacctcaacctaggcctcctatttattctagccacctctagcctagccgtttactcnntaaaaaaaaaaaaaaaaaaaaaaaagaaaaaaaaaaaaaaaaaaaaaaaaaaaaaaaaaaaaggggggggggggttaaaaaaaaaaatttggggggggcaaaaaaaaaggggggggggaaaaaaaaatttttttttttaaagggggggaaaaaaaaaaacctggggggatttttggaaaaaaaattttttttggggggggggaaatttgggcccaacccccccaaaaaaaaaaagggtttaaggaaaaaaaaaaatttttgggggggggggggggaaaaaaaccccttttttgtgggggggggagaagttttttttttggggaaaaaaaaaaaaaaaaataaacccggggggggcggnnn

SEQ ID NO: 102339 - DNA, 443 bp, Homo sapiens
  misc_feature (1)...(443): n = a,t,c or g
tgaatttttccccccttattgggaattcttaaaaataaatgcatgcatgttttcccctgaaaaaaaaaaaaaaaaaaaaaaaaaaaaaaaaaaaaaaaaaaaaaaaaaaaaaagggggccccccttaaaaaaaaccccgggggggccccaaattccccggggggggaaaaaaaaaattcccccccttaaggggggccaaaaaaaacccccccggggatttttggaaaaaaaccccctttttgggggggggccatttggccccccccccccccccaaaattaacccccccgagaaaaaaaaaaatttttaaggggaaaggggggaaaaaaaaccttaaattccttgggcggaaaaaattttccctcccgggtttttttaaaaaaaaatcttccccccgggactgggggtttnnnnnntgnnnnnnannnanggantttaaaaaa

SEQ ID NO: 102340 - DNA, 428 bp, Homo sapiens
ccacagcctctgtttcagaaggaggaggacttcagggcattactatgaaagacagtgacgaagaagaagaaggctgatatcacacagctttgcagaaggaaggaagaccttgatcgacattgttttttatttttttaaccttgtccttgtaattacattcattgtttgttttggccaaataaaaatgcttgtatttctttaaaaagtaagcctgaatgtagagtaaaaggggaaatgccaagattttggggtttttttgtttcctttttttgtttgtttgtttgtttgtttttttggagaagagcatcctcttttgtgtagtttgacctaaaaatgaaccttggctctgcttgtgatcagaacatgaacttttttttttaaagaagatttgagcatttttctgtaatcacatcaaaatgatgttttcg

SEQ ID NO: 102341 - DNA, 434 bp, Homo sapiens
  misc_feature (1)...(434): n = a,t,c or g
atttttctaatttttgacatctccctctctcattttttgtattttgtgtttaattttctggtatctaattcaccttgattttctatctttctggggatattttcatatgctgtcactcttacagttgtcaaatgccttctcctgaccttgcccttgtgttctgtttactctgcccacctcttcgattctccccattgctacctggtgttttggnttctttttctttttctttttctttttttctttttttttttttgggaaaaaaagttccttttttaccccactttgatgttttgggcccaattttggtttacccaaaatggttgcttcggggttaaaacaattctcctgccttaccccccccagaaattgggacttccgggggccccccctgccaggtttatttttgtttttttaacaaaaaccgggtttcg

SEQ ID NO: 102342 - DNA, 201 bp, Homo sapiens
aggccacctactcatgcacctaattggaagcgccaccctagcaatatcaaccattaaccttccctctacacttatcatcttcacaattctaattaaaaaaaaaaaaaaggggcggccgttttaaaggatccctgggggggcccaagtttacccgggcatgcaacgtaatagctttttccctatagggagccgtattataac

SEQ ID NO: 102343 - DNA, 426 bp, Homo sapiens
cttttaaccagagaaattgacctgcccgtgaagaggcgggcatgacacagcaagacgagaagaccctatggagctttaatttattaatgcaaacagtaaaaaaaaaaaaaaaaaaaaaaaaaaaaaaaaaaaaaaaaaaaaaaaaaaaaaaaaaaaaaagggggggggcttttaaaaaaaaccccggggggggcccaattttagggggggaggaaaaaaaatttttttttttttttggggggggaattaaaaacaatctggggttttttgggaaaaaactttttttttgggggggggaatttgggggccccccttccctaaaaaattaaaattttgtggaaaaaaaaaaatttttaaagggggggggggggtaaaaccccccttctttttgtcgtttgaaagatttttttataaaaaataaaaaaa

SEQ ID NO: 102344 - DNA, 415 bp, Homo sapiens
cggacgcgtgggccaagattgtgccactgcattccagcctgagtgacagagagagactctgtctcaaaaaaaaaaaaaaaagggccccagggtttaagggggccgggggggccaaatcccttggggttggggttttgaaccccccctgcccacccgggaaaaccccctttttttttaaaaatacaaatttacccgggggggggggggcatccttgaaaccccttttcctgggggggttggggcgggaaatttttttttttccggggggcaaggtttgcagggacccaaaaccccccttttgctttccacctgggccaaaaaaagggaatttttgtttaaaaaaaaaaaaaaagggggcgcccttttttaaagtttctttggggggcccaaatttttccggggttgggaaatatat

SEQ ID NO: 102345 - DNA, 512 bp, Homo sapiens
ctttcaccgctacacgaccgggggtatactacgggcaatgctctgaaatctgtggagcaaaccacagtttcatgcccatcgtcctagaattaattcccctaaaaatctttgaaataggacccgtatttaccctatagcaccccctctaccccctctagagcccctaaaaaataaaaaataaaaaaaaaaaaaaaaagctaaaaaaaaaataaaaactataactgaaaaaaaagggaaggggggggggccctttttaataaaaccccggggggccctgaccaaacgggggaaatacgatttttttttttttttttagaggggggaggaaataaggcggtgggggctttttggggaaaagcccttttttgggggggggagttttgctcctgccccccccctgaagaaaaatatcagggccggggaggaaaaaaaatttttgataggaacttagtggaacacatcgccttttgctgtgcgctggagggaattttgatcatgaaaaagaaaaaaat

SEQ ID NO: 102346 - DNA, 385 bp, Homo sapiens
ggcactcgtgtttcacaacagggacccttaaaggcgatgtttccagcaaaggatgtgatttttttttttttttttttgaaaaaagttctcactgggttcccaaggcgggagggcaggggtctttcccagacccccccttggcaaactacaaactacggccttaaactccggggctaaagggacccccccatttttgtttcctgagccccggaaacggggggggcccccccccgcccccggttgggagggaattttttgcccacatttttttccaatgggtcaaaagggggaggggggcctttggcataccggggaggggccccattaggctcaactcctaatttttttccattcaccatcagttgggggcggaattcataacagg

SEQ ID NO: 102347 - DNA, 452 bp, Homo sapiens
  misc_feature (1)...(452): n = a,t,c or g
tccctaatctcaagtacccagggacacaaacagtgcagaaggccgcagggtcctctgcctaggaaaaccagagacccttgttcacatgtttatctgctgaccttccctccactattgtcctatgaccctgccaaatccccctctctgagaaacacccaagaatgatcaataaatactataaaaaaaaaaaaaaaaaaacaaaaaaaaaaaaaaaaaaaaaaaaaaaaaaaaataaaaaaaaaataaaataaaaaaatgtaattatatgagctacaaaacaagggaaaggaataataaataattggagggggggggcggtaataaaaaatgattgggggaggagaaatgcttaacgcgccgaaggcctgntcctttttttgttttggggggggcgtaaaaaaatcccgggttttttctgaagagaaaaatccttttgtgtgggggaaaaaact

SEQ ID NO: 102348 - DNA, 429 bp, Homo sapiens
  misc_feature (1)...(429): n = a,t,c or g
cccacgcgtccgcccacgcgtccggcttgagattgagaggtcaaggctgcagtgagctgtgattgcaccactgtactacagcctagtgagaacacatcttggaaaaaaaaaaaaaaaaaaaaaaaaaaaaaaaaaaaaaaaaaaaaaaaaaaaaaaaaaaaaaaaaaaaaaaaaaaagaaagaaaaaaaaaaaaanngaaaaaaaaaaaaagacaaagcaacaaaaaaatgaaaaaaaaaaaaaaaaaaccccccactttttaaaaggggccagaggggggggcttgtctccccttcctccccaactccccccttcttttaaaaggggttgaaataaaaaaaaantttttaaaaaaaaaaagaaataaaattgggggggggggctttgggtggagaccttttttaaaaaaataaaaaaaaaaaaaaaaa

SEQ ID NO: 102349 - DNA, 380 bp, Homo sapiens
gccgcctgcccgccgcctcctccgtgcgcccgccagcctcgcccgcgccgtcaccatgagccaggcctacttgtccagccaccgcggtcacacaaaaaaaaaaaaaaaaaaaaaaaaaaaaaaaaaaaaaaaaaaaaaaaaaaaaaaaagggggggggggttttaaaaaaaaaacagggggggagaaaatattaagagggaggaaaaaaattatttttttttaaaaaagggggggtttataaaacatgaggggggtttttaggaaaaaaatttttttttgggggggggtatttgggggaaaaaatcctcgagaaaatttttgggtttggggaaaaaaaaaattttttaaggggggggggggaaaaaaaagcttttttttg

SEQ ID NO: 102350 - DNA, 384 bp, Homo sapiens
  misc_feature (1)...(384): n = a,t,c or g
gaatgtagggtttcggagcttccatgccgtcccgggcaccaccctccagaaacctccatgggtcagctatctggaagcccctccaacccagtcctcttgggtttttatggaagcttcatgacatcagcattccttcccccagggtatcgggcaggaccctctctggggacaggggtttttttttgtggttttttttttgaaagggagttttgctcttatcgcccaggctggagggcaagggcatgatttaagttaaccacaacctgcgcctccatgactttttcnaaaaaaaaaaaaaaaaaaaaaaaaaaaaaaaaaaaaaaaaaaaaaaaaaaaaaaaaaaaaaannnannnnnnnnnngggggggggcccttataaaaacc

SEQ ID NO: 102351 - DNA, 400 bp, Homo sapiens
  misc_feature (1)...(400): n = a,t,c or g
atagcacataaagccatttaccgtacatagcacattacagtcaaatcccttctcgtccccatggatgaccccnnaaaaaaaaaaaaaaaaaaaaaaaaaaaaaaaaaaaaaaaaaaaaaaaaaaagggggggggctttaaaaaaaatctttgggggggccaaaaattaacgggggaaaaaaaaaaaatttttttttttttaaaggggggtaaaaaaaaacccctggggattttttaaaaaaaaacttttttttggggggggggaaattggggccaacccccccaaaaaaaaaaaaccctttaaaaaaaaaaaaaaattttaaaggggaaaagggggaaaaaaaattttttttttttgggtggaaaaaaattttttctttggggttttataaaaaaaaaaa

SEQ ID NO: 102352 - DNA, 384 bp, Homo sapiens
  misc_feature (1)...(384): n = a,t,c or g
cggacgcgtgggcaaagaaatgtctatttttctttgttcccaattaatgtaaataaattttaaaatgcattaaagtaatggtaaagacaataaaaaaaaaaaaaaaaaaaaaaaaaaaaaaaaaaaaaaaaaaaaaaaaaaaaaaaaaaaaaaaaaaaaaaagagaaaaaattaaaaaaaacccaaaaagggaccaaaaaaaaaaaaaagcaataaaaaaaagcggttttatttttaaaaaaaaaaatttttttcgggggggggttttttttggggggccccctttttttgggggggcccctttgtgggaaaaatcctttaaaaaaaaaaaaaccttaaaaaaaaaattntttttttttggggtattatatcttccttctgcgg

SEQ ID NO: 102353 - DNA, 236 bp, Homo sapiens
tttcgccatgttgcctgggctggtctcgaactcctggcctgaagcaatctgcctgccttggcctcccaaattgctgggattacagatgatgtgagccactgtgtccagccctcactgtacgggttttctaaaaaaaaaaaaaaggggcggccgttttaaaggatccttgggggggcccaagtttacgcgggcatgcaacgtaatagttttttccttatagggagccgaattataac

SEQ ID NO: 102354 - DNA, 396 bp, Homo sapiens
aagtatacagattgtcatctgtacaaggaactgtatgtatgaaagcaaatgtacttatttataaatggctaacacttggaaaaccaaaaaaaaaaaaaaaaaaaaaaaaaaaaaaaaaaaacccaaaaaaaaaaaaaaaaaaaaaaaaaaaaaaaaaaaaaaaaaaaaaaaaaaaaaaaaaaaaaaaaaaggccccccccgataaaaaaaaacccagggggcacaccactccttcgaggacaaaaaaaactttttttccaacaaaaggggggatataaaaaaaccccgggtgcattttaaaaaaaaaacacctttcccggggggggctcttttggcccccccccccccaaaaaaaaaaaccccccgaaaaaaaaaaaaacactggggggggggggg

SEQ ID NO: 102355 - DNA, 252 bp, Homo sapiens
ctatcctagaaatcgctggcgccttaatccaagcctacgttttcacacttctagtaagcctctacctgcacgacaacacataaaaaaaaaaaaaaaaggggggggcccttttaaaggacccctgggggggcccaagtttacccgggaatgcaaggaaaaacctttttccttttggggagcggattaaaacccacccttggaatttttggaaagaaaccttatttcggggggggaacttatggggacaccttc

SEQ ID NO: 102356 - DNA, 448 bp, Homo sapiens
  misc_feature (1)...(448): n = a,t,c or g
ncttggatcgcctgcggtaccggtccggatttgaggtccttcccacgcgtccgcagggtttcaccatgttgcccaggctggtctcaaactcctgagctcaggtgatccgcctgccttggcctgcgataaaattgcacagaagtaaatacacacacgtgaggatacggaaaaccggggaaacctgagcaagagcagtcagaccccggctgtgatggcgcccagtagttctgcgagatgttaccattggggaaactgagtgaaggcgggtacctgggatccctctgttttcttttttgttggtgntggtattttgagatgaagtttccctcttgttgcccaggctgggtgatccacctgcctcggcctcccaaagtgctgggattacacgcgtgagccactgtgcccagcccctctggtttatttcttcttttttttttttttttttgan

SEQ ID NO: 102357 - DNA, 435 bp, Homo sapiens
  misc_feature (1)...(435): n = a,t,c or g
tggagtcttgctcttgttgcccaggctggagcacctgggttcaagcaattctcctgcctcggcctcccaaagtcctgggattacaggcatgagccaccatgcccaggcttatagtgtttttgatcatacagctttggatagttttctgagtggttgctctaggtataacaatatacatatgtaactcatcacagtctactagtactgatgtttaaccaattctagtgtggtttaacaaccttttctacatttacacccctttactctctccacttttaaaataaaatttctgtggcatttcctccatatacattgaacaccatattaggtgtagagtttttgctttaacactcaattatcatttaagaaactcatgagaggttggatagtctgtcatatttgaccttatttttactcattnttgatgctctttcn

SEQ ID NO: 102358 - DNA, 383 bp, Homo sapiens
caccttctcctgtgtcctcacatgagaggtgtggggtgggaggaagaaaaaaggcacccaagctcactgatgtttcctcttataaggacactaatctcatcatgagggtgccacctcatgacctcatctcaacgaaatacctcccaaaggccccatctccaaatactgtcacattgggattagagcttgaacatacaatttttttctttggtggggggggccacaattcagtccaaagcaagtaagaaataacacttaaaggacaggtgcaatgacacctgtaatcccagcactttgggaggccgaggcaggcggatcacctgagtttaggagtttgaaaccagcctggccaacacggcaaaaccccatctctgctaaaaata

SEQ ID NO: 102359 - DNA, 389 bp, Homo sapiens
  misc_feature (1)...(389): n = a,t,c or g
actccttgggatcaaagcctctcggtttgttgtctctcagccctgtaaagtggttcaggatctttgggaaggaaaggaataaggtttggggcaaggatgggggaacagacagaaaccaaagcagctctgcttttaaacacttacaaagaggagattctgatcccaagcaaaacaaaataaaagcctgtagctctaaattttatttgagaaggtgtgtcaaaaggagcttccttcttataaaaaaaaaaaaaaaaaaaaaaaaaaaaaaaaaaaaaaaaaaaaaaaaaaaaaaanngggggggggcccttttaaaaaaatcccgggggggcccccaattccccggggggggaaaaaatttttttttttttaaaaaaggaaaaaaaaaaaa

SEQ ID NO: 102360 - DNA, 352 bp, Homo sapiens
  misc_feature (1)...(352): n = a,t,c or g
gtgtgtgtgtgtgtgtgtgtgtgcgcgcgtgtatatatatatagtgtatgtgtatatatgcatatacacatatatgtgtgtatacatgtatatatgtatatatatacatgtgtatatacacgtatatacatgcgtatacgtgtatatacgtatacacatgtatatatgtatatgtgtgtgtatatacacatgtatatacacatacatatacacacacacatacaagcactctgtgtactatcttcacaacttttatataaatccaaaactactgcaaagctaaaattttatttaaaaattatgtctgggccaggcgacannnnnnttnttnatacatttttttaccttcttg

SEQ ID NO: 102361 - DNA, 331 bp, Homo sapiens
  misc_feature (1)...(331): n = a,t,c or g
tttaaatacagaccagagaggaagttctctttggaagctttggagttttgccacattattttaactcttttgccacattgtattactatctaaacctctttcaatcttttaactggaatgcctagaatcctgtctccctactctcctctgctatcactagagaatgtagagaatggaaatggctgcctttatgcaacaatttcccaggagctgggccaaagaaggtggtaaagaacaggttgtgtgtgtgtgtgtgtgtgtgtgtgtgtgtgtgtgtgtgtgtgtgtgtgtgtgtgngagagagagagagagagagagagagagagagatg

SEQ ID NO: 102362 - DNA, 843 bp, Homo sapiens
  misc_feature (1)...(843): n = a,t,c or g
ttttttttttttgtgagatggagtttcactcttgttgcccaggctagagtgcaatggcgtgatcttggctcactgcaacctctgcctcccgggttcaagcaattctcctgcctcagcctcctgagtagctgggatttcaggcatacgccaccatgcctggctaattttgtatttttagtagagacagggtttctccatgttggtcaggctggtctcgaactcccgacctcaggtgatctgcctgccttggcctcccggggtgctgggattacaggtgtgagccaccacccccagccgcctctatgctttttgtttctttgatatatctaaacttaaggtcagaacagaaattcatgtgctgaacagaatggattctttttgcagtaccaatccaattgaatcctctttttattttcctgcgtccttaccagtcactttgatagtgctaactaacctacactatgggggttattcatgaattaagtatgataaaaaaaaaaaaagaccttgaaaatgttgtgtaccctgtggatttgaggcttattactaccacctggctggataaaaggtcaaaaccttcaatcacttagggggactggaactttggtaaaatacacttatgatcctactgggccnnnnnnnnnnnnnnnnctgctttcctaaatatgaggcaatagaaatttataatttgagcctacagtaccccttgttttagctcttatcacagctggcaactggtagtgattttttaagaatgaaaatccgctcnnnnnnnnnnnnnnnnnnnnnnnnnnnnnnnnnnnnnnnnnnnnnnncctnctccccacggcggcggaatattca

SEQ ID NO: 102363 - DNA, 344 bp, Homo sapiens
  misc_feature (1)...(344): n = a,t,c or g
gtttcatgcccatcgtcctagaattaattcccctaaaaatctttgaaatagggcccgtatttaccctatagcaccccctctaccccctctagagcctaaaaaaaaaaaaaaaaaaaaaagggggacggggccgggaatcccaaatttttgaatgggaaatccggaaaacccccgcaggttcatttaaatggggcttggggccccatccaaatttttttatttaaaacatggtttggcctttttttatgaaacaaaccccctttaagttaaaatttgggccagggaccctcggaactataaaattttttaaaggactaaaataaaggcccttctttttttgggcn

SEQ ID NO: 102364 - DNA, 392 bp, Homo sapiens
  misc_feature (1)...(392): n = a,t,c or g
cgacttattttatagaaatactaagtaacagagaaatttgattctttatgaagtgaaaaaaatcaaatttctataaaataatactaagtaacagagaaatttgattctttatgaagtgaaaaaaatcagggaaaaaactatgatcccattcttatttgataaatatacatcaaaatgttaacagtggctagagatgggtagtgagaactcttgaatatgtaccttttttgagatgggggtcttgctgtataaccgaggctggtctcaaactcccgggctcaagtaatccctccacctcagccttccaagcagctgggactaaaggtgcacaccaccatgcccagccaattttatttattttatatgtgngtatgtttgggtgtgtgggtatg

SEQ ID NO: 102365 - DNA, 381 bp, Homo sapiens
ggggtttcgccatgttggccgggctggtctcgaattcttgacctcaggtgatccgctcgcctctgccttccaaagtgctgggattactggcatgaaccaccatgtccagcccattgtggaatagtctttaaacatatttgctcctgcttttttttttttcaagtatcatcacttcaggtatcccttagggcattttccctgactgtgccttaaaaaaaataataatggtttcttacagttggccagggacccactggggatggggagggggcacaaatggtctttaaaaaagttcaaaacctcttcaaagggaaaaacaatcaaattgaccagttctcggggaaaaaggcaaagcgatttcggaagcaacccccacccaag

SEQ ID NO: 102366 - DNA, 384 bp, Homo sapiens
  misc_feature (1)...(384): n = a,t,c or g
ctgaaatattatacggcggatgagaacggcaaaactagtcgccttcttccacagcgcccttctgatgaatgtggtgctggtgtgtttatggcaagtcactttgacagacattattgtggcaaatgttgtctgacttactgtttcatcaaaccagaagaccagtaactgtatgagttaataaaagacatgcactcccgctaaaaaaaaaaatagaaaaatcttgaattcagatagaaatgctaatgccaacaccacggagcctcttcccgaaaagacacaagagagcctgtgagaatnctacctttggtccgctccccactgccaaatgcttgaggcgaggtccaagcacatcctgncaacatgcattgccctggatttctaccc

SEQ ID NO: 102367 - DNA, 344 bp, Homo sapiens
aggaggcctatgttgtgggtgcatgaaccccattttgagtaacaaggctatcaagtcagagaataaatacgcattgcttttacccacacagaacttgcgactgaaatgagaaaataggctgagtgtgatagctcatgcctgtaatacctgcactttgggaggccaaggcaggaggatcccatgagcccaggagttcaaaaccagcctgggcaacatagtgagactctgcctcttaaaaaaaaaaaaaaaaaaggggggccgctttaaagaatccctgggggggccaaagtttacccgggcttgcaagggaatagttttttccttatagggaggggaattataac

SEQ ID NO: 102368 - DNA, 440 bp, Homo sapiens
attaaaccttgataccactgcagtacaagtccggaattacccacgcatccgggagagctataaggtcagcttcctgagcgctctcgaggagtacactaaaaagctcaacacccagtgaggcgcccgccgccgccccccttaccggtgctcaaaataaacgtttccaaagtgaaaaaaaaaaaaaaaaaaaaaaaaaaaaaaaaaaaaatgggggggggccccttaaaaaaaaccccggggggggcaaaaattaacgggggtaaaaaaaaaaaaattttttttttaaaaggaagggaataaaaaacacatgggggatttttgaaaaaaaaccctttttttggggggggaaaaatttggcaaaacccccccaaaaaaataataggttctaagggaaaaaaagaatctcaaagcgagacatagccctaaaagcatcgcgggaa

SEQ ID NO: 102369 - DNA, 375 bp, Homo sapiens
atgggatctcactatgttgcccaggctggtctccaactcttgggctcaggtaatcctcccttcttggcctcccaaagtgctgggattactggcatgagccactgcacctggccattcttaatgagttaatttttgtctggtatggggaaagggtccaacttcattgttttgcatttgaatatccagttccaccaacatttgttgaaaagactattctttcccagttgaattatcttggcagaattagttgactgtcagtgttaagctttatttctgggttctcgattctattgattttttttttttaatttgactgaacgttggaaaaattattcatctggaatttaaacctactggggctggtgggcatgaccc

SEQ ID NO: 102370 - DNA, 407 bp, Homo sapiens
  misc_feature (1)...(407): n = a,t,c or g
gggcagtgttccattcgccttatctgagttacctatgtcagggccgagggaaatcttcccttttgcccctgaatgttggctgataatcactgacaacagacagatgaacatgtgaaaaggcatacgaacgtatttgatcatagtttcatgagacatgggagccttcagaacgaacctccacacatacaggggaactcgtctatgcttatgcttacgctcaacaaactacggacatccatgtacaaatattatgcacaaaaggggtgtcatctaatgcttatagactgtgtggggaaacccagtaaggctgtctttctggagtcttcttggcctctctgagcagacttccttcctgctgggaatggggcaggatcctctctggaatacggtgcttatgatctacagtn

SEQ ID NO: 102371 - DNA, 346 bp, Homo sapiens
ccaggctggtctcgaactcctgacctccagtgatctgcctgcctcggccacccaaagtgctgggattacaggcatgagccaacgcgcccgaccgcattttcaatgtaaaaatgttccctaacattagaaattatttttttccctcaaaataaactgataatctgtgtttgtcagctctggctgccataacaaaatgctgtagaccgagtgagttaaacaacagaaattaattttttcacagttttagagggcgggttctggttggggctctcttcctggcttgtagatggctgccatctcactatgtgcttatatgacctcttctgtgtgtgtacccagctctctg

SEQ ID NO: 102372 - DNA, 358 bp, Homo sapiens
aacatgatgcaactaacgcggtacaactctcctgtgattgtgattttctggattttacatgttctgaatttagactttaggactgggcatggtggctcatgcctgtattcccagcactttgggaggccaagtcaggaggatcacttgagcccaggagtttgatatcaaccgtggcactagagtgagaccccatgatatgggttggctgcgtctccaaccagatctcatcttgaattgtagttctcataatcctcacatatcatgatggggacccacgtagaggtaatggaatcatggaggctgttacctccatgctcttcttatgatagtgagtgagttctcacaagatctgatgggt

SEQ ID NO: 102373 - DNA, 384 bp, Homo sapiens
  misc_feature (1)...(384): n = a,t,c or g
ggccaaactggagaagaagaagaagaagacagggcgggctaagcggcggatgcagtacaaccggcgctttgtcaacgttgtgcccacctttggcaagaagaagggccccaatgccaactcttaagtcttttgtaattctggctttctctaataaaaaagccacttagttcagtctaaaaagaaaataaagcttgggcaaggcttcaaacttaaaaaaaaaaaaaaaaaaaaaaaaaaaatggctgggtgtgtgttaaaagtganaaagnanagnccggggggcgcgggggggggggtattgccctaaccccctcttatgggggcccctcttgggcatttgagtggggggggggggtccccccccctcctctttacctaagaaga

SEQ ID NO: 102374 - DNA, 356 bp, Homo sapiens
  misc_feature (1)...(356): n = a,t,c or g
gcgtgggaccctctgagccaggcgcgggatataatctcctggtgtgccgtttgctaagaccattggaaaaacatggtattagggtgggagtgaccggattttccaggtgccatctgtcatggcttcccttggctaggaaagggaattccccaaccccttgcgcttcctgggtgaggcatcacctcgccctgcttcggctcacagtctgtgggctgcacccactgtcttgcacccactgtctgacaagccccagtgagatgaacccagtacctcagttggaaatgcagaaatcacctgtcttctgcgttgctcatgctgggagctgtagactggagctgttcctatttggccatctn

SEQ ID NO: 102375 - DNA, 368 bp, Homo sapiens
cagctactcgggaggctgaggcaagagaatggcgtgaacccaggaggtggagctttcagtgagccaagtggcactgcactccaacctaggtggcagagtgagactctgtctcaaaaaaaaaaaaaggggaatttggagggacccaattggccccttgaaaaagggtttaattaggggggcccacttccttagccaaaaaggggcttgggggggcccggcccctaatttaacgggctaacgggcataaaaggggggcgggcgcccttggaatttttctttagggaaccaccaggggctttaaatttttttgcccacccccccaaaaaaagaaaaagggcggtttataaaaaaaccgggttttaaaattt

SEQ ID NO: 102376 - DNA, 337 bp, Homo sapiens
  misc_feature (1)...(337): n = a,t,c or g
gtctctactaagaaatgcaaaaactggccggatgtggtggcaggcgcctgtggtcccagctactagggaggctgangcatnnanaancgccccttttctccaagcttaagtttttgtgaggggacatgatttcaggtggattcacaccgaggccaaagagcttcactttatagcttaagccggaacccaaccctttttttttagaaaccgaggctccctttcattacaaacgtctccgggccacatctgctgtggctagtgctaacatgatttcgcgcgctgcttttttgagttactaataaaccttacgccgcacgggcccctgattttttttcca

SEQ ID NO: 102377 - DNA, 348 bp, Homo sapiens
attttctatttactagagacggggtttcactatgttggtcaggctggtctcgaactcctgacctcgggtgattcacctgcctcagcctcccaaagtgctgggattacaggtgtgaatcaccacgccctgcctgaaattcatgtattttaaggggcaaacaggaatcgtcttggttaaagcaaagggaataaagaattttctaaatagactaagagcaaaatccaagtgcttgagaaagcacagcatacttgggggatggcaagcacttaatattggctgaaatggagtttccttttaagctaatgacaaaagtagttggctagatcaagaaataccactgtattatgc

SEQ ID NO: 102378 - DNA, 359 bp, Homo sapiens
aggacctagaggaaggcatccaaacgctgatggggaggctggaagacggcagccgccggactgggcagatcctcaagctggaccattccagtgaattcagcaaaaccagagaactctaccccgtgttttgacagatttaagagaaaatgcagtaaaattcagcttttaggaaaaaaaatagaaagtatagatattaaaagaaaacctggaaactttaaaatcatttatcattagctacccaggatcacaatgatgaggtcttggggaagggtgggggaagtgtgtgggggacttcaaaaactaatcagtgaagaaaagcagtttggccaatgtggagactaaaacatctttctaaatct

SEQ ID NO: 102379 - DNA, 381 bp, Homo sapiens
ctgaggtcaggagttcaagaccagcctggccaacatggtgaaaacctgtctctaataaaaatacaaaaaaaaaaaaaaaaaaggggattgccaaaggggaaacccccttccttaattttttgtttggaacatttttaattaaaaaaattaagtaaaggtttttttttttgtcccctttttttatgggcccacttggggggacttaactttttttgaaaatggtttttaacgggttcaaaaaaggggaaaaaaaaaaattttttggaaggaaaaaaaaccctttaggccgggggattttggggggggggaggaaaaaaaaaaaaaaaaaaaaaatttgggtggggttggggggttccttcttgaatccccaccttttgggaa

SEQ ID NO: 102380 - DNA, 393 bp, Homo sapiens
  misc_feature (1)...(393): n = a,t,c or g
ggcgttgcagctcatgccagcacagacagggtacagggaggggctttcaagacccttctggcctttaatcagatggatcttttttttttttggaaagggagtttccctttgcccccgggttaaagggcgggggcccaatctaatttaatggaaccccccccctccggggtaaaagcaattttttttcctaacttccccaagaagtggggtaacgggaccccccccccggccccacttatttttggggggttaaaaaaaaagggggtttccccttgtggcccgggcggatctgaacccccggccccagggggaccctcccccctggcccccccaaagggcgggaataatgggcgggaccggctgcccccacccccggataaatttttaaaccan

SEQ ID NO: 102381 - DNA, 249 bp, Homo sapiens
gggcaatgttctgcctgttctgtacggggaaatgcgcgtggggtcacgcgtggtttctcaggagatcagcacggcagacgaaggggacggtggtcaggttgtggtgattggtcgctgatgcaaaatgttttatgtgaaaccgcctgcgggcggttttgtcatttatggagcgtgaggaatgggtaaaggaagcagtaaggggcataccccgcgcgaagcgaaggacaacctgaagtccacgcagttgct

SEQ ID NO: 102382 - DNA, 301 bp, Homo sapiens
gcacgaggagagagagagagagagagagagagagagagagagagagagagagagagagagagagagagagagagagagagagagagagagagagagagagagagatgccctttttgcttttttccctccgaggggggcgcgccccccccccgagatagagaggggggtttttgtgggggcgggctctgtgcgcgagatctatcccacactctctatattttttttctccccccccgcccacagagggagagagctccgctcgagatgtgtatcacactcactccaccttatatctcgcgcc

SEQ ID NO: 102383 - DNA, 322 bp, Homo sapiens
gcccgaggagagagagagagagagagagagagagagagagagagagagagagagagagagagagagagagagagagagagagagagagagagagagagagagagcggggcgcgccccccccccccctcttttttttagggagggggggggccctgcgggcgcacgcaatctctccccccccctttttgggcgcccccccctatatatatattttttttcacatgcgcgcgcgccccccacacagatatttgtgcgcgcagagagagacgcgccccgcgctctaaaaactcagtgtggggtgcgagagagggagacactctct

SEQ ID NO: 102384 - DNA, 321 bp, Homo sapiens
gcccgaggagagagagagagagagagagagagagagagagagagagagagagagagagagagagagtctcgcgccgtattccgcgcggggatctccgtgatcaattcccgcatccgctcgcgcgctccagagacagcttttgtgggagcgctgaccactttggcaggggtgttttcaacaaagtgtctgtggtgaccgaccctcccacacacagagtgacctccagcctggggggtggggtagaacgcgacctactcacgctctccggggggggcacttacgctccctggaagaatatgtgcgccacaggggaagaccaaa

SEQ ID NO: 102385 - DNA, 323 bp, Homo sapiens
  misc_feature (1)...(323): n = a,t,c or g
gcacgaggagagagagagagagagagagagagagagagagagagagagagagagagagagagagagagagagagagagagagagagagagagtctgcccccccccgcggggtgcgctaagggcgcgggttggggggagtgaccacaatatctctctgacccccacacgggggagggggcgcccgcccccttatgtgtgcgcccccccataaaaaagagcgcgcgccccgctctcagccntaacacacacgtgacgcgaaaaaacaagccccccccccacgtgcgtgtgggacacacgcggagggcgcgcgccttcgtgcacan

SEQ ID NO: 102386 - DNA, 345 bp, Homo sapiens
ttcggcacgagagagagagagagagagagagagagagagagagagagagagagagagagagagagagagagagagagtctcgcgccgaaatctctctcggggggggggtggtgtccccccccctctccaaaatgtgcgcatacatagtgggggccccgcgcgggggacgctccaccacataaagaagaagacctctctgacagatgtggggctggcccagtgagaccgggcgcgtatctcttgtggtgtggacaccccactcaccccccaggaggtgggcgtgagagaacactctgtgatatatataaaaaatagcgctctcttctcactctaaagagaggagcg

SEQ ID NO: 102387 - DNA, 326 bp, Homo sapiens
  misc_feature (1)...(326): n = a,t,c or g
gcccgaggagagagagagagagagagagagagagagagagagagagagagagagagagagagagagagagaaaagatatcttttctggggggggggcgcggcacccaattcgctatagagagaggcgtaatacaattctgtgggcggcgttatacaacggggagagtgagaaacacnnnnnncccnttgnntngcccccntggccctccccgcccctgtttttgcgtgggncgcggggggttttccttgcctgcgtccggcctggggcggtctgagtcttatttcgtngcttctcggagtcccgctggggagggtattggtggccg

SEQ ID NO: 102388 - DNA, 336 bp, Homo sapiens
  misc_feature (1)...(336): n = a,t,c or g
cagacactcctcccttcaagagttagaagactgaccaggcatggtggctcacgcctataatcttagcactttggtaggctgaggcgggcagactgcttgagctcaggagttcgagaccaccctgggcaatacagcaaaaccccatctctacnaaaaaaaaaaaaaaaaaaaattttgtgggcggnnnngnnnnnnnnnannnnnnnnnnnnnnnnnnngnnnnnnnnnnnannannnnnnnnnnnnnnanannnnnnnnanannnnnnnnaaaaaaanaannnannnnnaannnaaaaaaanaaataatacatgcccttctggggaaagacatgca

SEQ ID NO: 102389 - DNA, 344 bp, Homo sapiens
ttttaaaggaacaatttctagaaatgtagatacagtaattcaacaaataactaaagaaataactacatatatactatgtctatgtgtgtatgtgtatgtatatataatatatactgtgaaggaaaataaagggtgccatgaaaacatatcacagagtgttagggactgaattttgcctcccttctcgctacccaaaattcctgtgttgaagtcctaacccccagtacctcagcctgggattgcatttggagaaagggtctttaaagaagtaactaaggttggccgggcacggtggctcacgcctgtaatcccagcactttgggaggctgagactggtggatcac

SEQ ID NO: 102390 - DNA, 367 bp, Homo sapiens
ggcacgaggaagttattgacagtttcagtttgggaagatggaagcattctggagatgggtggagatgtttgctcaacagtgtgaaggtgcttgatacccctgagctgtacccttaacaatggttaagatacagccattatggaaaagagtatggaggttccacaacaaatcaaaactagaactaccgtgtgatccagcaatctcattgctgagtatgtatccaaaggaaatgaaatcactgtgtcaaagagacgtctgcactcccaggctcagcacgggaccactcacaatagccgggatgtggaacccacctaagcgctcgtcgatggattaggtggataaagaaaacatcgtgaattactgaata

SEQ ID NO: 102391 - DNA, 561 bp, Homo sapiens
gcctatttttttttaattgttttgtagagatggggtcttactatgttgcctaggctggtcttgaactcctagcaagtgatcttcctacctcccaaagtgctgggattacaggcatggagcccctgcacccagcctcaatttttattttctgttctttgatttccaagaaatctgttcagatgatagtctttttaccccacctcctcatttggttcagtgtgtgttgatgagcagggcttcagacccacatccatcactgataggaccacatgcagaggactctgaccctactgcagtcattatgaaaaccttccaaaccaaaataagaagggtagccaacaccaccaccacctagccccaggagtcctaactttagaaaaggcagagtgagctgtgcgcagcatgcatctgtaatcccagccactccggaggctgagatgggaggatggcttgaggccagaaggtcaaggctgtagtgtactgtgactgtacctgtgaacagccactgtactctagcctgggcaacataccaagatcttgtctctaaatttaaaaaaaaaa

SEQ ID NO: 102392 - DNA, 372 bp, Homo sapiens
ggcacgaggtctcctggtgcgccgttttttaagcccgtcggaaaagcgcagtattcgggtgggagtgacccgattttccaggtgccgtccgtcacccctttctttgactcggaaagggaactccctgaccccttgcgcttcccaagtgaggcaatgcctcgccctgcttcggctcgcgcacggtgcgtgcacccactgacctgcgcccactgtctggcgctccctagtgagatgaacccggtacctcagatggaaatgcagaaatcaccgtcttctgcgtcgctcacgctgggagctgtagaccggagctgttcctattcggccatcttggctcctccaggaagcccacaggacccgtctctgctgatggag

SEQ ID NO: 102393 - DNA, 360 bp, Homo sapiens
cggcacgagtgaaccttctcacacactgtattagtttgttcttacattgctaaaaaaactatctgagactgggtaatttatgaagaaaagaggcttaattggctcatggttccacagcctgttcaggaagcatggcttgggaggcctgaggaaacttacagtcgtagtggaaggtgaaggggaagcaggcacatcctatatggctggagcaggaggaagagaatgaagggggaagtgctacacactttgaaacaaccagttttcatgagaactcactatcgcaagaacagcaagggggaaatctgcccccatgatccaatcacctcccaccaggctcctcttccaacattgggaattaca

SEQ ID NO: 102394 - DNA, 407 bp, Homo sapiens
aaagtggtttggtttaaacgtccgggagtatactacggtcaatgctctgaaatctgtggagcaaaccacagtttcatgcccatcgtcctagaattaattcccctaaaaatctttgaaatagggcccgtatttaccctatagcaccccctctaccccctctagagccaaaaaaaaaaaaaaaaaaaaaaaaaaaaaaaaaaaaaaaaaaaaaaaaaaaaaaaaaagggggggggctttttaaaaaaatcctggggggggcccaattttccggggggggaaaaaaaattttttttttttttttgggggggtttttaaaagggggggggggggggggtttttaaaaaacgggggggggggaaaaatttttttttgtgttttttttgaagaaaaacccctttttgggggga

SEQ ID NO: 102395 - DNA, 377 bp, Homo sapiens
ctcctctgctgcagcagaggaaaataatgatgaaaagaaggaggaggctgaaaagacagaggatgacatggaatttggccttttcgattaaattcctgctcccctgcaaataaaggcttttttcacatctcaaaatataaaaaaatcggggggcccttttaaaaggacccctcgggggcccaaacctccccggggggcccaagataaaacctctttccatatagggagcctttttataacctgggccgggccgggggtttaacaccgggggggggggaaaaccggctccttggggattttgggaaagaacccttttttgggggggggcccttattgggccaaggtccctaaagggattaaacgctttagggaaattt

SEQ ID NO: 102396 - DNA, 388 bp, Homo sapiens
accacgcgtccgcccacgcgtccgctaagttctagatcggagcggccgcccttatggaaatcagttttgtataacttaaaataattaaataaatgaataaatccaaaaaaaaaaaaaaaaaaaaaaaaaaaaaaaaaaaaaaaaaaaaaaaaaaaggggggggggctttaaaaaaaaatttttgggggggccaaaaaaaacccgggaaaaaaaaaaaaattttttttttttaaagggggtaaaaaaaaaaacggggccccggccccttttaaaaaaattgggaaaaaaaaaaaaccctctgggggaatttttaaaaaaaaaatttttttttgggggggcaattttggccacacccccctccaaaaaaaaaagccctcttgagaaaaag

SEQ ID NO: 102397 - DNA, 188 bp, Homo sapiens
ccaacatgaatgggtgtgcatatcactcgaggctcttggtaaaatgcagactctggccacgcgcagtggctcacacctggaatgccagcactttgggaggccgaggctggcggatcacaggatcaggagatcgagaccatcctggctggcgcagggaaaccccgtctctattaaaaaaaaaaaaaagg

SEQ ID NO: 102398 - DNA, 378 bp, Homo sapiens
attgaatacataagatctgagagatgtgcttgattaattcagccttcctaagtgttgagggtaggttatttgactttttttaattgacagattaaaattgtatgtatttggccaggcctggtggctcatacttataatcccagcactttgggaggccaagacaggaggataacttgagcccagttcaagaccagtctgtgcaacatggggagacccctgtctctattaaaaaacttatttttaaaaatcatatatatttatggtatacaacatgatgttttaaaatatgtatacattggggaaaggccaaatcaagctaattagcatatgcattactttacatacttaacatttttttggtgataattaactttttat

SEQ ID NO: 102399 - DNA, 391 bp, Homo sapiens
ataaaatggggcataatcaaattttactgcttgaggacagatgcatacagtaaggatttttaggaagaatatatttaatgtaaagactcttagcttctgggggggttttgaattatgtgtgagccagtgatctataaagaaacataagcttaaagttgtttatcactgtggtgttaataaaacagtattttcacaaaatcacaacaaaaaaaaaaaaataaaataaccgggggggcccccttttaaagtaaccttgggggggccaaattttaggggggtttgaaaaagatattttttttctttttggggggggttttttaaatctgggccgggggcgttttttaaaacggcagggggggggaaattgtatccctggaatttttggaagaac

SEQ ID NO: 102400 - DNA, 392 bp, Homo sapiens
ggcgcaccagagaacccagccaggactctggcctttaccctgggggttgcttccaccctgcagcaggtgggatgaggtctgtgtgtgtgtgtgaaccatcattttttgatcatcatgaccaatgaaacattgaaaaaaaaaaaaaaaaaaaaaaaaaaaaaaaaaaaaaaaaaaaaaaaaaaaaaaaaaaaaaaaaaaaaaaaaaaaaaaaaaaaaaaaaaaaaaaataaaaataaaataccataaaaatataaaaataaaaaataaaaaacaaaaaaatatgtttgttgggggcgttgtttatattaattatgggggggggcccatcaaccgtggggggaatgattttatttttttcttttgtgtgggggatataataactcgcccgcccc

SEQ ID NO: 102401 - DNA, 398 bp, Homo sapiens
  misc_feature (1)...(398): n = a,t,c or g
tcatggagttccaaactgttgttttacagtgatagttattaatcgtatttgtagaaagccaaagcctttattaatacagatgggggagattaaaatgaaacctgttactgattatttagaagttactcccttttatattttaatttaggaatcatttctgtagttgttaattataaattataattacttttgcattttatttacagaaaacctgggagctttccttccaagtgttttctttaattagaatcacagaataaaactagtcaagaccagccatggtggctcacgcctgtaatcccagcactttgggaagttaaggcaggcagatcacttgaggctgggagttcgagaccagcctgaccaacatggtgaaaccccgtctctactaaaaatan

SEQ ID NO: 102402 - DNA, 1821 bp, Homo sapiens
cgcccgcttggcacgaggaaaggaatatggaaccagtatgaattaaaatttgtgttttcttcaacattccataacatcactaagaaataaaaaattataaaagctacatggttaaaaagtaccatgctggccaagcgtggtggctcatgactgtggtcccagcactttgggaggctgaggtgggaggaaggctggagcccgggagtttgaggttgcagtgagctgtgatcacaattgcactacagcctgggacgacagagtgagaccctgtctcaacaaaaagtacaattgtttgaaagaatgtatacatgttttttactttttagtgaaatatattgtttttaaacattccttggtagagagaatttttttgttggataaaagggaggtatttttgttaaggatatctgggcaccctaaaaatttcatacttttatgtccacttcattaccgtatggggaggaaaagttgctaccataaagtatgtggtttgtaggagctcctaaaataaaactcttcagttttccaccctgaagtcagcttttggtcataccagattatgtacatatgtagtgggttcatgccatacttttagaaggccagcagagggagcactactcaatgtacagtgtttactgtactgctgagaagactagtattttctatggctcagtacaaaatgaaaacaaaattaaatttcacaactcctcaaaacaaaaccaaaacaaaatttttcattttattcgtgggttcaggtttcagacatgctatttattagtgactgagcagattattttatttctgtgtacttttttgcctatatatgaagactactcaattaccctattttagagggttggtttgtttgtttgttttgcggcagggtctcactttgtcgtccaggctggagtgcagtggcatgattgcagcttgctgcagcctcaacgtcccgggttcgacggattctcccacctcagcctcccgagtagttcggactacaggtgtgcgccaccacacccagctaatttttgtatgttttgtggaaatgtggtttcactatgttgcccaggctggtcttgaacccctgggctcaagtagtcctcctgctttgtcctcccaaggggctggaattacagatgtgagccaccataccccgttagagttgtgtttttagatttttaagttattatggatacatcctagttgcacatatttttgaggtagatgtgatattttgatacaagcatataatatgtaatgatcaaatcagggtaattggagtatccattgcctaaagcatttatcatttctttgtgttgggaacattccaattccactgtcataattgttttgaaatatatagtaaatgattgttaactataattgccctatagagttacgttgtcagtcctacttagtggccctagcaaagaggaagaaacatagtaatttacgcaaattcccggtggaaaattagagaaagtttagagaactaaattagtgtaaaacttaaaagtatttcctgactataaattcctaccattaaaaacaaaaaagcacccgtgaacccacaaggataaaataatgtgtttgtccctgcccttccttgcatatcctgggtgaggctggttgatggtacattgttgtagaataattgcggaattttatttacctggaagtttgctgagaaaacaatgtctgaggtggtgtaagtttttggaaagcaaacatttgacagagttctcataattgattttcattttccaccctttattctgttaaagtttctgaaatattgcataaggccattctgaaaaaaaa

SEQ ID NO: 102403 - DNA, 349 bp, Homo sapiens
tagaagaacacttacctaaacaacaaaaataaggattaccaatcacctcaaaaatcagtttgctgatccaacactttacattaaacaggtgtgagccaccatgcctggcctaaaaaatatatattttttaaaaaataaagacaagggtctcactatgttgcccagcttggtcttgaaatcttgggctcgagtgatcctcctgccttggcctcccaaagtgctgggattacagacatgagccactgcaccaggccaagaaaaagtatcttaatgacatattttcatttgtgtttttcttcagccctctggatgccagctctccttcccacttggcagctccctgcagcag

SEQ ID NO: 102404 - DNA, 381 bp, Homo sapiens
cagataatatttttgaaactttgaaaagtagtatttgtctagattcaccttttattaccttttcctttttttcttttcctttttttttttttttgaaaagggagtttttttttggtaccccgggggggagggaaggggccccaattctaagttattggaacccggggctaagggaacccttcccctccggggtaaaaagaatcccccggcccaaccctcccgaggggggggaataaagggccccccccccctggcccagtaattttttggttttttagggggaaagggggttaaacctggggggccgggggggtttgaacccccggccctcgggggaccccccccccgggccccccaaaagggggggaataacaggcaaga

SEQ ID NO: 102405 - DNA, 433 bp, Homo sapiens
ggacggaacagaagtccaaaagcaaacagcaccgagtgtcaaggagagcacagcagagagcagaatctcctgaatctagtgcaattgaatccacacagtccacaccacagaaaggacgaggaagaccatcaaaaacgccatcaccatcacaaccaaaaaaaaatgtccgtgtaggacgctccaaacaagcagctactaaggaaaatgattcaagtgaagaagtaaatgtgtttcagggtagctctcctgtcgatgatattccacaggaagaaacagaggaggaggaagtttctacagtaaatgtacggcggcgaagtgctaaaagggaacggcgatgaacaaatgtaattaataactttctctgtgaaagctttggaaaaatctttttttttttttttttttgggccaactttggggtggaaaaaaccttttt

SEQ ID NO: 102406 - DNA, 442 bp, Homo sapiens
  misc_feature (1)...(442): n = a,t,c or g
cccacgcgtccggtgagatacagacaagcgtgtagtcatgaagagctccaccatgcagagagcaggtggataaagagttaccaatgaaaatcaaaagagaaattccaaagtggcagaagaaaagccaaattggcctggcacagtggttcatacctataatcccagcatcttgggaggctgaggcaggagaatcgcttgaggccaggagttcgataccagcctgggcaacatagtgagatacccatctgttcnnaaaaaaaaaaaaaaaaaaaaaaaaaaaaaaaaaaaaaaaaaaaaaaaaannnnaagggggggggcttttttaaaaaatcccggggggggccccaatttaccggggggaaaaattttttttttttttttttttagggggggaaaattaaagggcttggggtttttttgaaaaaaccccttttttgggggg

SEQ ID NO: 102407 - DNA, 413 bp, Homo sapiens
tcagagtaaaaatcccaagttctgtaggaccttctgcccaactacatgacctgacctccaaggctaatcctctacttctacagtttgaaaaaaattcaaaaaaagaagggtaaaaaagtgatagggtttacagatgaacaagattatttagcataagcacacagtctgaagccaaagtggcaatatctctttctaaagagttttcgtttcatttttcagacatttattcccatataaaatttatatatttcaaccacatggtttgcaacagtgataaaaagatgagtccctgctcttataaagttcctactcctaagccaggcgtgggaactgggatcacacctgtaatcccagtactttcggaggccaaggcaggaggatctcttgagcccaagagtccaagaccagcctgg

SEQ ID NO: 102408 - DNA, 398 bp, Homo sapiens
  misc_feature (1)...(398): n = a,t,c or g
cggacgcgtggggcacacacagaggaggataaacaggtgaagagaaacagaagcagctgaagggccaggaagtggatctttctagggatgtggcattctgctggatggctttttaaaatgggttttttcctttagggagaccgaataaactgtgttgtgcacctgcgnaaaaaaaaaaaaaaaaaaaaaaaaaaaaaaaaaaaaagggggggcctttttaaaaattccctgggggggcccaatttttgggggggggggaaaaaatttttttttttttttaggggggggcttaaaaaaccccccgggggttttttggaaaaaaccccttttttggggggggggaaattggggcccccccccccccaaaaatttaacccctgggggaaaaaaaaaatttg

SEQ ID NO: 102409 - DNA, 396 bp, Homo sapiens
cataaatattatactagcatttaccatctcacttctaggaatactagtatatcgctcacacctcatgtcctccctactatgcctagaaggaataatactatcgctgttcattatagctactctcataaccctcaacacccactccctcttagccaatattgtgcctattgccatactagtctttgccgcctgcgaaaaaaaaaaaaaagggggggccgttttaaaggacccctgggggggccaaagtttacgcgtgcttgcaaggtaatagctttttccttatgggggggcgaattatacgccagctggggatttttgggaaggaccctttcttggggggggggacatatggggacaacctccccccggagattaaacgctctgggggaaaaataa

SEQ ID NO: 102410 - DNA, 353 bp, Homo sapiens
  misc_feature (1)...(353): n = a,t,c or g
gctttgtttacctaatcaagcctgggcaatggcgggctcccctcccccagcctcgctgctgccttgcagtttgatctcagactgctgtgctagcaatcagcgagactccgtgggcgtaggaccctccgagccaggtgtgggatatagtctcgtggtgcgccgttttttaagcccgtcggaaaagcgcagtattcgggtgggagtgacccgattttccagctgggtgcggtggctcaggactgtaattccagctacatgagaggattgcctgaggccaggagtttgagaccagcctgaacaacataatagactgggagctccatgaggtccgagacaacctgaagacgcccagn

SEQ ID NO: 102411 - DNA, 459 bp, Homo sapiens
  misc_feature (1)...(459): n = a,t,c or g
nattgagnccattgagnaccctagtcagngnggnggaattcatcactcttccatggggcttttattctatttggtgagtttcttctacagccttgagttctgcttgttttgtatgagatgtcccttttttgttgtatgctacccaacatgtatctgtgttgcatttgagaatagagactttttcttttttttctttttttttttttttttgggctttgggaaagggtgtttatttttttcccggtttgaggggggggggacaaatttggtttaattgaaacttttccccctgggttaaaacctttttttttgcttaaccttctaagtgggtgggaattagggcccctggccccccccccttttaagttttgcttttttaagggccgcgggttcccctttttgccccggtttgtttttgtggccaatttgcttttaacctgttgcaaaaaaagggatggn

SEQ ID NO: 102412 - DNA, 492 bp, Homo sapiens
  misc_feature (1)...(492): n = a,t,c or g
nattgatncccatcggagagcgtcggaanncgncngcgngnntgngtttcgctgtctgccacccatttctagccgtagaacttttgcactttgtctaccctgaattccaggtactatggcgcaccatggcttacctggctggcttgtcttaggattgtatttgggggcctgagttcataattaatatataaacttgtgattttagagataattttgaccggggctaagttttttaaggaaaagaagtgagctgcttgcaagaataataagctggcaactgtgtacttgatgcatgggcctggcaccattcatgaatgtgatgtgagtgaggaagggttgataaattccattccagatgagctggaagaggaggnattggtttgttttgttttgttttttgagacaggctcgctctgtagcccaggctggagtgcagaggcaagatctcagctcactgcaaattctgcctcccgggttcaagcaattttcctg

SEQ ID NO: 102413 - DNA, 182 bp, Homo sapiens
ctcactccccttccaccctcagctccaccctcagtggatgataatctcaagacacctcctgagtgggtgtgctcactccccttccaccctcagcggatgataatctcaagaaactaaggaagaataaataaataatataaaaataaaatgaatactgcagtccttaaaaaaaaaaaaaaaag

SEQ ID NO: 102414 - DNA, 388 bp, Homo sapiens
ttttttagtggagacggggtttcaccattttggtcgggctggtctaaaactcctcaactctgggggggcactcacctcggcctttcaaagagctgggattacaggtgtgattacaggggtgagccactgctttgaagtgaacagagtctggactggaactcagtatttcttatgctatatcttaaaatcttagcccttattgcaacaaactacttttattttctaactttgaacatagagccagactgacatcagtctatccaggaaactgtccacaaggcaaaggaaacagtggttgttgattaaggttggaccaagtgctgggaggtggctttgcagtggctaattgggggaaatgctgaagtcacaaacagccttgcttctgctg

SEQ ID NO: 102415 - DNA, 391 bp, Homo sapiens
aagaagaaggtggcatgtttctagttggtatatgtttccatctttgtgataagatgatttaataaatctctttaaatactaaaaaaaaaaaaaaaaaaaaaaaaaaaaaaaaaaaaaaaaaaaaaaaaaaaaaaaaaaaaaaaaaaaaaaaaaaaaaaaaaaaaaggggggggggggggaaaaaaaaaattgggggggggggaaaaaaaagggggggggggaaaaaaaatttttttttttaaagggggggggaaaaaaaaaccgggggggggtttggggaaaaaaaaatttttggggggggggggaattggggggaaaccccccaaaaaaaaaaaaggggggggggggaaaaaaaaaattttggggggggggggggggaaaaaacggggga

SEQ ID NO: 102416 - DNA, 398 bp, Homo sapiens
aaaccatttacccaaataaagtataggcgatagaaattgaaacctggcgcaataaatatagtaccgcaagggaaagatgaaaaattataaccaagcataatatagcaaggactaacccctataccttctgcataatgaattacctaaaaaaaaaaaaaaaaaaaaaaaaaaaaaaaaaaaaaaaaaaaaaaaaaaaaaaaaaaaaaaaaagggggggggccttttttaaaaaatcctggggggggccaaaataacccggggggaaaaaaaaattttttttttttttttggggggggaaaaaaaaaccccccggggttttttaaaaaaaaacccttttttgggggggggaaatttggggccccccccccccccaaaaattaacggccttaagaaaaaaa

SEQ ID NO: 102417 - DNA, 363 bp, Homo sapiens
atttataaatcaaaacctgggtttccttctctgacatttttttttgtgggtttgattttcgggtttttttttttttggcccaaacccgggggggttcgccaaaaaaaaccccaaaaatttccaaggcccggggccattcttttttaaaggccgcatttcaaaaccatttttttttcgggggggcctttttggggccggcctgccggggggaaaaacttttttccgggccaatgttcctttctcccccaaaaaattttggggggggggggtgatggggccccccccccccggaacacggggggccaaaaacccccggcggggccccttggtaagggggggggttttcggcttggtctaaaatag

SEQ ID NO: 102418 - DNA, 392 bp, Homo sapiens
aaacattctactactcactctcactgcccaagaactatcaaactaaaaaaaaaaaaaaaaaaaaaaaaaaaaaaaaaaaaaaaaaaaaaaaaaaaaaaaaaaaaaaaaaaaaaaaaaaaaaaaaagggggggcccccctttaaaaaaaccctgggggggcccccattttccccgggggggaaaaaaaaattttttttttttttgggggggttataaaaacccccccggggtttttttgaaaaaccccctttttttgggggggggccttttggccccccccccccccaaaaaatttcccccccgggggaaaaaaaaaattttttggggggtggggggggaaaaccccccctttttcttttggtggaaaaaatttcccccccaaaaaaaaaaat

SEQ ID NO: 102419 - DNA, 355 bp, Homo sapiens
attttatttttttggcagagacggggtcttgctttgttgcacaggctagtctcaaactcctgggctcaagtgatcctcccacctcggcctcccagagtgctgggattacaggtgatttattttaaatgatatagttgcttaagcatttttgttctgtaagttttttacttttcgtagggaaggatggcattgctaatttcttctcagatagacagaatatgtgccatgtatttaagagttatgacacaaaccagctacagaaacagaatttctcatcccagaattttcttgttttttattattattattatcatttttttcctttacaaattgtagtttagaaaagtttaactcc

SEQ ID NO: 102420 - DNA, 363 bp, Homo sapiens
  misc_feature (1)...(363): n = a,t,c or g
tattctcaaacctaaaagtgcccctggcacatggggtgtgctctataattacctatgaaatgatttaatgaagggttgaatgaagatgagtacataactacaagaacaccaaaaaaaaaaaaaaaaaaaaaaaaaaaaaaaaaaaaaaaaaaaaaaaaaaaaaaaaaaaaaaaaaaaaaaaaaaaaaaaaaaaaaaaaaaaaaaaaacacaaacaaaaaaaaaaaaaaaaaaaaaaaaaaaaaanaaaaaaaanaaaaaaaaaaannntttgggggggggggtttttttggttgtantctttnnnccctttttattctttagaaaaaaataaaattgttgtaaaaagggtgagggtggggggg

SEQ ID NO: 102421 - DNA, 399 bp, Homo sapiens
ttggggaaaaagggaatggagagttggtgtttatggggacagttttagtccccccccgccccgcttaccccaacttgaagctcagagtcttagttgtacaagatgaaaagagttctgaagatgttttactttaaataaatgtctattgtgaaaaaaaaaaaaaaaaaaaaaaaaaaaaaaaaaaaaaaaaaaaaggggggggggccttttaaaaaacccctgggggggccccattttcccgggggggggaaaataattttttttttttttttggggggggataaaaaaccctcctggggttttttggaaagaaccctttttttgggggggggcaatttggggcccccccccccccgaaattttaggcgcttgggggaaaaaaaaatttttttggggggg

SEQ ID NO: 102422 - DNA, 359 bp, Homo sapiens
aaatgttctgactaggagtggttattgactgtaactacacaattaaaattgtttgtatcgtacaaaaaaaaaaaaaaaaaaaaaaaaaaaaaaacccccatataaaaaaaaaaccctaagggggcccaactttccccccgcggggcccccagcacccctccccctctcagggggcgaaaaaaagccctctcggggccttttaagaagaccccccactctggggggggccgcaaagggcccccccccccccccgaaattaactcccctccggaaaaaaaaaatattttaagggtcaagtggggtaaccacaccccatcacctccgcgctggagcaatcccccccctcaccccaaaataac

SEQ ID NO: 102423 - DNA, 362 bp, Homo sapiens
ataaatattatactagcatttaccatctcacttctaggaatactagtatatcgctcacacctcatatcctccctactatgcctagaaggaataatactatcgctgttcattatagctactctcataacccccagcaccctctgttagtgccgcaataaatgctcattcttgaaaaaaaaaaaaaaaaaaaaaacaaaaaaaaaaaaaaaaaaaacaaaaaaaaaaaaaaaaaaaaaaatgataaaaatttagaaagggaacggatgaaaaaaacccctacaacacaaaaaaaacccaaatttggggggggggggcgcttaaaaaaacaggggggggggggggagatatctttgtggggattt

SEQ ID NO: 102424 - DNA, 363 bp, Homo sapiens
agaggacccaaagacttccccaaagccaaaaatcatccaaactcggcgtcctggcctgccaccctccgtgtccaactgagctgcctgctccttctcgataatagccgtctcctctttatcatgctttttccccctgttgtttgtcaaaaaaaattgcctttaaattcaaaaaaaaaaaaaaaaaaaaaaaaaaaaaggggggggcccttttaaaaaaaccctgggggggcccaattttaccgggggggggaaaaaaaaatttttttcctttaagggggggaaaaaaaaacccacttggggatttttggaaaaaaaccttttttttggggggggaaaaaaggggccccccccccccccaaaatt

SEQ ID NO: 102425 - DNA, 411 bp, Homo sapiens
cccacgcgtccgaccataattacccccatactccttacactattcctcatcacccaactaaaaatattaaacacaaactaccacctacctccctcaccaaagcccataaaaaaaaaaaaaaaaaaaaaaaaaaaaaaaaaaaagggggggggcccttaaaaaaaaccccggggggggccaaaataaacgggggggggaaaaaaaaaattttttccctaaaggggggggaaaaaaaaaccaccgggggaattttggaaaaaaaacctattttggggggggggaaaaatggggcaaacccccccaaaaaaattaaaggctttggggaaaaaaaaaaattttaaggggaaaagggggaaaaaaaagcggaaaagcctggggggggaaaagttttcttaacggaaaaaaaaaaaa

SEQ ID NO: 102426 - DNA, 361 bp, Homo sapiens
  misc_feature (1)...(361): n = a,t,c or g
cccggctcgagcggccaaatgtcctggcaccctggtgctcggtcacagtgacaagtacaagtaactatcacacatgccctttgtcatattggtgatttccactgtttttctcccaaactgcagcttatatttgttctcttaatactgttgagcaaaaacttttaatttttataaagtcgaatttatcaatgttttctttaatggtttgtgtttattgataataaagaacactttgcctaaaaaaaaaaaaaaaaaaaaaaaaaaaaaaaaaaaaaaaaaaaaaaaaaaaaaaannncgcccccctttttattaaaagggccctttaaaaccccttttaaaccccctggggggctttttttt

SEQ ID NO: 102427 - DNA, 341 bp, Homo sapiens
gtagcttccaattcaattcatcctaaagccaaagaaaatacagcaccacacacacacacacacacacacacacacacacacacacacacacacacacacctttttatggctatttttaagtgacattgagtgacttacttttttttataaaaaatttacaacatatttatatccccgcgcccacatactgtgtgaaaagagagcgagcgcggggagcgcatcttataaatattttgaacagaggtctctttgtgactgtgctcgagagagggtatcacacacccagtgagtggcgtatcgtgggtgtgtgtcttttttcacacggtgtgagagtgtgtaca

SEQ ID NO: 102428 - DNA, 309 bp, Homo sapiens
ccatgttggccaggctggtcttgagcttctgacttcaggtgatctgcccacctccgcctcccaaagtgttgggattacaggtgtgagccaccgtgcctggccctagaacttctcttgggagaaaactagatgtcattggtaggaacacagtcagctgttgcttaatgatggagacacattctgagaaatgcatcatcagatgatttctttgttgtatgaatatcatagagttcacacaacaatgaaatcgagagtttacataaacctagatggcttatatatatatttatttacatggttgttttccac

SEQ ID NO: 102429 - DNA, 365 bp, Homo sapiens
  misc_feature (1)...(365): n = a,t,c or g
gaactttctccactaaagtttctgacaaaggccttctccaaataagacccaatgagacatttgggattcattgcctcctactttctagaaacaaatagaaaaggcaggaagcacagctaacaacattggtggccagctgaaggagtttacacaccctaccatgaccctggtagagtagagacagcatgagttgaagcctgctactcagaatccactgcaactaagagtgtgtgtgtgtgtgtgtgtgtgtgtgtgtgtgtgtgtgtgtatgtatgtgtgtggngngngntntntgcanttacaatcacagatctgcctgccacacagtggagccctctcttggactctgaatgcatcgcccagca

SEQ ID NO: 102430 - DNA, 275 bp, Homo sapiens
catggggtttcattatgttggccaggatggtctcgatctactgacctcgtgatccacctgcctccacctccgaaagtgttgggatcacaggcatgagcaccgcgcttggccagaagtggcattcttaaattcaagaaattgggatggggagtattcacacattttataacccagaaattcaagcaattctggtgactacaaatgcattgttttggagaatagttgtaaggtggaaaaagaattaggaactcgacagatagtgagttttaacttta

SEQ ID NO: 102431 - DNA, 343 bp, Homo sapiens
ctttacactgaaagccttttaagtcaggttcacctattagaaagctcacttaaactgcagtaggaaaactgactgtaaggctggagaccaaaaggagatctcttaaaggtagaaggaaatgaatgtaaatgtgaagaagagaggcaatgccagctttgagatagagaacagaaaaaatatctgcaaaagacgtatctaaaaaagaactgttatccaaaatatgcaaacctggccgaacacggtggctcacgcctgtaatcccagcactttgggaggctgaggcaggcagatcacttgaggccaggagttcaccaggctggccaacatggcgaaaccccgtctt

SEQ ID NO: 102432 - DNA, 345 bp, Homo sapiens
ctctaggcccaccatccagaggcaacttttttttaaatttggtaaacttccttctggaaatttttaatacagaaacacatttgcacccacccacaaacacacacgtcattctcacacacacacattcgcacacacgaacacacatgcaattgcacatgcccccatgcacacacaagaaaacacaaactcataaaaacacacacacagccacacacacagaaaatatactgtaaagaaagagagaaaataaaaagttaaaaagttaaaaaaaaaaaaaaaacctgttaactccaggggagcaccacccacaaaacctccaccaactgacagtttttttttttgact

SEQ ID NO: 102433 - DNA, 332 bp, Homo sapiens
  misc_feature (1)...(332): n = a,t,c or g
gatttattcagaataaattttttgtgcttatgaagttgaaaaaaaaaaaaaaaaaaaaaaaaaaaaaaaaaaaaaaaaaaaaaaaaaaaaaaaaaaaaaaaaaaaaaaaaaaaaaaaaaaaannnnanaaaaaagggggcccccaaaaaaaaaggggcccaaaaaaaccggggaaaaaccccggggggggttttttaaccccccccctttttttgggccccccccccccggtttttttttggggggggggggggccccccttttttttttttaaaaaaaaaaaaaaaaaagccctcccctttggggggggggcttttttttttattgggggn

SEQ ID NO: 102434 - DNA, 316 bp, Homo sapiens
  misc_feature (1)...(316): n = a,t,c or g
atgatttttggtagagatgcggtctcactgtgttgcctatgttagtctcagactgctgggctcaagtgatcctcctggctcagcctcccagagtgctaggattacaggcaggagcctctgcatccactcccatcacttctgtaaattgcagtcaaggggcaatttacccagaagtaggaaccactggaagcaccattatagcagctgcctcttcaggaggggaatttgattctgtcctacaaaatgacatatgcatgtgttttttgacccagcaattccatttctagtagtctaagccaaagataacattggcaan

SEQ ID NO: 102435 - DNA, 398 bp, Homo sapiens
  misc_feature (1)...(398): n = a,t,c or g
gagctctggtgctgttcttccccctagaaaagaatctctagtgtggattctgcccagacaggctgacctgagaaaggcacagtggttcctccattccttccccatcatctgagtgttccagtatcccccatccctctcaatccagtcacctgcctattgacatctagctctgtttcccctgtcttgtccatgtctctaagacccagtaccagactgaactagcagcaagaaggacgaggaggccgggcatggtggctcacgncggtggtcccggcactttnggaggccgaggtgggcggatcacttgagattgggagtttgagaccagcctggccaacatggtgaagnccgctctctattaaaaatagaaaaatcagctgggtgtggtgggcacactc

SEQ ID NO: 102436 - DNA, 281 bp, Homo sapiens
  misc_feature (1)...(281): n = a,t,c or g
gcacgagagagagagagagagagagagagagagagagagagagagagagagagagagagagagagagagagagagagagagagagagagagagagagagaaaaaaaaattggggggggggggggggggcccccaattccctataggggggggtttaacacaaggggggggggggggttaaacaggggggggggggagaaaacannnnnnnnnnntnnntntnntttnnnttcttttntcctttttntcttcttcctcttttcttctccctcctttctcttc

SEQ ID NO: 102437 - DNA, 233 bp, Homo sapiens
gcacgaggagagagagagagagagagacagagagagacagagagagagagagagagagagagagagagatagagagagagagagagagagagagacatttttttctagttcgggaggggggccaaaagaaacaacacttttttttgaaacaggagcgcctaaagagggatatcaaaatatgcatgcgcgtttgataccaagtgctgtaccctttaaaaagagagggagggggg

SEQ ID NO: 102438 - DNA, 234 bp, Homo sapiens
gcacgaggagagagagagagagagagagagagagagagagagagagagagagagagagagagagagagagagagagagagagagagagagagagactttgttttttatagatggggagagggacatatagatagacaatattgttcctttttgtgccccggctggtgccattgtcctatgtgaaggcagtgtgggaggccataacactggtttctgtcccaagaagagcttctt

SEQ ID NO: 102439 - DNA, 286 bp, Homo sapiens
  misc_feature (1)...(286): n = a,t,c or g
gcccgaggagagagagagagagagagagagagagagagagagagagagagagagagagagagagagagagagagagagagngnntntctngtgttttctctctcttatagagcccccccccccgcgcggaggggataaaagcccgcgtgcgcccgtgtgatactgaaaagtgtctcatctcccccccggcccgggagagggcgagagacccgcttttatgtgcgctctctgacagagacgcgggggggccctcacacctgctgtgtgcagcggagcccgaccgttt

SEQ ID NO: 102440 - DNA, 302 bp, Homo sapiens
gcacgaggagagagagagagagagagagagagagagagagagagagagagagagagagagagagagagagagagagagagagagagagagagagagagcgcgcgcgcctttttgcgcgcggagaaaaaaaaaaacacacgggggggggccccccccttttttattatctttatatttaacactagggggagagagagagaggagacaaagtggggggtggactcatacaccctctctcgccccccctgtgtctctaaaaaaaaattttttgtggcacacacactctctctcttttttatgtg

SEQ ID NO: 102441 - DNA, 343 bp, Homo sapiens
  misc_feature (1)...(343): n = a,t,c or g
gcacgaggagagagagagagagagagagagagagagagagagagagagagagagagagagagagagagccccgcgnttttttttttttttttttttttttgttgagggacccgggggggggggccctttttcggggggaaaaaaaaaaattttttttttgtgaggaagccccaaaagcttaagggaccaccccctttttttaaccccttgcaccaaggggggggtaaaactggcaaaaaaaaaaaaaatcccccttttttttttttttttttttttaacccccagaaaggaaggggcgaaaaaagggggcccacattttggggggccaaatgcaaaaaattta

SEQ ID NO: 102442 - DNA, 352 bp, Homo sapiens
  misc_feature (1)...(352): n = a,t,c or g
gcncgaggagagagagagagagagagagagagagagagagagagagagagagagagagagagagagagagagagagagagagagagagagagagagagattttttttttttttttttagagaaaaaatatctcttttccccaattggggaattaaaagggcgaggaggaggctctttaaccccacttttaacgggtaaatggaacccctgcccccctcccccccattaagcgttgagggggggcggcccccccccgccccggtttttttttttttgggggcgtaaactgggcccacccttgggggaggagtggcgcacaagtgcccgaggatggaaacccacaccttggaan

SEQ ID NO: 102443 - DNA, 340 bp, Homo sapiens
  misc_feature (1)...(340): n = a,t,c or g
gcacgaggagagagagagagagagagagagagagagagagagagagagagagagagagagagagagagagagagagagagagagagagagagagagagagagagagagagagacactcgcgcctttttccgcgagagagcgtgtgtgtagcgcgcgcggggggggcgtcttctccccccagggggtgatctcttgactttttttataaaagagggagttttgtggctctgcgcgcgggggtttttcactgggggggaatatatttgttcaaagagagaggggggggggggaganaaagggaatgcacacagtgccacacacatttgtaaaaaagacattg

SEQ ID NO: 102444 - DNA, 333 bp, Homo sapiens
gcacgaggagagagagagagagagagagagagagagagagagagagagagagagagagagagagagagagagagagagagagagagagagagagagagaggaacccccccggggggaaaaatattgtatacgtgtgcccccacaaaaaatactctcccctgcctgtgactctcttttatatgtgacacataatctctgtgtgtctcactcaacaccgaggggagagagatatgtcgctctctttaactcacgagagacacggtgtttttaggaagaaaaacacgcgcggggtgtgagaaactctcagacagaaaaagatgtacactctgtgtg

SEQ ID NO: 102445 - DNA, 309 bp, Homo sapiens
gcacgagcagcagcagcagcaacagcaactgagaaacctgcgtgacttcctgttggtctacaatcggatgacagaactctgcttccagcgctgtgtgcccagcttgcaccaccgagctctggacgctgaggaggaggcctgtctgcacagctgtgctgggaagctgatccattccaaccaccgcctcatggccgcttacgtgcagctcatgcctgccctggtacagcgccgcatcgcaaactacgaggctgcctcggctgtgccacgcgttgctgctgaacagcctggggtctctccatcaggcagcta

SEQ ID NO: 102446 - DNA, 355 bp, Homo sapiens
ggcacgagggtggattttggagtattttaaattttcaagttagggatattcaacctgtgtaggtatgcatgcacacactcacatacacacagacacacacacacacgcacacacatatattcaccaatgtcttatacaaataggattgtgtacttttgcaacttgcacctcccaagtcaataagtcttctatggctgaactttgaatggctgctcagtgcaccttggcgtagctggcccatcatttgagggattcttttctgacggttaaggcaatgagttctttatcactgcgtggggaggcggatagcgctgtaactgatgtggaatgtcaagaccgtgcagggaggcggaaa

SEQ ID NO: 102447 - DNA, 346 bp, Homo sapiens
ggcacgaggcaggatgctctggatctcctaaccttattatacacctgcctgggcctaccaaggggctgggattacaagcatgagccacggggcccaacccaatttgattattaacataatggagagctaacccactatgactttgcccattgtttagaaagaatattcataggttaattatgacatttttgatgacacacagtggctcacgcctgaagtcccggcactttgagaggccaaggcaggcagatcatctgaggccttgagttcaggaccagcctgacccacatagtgaagccccctttctactaaacatacaaagattatctaggtattgtggcacacg

SEQ ID NO: 102448 - DNA, 409 bp, Homo sapiens
ggtctcactttgccacctaggctggggtgccatgccacgatcacggctcactacagcctcaaccttccaggctcaagcaatcctcccacctcagcttcccaagtagctgggactactcactctaggccatgtcctgagattacccaaacagctctacagagaggtccacatgattaacaactaaggcttcctgccaaaagccagagaggaagtaaagtctcctgacaatagccatcctcccaccccaaagaggccttcagatgacttcagccttgccaacatcttgcctacaatgttatgaggaatccctgaggccaggaacaactctgcttaaggtgggctccttaaattttctggatggcacaaaactatgtgaggataataggattaaatgtttcattgtttttag

SEQ ID NO: 102449 - DNA, 369 bp, Homo sapiens
ggcacgaggctataggccttcgctccaacattaaaaatggcctagaccacttcttaccactaggcacacctacgccccttatccccatactagctatgatcgaaaccatcctcctacttgttcaaccgatagccctggccgtacgcctaaccgctaacattactgcgggccacctactcatgcgcctaaatggaagcgccaccctagcaatatcaaccattagccttccctctacacttatcatcttcacaattctaattctactgactatcctagaaatcgctggcgccttaatccaagcctacgttttcacacttctagtaggcctctacctgcgcgacaacgcctaataaaagaaatgaaaaaggg

SEQ ID NO: 102450 - DNA, 353 bp, Homo sapiens
  misc_feature (1)...(353): n = a,t,c or g
ggcacgagtggatcgcttgaggtcaggagttcgagaccagcctggccaacatggtgaaaccccgtctctaccaaaaatacaaaaactagccaggtgtggtggcccccctccttttatatcagcttctttgaaggtttacccctggcatatggttcccccgccttaaggggatcctcctttttctcaccgggaactcaggattgggtaataattagttctagggggttacagggctcgcaaaaaaaaaaagggggagctctccctttctaaaaaaaaaccggcacctttttggatttttttaaaggacctaaaaaaaccccttttcataaccccaatttttccaaaacccctan

SEQ ID NO: 102451 - DNA, 993 bp, Homo sapiens
aatctccaactcctcctccttcttctaagccatcaagtattcctcggaaatcatctgtggatctcaatcaagttagcatgctttctccagctgccctatcacctgccagctcatcacaaagacatgaaagctaaaaaagaaaacacctcaagagcttttggttttacttttttggtttttgttttttgtttttgttttttaaaaaattgataaactgtgcatacttcattcacaacagattttctatacattctacatttaaacagaagtacacagttactgttaaagatgcagtattatctctcagatatttgctttattactgttttttgtaaatttgtttgtcaggataaacttgatgtgttaggaattaaacatgtatatttaggtgccaaatatgattgttaaccatatgtaacttattaaatatgttttacagtttatctcagacttttacactaaataagcaatatttttaaatgaagtcttgaattagtgaaatcgtaaataacaaattaatttgaattcgttttgaactttttaggccaaaggcagcatgtaggaaactaacttttaaatgggtattgtggtagaatataactgtatatttttactgttactgcaatagcatctttaatgggatttttaggtgatatactgcatccttaattgtaattgagtgtagcaacactcatgtatcatgtgtagaaattaacacttgcagttaactgctaaaaaaaaaaaaactagaacaaattgtcagggctaagaaaaattccattaaccttattttaaaaggactggccatttataacaaactagcaatttttatttttctcaatgagcaggatctggaactcctaagccatttactcctacaccaaccccttcatcgaccccacaccctcctgatgctcagagctcaactcctagtaccccttcagccacccctactccccaagattcaggcttcacccctcagcccactttgtt

SEQ ID NO: 102452 - DNA, 344 bp, Homo sapiens
  misc_feature (1)...(344): n = a,t,c or g
ggcacgagattttttaaaaataacagcaatcttcgttttttgaaaaactatcataggccatctcaatctttatctatcaatattttccttctttcactttcttgataaagccccatattttgcttctgcttctatgttttttttttaaaccaaatgattactaaacagggagtgaaggtccaggtgtgggggcttatgcctttaatcccaggattaatctttgggaggctgaggcaggaaaatcacttgagcccaggaatttgagaccagcccaggcaacatagtgagacacgaatatctacaaaaatttaaaaaattatccaggcatggtggcacgagcctgn

SEQ ID NO: 102453 - DNA, 369 bp, Homo sapiens
ggcacgaggtttttttttgagagggggattgaccatgttggccaggctggtatacaactcctgaccttaggggatccacccaccccagcctcccaaagggctgaaattacaggcgtgagccaccacacctggcctaatttcatcttctaaagtactctccctaaaatactaaggagtcttgctttacaaactcagggaattccccccctttctgtaaatccacacagagggctgtacaaatccaaagttggcgctcttagctacttctataacatccctttgcttgagactatgaaaaaataagcgtcactggtgggacacaggtgcaatattaccctactctcttacaggggaatgaaaagggggatg

SEQ ID NO: 102454 - DNA, 373 bp, Homo sapiens
ggcacgagggtgggtggagtcagaggctctctaataagggaatcatattagttaagattaccagtaagaaaaaaaatagctgtaaactactccatattcaaagtacagaactggctggatgctgcggctcacacctgtaatcccagcaatttgggaggccaaggcaggaggatctcctgagcccagcagtttgagacgagcctgagcaatagtgaaaccccatctcttaaaaaaaaaaaaaaaaagggccagaacttttttttctacaggaacattttttttcaaattatcctttgtaacctaaaaagggagggtatcaagtctttcagttataaagtaaaataaaagggctttgctgttaaaatgcaaaacg

SEQ ID NO: 102455 - DNA, 342 bp, Homo sapiens
ggcacgaggaaactttactgaaaaaaatcactgacaaggggcagactaatttaaaaaaaaaacatacctatttattactgggtacccaggagcctttaaaatgaaaacccaaagataccggggaagttgaccatttttatgcttaggttcaacaaagtatggacagccatgtagaaataggactggaccaaaagggtttaacctaatgctaatcaactgagtggggaaacccaacaagacctgtctgtctgaattcttgttggcctctctgagcaaaacttcttcttctgggtatggggggggaccctctttggaatgggggtcttaagaccttgcgccaat

SEQ ID NO: 102456 - DNA, 365 bp, Homo sapiens
ggcacgagcaaaaaaatagacaaattggactatattgaactaaaatgcttctgcacagcaaaggaaacaatcagcagagtgaagagacctgtagaatgggagaaaatatttgcaaactcttcacctgagaagggactaatatccagaattaacaaggaagcaaaaaaacttaatagcagtgccatagcggctcataactgtaatcccagcacattgggaggccaagtcaggaggatcacttgaggccaggagttcaagaccagcctggggaacatagggagacccccccccccgatctctataaacagttttaaaattagctaggtataggggcatgcacctgcagtcttagctacttaagaggg

SEQ ID NO: 102457 - DNA, 405 bp, Homo sapiens
ggcacgagaagaccaacctgggcaacatggcaaaaccctgcctctacaaaaaaaaaaaaaaattctttttttttcgaaacagagtctcgcactgtcccccaggctggagggcaggggggcaatctgggctcactgcaatctttgcctcccgggctcaagcgattctcctgcctcagcatgccgggagccccaaaggggcaaagtggttctttgatgggctgagggctttgtcacctgctccacccctgagcgggagccccccccaaagtatttgacggaagggggggggtctccagggggaaattaggtagggttaacattattgggccctaacttttaacccttccccctacccatgccctgggccatgtaattttgcagggccctcctgtcacaggcaggaag

SEQ ID NO: 102458 - DNA, 355 bp, Homo sapiens
gccactggaggcatcttgcttctgctggatgtggtcagccttgcatatgagtcaaagcacttgcttgagggggcaaagtcagagtcagctgaggagctgaagaagcgggctcaggagctggaggggaagctcaactttctcaccaagatccatgagatgctgcagccaggccaagaccaatgaccccagagcagtgcagccaccagggcagaaatgccgggcacaggccaggacaaaatgcagacttttttttttttttttttttttttgggaaagggagcctcctttttcccccaaggggggactgcaggggttaattttgggtatgttggaaaccccccccccggggtacacc

SEQ ID NO: 102459 - DNA, 783 bp, Homo sapiens
gcggccgcgccccccaacgctccgggaggccccccgggcccgcagccggcgccaagcgccgcagccccgccgccgcccgcgcacgccctgggcggcatggacgccgaactcatcgacgaggaggcgctgacgtcgctggagctggagctcgggctgcaccgcgtgcgcgagctgcccgagctcttcctgggccagagcgagttcgactgcttctcggacttggggtccgcgccgcccgccggctccgtgagctgctgagggcggccggcgcccgcccggcgtgccggagaggagaaagggcccgactgcccgccggaccctgcacccagcgactgggccccgcgcgcgcccctccgcgagggtggaggcggcggctgtgtgcgcagggcccggcaccggacttgggaccctgtgcgtcactccaggccttgcctcctgcgggaggacagtttggcttcacttctctgaccccagcctcggccgtaaagtgaaagagaccggaccagcttcagctttcggactctggttcttggatcgtgtcctctccccctcgccgccctcttcccccaatctgagccattgcaggcctctgcctgctgccccctctctcctcgggatcgggtccccagagccaccatctcctgagcctcccaccccgctgcctgggccctgtggttgctgggcctcccacctcaaggaggggaaggttgtacagcccgaacccgtggagcaatgccctgtctggcctccaaaaccaaaataaaactgggtcactttaaaaaa

SEQ ID NO: 102460 - DNA, 418 bp, Homo sapiens
  misc_feature (1)...(418): n = a,t,c or g
ctgacaccatggctacttagacagatttatctttttcctagtttgttggaaaaaaagtattctccaatgttttcttgttttggtaatggtttaaagtgagcaaagaagaaagcaaaaaaaatcttcaaacatactttattattttaccataagctaataaagaactggaagcaggctgggtaacaacatagtgagacctcagctcttaaaaacagacagacaaacaacttagccaggaggtggtggtgggtgcctatagtcccagctacttgggaggctaaagtgggaggattgcttgaacccaggaggttcatgatcaggccactgcaccaaaacaaacaaacgaacaaacaaaaaacctgggtttgggaaggttgtagcancagcaataaaagaaagttgagttaataaatttagn

SEQ ID NO: 102461 - DNA, 405 bp, Homo sapiens
  misc_feature (1)...(405): n = a,t,c or g
ctccataacttttatgtggngagcaagaacctatgttggacctttatgtttcattgccttaagcagaatgccatttctcagatagtggatgatttctgaggagaaaagagtcttatactgtacaatagtagagttcttggaaacaaaaggccccatctgctggaaacttgccagataagaaaccatgaattagaagtagggttctgcgaggcgaanaaaaaaaaaaaaaaaaaaaaaaaaaaaaaaaaaaaaaaaaaaaaaaaaaaaaaaaaaaaaaatataatttgggggggggcgctttttaaaaaatttcttggggggcccaaatttccccggggtaggaaaatattttttttttttttttgggggggggttattaaaaaccccgcggtgttttttgtggag

SEQ ID NO: 102462 - DNA, 398 bp, Homo sapiens
tgagccacgcgccctgccaagttttttaacttttattggccgggtaactttgtaagagaggccagtattttttatagatgtagcatttttttcattgcttaaaaaagattctccttctctatataacttttcttttcttttttttttcccccaaaaggggaggctatcggccgggggggggggctaccccccggaaacccttccttttggggggccggggggtggggataaaccgggctgggataataaaccctcttggttttaggggggaaacccgtgcttttttccaaaacccaaaaaaaataatgttccccgtcttttgggggggccccttttcccccccttttttggggggggccgggcttaaaaggggggaaccccggagggcgttctttttg

SEQ ID NO: 102463 - DNA, 395 bp, Homo sapiens
  misc_feature (1)...(395): n = a,t,c or g
cggacgcgtgggttctaggaatactagtatatcgctcacacctcatatcctccctactatgcctagaaggaataatactatcgctgttcattatagctactctcataaccctcaacacccactccctcttagaaaaaaaaaaaaaaaaaaaaaaaaaaaaaaaaaaaaaaaaggggggggcctttaaaaagaaccctgggggggcccaaatttaacgggggggggaaaaaaaaaatttttttctttaaggggggccaaaaaaaaacctcctggggaatttggggaaggaacctttttttggggggggggaaatgggggcccaccccccccccaaaatttaagggtctgggggaaaaaaaaaatttttaaggggaaaggggggaaaaccacccccn

SEQ ID NO: 102464 - DNA, 400 bp, Homo sapiens
cccacgcgtccgaccagaaggaaggaatcgaaccccccaaagctggtttcaagccaaccccatggcctgcatgactttttcaaaaaaaaaaaaaaaaaaaaaaaaaaaaaaaaaaaaaaaaaaaaaaaaaaaaaaaaaaaaaagggggggggggtttataaaaaaaatggggggggggaaaaattttcgggagaaggaaaaaaaaaattttcttcttataagggggaaaataaaaaaaaccgggggggatttttaaaaaaaaacccttttttgggggggggcaattagtggaaacatcccccaaaaaaaatatgtgggggggggaaaaaaaaaaacttgtggaagtgaggggggtaaaaaaatttctattcttggggggaaaaaaaaattatttaaaaaa

SEQ ID NO: 102465 - DNA, 410 bp, Homo sapiens
aaccattaaccttccctctacacttatcatcttcacaattctaattctactgactatcctagaaatcgctgtcgccttaatccaagcctacgttttcacacttctagtaagcctttacctgcacgacaacacataaaaaaaaaaaaaaaaggggcggccctttaaaaggatccttaggggggcccaggattacccgtgcaggcaacgaaatatttttttccttaaggggagccgaataaaaagagacctgggaatctttggaaaggaacctaactttgggggggggacaaaatgggacaaattacctacggaaatttaaggctctagggaaaaaaaaaaatttttaagggtataaggggtaaaactacctcgaaatcctggctgtttgagagttttgtttacttgaaatg

SEQ ID NO: 102466 - DNA, 2152 bp, Homo sapiens
attggcacgaggggcagaagtcttaggatacggctcgcacagtcgtggtagggttccaggtgcattagtggggcagggggcgggccggctgttcacagagcacccaggttcctcaccagctactctggccatatatcccacaccagaaggaacaagtgtggctgtgtccatctctgctcccccaaaggcccgctctaggccttatcctccctctaggtcctgccacaacctgtccctggctggctccagcgtcctcgtccctcctgggcctgtgcaccggtgggtggggcgcccatagcactgccggtaaaggagcctgcatgttcaggcccctcgggggattggggggactggggaggcgcagcctagacccaattgcttgcccccatgaggctagcactaataggaaacccttttttgttgtcatttaatgtctttattcctgcctttaatatggggaggaaggttccataagctacatgtttcctagttaagctctttcctattgtgtttatacagttttgtttgttatactctttgcaccttaaacccccaccactccccgacactattgccttcccagcatggctggagtgggaagaggcttgggccccgggggaatggttagggggactgaacccctctgaccttatgaggcccatggcactggggcagggagctggggacattttaatcatcaataaacgaagcactttattctgtacagatttgggcaggcccaaggtgcccgagtgatctgaggatttataatccaagccacaccaccctggttgttctctgggcttggagggtacagtgccagcagcttccttgcccaattgatgttggagctgtagacgtacgctcaggcgctcctgctgtcctgggggagagaaggttcgcccctccccgaggaagaaggcttctggtcaggacccccaccccaaggctggggactccaggctcctgctttactgtagctctttttcttccttgcactccttgatctttgggcttccgtgatgtcctcagggtccccccctccctgttgctatttttaatctctagtcccagtgcctggcagctctttggagctggctcacattttcccaaaaaaagttgatctctcccagtgggctgtaggcagggtcctccatgggtttccaacccccatcactggcaccaggatctcccacaggcactggtggtgtcatcacctgctggccccactacagcctgagtaggcctgagtggccgtggccaggctgagacctgtcaggccatactgacaagcagaggtcagagacactggtggggagctggcaatgaaaccctgtcctgggacatgggtttcatgttcttgtacacttcccctctgggatcaggtgaggggtccagacagctgaccagacagcttgacagctggtcaagacggtcacgggagctctaggtgggcacaaccaacccctctcctgggaggcccctgccccactggggataggagcctgtgtccctggtgctaagcactctcttcacttgggccattgttggggggggctcctttccggccagaccacaaggccagaagcaataatggcacctcagcagttccagtatggataggggttcctgttttactagcttttacatctttttatttaaaacaaaacaacacaaaaaaacaatgtgcccccagatgtcagaatgaggcgactagggcaccatactcactttccagggctgggggaagggggacgcaggatcatcccctcccaaggagatctgtgggggtcccaccgtccatctggacttctcagcctgtttggctagaactcaggcctggagtctgggtctgccccctccccggctccttggggctctctggtctcaggccagctggcgatgggtggctagagtgatgaactcaagccctgtggccacagttctgggagccttcaaccctggctcatgctgccatagtctccacggtgcccttcacagagggcttggtagtggcagaatggccatgcccaggtgtgtgttgagaccattgacaactgctcgtgtacaggcaccccacagccccagagcatggggcacagcaggcatgcgagtgagaggatgaaggggaataaagtcagtacaactcgtg

SEQ ID NO: 102467 - DNA, 478 bp, Homo sapiens
  misc_feature (1)...(478): n = a,t,c or g
ntcatattgcctcggaccgcccganctgaggacctcgcacgcgcccggttttactgtgttagccaggatgatctcgatctcctgacctcgtgatccgcccgcctcggtctcccaaagggctgggattacaggcgtgagccaccgtgccgggcctatctttctttatggcagttctagcaaactgatatgaatatctttatgtggaaaactacctatagctctacatactattagaatagctaaaatccaaaaacttgataatataaatgctggtgaaaaaaaatcaagcaattgttgctggtactaatgcaaaatgttacagtgacagcgactttggaggagagtttggcaatttcttataaaactgagcataatcttagcatatcattcagcaatgtgtgcttgagctcttatccataantttaaatcttatgtccttatgaaattccacataaaaatggttataatgaccttattg

SEQ ID NO: 102468 - DNA, 382 bp, Homo sapiens
  misc_feature (1)...(382): n = a,t,c or g
tgagctgagatggcaccctgaggtacctcacttttcactttattccaaaaatgctttcctttccccctgcaggtgagaagatgacagaggaagaagtanacatgctggtggcagggcatgaggacagcaatggttgtatcaactatgaaggtaagaggtgaactgcgctttctcagagaaagcagccatatggggcaggtcaagtatagtgtctggggctttccctatccctggacttgggctccaaaaagagccaggaggcaaggtgcagggccctgcccagcccatcccaggagtgggaggtcagggcggtataacaggaaaggaagggggtagtattgtagagggtgggaaggaatgagaagtgaaataatggaatgtc

SEQ ID NO: 102469 - DNA, 392 bp, Homo sapiens
  misc_feature (1)...(392): n = a,t,c or g
tgccaatggcaacagctttgccacgaggctttccaacatttttgtcattggcaatggcaataaaccttggatttccctgcccaggggaaagggcattcgacttactgttgctgaagagagagataagaggctggccaccaaacagagcagtggctaaattgcagtagcagcatatctttttttctttgcacaaataaacagtgaattctcgtttnnnnnnnnnnnnnnnnnnnnnnnnnnnnnnnnnnnnnnnnnnnnnnccttttaaaaaatccctgggggggcccaaatttaccgggggggggaaaaaaaatttttttttctttaagggggggcaataaaaaccccccgggggatttttggaaaaaaacctttttttgggggggggaaaa

SEQ ID NO: 102470 - DNA, 412 bp, Homo sapiens
tctcaggcttcaacatcgaatacgccgcaggccccttcgccctattcttcatagccgaatacacaaacattattataataaacaccctcaccactacaatcttcctaggaacaacatatgacgcactctcccctgaactctacacaacatattttaaaaaaaaaaaaaaaaagggcggccgccctttttttttttttttttttttaaaaaaaaaaaaaattcccccccccaaaaaaaaaaattttgggaaaaagggggaaactttaaaagggcgggggggggccccaatttttcagccaaaaaaaattctttccccccccaaaaaaaaaaaaaaaaaaagggggggggcctttaaaaaatccctggggggggccaaatttaacgggggggggagaaattaatttttttttct

SEQ ID NO: 102471 - DNA, 406 bp, Homo sapiens
agatattcaacaccttccgaaggtgaggtaggagaaagatactccacacccccaggggagacactagagagatactccacacctccaggagagactctagagagatactccacacccccaggagagactctagagagatattccacacccccaggagagactctggagagatactccacacccccaggagagactctagagcgatattccacacccccaggggaggcactagagagatattctattcctactggaggaccaaaccccactggtacttttaaaacatatccatcaaaaaaaaaaaaaggggggggccgttttaaggaacccttgggggggccaaggtttacgggggtggggagagtaaaagttttttccttatgggggggggtattaaacgctaggg

SEQ ID NO: 102472 - DNA, 502 bp, Homo sapiens
  misc_feature (1)...(502): n = a,t,c or g
tgaggangnnnnaattgacnnccntnngnacctgttccacctgccgtaccgacccacacgtccgctttcttttcctacaacaaatacttgagttcttttgagtttgcacttaatgatataatcagttataatagtaatttttaatattttcatagattgtttgcttctaccttgtgtaattttttaaattccatatttaggatgctctgtaaatattgaaaatgtgtcacattggatacatttttcttttaggtttagtttttactactgagacttatttatagtcttagtgctctattgccatttagaatatgataatcctcatgcctttaatctcagcactttgggaggccgaggcgggcggtttcaccgtgttacccaggatggtctccatctcctgacctcgtgatgagcccgcttcggtctcccaaagtgttgggattacaggcgtgagccaccgcacccggcgatttagtatttttttctaatagactatgttcan

SEQ ID NO: 102473 - DNA, 419 bp, Homo sapiens
ggctcactcacccaccacattaacaacataaaaccctcattcacacgagaaaacaccctcatggtcatacacctatcccccattgtcctcctatccctcaaccccgacatcattaccgggttttcctcttaaaaaaaaaaaaaaaaaaaaaaaaaaaaaaaaaaaaaaaaaaaaaacgggggggccccttaaaaaaaccccgggggggggcccaaatatagccgggaagggaaagcaaatttttttccttttagggggggcctaaaaacccccccggggggatttggggaaaaaaaactttttttgggggggggaacttgggggccacacccccaacaaaatattacccccgtgaggaaaaaaaaaaattttaaaggggaaggggggtgaaaactagccttttcctccggggctggaaa

SEQ ID NO: 102474 - DNA, 406 bp, Homo sapiens
cccacgcgtccgcaggagctttggctagttagaaggccatgaaaggcttcctagaaaaagtcattttagcaaagcctggaaaaaggttggcatatgtaagatcttagcaactatgtgaaatgaacaaatattgatcaataggaatgagccaagcaaagacatggggcagggtaaacactaggtttgaaggtctgaagggcaaaaccacagtctcacagaaaaaaaaaaaaaaaaaaaaaaaaaaaaggggacccctaaaaaaaaaaaccgggggggggaaaaaattaaagggtgagggggggggggggccttttaaaaatacaggggggggccaaaaaaaaggggggggtattggggaaaaggctttttttttggggggggcaatttttgggcccgcgcccccttt

SEQ ID NO: 102475 - DNA, 426 bp, Homo sapiens
  misc_feature (1)...(426): n = a,t,c or g
cattttgctgtttgagtgaggccacacaagagcatgaacagatgaaacaaatgctctactcctttttgctgctgagtaactgtggtggaggaagaaatggaaataatgaactgaaacgatatcattacatgtggcaacaaactcaggcaaggagtcttcttgggtccaaataaacattcagacccatgagactatcataggccatgggtggcttcattatacttaaaagggtataggacaaggaccacagcttacggcatggcagcaaggcattcctccttgttgtgtgccttgtgactgttcacacatcagttcatcagttcacatagccatccagagctctccagctgatggctcaaatgccaggagatgagatctctctgtgtgtgtgtgtgtgtgtgtgtgtgtgtgtgtgtgtgtagatna

SEQ ID NO: 102476 - DNA, 393 bp, Homo sapiens
ctgaggtcaggcgatacacccacctcggcctcccactgtgcttggattaagagcatgagcccctgcgcgtggcctggagcctaaccgatggtttatttagcatgtgctaaaaaagcagcaaggggataggaaagaaggtacctttttctgcaccattttattcaccctcctttaacactaacttctttattatcacccaaatattatactccatgaaaaacaccgtgagcttcacacatagggataagggccctgatgaggttcgttctccaacatcaaacccctttcattatccctttaaatactttatacaattctaaacacatgtgccagcaggggagccagcatgggtatatacatatatatacacacatacatacacacacacacact

SEQ ID NO: 102477 - DNA, 400 bp, Homo sapiens
ctattctagaacgcgagcggccgccttaatccaagcctacgttttcacacttctagtaagcctctacctgcacgacagcgcatattaataaaaaaaaacaaaaaataaaataatgggggggccctttaaaaaaaacctttggggggccccactttaaccggggaataaaaaaaaaattttttttttttattgggggccttataaaaaccccctttggatttttggaaaaaaacctttttttttgggggggaaaaatttggcccaacccccccccaaaaatttaagccttaaggaaaaaaaaaaatttttaaaggaaaaagggggaaaaccaactccaatatttttgctcttaaaaattttttcttttgggttactattaaaaaaaaattaatcccccggc

SEQ ID NO: 102478 - DNA, 399 bp, Homo sapiens
  misc_feature (1)...(399): n = a,t,c or g
cggacgcgtgggttcaattcctcttcttaacaacatacccatggccaacctcctactcctcattggacccattctaatcgcgtaaaaaaaaaaaaaaaaaaaaaaaaaaaaaaaaaaaaaaaaaaaaaaaaaaaatggggggggggggctttaaaaaaaaccctgggggggccaaaatcatccggggggggaaaaatataatttttttttttatggggggggtataaaaaaaccctggggggatatttgaaaaaaaacctttttttgggggggggaaactttggcccacccccccccaaaaaattaagggccttaggagaaaaaaaaaatttttgaggggggaggggggaaaaaactcccctttctgggggggggggaaaagatttcaaataaagaaan

SEQ ID NO: 102479 - DNA, 389 bp, Homo sapiens
gctcactagagcctggaacttctgggctcaagggattctcctgcctcaccctcccaagtagcgaggactacagacatgagccaccatgcccggctaactaaaaaaaaatttttttgttgtcgttttgcagagacagggtcttgccatgatacccaaaaagtatcacaacttattgaaatatactcattcccgtacaattgcctctcattatgaatggatctccacgcattaactatcattcatgctaataatctttgtttgtgactgacttaaccttgtcacctttccggcgctccccctctttataggttcttctctctaatttatctttaacattgattgtcattcctatttcctctatcctatccctttgtctacctgactgcggc

SEQ ID NO: 102480 - DNA, 453 bp, Homo sapiens
  misc_feature (1)...(453): n = a,t,c or g
natgaaccctgtaggaccggccatagatcncgttcgacccacgcgtccgggacaagtagcatccgtactatacttcacaacaatcctaatcctaataccaactatctccctaattgaaaacaaaatactcaaatgggcctaanaaaaaaaaaaaaaaaaaaaaaaaaaaaaaaaaaaaaaaaaaaaaaaaaaaaagggggggggctttaaaaaaaaatcttgggggggccaaaaaaaaaggggggaaaaaaaaaaaaatttttttttttaaagggggggaaaaaaaaaacccctggggaatttttaaaaaaaaacttttttttggggggggaaaaattggggaaaaaccccccaaaaaaaaaaaaggctttgaggaaaaaaaaaaattttaaaggggaaaggggggaaaaaaaggtttaattttttgggggaaaaaaaatttttaaaaaaaaa

SEQ ID NO: 102481 - DNA, 407 bp, Homo sapiens
  misc_feature (1)...(407): n = a,t,c or g
acacaccgcacaatcccctatctaggccttcttacgagccaaaacctgcctctaccccctctagagcccnaaaaaaaaaaaaaaaaaaaaacccaaaaaaaaaaaaaaaaaaaaaaaaaaaaaaaaaaaaaaaaaaaaaaaaaagggggggggcccttttaaaaaaaaccctggggggccccaaattacccggggggaaaaaaaaaaatttttttttttttagggggggtaaaaaaaaacccccgggggattttttgaaaaaaaccctttttttgggggggggcaatttggccccccccccccccaaaaaaaaaaacccttgggggaaaaaaaaaattttttggggggagggggggaaaaaaaacttttttttctttgggtgaaaaaaattttcttaaaaaaaaaat

SEQ ID NO: 102482 - DNA, 437 bp, Homo sapiens
cctaagttaatagatacatgtgtaattttacaaggggttttaaaaataaagcagtgtataggaagcagggaaaattagtatctacctcttttcctatatgggagtaaatgaaagaaaaagcgatgaatgtcttaaagaacatgcaggggtgattgttccattgcaccccagcctgggcaacaaagtgagaccctgtctcaaaaaaaaaaaataaaaaaaaaaaaaaaaaaaaaaaaaaaaaaaaaaatatataaaattaaaaaaaaaaaagataaataataatataaattttttatggggggggtgggtcttaaaaaatctccttggggtgccctctttctcgacggaggggatattctttttttcttttatttgggggttgcatatttacccttcgtggtgttttgaaaaaaacatctctcttggggggggtgatt

SEQ ID NO: 102483 - DNA, 254 bp, Homo sapiens
caaccattaaccttccctctacacttatcatcttcacaattctaattctacagactatcctagaaatcgctggcgccttaattcaagcctacgttttcacacttctagtaagcctctacctgcacgacaacacataaaaaaaaaaaaaaaaaaaaaaaagggggggggcccttttaaaggacccctggggggccccaagtttacccgggtaggcgaggtaaaaattttttccttaaaggggggcgatttaaaaa

SEQ ID NO: 102484 - DNA, 378 bp, Homo sapiens
attgcaaccattaaccttccctctacacttatcatattcacaattctaattctactgactatcctagaaatcgctggggccttaatccaagcctacggtttcacacttctagtaagcctctacctgcacgactacccatataattgaaggaaaagcctaacaaagaaagacaaaaaaacgagggggccgcccgcacaaaaatccctggggggggcattgttttgagcggtgggcggagggaatcttttttcccttagggagggctataataaacacatcggggagtcttggggaaaaaccccttttttcgggggggaacatatcgcggacacacccccccttaattgacaggggctggggaaaaaaaaaactcttggg

SEQ ID NO: 102485 - DNA, 375 bp, Homo sapiens
atcagccctggggcctcctgggtggcaggggggcagcagctctcctccccactcacaggccctgcagtgctcatttggaattcctcccaagacccctggccacccagacccccccattcttcctaacactggcaataaaccctcaactgtgaccccaaaaaaaaaaaaaaaaaaaaaaaaaaaaaaaaaaaaaaaaaaaaaaaaaaaaaaaaaaaaaaaaatggggggggggctttttaaaaaattctgggggggcccccattttcgggggggggggaaaatttttttttttttttttgggggggggttttaaaaccccccgggggttttttggaaaaaacccctttttttggggggggaaaaaaaaaaaaaacc

SEQ ID NO: 102486 - DNA, 401 bp, Homo sapiens
  misc_feature (1)...(401): n = a,t,c or g
aaggattgaaacaaaaagaagtcattgtattcatctctctgtgtagcacatatgaactgcctgttaaaggttagactataaatctgtggatagaaacaatgttaatatatgaggctagaagaaaggaaaacaaatataccaatattaagaaaaaattaataaaactagataaagagattaatgattaggaaataaaactagttttcattcaaatcttaccccctcccattttgtggaacatgagctaaatctctagatataatcaagaaaaattttaaaagagatatgaagaaaatgttttaaattaaaagttaatttttgccgggcacagtggctcacgcctgtaatcccancactttgggacgccgaggcagggggatcatttgaggtcaggagttcan

SEQ ID NO: 102487 - DNA, 427 bp, Homo sapiens
ctcggcctcccaaagttgtaagattaaggtttgagcttttgtgtccagcagatataatgtttttaaaagtttgagagttaatatgctctctggtgtgccctaggtcccactactcctattgccttaaaactcacgcagtacacatttgtcttccatgggcttcagttgtaagagaaccctttctactctttgctgttcacaagtctccttttaaacagagcttgttcccaatgctgttttgttttgccctctgccatgttcttccggccatcacctcctgtgcgccatccacgccaagcgcgtcactatcatgcccaaggacatccagctcgcccgccgcatccgcggagagagggcgtgattactgtggtctctctgacggtccaagcaaaggctcttttcagagccaccaccttttcaagtaaag

SEQ ID NO: 102488 - DNA, 414 bp, Homo sapiens
gtgatttctgcatttccatctgaggtaccgggttcatttcactatggaatgccaaacagtgggcgcaggtcagtgggtgcgcgcaccgtgcgcaagccaaagcagggggaggcattgcctcagtcgggaagtgcaaggggtcagggagttccccttccgagtcaaagaaaggggtgacggacagcacctggaaaatcgggtcactcccacccgaatactgcgcttttccgacaggcttaaaaaacggcgcaccacaagattatatcccacacctggctcggagggtcctacgcccacggaatctcgctgattgctagcacagcagtctgagatcaaactgtaaggcggcagcaaggctgggggaagggcgcccgccattgcccaggctttcttatgaaaacaaagcagccgggg

SEQ ID NO: 102489 - DNA, 374 bp, Homo sapiens
cggacgcgtgggctaacatctcagacgctcaggaaatagaaaccggctgaactatcctgcccgccatcatcctagtcctcaccaccctaccacacattcgaagaacccgtatacataaaatctagaccaaaaaaaaaaaaaaaaaaaaaaaaaaaaaagggggggggccctttaaaagaacccttgggggggcccaattttacggggggggggaaagaaaatttttttttttttagggggggggaaaaaaaacccccggggggtttttggggaagaacccttttttggggggggggaaaatgggggcccacccccccccaaaaattaaaggccttgggggaaaaaaaaatttttaagggggaagggggggaaac

SEQ ID NO: 102490 - DNA, 432 bp, Homo sapiens
tcttgcactccagcctggtgacagagcaagactccatctcaaaaaaaaaaattttataaaaatttttttttggggggacccaaacggggggcccctcccggggggggtttttttttggggccccaggggtcccccaactttttgaaaaaaaaagggggccccgtttgggtttttcctttctttggcccaaaaaaaaaccaaaaagggccttgtgctttccccaacctttggggaggcccccccggaaaaaaagcctttaaaagggggtcccttggaaaccggggggtctgttttcccccggacctccaacttgggttttttttccccctgggggggggatctctttttggccccccaaaaaccacaaggggagtggggaaaaatcctcttttccccgggtaaaaaccccccggggggggggggccctcgggg

SEQ ID NO: 102491 - DNA, 179 bp, Homo sapiens
aaatcgctgtcgccttaatccaagcctacgttttcacacttctagtaagcctctacctgcacgacaacacataaaaaaaaaaaaaaggggcggccgttttaaaggatccctcggggggcccaagtttacccgggcatgcaacgtcatagctttttccttatagggagccgtattataac

SEQ ID NO: 102492 - DNA, 297 bp, Homo sapiens
  misc_feature (1)...(297): n = a,t,c or g
agcccaacctcagctacatcatcgggaaggacacttgggtggagcactggcctgaggaggacgaatgccaagacgaagagaaccagaaacaatgccaggacctcggcgccttcaccgagagcatggttgtctttgggtgccccaactgaccacacccccattcccccactccagataaagcttcagttatnnnnnnnnnnnnnngggggggccgttttaaaggatccctgggggggcccaagtttacccgggcatgcaaggtaatagttttttccttataggggggcgtattaaaac

SEQ ID NO: 102493 - DNA, 350 bp, Homo sapiens
gcaggtttgttacataggcaatttgtgtcatggggttttttgttttttttttttggaacaaataatttaatcattcaggtttggaccccagaccccatccataatttttctaaatcttttccttcttcaaccttcaaccttcaagaaggcccaagggggggtggtggtccccctttagggatccaggggctttaataattaacctcccatttataagggaaaacatacagtattgggttttttgtcccaacataagttggctaaggaaaaggacttccacctccatccatgtttttgaaaaaaacaaaatcccactcttttttggggctgcaaaaaattccggggggaaa

SEQ ID NO: 102494 - DNA, 348 bp, Homo sapiens
tttcaccattgttggccaggatggtcttgatctcttgatctcatgatccacccgccttggcctcccaaagtgctgggattacaggcatgagccactgtgcccagcccttttttttttttttttttttggaggaaaattttttaaacctgggagggcggggttttcagggccccaaaataccccctttgctttccacctgggggaaaaaagggaacctctttttgaaaaaactgactttttaagggtaaaattcccgggggggtttgaacctcgggcccaaaaaaaaccccccgcccttgccctccacattgggaggttgggggaaaaaatttgtgccccgggttttaa

SEQ ID NO: 102495 - DNA, 370 bp, Homo sapiens
  misc_feature (1)...(370): n = a,t,c or g
caacaatccaaatcaaaccttcctctattcaatgtatgtgtcatactcacagccactcacaaatgttaaaagcagctgcaagtaatagaatcaagaaagtgaaaagacaacatgcagagtgggagaaatatttgcaaatcatgtctgataaaaaaacttttatcatatgtagagaatatataaagaattctgatatgtctgataaaaaaactgatatatattgagaatatataaagaattcttacaactcaacaataaaaagcaggcagatcatgaggtcaggagttcgagaccagcctggccaatatggtgaaaccccatctctactaaaaatacaaaaaaacttagcccgggcctgtggcacatgccn

SEQ ID NO: 102496 - DNA, 367 bp, Homo sapiens
  misc_feature (1)...(367): n = a,t,c or g
cagctactatattaatttgacctcccaattactattgtctcctggctgaaggcattctgatttatccaaaatccaatggctgtaattgtaactcataggttgaaaaacaaagatttctttataaaagttttaagtgagtctgtagtcccagatactagggaggctgaggcaagagaattgcttgaacctgggaaatggaggttgtagtgagccgagatggtgccactttctagcctgggcgaaagagtaacaccgaaaaaagttttcggtggagtgagatgctagggagcaacatttgtcacgtaaatcacatgtgtactctgaggcataaggcctagaaaatgacctgaattcctaanggtagatn

SEQ ID NO: 102497 - DNA, 346 bp, Homo sapiens
cgcggccgcgtcgacccaccatgcccggctatttttatgtgtttgtttgtttgcttatttattggtggaaatggaatttcatcatgttgcccaggctggtacagaacttctggactcaagcaatccccctcccttggcctcccaaaatgctggaattataggcatgagccaccacacccaaccccaatacatttgttgaaaaaaatgtgcatatataagtgaactcatgtagttcaaacccatattcaagagttaactgtattatcctttttctatagtactgaatttgatttgctaatattttgtgaaggatttttgtgttcttatttatgaaggatattagtct

SEQ ID NO: 102498 - DNA, 169 bp, Homo sapiens
aaaaaaacaaggctggaaagggcacagtggctcacgcctgtaatcccagcattttggaatgctgaggcgggcacattgcttgaggccaggagtttgagacgcctgccttggcctcccaacgtgctgtgattacaagtgtgagccaccgtgcctggtcgacgcggccccc

SEQ ID NO: 102499 - DNA, 368 bp, Homo sapiens
ctgacctcaagtgattcgccagcctcagcctcccaaagtgctaggattacaggctgaagtctctttactcttgattttcagctttatcagccaatgtcagttttatcagtcaatatactaaattatttgccaacgtaagactccgacaatgccattatactattcatacctcttactctattgtaataaaggaggtgtggtgaatatttaatatctttagatcaaagcctaagttctccaacctgtaaaatactctcttgggcctggggcatggtggctcatgcctgtaatcccaatactttgggaggccaagtcaggagaatcgcttgagcccaggagttcaagaccagcctgagcaacatagtgag

SEQ ID NO: 102500 - DNA, 361 bp, Homo sapiens
atggctgtggtcaatgaaactttattttcaaggacaggcagctaggctgtgggccatagtttgctgacccgtttcaggtaaattgttccttctgttcagttttatcaaagactctttttttttcttgttttaattaaaaagttttagagcaggacaaagactcttactttgatagtacatatagattttttaaattttattttcatttttagtaaagatggggtcttgctgtgttgcccagggtggtctcaaactcataggctccagtgatcctcatgccttggcctcccaaagtgctggaattacgggtgtgagccactgtgcccggccaaaataaatgtagattttgttgttgttaatt

SEQ ID NO: 102501 - DNA, 324 bp, Homo sapiens
  misc_feature (1)...(324): n = a,t,c or g
ctccactccttttctgttgggtacttaatatttacttagagatgtttagtagacaaaatttcttgacaaaaagaaaatagcattctcacataatctcagagttgtctctgatgaatgtaagttccccttttgattttcactatttctaggacaaagtttttgttctgtgttctccaaaaggtaagttnnttttttttttttttttttttttttttttttttttttttttttttttttttttttttttttttnnnnnccgggggggggggaggattttttttttttttttgtggccccccccccccctttttttttttttttttt

SEQ ID NO: 102502 - DNA, 414 bp, Homo sapiens
  misc_feature (1)...(414): n = a,t,c or g
gtaaatgtccctgcccccagaggtggagcctacagaggcaggcaggcctcctttagctctggtgggctccacccagttccagcttaccggccgctttgtttacctaatcaaacaactaactcggctatggcgggcgcccctcccctagcctcgctgccaccttgcagtttgatctcggactgctgtgctagcaataagcgagactccatgggcgtaggaccctccgagacaggtacgggatataatctcctggtgtgccactttttaagcccattggaaaagtgcagtattagggtgggagtgacccgattttccaggtgccgtctgtcaccgctttctttgactaagaaagggaattccctgaccccttgcacttcccgggtgaggcgatgcctcgccctgcttcggctcacn

SEQ ID NO: 102503 - DNA, 334 bp, Homo sapiens
  misc_feature (1)...(334): n = a,t,c or g
gtcagtcagagccttgggccagttggacagtccagtttccagtggggtcctgcacagatgggacacggtttaggaggaatcccgggctgcgggcattccttggcccagtggccagatttccggcacttgaagcaagatcctgggggaggaagttctagaggaacccctggcaactgtggttcaggcgtttggagttcttgtgtgctggagatgtggctggggtttgtctcacagtggaggcaaggaattgcacctcanaaatacattgctacttggctgccattactctattactgtacaccttgaaagcgaggttaattaagtcctgttgtgg

SEQ ID NO: 102504 - DNA, 333 bp, Homo sapiens
gggcagggtacataggggatgccagctgtatttgtttttatttaaagcaaaaatggcagaatgttaggatctgattgttgggtggtgggtacacgtatatttttgtgctgttttctgtattttgcagtattttatttttgaaaattaccaaaacaggccgaacacagtggctcatggctttaaccctggcactttgggagggcgaggcaggcagatcacttgaggccaggagtttgagactagcctggccaacaaagtaaaaacccatttctactagaaatacaaaaaaactataacaaaaatattttcggtgaattttttcctaccaaaaag

SEQ ID NO: 102505 - DNA, 179 bp, Homo sapiens
caattaccggcgtcgcccgcgtcctcctaacgctccttcacaagatggcaaagaggccaaggcaggtgaagcaccaactgagaaccctgctccacccacccagcagagcagtgctgagtaacaccaggctcctcaggcaccttcaccatcggcaggtgacctaaaggtcgacgcggccg

SEQ ID NO: 102506 - DNA, 356 bp, Homo sapiens
  misc_feature (1)...(356): n = a,t,c or g
ctggtctcgaactcccgacttcaggtgatctgcccgcctcggcctcccaaaatgctgggattacaggcataagccaccatgccaggccaataatgacatattcttaaagcctggcatgtaagtgctcactaagcgttagcaattgttgttgtttaaaaccttcctgtaggctggcagaggaggttcgtgcctatagtcccagcactttgggtggctgaggcgagaggttcacttgaggccacgagttaaagaccagcccaggcaacaacagtgagaccctgactctacccancacctacaaacaaacaaacaaaaccattatccgggtatggtgacatgcacctatagacctagct

SEQ ID NO: 102507 - DNA, 318 bp, Homo sapiens
gtgacctggagtgaaacagaatctacataacctaagcccatatactctgcactgtgtaaaggaaaagggagaaatgtattatacttgagacattgcacctaccccggaaggctggaaatacggaaacagcatggagttgcaagtcctctgaagacaatgagaggatttaggatgagcccgataggtgtggcagaccaaatggacatttctctaaattcaaggcggtattcaacggagtgcagtagtttggcttgtcagaaggcacgtagcctggcagacacaaacacttgtaggaaccatcggtggtcgacgcggccg

SEQ ID NO: 102508 - DNA, 369 bp, Homo sapiens
  misc_feature (1)...(369): n = a,t,c or g
gtaaaacccagcgataggtaccatcttatgcctatatttactgcagcttacccacatcagaactccacgtacaatgtgcccgtttcaacacggatggtcatggctgaggagtttaaacaaggtaagcgcttatccttatgctctgatttatacaggaaggatttacgtaccattgtagacccagtagtcagctgtgcaacttaaattgaagaaggattcactgaagtggattttggtgttcatttatttattacagnatatatttgagaactgacttcagaaaattaattccttttaggcaatgtgctctttataacatgttggaagattacgcacagttaacaccagtaagctggtttaagtgcatac

SEQ ID NO: 102509 - DNA, 351 bp, Homo sapiens
gtttgctaaggccattggaaaagcgcggtattagggtgggagtgtcccgattttccaggtaccatctgtcacggcttccctttgctaggaaagggaattccccgaccccttgtgcttcccgagtgaggcgatgcccctccctgctccatgggctgcacccactttctgacaagccccagtgagaggaacccggtacctcagttggaaatgcagaaatcacccatcttctgcgtcgctcacgctgggagctacaagatggagctgttcctattcggccatcttggaacctcttaactgttttttgttttttaatccattcagccaatctatgtcttttgattggagaattta

SEQ ID NO: 102510 - DNA, 346 bp, Homo sapiens
ctccctctgtcgtccatgctggagtgcaatggcatgaccccagctcactgcaaccactgcctcccaggctcaagcaattctcgtacctcagcctcctgagtagctgaggtcgcaccactgcactccagcctgggtgacaagactaaaaagctgtctcaaaaaaaaaaaaaaaaaaaaaaaaaaaggtttttttggggacccccaaccccccctttaaattaaattttttccaaaaaaaaaaataaaaaaaaggggttccctttgggggcccgggggggccttaaacttgggggttaaaggaatccctcctccccccccccccaaatgggggggaaaacggggggga

SEQ ID NO: 102511 - DNA, 360 bp, Homo sapiens
cttttttttaattatgcgtggggatggagtaccactctgctgtccaggctgtccttaaactcttgggtacacgtgatccttacaccttggcctcccaaggagctgggattacaggcatgagccattgggcctggcccagctttttgatattgtgaaaaacgctgcatgaatatcctttattcatttgaccattgaataccatagtgggtctaaaactggggctaaaatttagcttaattactcagctgcttaagagttttaaaagaaaatagtttgctgtagagaaaagtatacacaaaaaagttacgactatcctaaagaattcatatatctaagtatgtctaagaaaagaatacagaa

SEQ ID NO: 102512 - DNA, 357 bp, Homo sapiens
gttttttattaggcagaatccagatgctcaaggcccttcataatatcccccagtttagtacttggacttagggaacacaggaacctttaatagaaattggacagcaagaaagcgagcttagtgatacttgtgggccagggcattagccacaccagccaccactttctgataggcagcctgcactggcggggtgaattctttgccaaagtgatgggccagcacacagaccagcacgttgcccaggagcctgaagttctcaagatccacgtgcagcttgtcacagtgcagctcactcagcgtggcaaaggtgcccttgaggttgtccaggtgagccaggccatcactaaaggcaccgag

SEQ ID NO: 102513 - DNA, 343 bp, Homo sapiens
cttgataatgatgatctactacgggtattgacatacattacacttaccgcgtaggcagaccactctatgggctctttaaaattataccattttcagccttttgtaatggaaaaagtgaactcttttttactcacgagcacttaaatgccctattacttttgcatggccaggcgtagtggctcatgcctgaaatttcagcactttgggagcccctggcaggcggatcgcttgaggcctggagtttgagaccagccctcttaatggggaaacctgtctcgaccgaaaatacaaaaattagccactctcgtaacctggtttccaaaaaattaaaattaaaaaataa

SEQ ID NO: 102514 - DNA, 320 bp, Homo sapiens
gctgctcagcttaaagcacaagtaggaatcagaaccctttttactctttttttctccctgtctgcttgagccatcttttcctactctcaatccttgaggaacataaaaaatacataatttgaaaagaactgattctgtttatcaatagggaaaaaataatttcatttattttatccatactaagtttatctctttttgctgaaaaaggtatattaatattaatgtccatattaaatatgaacattagccaggcatcgtggcacgctcctgtagtcccagccacttgggaggctgaggcgggagaaccacctgagtccgga

SEQ ID NO: 102515 - DNA, 335 bp, Homo sapiens
tttgaccccggcacaagtaacacttgtttaaaaaagggggtgggggggggacgcccaagtgcgcgacttttctattttattaaaaataacataaagacaactgctcaagtttttttctcccaactcccgggcgtgaaactaagtactaaccctagatatgtatatatacacaaacacacacatgcacacagatgtagctttgtaaaactacggtagctcacacctgtaatcccagaacttttgtaggccaatgcaggcggatctgttgaggtcaggagttcaagaccagcatggccaacacggtgaaaccctgtctctattaaaaatacaaaatg

SEQ ID NO: 102516 - DNA, 351 bp, Homo sapiens
cttgagtcgtgtgccaccacgctcagccaacctttccatttctgtttttgcagagaagaggtgtcatttcaccatgttgccaagaccgatctcgaactcctgggctcaagggatcctcctcccatctcaggctcccaaagtgctgggactacaggcgtgagcaaccagatcctgctactactctgatttccatcacagattaatcatagggcagattcatatttaactttttaagaaattgtcaaactattcaagtggttgtaccatcttcattgccaccaacaatgtatgagaacttgcattcctgacaaccttgctaacattcagggttatccatctcttcaatttagc

SEQ ID NO: 102517 - DNA, 432 bp, Homo sapiens
ctcgagtcatcactgaggaagagaagaatttcaaagccttcgctagtctccgtatggcccgtgccaacgcccggctcttcggcatacgggcaaaaagagccaaggaagccgcagaacaggatgttgaaaagaaaaaataaagccctcctggggacttggaatcagtcggcagtcatgctgggtctccacgtggtgtgtttcgtgggaacaactgggcctgggatggggcttcactgctgtgacttcctcctgccaggggatttggggctttcttgaaagacagtccaagccctggataatgctttactttctgtgttgaagcactgttggttgtttggttagtgactgatgtaaaacggttttcttgtggggaggttacagaggctgacttcagagtggacttgtgttttttctttttaaagaggtgaggat

SEQ ID NO: 102518 - DNA, 125 bp, Homo sapiens
  misc_feature (1)...(125): n = a,t,c or g
ttttatttttttagntttaatatttatttatttatttacttattgagacagagtatcattctgtagcccaggctggagtgcagtggcacgatctcagctcattgcaacctccacctcctgagttt

SEQ ID NO: 102519 - DNA, 159 bp, Homo sapiens
ggaaaaacatggcctgctattgcagaataccagcgtgcattgcaggagaacgtcgctatggaacctgcatctaccagggaagactctgggcattctgctgctgagcttgcagaaaaaaaaaaaaagacgacggggccgggattcccaaatttttgagtg

SEQ ID NO: 102520 - DNA, 311 bp, Homo sapiens
tttttttttgatacaaaaatacgttcctttaatatttttacatgtcatatattaatatttaatgagaaacaaaatgtcacataaacagcccagtaataaaatcttatctttcaaatcatataatttttctttaaaacctgtacatattctcttgatgctttccaaactagatcttgatttaaatttgactcatcagtagaccctaaaggggaagctattgatccagattccaattcagcagcagcttctttgagttctctagttatatttttttccaactcctgctgcatcttgctcaagtagttctccat

SEQ ID NO: 102521 - DNA, 344 bp, Homo sapiens
  misc_feature (1)...(344): n = a,t,c or g
ttcatatcaaaagcatataataaacttaaataataacgaaatctgaaaacacttttttttttttggaaaaaaagttcccttttgccccccaaccggaaaagcaggggccaaatttgggttaacaaaaacttcaccttccggggtcaaaggaattttctggcctaaccctcaaaagaataagttggaaccaaagccttgcccccccaccccaaccaattaatggattttttagaaaaaaaggggcccccccccctgggccgggtgggtttaaaacgcccaccctaagggaatccgcccgcctgggcctccaaaagggggggaaccacgggctggacccccccccn

SEQ ID NO: 102522 - DNA, 260 bp, Homo sapiens
ctttttctttgaacaaatgtttttgtatacctactatgtatttgatactgggctactacagtgaagaaggacacaatctctattttcaaaagtgtggtctaaaggccaggcttggtagctcatgcctgttgtcccagcactctgggagggtaaagtgggatcgcttgagtccaggagttcgagaccagcctgggcaacatagtgagaccctgagttaaaaaaaaaaaaaaaattacctgggtgtggtcgacgcggccgca

SEQ ID NO: 102523 - DNA, 84 bp, Homo sapiens
  misc_feature (1)...(84): n = a,t,c or g
agtggtgcgctcaagcagncctcccgccttggcctcccaaagtgctggtattacaggtgtaagccaccacacccaggctggggt

SEQ ID NO: 102524 - DNA, 359 bp, Homo sapiens
ccggctcgcgcacttcacaaaattgggaagggcgtagcccctttgggaagaagcaacttaagtataaccaacactttcagaaattatacaaaaaggaaatggttgttaacctgttgatgaaaagattcctccaacaataccacagagtcttacaaaaaactgccagaatggcatgtgctcctcaataactgtcaccataagagaactgagatcatatttcataaatatcccagagactccatggctgcctgcagcatggttaatgatacgttcctaaaagggaggcaaaaggaaggggagaaataccgaggaagagagatacagaattcatgtcatctggttacttacatacattcaag

SEQ ID NO: 102525 - DNA, 345 bp, Homo sapiens
agattctgctattccccggaggctagagtgtctaaaagaagacgttcagcgacaacaagaaagagaaaaggaacttcaacatagatatgctgaatttgtcttctaaaacatactttttctgatgataaatgcatttatagtctttccaagattcattttctaaatatcatttttctaatactaggggaaataagattttcatagctgaatccctctttaagaagagggtctgggctgggcgcagtggctcatgcctgtaatcccagcactttgggaggccgaggcgggcggatcacctgaggtcgtgagttcgagagcaccctgacctcagggtcgacgcggccg

SEQ ID NO: 102526 - DNA, 367 bp, Homo sapiens
ttgatgtgggacttcagccctagtggccttgatggagcgtttcaaagaggttactactggtactacaacaagtacatcaacgtgaagaaggggagcatctcggggtttaccatggtgctggcagggtacatgctcttcatctactgcctttcctacaaggagctcaagcacgagcggctatgcaagtaccactgaagaagacatgctctgcactcccccagcaaccttcttggctgcaacccctccataagcaacacaatctcgattgttgctgaatcctttcatatcctaatgggaattaacctccaaataaaagatgactggtacttgtgaaaaaaaaaaaccaaaataaaaccctaaaccagca

SEQ ID NO: 102527 - DNA, 364 bp, Homo sapiens
gttttacacaaggctgatgaattcattaacaacttaaatgaacaaattctatcaactataatcaatcattttatgattaaatgaatattaccaatatttgacatgttttgtaatatgtagattatattcctgacctcaagtgattcacccacttcggcctcccaaagtgctgggattacaggtgtgagccaccgcgcccggcctgaaaaggatcttttaagttggtttcctgaatctcaagttacggacctttcacttctaatcccccaaaatgaagtcctttacagtcttttatcttgatgtttatgtggtcattgctgtgcttctgaagcatgtttcaaataaatggtaatttgcctccatt

SEQ ID NO: 102528 - DNA, 399 bp, Homo sapiens
gtcaaatatcatctcataaacattttatattggtagactaagtttaatatatgttgatattttcactatatgtgtctatttactatctttaaaactaaaatttcaggctttggtaaatgcatttttaaacaagatcacacattttaaaacttaggagtagccatcaagtaaatcagtgcagtctaggtgaagtaactttaaagtttgttctggctgggcatgatggctcagcctctaatcccagcattttgagtggccaagatgggcagattgcttgagcccacgagttcaagaccagcctgggcaacatagcgagattccatctctacttatttaaaaaatttaaaaaataagaacaacaaataaagtttgttttgagcaggagtaaggatgctctaa

SEQ ID NO: 102529 - DNA, 356 bp, Homo sapiens
gcgggtaaaccaagaagcatgacctaaaaactatggattatcatgcccgccaacccccggtgtgagccagaccccactgaaggtcacctgacttggaccctggtctgcctagggctaccaagccttactagaacaagtggcacagtgggggctaccccttctgcccgataaccccggggatgcctttcgaggcaaagcccactccttgggccaagcacagtggcttatgcctgtaatcccaccactcctgaaggccaaggtgggcacatatcttgcagggaagagttcgagaccaggctggccaacatggtgaaaccccatctctactaaaaatacaaaaaaattacttgggtgtg

SEQ ID NO: 102530 - DNA, 332 bp, Homo sapiens
aaagaattttcttcatataacataaatataacaccaattatagcttctcttctttttcccaagtcttatagcaaatatatataatcttcatatcaaaatgctaaaaagttattacaaattcaaactgcttaccatgataccaccattttgttttctttggattcttgttacatgttcgcacataaaaagaattatccggtggtcgtctcttttccttgcagctggaaagcatgctaataatgctaagacaaactgattggactgagagcgctggggaccagtcttctgttagaatggataaacagatatgaccattgctataaacatgagga

SEQ ID NO: 102531 - DNA, 340 bp, Homo sapiens
  misc_feature (1)...(340): n = a,t,c or g
gcaccactggttgccttcacacaggttaacttggaagacaaaggaggtttgtctaagctggtggaagctatcaggatcaatttcaatgacagatacgatgagatctgccatcactggggaggcaatgtcctgggtcccaagtctgggactcgcattgccaagctcaaaaaggcaaaggctagagaacttgccaccaattggattaaatgtacactgttgagctttctttacataaaaaggtaatgcaaattttcctaaagatttctatccaaagtgacttgatgaataatatgtacttaacttgaagagagaaagcacaaggagcacaattggttggttn

SEQ ID NO: 102532 - DNA, 336 bp, Homo sapiens
gcaccactggttgccttcacacaggttaacttggaagacaaaggaggtttgtctaagctggtggaagctatcaggatcaattacaatgacagatacgatgagatctgccatcactggggaggcaatgtcctgggtcccaagtctgtgactcgcattgccaagctcaaaaaggcaaaggctaaagaacttgccaccaattggattaaatgtacactgttgagctttctttacataaaaaggtaatgcaaattttcctaaagatttctatccaaagtgacttgatgaataatatgtaattaacttgaagagagaaagcagaaggagcagaattggttg

SEQ ID NO: 102533 - DNA, 304 bp, Homo sapiens
cttagaaatggttaaaacggcaaattttatgttatacatatattttgccacagtttaaaaaaattatttaaatctcttttacttttttttttgagacagagtcttgctatgttgcccaggctggtgtgcagtagcgggatctctgctcactgcaatctccaccttccgggttcaagtgatcctcgtgccccacctacttgggaggctgaggcaggaggatcacctgaacccaggaggttgaggctgcagtgagccatgattgcaccactacactccagcctggggcacagagtcgacgcggccg

SEQ ID NO: 102534 - DNA, 283 bp, Homo sapiens
cttttttgttgttaaaagtctgttctctagccaggtgtggtggctcatgcctgtattcccagcactttgggaggctgagaccggaggattgcttgaaaccatgagtttgagatcagcctgtacaatgtagtgagaccaccatgtttttatgaatacaaaatttaacccgatgggggggcacgtggccacatatctgggtacccaacaaattatgagggtaaagtgggttgatcccgtgaagccggaagtgcaaagatccagtggactgcgtcgggacttcccc

SEQ ID NO: 102535 - DNA, 226 bp, Homo sapiens
tggagttttgctctatttgcccaggctggtcttgaattcctgacctcaggtgatccgcctgcctcggcctccctaagtgctgggattacaggcatgagccaccatgcccagcctgctgtatctttaaatagcattttttcagccagcaccttttgtgctacttctagctattgtgcaaaaatggaattaaaggaattgaaatttatgttgattgtcgacgcggccg

SEQ ID NO: 102536 - DNA, 388 bp, Homo sapiens
ggggaagggtcactgcccagctggactccagggtggtccacgcatgacagtcacaccgaaccttcatgaggatgtgaactgttggctccaatttaccattcccagcaattccactcagatatttgtatactaatgttcacagcagcgtgaactccacagcaggtggagtaatgttccattgtgtgcatatgccacattttgtttatccattcatctgttgatgcacatttcggttgttcccacctttgggctattattaataatgctgctgtgaacattcccaagagaaataggaagacggctttgctaagaactaaaaaagggatggacaacaagggcatatacccaggggcagtgttctatcatgacagctttactgagagcagag

SEQ ID NO: 102537 - DNA, 427 bp, Homo sapiens
  misc_feature (1)...(427): n = a,t,c or g
gggcgtgttggtcagcctggtctcagactcctgacctcaggtgatctgcccgcctcggcctcccaaagtgctggggttgcaggtgtgagccaccgcgcccagcctacacctgctcttaattgtgttttgacatgctgggtactacaacattacataaaacataaccatggaaaaagaagtgagtactttacaatcttcaatgatatgtgatacaagaaaacttcattcttctgcagcaattgtccaccaaatacgtaaaaccatgaaatattaagtgagctcttacaaaataactgaaagtatttgcattcaaaaatgaaaatgcgtccataagacttttatgcttcattactaaaaaaatcattaataataaaataaataatgacagacagttactaatgcaataaagttgctaaaatgagatggn

SEQ ID NO: 102538 - DNA, 809 bp, Homo sapiens
  misc_feature (1)...(809): n = a,t,c or g
tttcgtggcaagtggagcaacacaaatttttcgatttctaaagatctgggatactgttctgctggtgatcacgagggcaccagagagtcgctgacgcggcactgctgtccttccctgatgtgatctgcctggggctcatgctctggggcagcagctccatcgtttgcatcctgcacaggcacaagcggcgggtccagcacattcataggaccagcgtctcccccacatcctcccctgagtccggagctaccaaaaccatcctcctggagcaggaaaggacaaggagtccccgaagctgacactgagttcatggggttgagctgacagcggccaacaggcnnnnnnnnnnnnnnnnnnnnnnnnnnnnnnnnnnnnnnnnnnnnnnnnnnnnnnnnnnnnnnnnnnnnnnnnnnnnnnnnnnnnnnnnnnnnnnnnnnnnnnnnnnnnnnnnnnnnnnnnnnnnnnnnnntatctcctgtccggggaagaggtgggcctctctccgtcgtgggaggagctctgaacttctccttcatccagggatgggccccagggacccaccagtggggctgggagaagcccccctcagcaggaagacagaggtgcctgggtggccgaggcctggaaggtctgcaccatggtgcacagaggccccggagctgggtgaggccagaaagctgctctggggtcagcggggaatgtgcctgctgaatctgtacctgagctacgtcttcacaaatggcctcagacctagagtgcagggagatcccctggcttttctgaagtggtggcaggtggtctcctgggtt

SEQ ID NO: 102539 - DNA, 405 bp, Homo sapiens
ggaagacagagaatgaccacatcaacctgaaagtggccgggcaggacgggtccctggtgcagttcaagatcaagaggcgcacgccgctgagcaagctgatgaaggcctactgcgagaggcagggcttgtcaatgaggcatatcacattgaggttcgacgggcagtcaatcaatgaaactgacactccagcacagctggagatggaggacgaggacaccatcgacgtgttccagcagcagacggagagtgtgccggatagcatcctggcagggcacagtttctagagggcccgtccccagcccgggccgtgcatcctagcattgctgttgaatggtgagcacgtgaccatgccgaccacaaaggtgtctgcggaaactcgaggacattcaccacgatgattgtgct

SEQ ID NO: 102540 - DNA, 413 bp, Homo sapiens
  misc_feature (1)...(413): n = a,t,c or g
tttatatgatttattgaatatgcgatctatctctctcccactaccatcacttgtatgcattcattcacacacacacgaacacacatacacacacatacacacacatgcacacacatacacacacacacacagtcactgggttttatccctaaaacaaaaaaagatggtaaagcataggcctagactgagtgtatggatatagaaaatagaatcatgaaggaaaataataagaatgctctttaaaatgtgaacatattgcctcagtttgttctataaataggtgagactgaattataaataagtaaaattggaataaacaatgataaactaattttgtcagcaatatcacatccttgtcaccatttcctgagcacttactatattcaggntctctcttcattttttctggtctt

SEQ ID NO: 102541 - DNA, 384 bp, Homo sapiens
  misc_feature (1)...(384): n = a,t,c or g
ggcgcctctcccccagcctcgctgccgccttgcagtttgatctcagactgctgtgctagcaatcagcgagactccgtgggcgtaggaccctccgagccaggtgcgggatataatcttgtggtgcgccgtgttttaagcccgtcggaaaagcgcagtattcgagtgggagtgacccgattttccaggtgccgtccgtcacccctttctttgactaggaaagggaactccctgaccccttgcgcttcccgagtgaggcaatgcctcaccctgctttggctcgtgcacggngcgcgcacccactgacctgcgccctctgtctggcacttcctagtgagatgaccccgtacctcagatgganatgcagagatacccgtcttctgcgcn

SEQ ID NO: 102542 - DNA, 342 bp, Homo sapiens
  misc_feature (1)...(342): n = a,t,c or g
atatgtaccacattttctttatctaatctgtcattgatgagcatttaggttaatatagacataatgaatagattgtacatgtacatagataaagatatcaaacgtatatctaaattaaaacaaacatccataatttcacccaattggaaatcgaaaatttgtataccaaagaatttatataacaaaaagatagctaaggtcgtgattgggtttagaactgtaaggttttttgttttctgttttttgctttttttagagagagataaagtctcgctctgtcacccaggctggagtgcggtggtgccatcttggctcactgcaacccccgcctcccaggcccan

SEQ ID NO: 102543 - DNA, 353 bp, Homo sapiens
gtcacctttatagaaaggaccgtcaggtgtcgagtgtttattcatcccaagccagccctcaccagtcctctggggttagccgcgggttctgtggggaaggtgcaattagttgttgagtttggagatgtggggaatcgggctggagggaataaacactttgcgcgtgtgtgtgtgtgtgtgtgtgtgtgtgtgtgtgtgtgtgtgtgttttcctataaaaaataatatttacctgtgctattagcaaagaatgtatcggatgtagttattgctcggtctttggcagtccgttctatttagggttttctgtgctttcctgtctgtggatgaggcaccaggcgtcatttgccattg

SEQ ID NO: 102544 - DNA, 310 bp, Homo sapiens
cgtaatttaaagatcttcccatgaagaaaataccaggtctagatggttttgcagaagttcaagtaagggtaactctttaaaaaaaattattattattattttttttagaaatggagttttgctgtattgcccaggctagtctcaaactcttgggctcaagagatcttcctgcctcagtctcttgagtaactgggactataggcatacagcactgtgcctggttagtaattctaattttataaaaactctctctgagaatggaaaaaatgaaaacattaactctttccatgaggccaggtcgacgcggccg

SEQ ID NO: 102545 - DNA, 375 bp, Homo sapiens
  misc_feature (1)...(375): n = a,t,c or g
gtggttaattttgaatccttcattcgatcagttaagaactcaaaaccctgagtcatgggggtcttttgtaaaagtccccaaactggcccaggaagtcccgccaactccacccctcattaggatgcatcactggcctcgtgcaccggcttcaccagcactgcaccctaatcaaaacaggggccagcaaggtgcctcacccctgtaatcccagcactttgggaggctgcggcagaactgcttggacccagtgcaaaaccattctgggcaacatagcgagaccatgtctgttnnanaaaaaaaaaaaaaaaaaaaaaaaaaaaaaaaaaaaaaaaaaaaannnnnnnnnnnnnnnnnnnnnnntnnaaaaaaaaaaaa

SEQ ID NO: 102546 - DNA, 138 bp, Homo sapiens
ctaagattaagtattaaaaaaaaaccaggctggtctcaaactcctggcctcaagcaatcctcctgccacagactcccaaagtgccgggattataggcatgagccactgcgcctggcagagcctgggtcgacgcggccg

SEQ ID NO: 102547 - DNA, 352 bp, Homo sapiens
  misc_feature (1)...(352): n = a,t,c or g
ggctagctctgtactccaggctggacaacagagcgagactctgtctcaaaaaaaaaaaaacaaaaaggtcccccccgttggctggttttaaaaaaacggttcccaaacttaatttttaacgtttttttttttttcccggaacaaaaaaattttttttaagttaaagggttgggtggggggaattccacggggccataaacagttttttttttttaaaaaaaaacccaatgggccgggggggggggcttcccccctgattccccaccttttggggggccctgggggggggaacccccggggggggggggtcgaaaccccccctccccaccggggaaaacccgggggcccgccn

SEQ ID NO: 102548 - DNA, 365 bp, Homo sapiens
  misc_feature (1)...(365): n = a,t,c or g
cagacgtggcgacccgctgaatttaagcatattagtcagcggaggaaaataaactccaagcagcccgttnaaaaaaaaaaaaaaaaaaaaaaaaaaaaaaaaaaaaaaaaaaaaaaaaaaaaagagggggggggggaagtagaaaaaaagttggttgttaatgtggggaaaccccggggggacgcccttgcttgggtttgttgcgccccccccggccgtcgaatttataataagaggtgtgctttttttttaattgaaatcggctgtaaaagtgtaacttgggcgcgggggcccgcttgttttttgttattttttaagagggcgaatgagttgtgggcgctatttttgtgggggagatgttgttg

SEQ ID NO: 102549 - DNA, 342 bp, Homo sapiens
  misc_feature (1)...(342): n = a,t,c or g
gttagatgtcatagtagaagcccgaggcctggctcagtggctcgtgcctgtaatctcagcactttggagggccaagggaggaggattgtttgagtccgggagttcgaggccagcctgggcaacatagcaaggccccgtcttgcagccagagaggtgagtgtagacaacttttcgtagacatgtgcaacagtgaggacagtcactatgaaggagaagagggattgcaggttgttagaagggtctttcaaagcttcaaattactttttttttttttttttttgaaagggagtttcttttttgttccccaggctggagggaatgggcccaattttggttcaccan

SEQ ID NO: 102550 - DNA, 332 bp, Homo sapiens
ccgcagttcaaaaaacactgctctggaggaaagtcaaacttgaaaactcaatctaaaatataaaaaaactcagtactcagtaacttcttggaggaaaaaagaaaatgaaaccaagaagagaacattaatctatactaaacagaagagatggtatgtaacatcctttcctctaagaatgacagaagggccaggcgcagtggctcaaacctataatctcatcgactcaggaggccaaggcagaaggatcacttgaggccaggagttcaagaccagcatgggcaatgtagtgagaccccactccattctctcaaaattttttgtcgacgcggccg

SEQ ID NO: 102551 - DNA, 342 bp, Homo sapiens
gccacgcatggtggctcatgcccgtcatcccggcactttgggaggtgaaggcaggaggattgcttgacgcgaggagttcaagaccagccttaacaacatgggaagacactgtctctacaaaaaaaaaaaaaaaaattttttttaaaaaaacaaaaaaattttgggaaaatatgaaaactttgggaaaaattagggccggggagaaaaaaaaacctggctttattcctataaaaggaatagggaaaaacccccctttttatgacacctttggttattattcatccctttggaaaaaaaaggaaaaagtttttttttatttattctaccttggcaaaaagtact

SEQ ID NO: 102552 - DNA, 424 bp, Homo sapiens
cggacgcgtgggctcctgtggtttctatctgaaattctcttcattttttttttaataactgctttattgagatataattcacatgccacacaattcacctatacagtatacaattcagtagtgtttactatattcagagttgtgcaactatcatttttctcacccccaaaagaaaccctatgcccgttagtattcactctgttttctcacaactctaggtaaccactaatctactctccatctctatagatttgcccatgctagacatttcatataaatggaatcatacatgtggtctttttcactgagtatattttcaaggtgcatcccagctgtggcatgaatcagcatctcattcctttttattgccaaataatattctatcatatggatatgtcgcattttatgtatccattcatcagct

SEQ ID NO: 102553 - DNA, 181 bp, Homo sapiens
ggaaagctcatggagcttcatggtgaaggcagtagttctggaaaagccactggggacgagacaggtgctaaagttgaacgagctgatggatatgaaccaccagtccaagaatctgtttaaagttcagacttcaaatagtggcaaataaaaagtgctatttgtgaaaaaaaaaaaaaaaagg

SEQ ID NO: 102554 - DNA, 429 bp, Homo sapiens
cggacgcgtggggcccaggatggccttgaactcctgggctcaagtgatccacttgccttggccccccaaagtgctgggattacaggttgctatgaaaagaaaaatcatgatattaagcacatcttattgaactgctgaaaatgaaaagtaaagaaaaaattttggactgatcattccaagatggccaaataggaacagctccggtctacagcttccagtgtgatcgttgcagaagacgggtgatttctgcatttccaactgagattttagcatcgatattatggaagctatgcctggactcaacaacacgaacttctactcaccaaggctgatcttgtactaatactaagtgcccaacctgacaacagagaagatgatgacctttataagacaccattccttatgggcatcagccagtcccatggtgtt

SEQ ID NO: 102555 - DNA, 486 bp, Homo sapiens
  misc_feature (1)...(486): n = a,t,c or g
ggcgggtttttacgacagcctcgatgagcccgtatncccggccgacccacgcgtncggactgagggtgcccgggatccttcacccccacatccattgagtccacggaacccagggtaactgggatggtatctgatagaaaaaatccaaatctgttgttctccttgtcttggagctgaccctttccagcagatgatatcacctctaagagatgggagtctcactgttttgcccaagctggtcttgaattcctggcctcaagtgttcctcccgcctcagactcgcaaagtgctgggattacaggcagaagtcactgctccaggccacattatttttatgattattatgattaatacttttaaatagttgtactttgggttcttgggaacccagagaaataaccttcttcacaaagttagttcaaaggattttttaaagcttagtgctaccgctctaaatgactttttaaagaaaaacatttcatattg

SEQ ID NO: 102556 - DNA, 411 bp, Homo sapiens
  misc_feature (1)...(411): n = a,t,c or g
agaaatcaagcttcagtgtgtaaggacgtgtatgttcataccacccccaagaatgtgtattgtggtatttttctggaaataagttaatgcatattaatatattttgccaattcgtaggatggaatggtatgtaaccaataaaaataatgtattagttctatacagatttatactagttttgctttgagagagttccataatgcatttttttctatcttaaacttttaaaaaaaatagacacggtgtctccgtctgttgcccaggctggtcttgaactcatggactcaagcactcctcctgccttcgcctcccaaagtgctgggattacaagtgtgaaccactgcacccagcatataatgtatttttaagcatgaaatgaaagatgccagaaagtacatatatatattaatn

SEQ ID NO: 102557 - DNA, 378 bp, Homo sapiens
  misc_feature (1)...(378): n = a,t,c or g
ctctccttgtatatttgaaaatgaggtttgcttccttctacttaaaaaacaacttgaacatacctgtttggatcacatggtcttgtcctgataacttggaagaggttgcttcagcattgttcttattgttgtggtggttattattaatattgtttcatattctgtttaaaaaattaaaattttactcatgaaaaaaaaaaaaaaaaaaaaaaaaaaaaaaaaaaaaaaaaaaaaaaaaaaaaaaaaaaaaatattaaaaataaaaaaaaatttataaatgtggggggggggggggttttatgattatgtgggggggataaaaatgccccgcgggaggatgaaaaaagtctcttttttttgggggnatttataagccaa

SEQ ID NO: 102558 - DNA, 415 bp, Homo sapiens
acgcgtccgcccacgcgaccgcccactcgtccgagtacgcgtggggagaaacaaggatggggcggaaaccacccccagcccagggctgctgcctgcccacctgaccttcccgctggactatcaccttaaccaacctttcatcttcggactgagggacacagacacaggggcccttctcttcattggcaagaatatggaccccaggggcccctaatatcccaggctaatattcccataccctagaagaaaacccgatggacagcacactgcacacgacacgaaggctgcccctgtaaggtttcaatgcatacaataaaagagctttatccctaaaaaaaaaaaaaaaaggggggccgctctaaagaatccctggggggggccaagcttaccgcgggaggggaaggttttatttttc

SEQ ID NO: 102559 - DNA, 426 bp, Homo sapiens
  misc_feature (1)...(426): n = a,t,c or g
cncgncnggaattcctctatagcccatccgtactacctggagactggatccgcaaagtagacacttggtctcatgaagccactgctgggctccagagagaagggaaaactaagaggttttaaaacccctaccctccttggtttacctccatcattaaaaaacaacaatgacaacgacaacaaaaaacaaaactaaaacgacttattatttattaattatgttggggcagacaatatgctgaacattagacataattaaatcttttaaaaaaaaaaaaaaaaaaaaaaaaaaaaaaaaaaaaaaaaaaaaaaaaaaaaaaaaaaaaaaaaaaaaaaaaaaaaaaaaaaaaaaattatanntggggggggggggtttatataattttttgggggggggcccacacccgccccggccggaaaatttttt

SEQ ID NO: 102560 - DNA, 414 bp, Homo sapiens
  misc_feature (1)...(414): n = a,t,c or g
ctttgaagttagcgaatgatgtgccattgagcatttttatttggtttggtcattgccatttaaataaattccattaatcttgtatttttattggttgttcattagagatttaagaatgtatgacatttaagaaatatgaacattttggaagtaataatattttaataatgccacactgaactattaataaattttaatgccgcanaaaaaaaaaaaaaaaaaaaaaaaaaaaaaaaaaaaaaaaaaaaaaaaaaaaaaaaaaagggggggggccctttttaaaatattcgtggggggccccccctttccggggggaggaaaaaatttttttttttttttttggggggggaaaaaaaaatcctcggggggttgttggagaacaccccttttttggggggggaaaaaaaaaaaaaa

SEQ ID NO: 102561 - DNA, 401 bp, Homo sapiens
  misc_feature (1)...(401): n = a,t,c or g
gaatattaaattgtaacatgattgctctctgtctcttttttcagcttatgggtatttatcttctattagtatttgtatcttcagttcattccactttaggaaacagagctgccagttgaaacaaaaaaaaaaaaaaaaaaaaaaaaaaaaaaggggggggggcttttaaaaaaatccttggggggggccaaaaataggggggggggaaaagaaaatattttttctttttggggggggcttaaaaaaacccctgggggttttttggaaaaaaacccttttttgggggggggaaaatggggggcacccccccccaaaaaaattgttgcccggggggaaaaaaaaaatcttaaagggggatgaggggaaaaaaaccataatattctgttgtataaaaacatgcn

SEQ ID NO: 102562 - DNA, 373 bp, Homo sapiens
  misc_feature (1)...(373): n = a,t,c or g
tttgaattatttcatgggtgattttctcctgttttctctgttctctcttttggaacttctgtcatctatgtattgactgtttggactgtctgagcccatccttttcaatttcttgtgtgtaaaaaagctcttttcttctcttgtgtttttgttcttctctctgggaaattttcttaaatttgcctctgattcttgtgttgagtttaaaaacaatatatgcctgcctgtaatcccagcactttgtgaggccaaggcaagcagatcacctgaggtcaggagtttgagaccagcctctactaaaaatacaaaaattatccgggcatggtggcacgtgcctgtagtcccagctacttgggaggctggaattatagan

SEQ ID NO: 102563 - DNA, 354 bp, Homo sapiens
ctggtctcaaactcctgacatcaagtgatccacccgcctcagcctccaaaactgctggaattacaggtgtgagccaccacacccagactatttttgtttttagtagtcacaagagttagtgtaattggtccatctttagtttgtgaaactgaggaatgttcaagtttattattccataagctctttgtttattgatgtcttcttaaagtgccttgcatctatgaaaaagatgttaggaattgactgcatttccaagactgacagtattggtgctaagggatccaattgatcccggttccatattctatattggtcctttttaatctctttacatatgttccagtattgtgacat

SEQ ID NO: 102564 - DNA, 344 bp, Homo sapiens
gttgcccaggctggtttcaaactggtgagctcagccaatctgcccaccttggcctcccaaagtgctagagttacaggcgtgagccatcgtgcccggtcaatgaaacaataaagttctatacacttatttttattttctttacttttttttttttttttggaaaaaaattaacctttttgtgccccgggttaaagggcagggggggggatttatttattggaacctttggcttggggttaaaagaaatcttcggccctaaccccccgaagaacgggggataacgggggggggccacccccccgggctattttttgtttttatagaaaacaagggctttttcatct

SEQ ID NO: 102565 - DNA, 348 bp, Homo sapiens
tttggaatcaacctaagtatccatcaacaggtgaatggatggagaaaatgtggtacatatacaccaagctggtccaacccatggcccatgggccacatgtggcccaggatggttttgaaggcagtccaacacaaattcataaactttcttaaaacattatgagatttttgtgtgtgtgtgtgtgtgtttttttttttttagcccataagctatctttatggttagggtattttaaggggggcccaaaacaattttttttgcaatgtggcccatggaagctatatggttggacacccccaaagggaatatttttcaccctgtcttttgcaacaacttgaacggaacggg

SEQ ID NO: 102566 - DNA, 381 bp, Homo sapiens
ttatggtattctacaaaagcatgaatttcctcatagcaattttgagaaattctcttgacctgtgtagggagatttttactgaagagatgctatgtgacataagttttgacagtagtaaaataatttttaaatgtaatgacaaaagataaaaccaagttacatgatttggatgtttgtcccctccaaatctcatattgaaatgtgacctccaggccaggtgcagtggctcatgcctgtaatacccaacactttgggagtctgaggtaggaggatctcttgaggccaggagtttgaaatcagcctgggcaccatagcaggactccatctcttaaaaaaagaaatgttggaggtggatcctagtgggaggtcttggaatcatgg

SEQ ID NO: 102567 - DNA, 395 bp, Homo sapiens
ccgggccgctttacctactcaagcctcagcaatggcgggtgcccctcccccagcctcgctgccaccttgcagtttgagctcagactgctgtgctagcaatgagcgagaatctgtgggcgtaggaccctccgagccaggggcgggatataatctcctggtgtgctatttgctaagactgttggaaaagcgcagtattagggtgggagtgacccgattttccagatgccatctgtcacccctttctttgactaggaaagggaattccctgaccccttgtgcttcccgagtgaggcaatgcctcgccctgctttggctcacgctcagtgcactgtacccactgtcctgcacccactgtcagacactccccagtgagatgaacctggtacctcagttgg

SEQ ID NO: 102568 - DNA, 396 bp, Homo sapiens
  misc_feature (1)...(396): n = a,t,c or g
gctgagtgcagtggctcatgcctgtaatcccaatactttgggaggccaaggcaggaggatcacttgaggccaggagttcaaggtggcagttgagccatgatcatgccattgcactctagcctagaagacagaaaggttaaaagaaaaaaattttttgaaaacaatttaacattattttataaaattgaatagtgctatggtttggatacgtgtccccacctaaatctcatgttgaaatgtaattcccagtgctggaggtggggtctggtagaaggtgattggatcatggtgttggagtcttgatgaatggtttagcatcatcccctcttagtactgtatagtgagagttctcacgagatctttgttgtttaaaaatgtgtggcacctcccccttcn

SEQ ID NO: 102569 - DNA, 391 bp, Homo sapiens
caaaatgatggtgtctggaggtggggttttgggaggtaattaggtcatgagagtggagcccttaagaatgacatctggcagggcgcagtggctaatgcttgtagtcccagcactttgggaggccaaggcagggggattgcttgaggccaggagtttcggacaaacctggccaacatagtgagacccttgtctctatttaattaaaaaagagaatgggattaatgccttcataagagacatgagagagataattctctctgccatgtgaggataggcaagaaggtggctgtctgcgaaccaggaagaatgccctcactggatactgaatccgtcagtaccttgatcttggactttacttaccgaagtttgagaaataatgtttgtggtttag

SEQ ID NO: 102570 - DNA, 334 bp, Homo sapiens
gttatcccttccttcttggttattcctcccttttggaatgggaatgtctaacctatgctattttgatagcacataacttgttcatttcacaggctcacagctggagagaaattcacattaggatgaatcatgccttgagtctctcatctatatctgatttagatgagactctgggatttggagttgattctggaatgagttaagacttctgcggtgtcatgtgcctatagtcccagctatgtgggagactgaggtgggagaatcgcttgcgcccaggacattgacactgcagtgagatgttatcatgcaaaaaaaaagaaaaagaaaaaagaaa

SEQ ID NO: 102571 - DNA, 358 bp, Homo sapiens
gggagggggagggggagggagagggagaggatttgtcttatctggggagattagggaaggaaagatcttcctgaaaaagaggtgcttgaactgtgagcccaaaaatgactaaaaatgtgccgactgaagagagggaggaaaaaacgttacagataaaaagaataacctgcataggatgctgaggcaggagaatcgcttgaacccgggaggcagacgttgcagtgagccaagattgcgccactgcactccagcctggtgacagagggagactctgtctcaaaaaaaaaaaaaataacctgcataaaggccctgtggtcagggtataaggacacaaaaagcaagggcatgtgacttaatc

SEQ ID NO: 102572 - DNA, 345 bp, Homo sapiens
gatctcctgacctcgggatctgcccgcttcggcctcccaaagtgctgggattacaggcgtgagccaccgcgcctggcccaatgcagggtctgttcttttaatgacatactagattacctgtatgctaagcatacaggtgtagggaaataggaggaggagaccgaaaacaagaaatgggagctggtgtggtagtgcccacctgtggtcccagtcacaggggaggctgaggtggaaggatcacttgagcccaggagttcgaggcttaacagtgagtggtgatcacaccactgcactccagcctgggtgacagagcaagattctgtctccacacctctcccctgcccc

SEQ ID NO: 102573 - DNA, 351 bp, Homo sapiens
ctcgaactcctgacctcaaccagtactcctgcctcgccctcccaaagtgctgagattattctaattttctacagctcagtactagtttggcacctaagcgcacttagtaaattttttaaatgattccctagtattttctattttctatttactatagttcatttttgaaaaatctgtttgcaatccactaggtttattttacaagcttcagtgggtctcagctttcagtttaaaaaagcaatagaaccaagcacagtggttcacgcctgtagttctagcactttgggaggccaaagcaggaagattgcttgaggacaggcgttcgagaccagcctgggcaacatagggaga

SEQ ID NO: 102574 - DNA, 352 bp, Homo sapiens
  misc_feature (1)...(352): n = a,t,c or g
gtgaggaatataatctcctggtgtgccgtttgttaagcccattggaaaagtgcagtattggggtgagagtgacccaattttccaggtgccatgtgtcacccctttctttgactaggaaagggaattccctgaccccttgcgcttcctgggtgaggtgatgcctcgccctgcttcggctcatgcacggtgcgctgcacccactgtcctgcacccactgtccagcactccccagtgagatgaacccggtacctcagttggaaatgcagaaatcacccgtcttctgcgtcgctcacgctgggagctgtagactggagctgttcctatttggccatcttggctccaccccacaccn

SEQ ID NO: 102575 - DNA, 336 bp, Homo sapiens
caagcatgtggtcggggaactcaagaatgacctgagcatctgtggaaccctccattctgtggatcggtatctcaacatcaaactaactaatatcagtgtcatagactctgagaaatatcctcacatgttatcagtgaagaactgcttcattcagggctcagtggtccgatacatgcagttgccagcagacgaggtccacaaacagttgctacaggatgcagcaaggaaggaacccttgcagcagaaacagtgatggctcctcctcctcttccccttcctctttcattggtgacccgcaggaccagcaccacgctcttctattattttttcaagtcc

SEQ ID NO: 102576 - DNA, 345 bp, Homo sapiens
tggagccaggattgttggtcatttgactcatgccttgaagcaaggagaatacggtcttgccagtatttgcaatggaggaggaggtgcttctgccatgctaattcagaagctgtagacaacctctgctatttaaggagacaaccctatgtgaccagaaggcctgctgtaatcagtgtgactactgtgggtcagcttatattcagataagctgtttcattttttattattttctatgttaacttttaaaaatcaaaatgatgaaatcccaaaacattttgaaattaaaaataaatttcttcttctgcttttttcttggtaaaaaaaaaaaaagtcgacgcggccgca

SEQ ID NO: 102577 - DNA, 340 bp, Homo sapiens
tgggtttttaccatattggacaggctggtctcaaactcctgatgtcgggtgatttgcccgcctcagcctcccaaggtgctgggattacaggcctgagccactgtgcccaggcagggatttttttttttttaccctatgacatatttactgttttttagagactttattcaaagcacttcttttttttaaacctacttttttggtcaaagcgcattgcgtaggccttttaacacgcccctttcttgttccccagacggttggctcgcctgaggtcaggattccaaaaccacccttataaacttggtgaacccctcttccactaaatttttaaaattggctg

SEQ ID NO: 102578 - DNA, 414 bp, Homo sapiens
tctcactatgttgctcaggctggtcccaaactcctgggctcaagcaatcctcctgcctcagcctcccgaagtgctgggataacaggcgtgagccaccatgcctggcctccttcactctttttatgataatctctcctagtcttgactttgttttcgcagcagtggccctggcttgctggtagtaaattcatcatactgccagtagtttatagtcagtggtgtgtttctcagtacaagattctctcattcaccgtacatctcaagagagagcacttcagtgaaacttcaggagtttttgtttgacatctttcagaaatgcttgacatacagacttgccttctcaaagtatagtgatactttgctgagaatcagcattttttattggaattttttttttttttttttttgaaacgg

SEQ ID NO: 102579 - DNA, 463 bp, Homo sapiens
  misc_feature (1)...(463): n = a,t,c or g
gggangaccgcgggggatttaaatgagaccatggaagcctcgnccgaactcccggncgacccacgcgtccgcccacgcgtccgcccacgcgtccgcccacgcgttcgcccacgcgtccgccatttatgctgtctgttgattgcctcctgttgtattagtctgttctcacattgctgtaaggaaatacccaggactgggtaatttataaaggaaagcggtctaattgactcacagatctacaaggctgggaaggccttaggaaacttacagtcatggcagaaagcaaaggggaagccaggcaccttcttcacaaagctacaggagggagaagtacaagcagggcacatgccagacacttgtaaaaccatcagatctcatgagaactcacttactattatgagaacagcatggggaaaatcactcccatcatcccatgttccaaacacttcccatcaggtccctc

SEQ ID NO: 102580 - DNA, 382 bp, Homo sapiens
atactactgtactccagcctgggcaacagagtgaaactctgtctgaaaaaaaaaaaaaaaaaaaaaaaaaaaaaaaaaaaagggggggggggggcccctttggggatttttttttgggccttttaaaatggccttttattttggggggcgaaaaaccccaaaaggcccccctattttaaaaaacttttttattttgggggggttttttttccccccctttcccttttgcccttaaaaaaaatttttggaaattttttaccggtttccccccaaaaaaaaaaaaaaaaaatttttgggggaaaaaacccttgaaacccttttggaaaaaaaaaaaaaaaaaaaaaaaaaaactaaaaaaaaaaaaataaaaaaaaaagggggg

SEQ ID NO: 102581 - DNA, 530 bp, Homo sapiens
aaaacaacaacaacaacaacaacaaaaggtgattggtaaaaattcactgatgcaatgccatttgcaaccttcagtgcaagtctgattttgacagagttcttaccaattattgcagatgtaaagagattacctttttagcttatgccttgatattatgtgttttgctttagatggtttggtggttggttggtttgtgggataggttctttttggctgtgtagtaatgacatcaaatgcccgcagagaattagttgtaaatggtaatggtctttttaaatggtttaactgctgtactcaaaatactcttcaacctgatctggtgtcctaaaagtttagtacttctaataagatctaacatgtggttgcatttgttataaatgccaaagttatatttaaaaacgacccaaaggggctgggtgtggtggctcacacctgtaatgtcagcactttgggaggcccaggcaggaggagaacctgagcccaagagtttgagaccagcctgggcaacatagtgagacccgcatctctac

SEQ ID NO: 102582 - DNA, 416 bp, Homo sapiens
tttttgctaggatagcgttctctgagaaaagagggcacaggccagtccagctaaagaatattaccaccgcagacgtggctctcggtgggatgcatttgaccacttgcctgggaatccctatgtgctctgttaaacttcaggttcccgggccccaccccagacctaccacatcagaatccctggaagcattgcctcgacatggagtccgtgcccttcacttcaccactgtccccacccctgaataaactccatgctcccccaaaaaaaaaaaaaaaaaaaaaaaaaaaaaaaaaaaaaaaaaaaaaaaaaaaaaaaaaaaaaaaaaaaaaaaaaaaaaataaaaaaaaatattaaaaaaaaaaaataattaaaaaaaattaaaaaaatattttttttttttttttttcctttcttta

SEQ ID NO: 102583 - DNA, 958 bp, Homo sapiens
  misc_feature (1)...(958): n = a,t,c or g
ggctgtccgactcaacatatcctatcctcctcagaacttgaccatgactgtcttccaaggagatggcacagcatccacaaccttgaggaatggctcggccctttcagtcctggagggccagtccctgcaccttgtctgtgctgtcgacagcaatccccctgccaggctgagctggacctgggggagcctgaccctgagcccctcacagtcctcgaaccttggggtgctggagctgcctcgagtgcatgtgaaggatgaaggggaattcacctgccgagctcagaaccctctaggctcccagcacatttccctgagcctctccctgcaaaacgagtacacaggcaaaatgaggcctatatcaggagtgatgctaggggcattcgggggagctggagccacagccctggtcttcctgtccttctgcatcatcttcgttgtagtgaggtcctgcaggaagaaatcggcaaggccagcagtgggcgtgggggatacaggcatggaggacgcaaacgctgtcaggggctcagcctctcagggacccctgattgaatccccggcagatgacagccccccacaccatgctccgccagccctggccaccccctccccagaggaaggagagatccagtatgcatccctcagcttccacaaagcgaggcctcagtacccacaggaacaggaggccatcggctatgagtactccgagatcaacatccccaagtgagaaactgcagagactcaggcctgtttgagggctcacgacccctgcagcaaagaagcccgagactgattcctttagaattaacagccctccatgctnnnnnnnnnnnnnnnnnnnnnnnnnnnnnnnnnnnnnnnnnnnnnnnnnnnnnnnnnnnnnnnnnnnnnnnttctccatccaatcggtccacactccccgcccccggcctctggtacccaccattctcttctctactta

SEQ ID NO: 102584 - DNA, 499 bp, Homo sapiens
  misc_feature (1)...(499): n = a,t,c or g
ggggctgccccctnnanaaaactgagcctacagcatncgcangagcnaaaagntgaacttaacgaaggagatattgcggttgttcatataaaacgagaggaaggctggttcaaaggcacattacaacgtaatgcgaaaactggacttttgccaggaagctttgtggaaaacatatgaggagactgacactgaagaagcttaaaatcacttcacacaacaaagtaacacaaagcagcttaacagaaagagcacatttgtggacttccagatggtcaggagatgagcaaaggattggtatgtgactctgatgccccagcacagttaccccagcgagcagagtgaataagatgtttgtgtggcatatgttagtctggattctgatgtataaggggtgccttgtactgtctgatttactacacagagaaactttttttttttttacaatatgtgactaaaggggccaatggttagcacggctaacctaatgtattggtttttt

SEQ ID NO: 102585 - DNA, 563 bp, Homo sapiens
  misc_feature (1)...(563): n = a,t,c or g
cgcccccccccgnnnnnnaattgattatcgacggcgttgaagcctacgcgctgaacgccagcggtgtggtgaatatcatcgtgttcgatccgaaaggctgggcgctgttccgttccttcaaagccgtcaaggagaagctggatacccgtcgtggctctaattccgagctggagacagcggtgaaagacctgggcaaagcggtgtcctataaggggatgtatggcgatgtggccatcgtcgtgtattccggacagtacgtggaaaacggcgtcaaaaagaacttcctgccggacaacacgatggtgctggggaacactcaggcacgcggtctgcgcacctatggctgcattcaggatgcggacgcacagcgcgaaggcattaacgcctctgcccgttacccgaaaaactgggtgaccaccggcgatccggcgcgtgagttcaccatgattcagtcagcaccgctgatgctgctggctgaccctgatgagttcgtgtccgtacaactggcgtaatcatggcccttcggngccattggttctctgtggaggagtccatgacgaaag

SEQ ID NO: 102586 - DNA, 405 bp, Homo sapiens
  misc_feature (1)...(405): n = a,t,c or g
attattttaatataatttatcttgctgagatagcaagtcaagtttataaagaagatgcatttaggaataatcctaaaagatacaaatgtgtattaaaaaaaaaaaaaaaaaggggcggcctttttagagtatcaaggtttactaccgcgggctttgaagggaatattttttttatagggcgccataaatgcaataaattggccgccgtttaacaacgtcgggatgggaaaaaccttggggttccccaatttaatggctttgaagcaaatccccttttccccagttggggaaaaaacgaaaaggcggggnnnnnnnnnnnnnnggaaaancccgggnnttccccattttannccctttggttcaaatccccttttcccaaattgaggaaaaagaaagagacctttn

SEQ ID NO: 102587 - DNA, 390 bp, Homo sapiens
tttcgttgcagcctcaaattcatgagctcaagtgatcctcctgcctcagcttcctaagtagctgggactacagttgtgccccactgcctcccagagtcatttttaactatactgaccatttaaactatttgagtttctctgatagttagggaaacatactaattaggtatgttttttatgaacttttaatgctggttattagtacaatcacaggggtcttaaatattcttgaggatattttaggaagtaggaagaataatgatgatgatgaatatgatgatgactatggtagtggtggtggcggccgctaatataacagggcactggctgcattctaagactttgaatggattaactcagttaaccttctcaacaggttgtaagggggga

SEQ ID NO: 102588 - DNA, 432 bp, Homo sapiens
tttcgtctttttaaatttgctttgatggaactttgttccatagaaggcatctcagatcagcctttattttttgtttttgggttttttttttttggcaaggaagcttcctttggcccccaagggggaagggaaggggggaaatttaaattaatggaacccttggcaaagggggtaaaaggaatttcctgccctaaaccgccccacccttgtttaaacccaccaaaacccaagagggggggggaatcttccccccctgaaggcccaaaaaaaactggggccccgggcccggcaaaaaagggccttttttttttaaccaaaggcaagaacccctggccgggaccgggaaaaacaaggaaaaaggccgttttcccaaaaaatttttaatgggcctttaaggccaaggtgaatctttaaaagaaaaccatggctttc

SEQ ID NO: 102589 - DNA, 758 bp, Homo sapiens
  misc_feature (1)...(758): n = a,t,c or g
ccgagttacccttgcggcgcacgcctccctggacaagttcctggcttctgttagcaccgtgctgacctccaaataccgttaagctggagcctcgggggccatgcttcttgccccttgggcctccccccagcccctcctccccttcctgcacccgtacccccgtggtctttgaataaagtctgagtgggcggcaaaaaaaaaaaaaaaaaaaaaaaaaaaaaaaaaaaaaaaaaaaaaaaaaaaaaaaaaaaaaaaaaaaaaaatttttttttttggggggggccgttttttttttttttgggggggggattatttttgggggggggggggggttaaaaaaaaagggggggggaaaaaaaaccccgggccccaaaaaaaaaatggggggggaaaaaaaannttttttgtattataagataagtacaacacacactccctaagtcctggtatcactatctttgatgcatacctagcccggcccaaatattatatgttttaacaaatcacaaatataaaagttttactttaagaatttgtaaaccattgggtgtcctttcactatgaagcacttctgccaaaaaaaattcttttggtgatatctaaaaaccgtaacttctagtcgttgaaaaaaaaccctccatatgatcaaattctctcttcctagtgcatttttcctaaaaaccgtcaaaataaaattcataattaactatttatttatcgtcccttagtagttcggatcacctattacaaatataact

SEQ ID NO: 102590 - DNA, 767 bp, Homo sapiens
  misc_feature (1)...(767): n = a,t,c or g
cgagttcacccctgcggtgcacgcctccctggacaagttcctggcttctgtgagcaccgtgctgacctccaaataccgttaagctggagcctcggtggccatgcttcttgccccttgggcctccccccagcccctcctccccttcctgcacccgtacccccgtggtctttgaataaagtctgagtgggcggcaaaaaaaaaaaaaaaaaaaaaaaaaaaaaaaaaaaaaaaaaaaaaaaaaaaaaaaaaaaaaaaaaaaaaattttttttttttgggggggcccctttttttttttttgggggggggattattttttgggggggggggggggtttaaaaaaaacgggggggaaaaaaaaacccgggcccaaaaaaaaaaaaagggggggaaaaaaaaaannnnnnnnnnnnnnnnnnnnnnnnnnnnnnncnnnnnnnnntnnnnnncncnnnnnnnnnnnnnnnnnnnnnnannnancnntnnnnnntnntntnntnnntttctnncttcctccntcttctaattnnctttttcttacttttcttttctaacctaattattttctttaataanctttaatttaatataaanttattataaaaatatttttttttttnntttattanatataattaataaaattatatattttttttttaattctttataacatcttattttctcttttctacttctttatattaaaattaaatatattttttaaaaatnatntttctannaatattacataaaaaaataaaaatac

SEQ ID NO: 102591 - DNA, 944 bp, Homo sapiens
acgatgcagtccgtgccaacgacgacctgaaggagaacatcgccatcgtggagcggcgcaacaacctgctgcaggctgagctggaggagttgcgtgccgtggtggagcaaacagagcggtcccggaagctggcggagcaggagctgattgagactagtgagcgggtgcagctgctgcattcccagaacaccagcctcatcaaccagaagaagaagatggatgctgacctgtcccagctccagactgaagtggaggaggcagtgcaggagtgcaggaatgctgaggagaaggccaagaaggccatcacggatgccgccatgatggcagaggagctgaagaaggagcaggacaccagcgcccacctggagcgcatgaagaagaacatggaacagaccattaaggacctgcagcaccggctggacgaagccgagcagatcgccctcaagggcggcaagaagcagctgcagaagctggaagcgcgggtgcgggagctggagaatgagctggaggccgagcagaagcgcaacgcaaagtcggtgaagggcatgaggaagagcgagcggcgcatcaaggagctcacctaccagacggaggaggacaggaaaaacctgctgcggctgcaggacctggtagacaagctgcagctaaaggtcaaggcctacaagcgccaggccgaggaggcggaggagcaagccaacaccaacctgtccaagttccgcaaggtgcagcacgagctggatgaggcagaggagcgggcggacatcgccgagtcccaggtcaacaagctgcgggccaagagccgtgacattggcacgaagggcttgaatgaggagtagctttgccacatcttgatctgctcagccctggaggtgccagcaaagccccatgctggagcctgtgtaacagctccttgggaggaagcagaataaagcaatttttcttga

SEQ ID NO: 102592 - DNA, 429 bp, Homo sapiens
ctctagagcggccgcaatacagtgcctagtattaacttctttgggtcatatacatctttgcatgcctacatgcctattcctagagacacacacatacacaaacattccaaggagttttaggggtcttggagctcagatcaacacctagccttattttattattattattttttgagacggagtttcactcttttttttttttttttttttttgggacccctctttattggggggggccttccaaaattggtcaacccccttttccaaatggcctttttagggggggggtttaaaacccaaagggggtttgggttgtaagggaaaatttttttgggggggtgaaccaaatgggggggaaggtggccccattattggcggaaaccccgggaaacccgggggttccaaaaatttgtggcccctaaacccccg

SEQ ID NO: 102593 - DNA, 410 bp, Homo sapiens
cctgtctgcctatcagggtacccctctccctgccaatatcctggactggcaggctctgaactatgaaatcagaggatatgtcatcatcaaacccttggtgtgggtctgaggtcttgactcaacgagagcacttgaaaatgaaatgactgtctaagagatctggtcaaagcaactggatactagatcttacatctgcagctctttcttctttgaatttcctatctgtatgtctgcctaattaaaaaaatatatattgtaaaaaaaaaaaaaaaaaaaaagggccggccgctcgggattaaaaattagcggacgcgggggcggacccgggggttaaacagttacttgggctccaaggttacgggtaaaaaagggaaacaaaattgggcattatacgggctttattttgcaaa

SEQ ID NO: 102594 - DNA, 393 bp, Homo sapiens
tctcaagtacccagggacacaaacactgcggaaggccacagggacctctgcctaggaaaaccagagacctttgttctcctgtttatctgctgaccttctctccactattatcctatgaccctgtcacatccccctctccgagaaacacccaagaatgatcaataaatactaaaaaaaaaaaaaaaaaaaaaaaaaaaacctaaccgttttaaaaacttaaatccccctgaaggttttagaaaatggttttaaaaaattttggcctattttgggaccataccccccttaaaaaaattttgaaagcccaggggcttcaccctttgacaccaaataaaaaaccccttcctgagggaacctttagggggggaaatcccccctcaggttgaaaaccag

SEQ ID NO: 102595 - DNA, 370 bp, Homo sapiens
ctctcctacttacaggactcaacagactaaccacagacctatactccctctacatatttaccacaacacaatggggctcactcacacaccacattaacaacataagaccctcattcacacgagaaaacaccctcatgttcatacacctatgccccattctcctactatccctcagccccgacatcattaccgggattttctcttacacaagacattacgtaaacagcagcacctatttggaaacaaacgaacgggggggctcgtacaaaaatcgcttgggggggccggaatccaagggccttcggataaaagatgactccctatgttgggggccacttcatgacacaagcgcgtattatgaaaacaaaac

SEQ ID NO: 102596 - DNA, 415 bp, Homo sapiens
ctagttctagatcgcgagcggccgcccttttttttttcaagtattggaaggggtggggagatatataaataaatcatgaaatcattacaaaaaaaaaaaaaaaaaaaaaaaaaaaaaaaaaaaaaaaaaaaaaaaaaaaaaaaaaaaaaaaaaaaaaaaaaaaaaaaaaaaaaaaaaaaatagggggggggggtcttaataaaaaatctcggggggccccacaataattccctggggaaaaaaaaatttttttttttttttagggggtaaaaaaaaaacaacccgttttttttaaaaaaaaaaaatttttttgggggggggggtttatccaacccccccccccccacattaaaaagcttttagaaaaaaaatatttttttttgggggggggggggggacccccgcccttttctcg

SEQ ID NO: 102597 - DNA, 378 bp, Homo sapiens
aaaatgctgaagaagcccaagtttgaattgggaaagctcatggagcttcatggtgaaggcagtagttctggaaaagccactggggactgagaaccagagcttgaaattcaaagctgcgatcccttcacagcagtaaaccagctctttggaaccgattccatcaccccaataaaggagctcttcacagcagaaaaaaaaaaaaaaaaaaaaaaaaaaaaaaaaaaaaaaaaaaaaaaaaaaaaaaaaaaaaaaaaaaaaaaaaaataaggggggggggccgttttaaaaaaactcttggggggccccccccttcccccggggaaaagaaatttttttttttttttttggggggggaataaaaagccccgggggggtggg

SEQ ID NO: 102598 - DNA, 418 bp, Homo sapiens
cccacgcgtccgggaagaggcaggcagaactggcgctgcaagtccagtttcaacaaactattttctatctgatatgctaacacattgttggagcttgtctcccttaaaaaaaaaaaaaaaaaaaaaaaaaaaaaaaaaaaaaaaaaaaaaaaaaaaaaaaaaaaaaaaaaaaaaaaaaaaagaaaaaaaaaaaaaaaaaaaaaaaaaaaaaaaaaaaaaaagaggggcgggcccattgtttgaactttgcttcccctccccccttttcgtggggggaaaaaaatatttttctttttttttggggggggaaaaaaaaaaaaagggggggggttgagaaaaaaaaacttttttttgggggggaaaaaaaaaaaaacaccccccccccccctttttcttggtttggggaagtaaaatcttt

SEQ ID NO: 102599 - DNA, 220 bp, Homo sapiens
cctccacaggctgggtggcccggaggctgggctgggcgagtatctcttcgaaaggctcactctcaagcacgactaagagccttctgagcccagcgacttctgaagggccccttgcaaagtaatagggcttctgcctaagcctctccctccagccaataggcagctttcttaactatcctaacaagccttggaccaaatggaaataaagctttttgatgcc

SEQ ID NO: 102600 - DNA, 490 bp, Homo sapiens
  misc_feature (1)...(490): n = a,t,c or g
cgcctccccgttttgagcgccngtnntnnnnaattgacccgcgctgcaggaattcggcacgagcccctctctccttggccggcccacaccctggaatgggagacgcatcgaatcacatgggacagatgtaaaagggtccaagttgccacattgcttcattaaaacaagagaccacttccttaacagctgtattatcttaaacccacataaacacttctccttaacccccatttttgtaatataagacaagtctgagtagttatgaatcgcagacgcaagaggtttcagcattcccaattatcanaaaacagaanaaaaaaaaaaaaaaaaaaaaaaaccctcgggggggggccgggcccccaattccccctaaagggagccgaataaaaattcatgggccggggtttaaaaacggcgggacggggaaaaaannnnnnnnnnnnnnnnnnnnnnnnnnnnnnnnnnnnnnnnnnnnnnnnnnnnnnnnnnn

SEQ ID NO: 102601 - DNA, 1077 bp, Homo sapiens
  misc_feature (1)...(1077): n = a,t,c or g
cacttcgcattgacccgctgctgcaggaaacggcacgaggggaaatgcaaacgtgcctttgatgccactacagcgaggataaagacggtctggaaccccttgtgggtacaacgtaacttctcagaacggcaccatctactcccctggctttcctgatgagtatccgatcctgaaggactgcatttggctcatcacggtgcctccagggcacggagtttacatcaacttcaccctgttacagacggaagctgtcaacgattacattgctgtttgggacggtcccgatcagaactcaccccagctgggagttttcagtggcaacacagccctcgaaacggcgtatagctccaccaaccaagtcctgctcaagttccacagcgacttttcaaatggaggcttctttgtcctcaatttccacgcatttcagctcaagaaatgtcaacctcccccagcggttccacaggcagaaatgcttactgaggatgatgatttcgagatagcaatcactggggaagggaaaccaacacggatgcctcagtcaaggaagaaaagctgccacatcatttcagtactaatatcggctaagcttaatagagcatttttataaattaagaacttaaaacggtattatttttaaaagactaaaaataaatacagacatagtttctaaaannaaagnanaaannaaaaaattcctgggggggggccccggaacccaattccccctatggggaggcggattacaattcccgggccggggttttacaacgccgggactggaaaaaccctgggttacccaattaaatcgcttttttgaaaacaaaannnntgggngcggggcggaccggggtttttggcgntctttttcncnttgtctgggggggggcccgccctccgggggctcgggattnccctcgtgggctttgntcctctgtgcccntttgtccccnggggggcgggcgggcccccccgtggggttcncngtttntggccgtgcgcnngngnccagatngnncncntcctcgctnnctgcggcatgataacccggtggtacaccggtcgcaatcatctgcggcc

SEQ ID NO: 102602 - DNA, 507 bp, Homo sapiens
  misc_feature (1)...(507): n = a,t,c or g
agggnggggnnnnnaatttgcccccggcttcaggcatcgcgctgcaggaattcggcacgagggaacccggtccctcctgggacccttccagtagattggatttcactccatggactcctcctcccctctccccctccccctcaggggagccggcagagccaaacaaagaaagagattaacaagaaaggaagaagctgtaggactaaggactgaggatcctggggtgtcccccaccactttcccctgccctgtcgcaggggcaagtgaggagggggaatccagaattaaggcctagcaggcctataggaaccctcagagatgtgtgagatttaagagatctagatttttttttaaccaannnaaaaaaaaaaaaaaaaaaaaaaaaaaaaaacttgggggggggggccgggccccaattccccctaaaggggggggaaaaaaaattccgggggcggggtttaaaaagggggggggggggggaggnnnnnnnnnnnnnnnntnnntntg

SEQ ID NO: 102603 - DNA, 488 bp, Homo sapiens
  misc_feature (1)...(488): n = a,t,c or g
acggacccgcctttcggattcggtacgagnnnnnnnnnnnnnnnnnnnnnnnnnnnnnnnnnnnnnnnnnnnnctgctctcaacatatgtggggcgcctcagtgcccggcccaagctcaaggcctttctggcctcccctgagtacgtgaacctccccatcaatggcaacgggaaacagtgaggggtggggggactctgagcgggaggcagagtgtgcctttctttctccaggaccaataaaatttctaagagagctnnnnnnnnnnnnnnnnnnnnctnnnnnnnnnncccggcccccaattccccctatagggaggggtataacaattcaggggccggggttttacaacggggggaggggaaaaaaannnnnnnnnnnnnnnnnnnnnnnnntnntnnnnnnnnnnnnnnnntnnnnnnnnnnnnnnnnnnnnnnnnntntncnnnnnnnnntnnnnnnnnnnnnnnnnnnnnnnnnnnnnnnnnnn

SEQ ID NO: 102604 - DNA, 489 bp, Homo sapiens
  misc_feature (1)...(489): n = a,t,c or g
aatcgccccgcgctgcangaattcggcaccaggaactttcagtcctctaggcctcgcacgtgctgtcccatcaatacctgaaatgtcaccttcctttcaactcctttcccctcgttacctccaagcacctatagagaaggaaaaataatcttccttctaccagtttgagttctcagctgggactcctgtaacaacagacagaatgaagagaaaaacaagggtattaacatgtgcatttcatatatacatgggacatacccagggaatgagtaattctaaaggtgtggctgagaactccattttatacagcatcgtcaacaaagaacaatacgtttttggagaagtgacaacacaaaggaaaaggaccttaaaggctgggcgcggtggctcacgcctgtaatcccagtactttgcgaggccgaggtgggcggatcacctgaggtcaggagnatgagaccagcctgaccaacatgtggtgaaacctcgtct

SEQ ID NO: 102605 - DNA, 470 bp, Homo sapiens
  misc_feature (1)...(470): n = a,t,c or g
atggggannnnnnattgacttgcatcgcctgcaagaattcggcacgagggatggtctccatctcctaacctcgtgatccacccacctcggcctcccaaagtgctgggattacaggtgtgagccaccgcctgtaaacctcctctttcatctcacatgacctccaggcccaaccttttcctactgtcataactaatcgtgttttacttctcagcacagaacaatatgtacataataaaaactagcataaatttaataattcaaaaaccaacaagaatcccttttattataaaaataatcactattattgcttaaactattttacacatttgatttttctaagttctacatataagtatatattgtacagaaaagcaccagagacaggagaataccttttaaccaatgtgatcaaaaacactatctgaatggctaaagacaggtagtaaaacagggaaactattaaacatata

SEQ ID NO: 102606 - DNA, 253 bp, Homo sapiens
  misc_feature (1)...(253): n = a,t,c or g
tggtggagaaaaaaaaaantttgactcgactgcggattcggaccaggtgaaccccatccagggcttagcctccaagtgggactacgaaaagaacgagtggaagaagtgagagatgctggcctgcgcctgcacctgcgcctggctctgtcaccgccatgcaactccatgcctatttactggaaacctgttatgccaaacagttgtaccactgctaataaatgaccagtttacctgaaaaaaaaaaaaaaaaaaa

SEQ ID NO: 102607 - DNA, 447 bp, Homo sapiens
  misc_feature (1)...(447): n = a,t,c or g
ggggaggngnggnngnaaatgatcgcatcgagggatgttngaagccttttgtttgtcgttctggctgagttcgtgcttaccgcagaatgcagccataccgaatccggcttgtgattgcgccatccccatagcagccatcacatcagtaccggaaagagagtcagaagccgtggcccgtggtgagtcgctcatcatcgggctttttggcgaatgaaatttagctacgctttcgagtctcatgcgccttctccctgtacctgaatcaatgttaggtttccgcagaacactgcgccggtatcgatatacatttggttggcaaacttgagtggtttcactgctggcgtatgaccaaagatgaacgtgtccgcgcctttgatttctttcacgatcccgttttgtgagttgctgattcgttcgcggttccagattacctgctgatgatcaact

SEQ ID NO: 102608 - DNA, 450 bp, Homo sapiens
  misc_feature (1)...(450): n = a,t,c or g
nttgccccccgctgtcccccggctgcacgaattcagcacgagcggagccgtcagtccacgcactcccggatgcactcaacaacctaaggacgcacgagggttccggggatggtccgagctcgtccgtagattggaatcgccctgaagatgtataccctcaagggatttatgtcatatctgctccttccatctacgctcgggaggcctgacgcgtctcctccatccgcacctggagtcagagcgaggatttttgtatttgctcggtggtgcccagtctctgccccagaggctttggagttcaatcttgaaggggtgtctgggggaactttactgttgcgagctgtaaataatggctatttatatcctattttttctcaccccatctctctagaaacacctataaaggctattattgtgatcaaacaaccaaaaaacaacaaaaaaaaccct

SEQ ID NO: 102609 - DNA, 503 bp, Homo sapiens
  misc_feature (1)...(503): n = a,t,c or g
atggaanccccnnnnnnattgacccggctgcaggtctgctgtcactcttctcctcctctgttgattgtcgcagcccggattcaaatgctgcagccgcccaggcgggcggtttaagaccggctgcacggcgctccatcgtttcacggacctgctgggcaaaaatttcctgatagtcgtcaccgcgttttgcgcactctttctcgtaggtactcagtccggcttctatcagcatcaccgcttcctgaacttctttcagaccatcgatggccatacgaccggagcctatccagtcgcagttcccccaggcactgcgggcttcctgaaaactgaagcgcgcttttgaaggtaacgtcaccacgcggcgaacgatggcctcttccagccagcacagaaacatctggctcgcctgacgggatgcgacgaattttcgccgccccataaagtacgcccacgactcgttcgcactggcccgtgccgtggagtagctcatctgggcgtaattc

SEQ ID NO: 102610 - DNA, 460 bp, Homo sapiens
atttgccccgccttgaagcggctgcaagaattcggcacgaggagagagagagagagagagagagagagagagagagagagagagagagagagagagagagagagagagagagagagagagagagagagagagagagagcccccccccccactctgtgtgagacataacactctctctctctctgtggacgatctgtccccctctcttgccttgcctgcgcactggatctatattgctctttctcacgcgcgtgtttttgtgtttcagagagagactctctctctctttttttttgaggctctgtgggctcctatattttctcatatgcacatgtgcgcgccgcgcgcacacacacgcgcgctctttttttttttttcacgcgcgcgcgcagtgctctttttttgtgtgagatctccccctctctttaactctttacacactctctctctgtgtgagagaa

SEQ ID NO: 102611 - DNA, 439 bp, Homo sapiens
cttgtgttcacttgtttatctgctgaccttccctccactattgtcctgtgaccctgccaaatccccctctgcaagaaacacccaagaatgatcaataaaaaaaaaaaaaaaaaaaaaaaatttgggaaaaaaatttaattttcaatataaaaaaactttttccacctaaggaaatactgtttcgggatatcaaagcaaatttctgattaaagaccaattaattaaaaagagaatcccccccaaattaaaaaaaaaaaattttccccggcttgggggcccatgcctttatttccacctactcgaaaggggggggggggagaaaaatttgaccctagggggttgaggctgggggaaactgtaaaaaccctgttgaaaccagcctgggaaaaaaagggaaaccctgccccaaggaaaggaaaaggaaaaaaaaaaaagggga

SEQ ID NO: 102612 - DNA, 507 bp, Homo sapiens
tctcctccgaatatcctggtctggttctccagttcagtgtttcagattaaatcccctgacacagtaaaactcatgtgcactgacttctcctccgaatatcctgctttggtttctccagttcagtatttcaaattaaatcccctgacacagtgaaactcatgtgcaccgacttctcctctgccccagatggtgtaacctgggctggccagacaggcacctccccagtgggcgtgtcttcagacaaaggtggctttgctttgttgaagttactgatataaagatcagcgcctgaaacagattctccgggatattaccggagacggagtgttttattattagcctttcttaggtggacatttccatttgaattacaagtcctttaggctgggcgtggtgcatggctgtaatctcagcaccttgggaggctgaggcaggaagatcacttgaggccaggcgttggcgagcagcctgggcaaggtggcaagaaccttgtctctacaaaaaaaa

SEQ ID NO: 102613 - DNA, 583 bp, Homo sapiens
gagaacacacagtgccgggagaccctatcaatgtaatcagtgtgagaaagccttcaggcacagctcctcactcactgtacacaaaagaacccatgtgggaagagagaccattaggaatggcagcctgcctttatccatgtctcatccatactgtgggccccttgctaattaacttccattttgtaaaaatataaacacatggggctatgactttccctcgtaatactcctttagctgcatcctgtgtttcaatgtataatattttcattttggtttaattgtaagtattgtcttaacctccattatcgtttattctttgacccatctattatttggaattagatttttcaaaactaatatgtggatatattttcatagaggtataatgacttatagtgaaatgcatacatctgaagtgtacagttggatgagtttgacagatgcatacatgcatgtaaccaccaccccattccagatatagaatgtttctatctctctggaaggttcctgcatgttatatggctatttcttagttgcctttttgttgttggtttctaatttaattacatggtgagaagagtat

SEQ ID NO: 102614 - DNA, 204 bp, Homo sapiens
ctccgcccgcggccacaccgcagggaccctcgccaataaacagccctcccaccaaaaaaaaagcaaaaaacaaaaacagaactaaaaaaacaaaaaaaaaaaaaaaaccgcccccctcaaaaaaaaaaggcccccaaaaaacccctaaaaaaaccatgggggggcctttaaagaccaccacataggtggggcgccccccccccg

SEQ ID NO: 102615 - DNA, 462 bp, Homo sapiens
  misc_feature (1)...(462): n = a,t,c or g
gaaagaaacctgagaccctngttgtagacactaggcagtgcggtggaattcgcagggtgtgcaaaatggtgattttcctattcaatcatttcttctacgttagctggtattcctctctaaatatacccctccccttttagtatcattatggattcatggattgagccttctttccttccttccttcccttccttccttccttccttccttacttacttacttacttncttccttccttccttctttccttacatccgttattaatccattaccttcattgttctttttggttttcaaattgtcccaattttggacataagagcccatttaagctgacatggacctaacagaatttccaaactcaccttttctttcctgtgtgggtattattgactttcaaaggcttgggatttccctctagcctgcatctacttgttctgtgaaatttaggtaggttataan

SEQ ID NO: 102616 - DNA, 476 bp, Homo sapiens
  misc_feature (1)...(476): n = a,t,c or g
catcgaggccaatcgtagaccactaggacagngcggnggaattcctggcacttccattgttcatatattgatatgcttaatgatgtttctgaagatttattcatttttcctttattcctttttattctgttcctcagcccagatcatttcaatgcacatatcctcaagtttgctgattctttcatttcctgctcagatctgctgttgagcccctctagagaattttttatctcagttattacacttttcaactccagaatttctatttgccctttaaataacttaatctgttgatattctgaatttggtggtgcattgttcccatactttcatttaattctttagacatggcttcctttagctcattgaacatatttaaaatagatgattggcctggcacggtggctcacgcctgtaatcacagcactttgggaggccgaggcaggcagatcaccggaggtcaggcgtttgagact

SEQ ID NO: 102617 - DNA, 455 bp, Homo sapiens
  misc_feature (1)...(455): n = a,t,c or g
ccccaatagtagacccctagtttagagtgctgtaattccttgttgggcaagctggtctcaaactcctgacctcaggtgatctgcctgcctcaggctcccaaagtgctaggattacagccgtgagccaccgcacctggcgaactcattatttttaatgaccacataaaatctccttgattgatgtgtcataatgtatttcatcagccctcctgatagatactttgctgccacacatggtgctactgtgcatatccttgcatttacatctttgagcacatgtgtgagaatatctttagactaaatttttagaaatggagtaggttaaaaaatatttgcattttaaattttgatattgctaaaattttctccaaaacggttttgctaatttacatacctatcaaacatatatggaagtgcctgttcccccctaccctgcttgtcacagttatcttcan

SEQ ID NO: 102618 - DNA, 2259 bp, Homo sapiens
ttttttttttttgcggaggagcaaacgcggctcagtttattagaatatgcaaaagatgatggactttcctccacaaatacagattgctgcttctcagtttctatcaagagcaagacaacagttgaaaaactgtaattcctgatgaagaagcaaaaaagttatcagtttacaaaccagggataacaggtgatttcaacaaaagataaaaaacttttttttccaaaaaatcaaaattttcaagtattattccagatgacatgggcaaagctacgcacacggcggaagccaagggtgcccctcaggctctgtagggtcttggaggaaggggcccggggcagcatgagggagccggcgcgtcctgggacctgcctccagccccgggcttggggccgtggtcactcacacaagggagcagcacgtcctgggacctgcgtccagccccaggctcggggccgtggtcactcacacaagggagcagcatgtcctgggacctgcgtccagccccaggctcggggccgcggtcactcaccggttagcaaggagcgactaacttggcggccacgtcgagggttagcagttttggacattggaaggtttctttttttaataaacagaagcatatgcttattctttcaaataccatactatacccaattttagtcaatttgtaaattataaattatattatttgtgctacagtttgtgacatttaaatcttattagaagataagcaccaaacctattaaaataaaaaatagataaaatgctgtggttttcccagcagcaggatattgtgtacgtcctgtaggctgtaaacttatgctcccttctcctgaaacaatgtttttgataaacttgcccttctcccttgaaacttttcctgaaaacagacttccgctttaactgtagtttcggaaaatgtacaaaagagcaaaactgcccctctcggcgggacggccgcatgttacagaaaggcttcgtctctgctgctgatgccaccacgagccctgcccagcgctcaccaggagggcgggctgcggcccccggggctctggggagggtctcactcagagggtaaagctccacagaagagtcaccccagagcacctgtcggagaccctgcgtcccttccctcagggggctgtgaaaacaccttgacgtgcttgtctctgtattttaaaaacacgctctcttcacctccagtgctgaaagctgctcagggcctctggatgcttagtttttgaaccttgtctgttcacagatatgattgaatttcatggcgtggtgagctttcacctgagtgcggcagttacggccccagtagcagtcaggacgggatgttacggccactggcaactcggaagcaggaatgttctgccgatactgataggtcagctcacggaagctgcgcaggccacagcagtaacacagaacggtgtctcccgtgactctgtaatcagacagcagaaacactccccgctggagagccatgaggctctcggtcaacatgtttttccatgtcaaacctctggttgccaggtaattcttcaggatgtctgactcgtagctgttgttgttcagcacgccgtccagacacttgtcacccaggttgagctcacaaaacggggccaggcagccgtagcagccggtccgggtgcagccccagtacaggtggcagaaaggctgcaggcagaccgcacactgctgaggggcgacacgcgggtcctgctcgcgctccgctctccggtcgggcatgggctggaagcagcaggtgcacagggcgtggcttccttgcagagggcacacgtaatcctggactgctgtcgtcaggctgacggacgtggagggtgcatcccccagggcctgtggggctcctggctcgccctcgggtgctgggcagtggggaggctgcgccgcctgccttctgtactcaggacactgccggcacacgacgtatggctggctgcaaggaagcacagggccgagctgtgtgcaggccccaagcctctcaggtagggccggtgcaacgcgggtccgcagccatcacagctcagctccaccgtcgctcagctgcttggtgtgaggggaagggccgggccccattcctgtccagcaccccagtgttagagagggaccagaacgagtcgaagggcaaggacacgcctctctgcatccccagctcagcccccacgctttggagccccatccccagggtcactacgtacaaaaagacgtgtgctcccaggagacgacgccaga

SEQ ID NO: 102619 - DNA, 465 bp, Homo sapiens
  misc_feature (1)...(465): n = a,t,c or g
cttcgcgaccttagattgtggaccactatccatgtggtggaattccaacgtctggctctgtcacccaggctggagcgcagtggcacaatctcggcccactgcagcctcgacctctggggctcgagggatcctcatgcctcagcctcatatgtagctggggccacagacatgcaccaccacacctggctcgaggccattttagttctgaggttgagcagctcaggagccggctccagcacggtgctgtgtttgtgaaacagagaaaggggacccccgaggaccccagacagggccttaggactctcatatcttcttgtcttctccatctggtggctcttgctctctggttttctctaccttttcatggccccagaatccatatgcagtaaaggaactctctggaataaaattaaagtcctcctatnnnnnnnnnnnnnnnnnnnnnnnnnnnnnnnnnnnnnnnnn

SEQ ID NO: 102620 - DNA, 958 bp, Homo sapiens
ttcggcacagcttggcgttcaatcgattctcctgccttagcctcccaagtaactgggattgcaggcacccaccatcatgccctgctaaattttgtacttttgtagagatggagtttcaccatgttggtcaggctggtcttgaactgctgacctcaggtgatctgcccaccttggcctcccaaagtgctgggattacaggtgtgagccaccatgcctggactcgttgttgttgttgtttttaattagtgaggagctacaagaacacatttataaaaattaagaggaaacagccccactgcatttgagaaggttaccatttccttcgaagttcctgctgttgccccttcctggtgggggagacactgtcctgtttcagtcattccgttgctttgctttatagttttattaatgtgtttgtgttggctttgcatgttttcaaatatatgaatgaaatcatgcagagtttattcttttacagtttgccttttcacttgattatgttcctgagatgtatccggattattgtgtgtaggctgtatgggcattccttttccctggctggcctagtgatccattggaaaattacaattaattggatttttctatgtggttccactggtcatttttctgcccctgtgccctttgggaatcatctcctaaactctagtctcggcccttgctcttccatgtaaccttgagaatcagcttgtcaaattccccccaaaaaccccttgagatgtagaatggaacccagctgaatctatagatcagtctggataaaatcagcacctgtgtaaaattgaattttcccattcatgagcagggtttatttctgcactcaatgttttcaataaagttgtgtaccttttcccataaagatcatgcctttttaaattggattaattcttaagtatctgatatcgtatgctattatacatgcactatcaaaatagactgt

SEQ ID NO: 102621 - DNA, 2552 bp, Homo sapiens
cccacgcgtccggctgggattgccatatgcatctgcatgtgcatgaagaaccacagggcgacccgcgtgggcatcctcaggacgactcacatcaacaccgtctcctcctatcctggaccaccaccctacggtcacgaccacgagatggaatactgtgcagacttgcctcctccatactcccccaccccacagggtccagcacagcgttctccaccccctccttatcctggaaacgcaaggaaataatctatctcccagaacagaacatgtgccaatgggcgatcttgcctggaataaaatgcctctactcagaaacaggcaggaaagaattgctccaaggaatactttttggggtcagataatgtgtcaggtggaatatccctgctaggagatataggatttctactctgctcaaagctgaccccatctggagtattaatgtttggttctatggaaccacattttaagagatctgctgatccacctaagcacattcagggaagagtaatgtaattgacaaaatatctgataatcatgttgtttaagggctaggtgaagaaagtttcagtattgatcctggaaaaaaagaagatctaagtaggatgggagaatgatttggcccacacaaggaagcaactttattctatatagctttaaaagtcagaactagaattgttcattctttcattcatcaataaatgtattttgagtgcctaagagtttactatgtgcctagcactgtttgaggtcctgatggaagttacaggatgggtactctggttttagtacaagaaagagcaatgactagattgctttgtgaagctcttggtagagacacgctccagaagggataacaaaatcaaatagtagatgggttcattgggcctcagaagttctgctcgtattttaggtgggtgtgaagtgaatttctatatgtccaggagtgaatacaacagaaagagttggatcttatttatttaattagggagttaaaacaagaccaaaaagactcaacagccgcttgaagccaagaactcttcaatgccagctactgccacctaaaaatcatctggctttatagtggatcagaataaaggttattctaactgtggggagaaaaaaaaaattgtatcaagttccacaggtagcagacacttcacttccaagtaaaagatgagaaatcaattattcccacaggattttaggtcagggagcaaaaatctcagaacttgaccatgaagatacacaacagactcgcaaaaataaagtgggaaatgaagttcagattcccttctgtagatttccttaaaactattatttttttcttcttcgtaaaattttgataatctgttctcttaaaaaagttaatgacacaattaagatactgacatcaaattgttgccttttaccaaaatgcaaattttatgaagtgcctacctttatatgtataaagcatttaataaataattctaatgtgccatattttgctgtgagtgaccttaacatttatatttttatatgaattgtttcatgtatttataaaaattgtatattgaacattggaaatagatgattagatttttgtgtcattttacaattaaatctaaaatgcttaatccaatatcatcatcaaaattcagtgaaatcccaaaacagtgccaagaattttgctgaatgaaacaatcaaacaaagcattttaaggtgtaagttatagtacctgtacttgcagataagaagcttactatatcattattataagtagcatatattactttcaaatacctatattagaaagatattgatctgactgaaatataacctacctgccagtaaggtccaaaggctgaatttgttttgaatgacttccttgatctttaagcactgatgattttcttatatatgaggatgcaaagcattcaagagtttcagcctgttctggtgaggggctccctgacttacataaagttttcagtgcaattttaatagtacatatgctttaatttatttttcttctgcgtgtggtcagacccaattacactgtggctaagactctcaaagtgccagggtttctgtgatgattctgagaatgctgaatacaaatataccttatattctttaaggaaaacggaaaggaaagatcagcagaaatagggttttctcatcttcaccatcaataaacatttattgcgtacctcctatattctgcaaattttccccaaatagaagccagttcagtccacaccatctcttctttgagttgtttatggcctcccttaaggcattttacaaacccataagcctacaatagatgagtatttttactatttgtattaagtgtcataatagcatcaatgtgcacattaccagtatagactgttggagttcactgattgttttcatagatgatgcttcttggggaaaaatagtataggatgtgaaagttttgaattacggttatttaaaaactaacatttgctatgggccaaagtgtttacaataagcaataaagtgaaagaacctattataacccagattataaaaaaaaaaaaaa

SEQ ID NO: 102622 - DNA, 505 bp, Homo sapiens
  misc_feature (1)...(505): n = a,t,c or g
cagtgtncnnnnnttcagattgacnttggtcagngacgngcaanncaagaactgatgacccatggggccaagtctccagatggcacgagagtccataatgcctttttgtttgtgaccactgtatgaccgaatgaatggaatgcatgcgactgattttaggaggatgctaccagtttcggtagagtatgattgcctcgttcaatgtggcgtttttatatatattttgtgactctttatagtttaaattttttgtaagcaaaaaatacctggtaatttttcatttgtttttcatatactggtaccttctttttggctgagatctttcttttacttgtgatatattcatattactcgtttataaaaaatcaaaaacaaaaggaaagaaaacaaaaaaaacttgcacaaaaatactgaggagccaattaatttcctacttcaatgtatctaatgtaagtgaaaatctggatttatttctctagtttacttattttctactttaataatn

SEQ ID NO: 102623 - DNA, 435 bp, Homo sapiens
attgcatttcctagaagcttgcaggcttgcaagagcactgttggcaggaaacgtgatagaaatgaaagtcaggacacaatgtccccgaacacctcggttatccaaagcggctgtcgaggccatcgcgttatcaaattcgcttttatttactgtcgtctcctgcaccctcccgttccccagccaagagggcgaagagtgttttcccccaagaataaaaacagctccgcgatttgaaaaaaaaaaaaaaaaaaaaaaaaaaaaaaaaaaaaaaaaaaaaaaggcggccctttaaattaaagggcccctttaaacccccgttgaaaccccaggggggtctttttgaggcccccccttttggggggccccccccccccggttttttttttgccggggggggggcccccccccgtggtttttttaaaaaaaaggggaaag

SEQ ID NO: 102624 - DNA, 471 bp, Homo sapiens
  misc_feature (1)...(471): n = a,t,c or g
ggacgtcccattgagnccnttaaactgagaccatcagnacagngcggnggaattcatttgaaaagattaaatgttaagacaggcatggtggcttatgcctgtaatcctggcactttggaaggtcgaggtgggaggattgcttgagcccaaaagttcaagaccagcctgggcaacatgatgaaacatcatctccacaaaacatacaaatatcagctctgttatatatgaaataaacagagttttccaaagatcttttataagatgggagaaaggagatgaaatagaagagagattgacttggtccttcaggattggaatctgatagatgggacactagaggaagtttaatgtaatctttttggctatctagatctagtttttaggccctggctagaagccagttagttcctcttctagaatggccaattaagtctacaatgccggccacagtgagcttgtggtatttagctt

SEQ ID NO: 102625 - DNA, 688 bp, Homo sapiens
gcggtggaatttgttatttatatatttaagtagtttgctacatattgtattggatttatttcatgctaaaataattattttcttttttgtttacattgtccatgggaaaatgctaagtcacagatgaatacagcaagattaaatattgcagacctagggatccaaatgaagaactagatgttttagattttatgagattatatcagactatctaaaaagctacatttataaaaagtactggaatacagtaggcataaaacaaacttggtttctattgcatttattacaaattttagaacaaaaccatgtcctttgcagcaacatggatgcagctagaggtcatcctaagcaaattaatgcaggaacagaaaaccaaatattgcatgtcctcacttataagtgggagctaaacattgaatacacatagacaaaaatgggaacaacagacactggggaccactagacagaagggagaatgaggctatgggctgaaaaactaactgttgggtactatgctcatcacttgggtgacaggaccatccatatcccaaacctcagcatcatgcagtatacccaggtaacaactctacacctgtactctttcactaccccctcaaaaaacactggggagtacaatttgctggatcatatggtagaagtatgtttaattttgaaggaaactgccaaa

SEQ ID NO: 102626 - DNA, 460 bp, Homo sapiens
  misc_feature (1)...(460): n = a,t,c or g
nttcgagncccctnnatcgtagacactagtccangccgnggaattcccttccttaaccgtaaacatgatataaaatgaggatcaaatctccgttaatcctagatcctaactatccccatatcctcctcagagactatcgaatttcttactttcttatcttccctaaaataatctatgcataatcaagcatatcattactatcttcacctgcattataggcaacacagcggaacatctgtcacaagtgtcttgtaagatatatgtattggtttctttttctttctttttttttttttttttttttaggaaagggggccttcgcccccccgggggggggggggggggggaatttgggtttatgggacccccccccccgggggttaaagggaaccccccatttaaattttcgggggagggggaaccaaagggggggccccccaaaagggggtaatttttattt

SEQ ID NO: 102627 - DNA, 467 bp, Homo sapiens
  misc_feature (1)...(467): n = a,t,c or g
ggccnntnnnnnnnnnaatggatgtctantagagccagcgtcgtggaattccttggctaatatttttattttttgtagagaagaaggtctcactatgttgccccggcctcaggtgatcctcccacctttgcctcccaaagtgctgagattactcccacctcctttaagctcatagatgtacttaggacagtgcccagcaccaagcaggtgctcaatgtgctaccagctactcttatcatcattgctgtccagtgtttctttttttttttttttggagaaaaaatttttttttttgtgccccggctgggagggaagggggccaatttgggttactggcccctttggttccgggggtaaaggaaattttctggcttaaccccccaaggtccttggaatacaggggggggccccccacccccacaaattttttggttttaagaaaaaaaagggttcccccatgtgggcaa

SEQ ID NO: 102628 - DNA, 457 bp, Homo sapiens
  misc_feature (1)...(457): n = a,t,c or g
nactgagntcccgctaacctacggaagngcggnggaattcgcaacatcaagttcagcagcctgtccaccttcatcgcccacaagaagtattactgctcctcgcacgccgccgagcacgtgaagtgagcgcccacactacagccgcagacgctttgcacgccccgctgcgatgcggggagggggccgcccccaggccgcacggactgccgctcctgggaatcccgccacgcacaggcctcggcggagggggccgcagggggcagcgcccgcctggacccttggcacttaataaagaagttcagtttgatgagaaaaaaaaaaaaaaaaaaaaaaaaatcggcccgccagaaattaaagggcccggtaaaccccgtgaaagacccttaatggtcctttttattgcccacccatctggggttggcccctcccccgggccttcttggccctgggagggggc

SEQ ID NO: 102629 - DNA, 474 bp, Homo sapiens
  misc_feature (1)...(474): n = a,t,c or g
tgaggtncccnaggtggnnnnnaatcgaagacaccttcgagngccgtggaanncggcggagaagaaaacttcggagatggggtttggctatgctgcccaggctggtttctaactcctggcatcaagcgatcctttggcctcccaaagtgctgagattacaggcgtgcgccaccacacccggcctcaccaggcgctggctgcatggccagatctggagcccgggagcaggttctgtgtagagggagtcactctgggagtcatttgcttgtgggtgatcatcagagccctttgtttggagtcaaaatcccaggaagagtgcatagactgagcagagaagagggccagccacctccatagaggcagggagagcagccgagctggagccggaggattcctggacatggagaaggcctgcagttttgtcaaggaagcaagcaaagggtctctttctactcgatgaagttcgctcccagg

SEQ ID NO: 102630 - DNA, 469 bp, Homo sapiens
  misc_feature (1)...(469): n = a,t,c or g
nggtagttttacctgattaccacattgagggcggtggaanncaacctaaaggcatctcggatttgcttgggaggtgggaattttttattaaaagaaaatgaaagaaatgtggagtggaggtggggagaagaggggaaaatcaagctattgttgtagcaaaatgtgagggagaggggatgtggggaaaggggaccgtgcaaacacaccccatttatcacagttaaaaacaaagcccgcgccggcccgctgctttgtcaaccgctgcccggggcaaaggcctggcgtgggggcagcttcccacctcatcctcacacacagcacaacacccaagggccggacgccccgctccagccggacccaaggagggcacagcagcgcaggtctgactctccgaggcgcgcgcgcacactcgcacacatgcacacacacatacagacacacacacacacacacacacacgcgcccaagg

SEQ ID NO: 102631 - DNA, 490 bp, Homo sapiens
  misc_feature (1)...(490): n = a,t,c or g
aatcgngntccactagtccagngttcgaggatccactaaacagtgtggaggaattcgcttatatgcattaaagattgttcccaacgctatatttctgtccgtgggtcatagcccttaaccagcctttgtttgtctgcctgtgaagtgggtgagtcactctcattaaagcacttcctgtgatccacactctcagaatgtaacagtgcatttcacccacacagcccttcgatgtaggggctataatgaatcccataactaaggacactgatgctcagagaagttaagcaactgcccaaggtctcagctggcatgaaataaagccaggatttgagcccaggtcatttggctgtagagcccaaggtgcttactgttaccttatactgctccctcggtggccaagcaggtcatgaacttgcgtactcgagtgatatgactgcctcggccatccaacgtgctgggattgtaggaatgagccaccacacccggcgag

SEQ ID NO: 102632 - DNA, 457 bp, Homo sapiens
  misc_feature (1)...(457): n = a,t,c or g
gggagaactgagacctccgaaactgagggctatcggaagncnggaggaatgcaacggtcatgggaaaggaggtgggtatctggactggggtgggggaatattgaatactcaggaccactgagtattcaatattcttataatagatacattcacactggggatactggctagatgtcagcctcatcgcagctcacttggctatcaatcctgactgttttatgtacgtatatattttttcccaatgcacagataaacttacagagaaagaattcattgaggggacactggccaataaggaaattctgcgactgatccagtttgagcctcaaaaagtgaaggaaaagatgaagaacgcctgatgccaactgttcagctgtcctccctccacctaccactcacatgacacccgtgagcgcctgtgcacacacacacacatgcacacacacacgcgcgcact

SEQ ID NO: 102633 - DNA, 436 bp, Homo sapiens
  misc_feature (1)...(436): n = a,t,c or g
nttgaagacaactattgcagngcggtggaattcggacgggaaggggagtttgagaccagcctgggcaacctggccagacccggtctctattaaaaatacgcaaaacacacacaccacacaccccaccccacacagcccacacaccccacacggccagcagccctttctgtcaccgactccgttcccctggccagtgagctctccgtccccttttcctcccttttcgcacacgtgcctttcctgcctgctcccacctggtgcctgaggcgtctctgcgcctcagcactggctgttcggattgcactacggagggcagtgtaggtttgaaaaggaaagtttcattatatagaacactaccaaggcagggcgcggtggctcacgcctgcaatcccagcactttgggagaccgaggcgggtggatcacttgcggacagta

SEQ ID NO: 102634 - DNA, 460 bp, Homo sapiens
  misc_feature (1)...(460): n = a,t,c or g
gccccccattgaaaaccntnnnnnnatgatgtctcttataccagctggtggaattcggcatatcttcattgtacaagtcttgggaaatacagattccaaggagaaaatataaactatcagtagttccaccacccaaagacaaccactttgaacacagtatggtatttccttgcaggcttttttccatgtgtccgtaggtacatagagttaaataaccaggaacatgctgctggaggaggtctgttgctgtttttactctatcatgagcattctctgatgtctttaaagactctttagggccaggtttggtggctcaccctgtagtcccagcactttgggaagccaaggcaggaggatcgcttgagcccagcagtttgagaccagcctgggaaacagtgaaaccccatctctaccaataaataaataaataaataaataaatattagccagacttggtggg

SEQ ID NO: 102635 - DNA, 486 bp, Homo sapiens
  misc_feature (1)...(486): n = a,t,c or g
gccagtgccaatggagaccctnatagtagacattagtccangaggtggaattccgcgggcaagggaacctctccagtctcaggacaatggtggttgggagaagctaagctaaggtcaaagccaaacacagcgagaacttagcctaagtgtatcggaccagctaggatcaagacccaacccttgactaggaaggagggcatcttgaatgccagttccctaagacagcatttcacgggtgaggtgtattctcccatggcaagacattggaggtgctatcatgagagaaagaacaatggatgcttgcagaacagaacccgcagatgaccactaaggaatgacactggttttccttctctaataaaaataacaacaacaacaacaaaaatagctgggcgtggtggcgggtgcctgtantcccggctactcgggaggctggggcgggagagtcgcttgaatccgggagacggaggttgcggtgagctgggn

SEQ ID NO: 102636 - DNA, 476 bp, Homo sapiens
  misc_feature (1)...(476): n = a,t,c or g
gagagggtncctttcgagcaccatctagttagagcactatctagtccagtgtcaattcagtttagttcgtagtgtcatttgaatctcctgtatacctttttctttttgtctacttgttgtattactgagaacagcatgttaaaatctccagctattattgtagattttctatttttccctttggttttactagtttttgttcatatattttggcattctgttatcaaatgtggatatgtttgcaattgttgtctcttcctattgtattgagcaggaactatcctttttgtcttataatactcattctattgaagaatattttgtgtgctattaatacagctactacaggccatgtgcagtgtggctcgtgcctgtaatcccagccctttgagaagccaaggcaggaggattgcttgaggccaggagtttgagaccagcctgggcaacacagtgagactcccatctctaanaaaaan

SEQ ID NO: 102637 - DNA, 482 bp, Homo sapiens
  misc_feature (1)...(482): n = a,t,c or g
agaggnnnaggcccccccccccattgaagnccntnatagtaagacattagacagagcggaggaattcgcagctttattcataataatcaaaaactggaagcaaaccagatatccatggggcatactatatttagaaagtatataattatacttagtattaggaaagtatactaatattatataacccccttatttacaggccgtacattccaagaaccccagtggatgcctgaaaccatggatagtactgaactctatgtatactgtttttcctatacataaaaacccatgatgaagcttaatttataacttaagcacagtaagagattaacaactaataacaaggtagaagaattatagcaacatactgaaataaaagttgtgtgaacgcagttgtgtgtgctcgctctctgtctctctctctctctctttctctctctctctctctctcttgctctctctgtctctctccctctctcaaa

SEQ ID NO: 102638 - DNA, 1074 bp, Homo sapiens
cgatccacgcgtacgctcgccgcagcctccctctttgtgctcctttcccctgctgcccttccagatgcgctctttccagaaaggcagcacacgcatgtctctgccgtggccccagatcctccccgcgccgccgttttgagcgttcacactcattacccaggtccgtctgggagacccgccgggctcccgccctcccggcccgcagcctcctggccaaaatcctcccgggacaccccacctggactgctgcgaacgggcctccacccgcctccccggacccgcagcgccccccgctccctcagggttctggggtgaaggggtctgaatagcaccaggggaggcggcagggcgggcctgtcctacctgcgcccgagcactgctgagacgacatcccttccagcgccgccacgtagtccagccccagccagccgcggtaggtggttttctctccgacaggcaccgcccggacggtggcatccttgaaaagcaggtcttggccatgatagttggaggagtcgaacattttgaacccgttcttattgtggtcgtctccaaacaggtcctggaagcaccgcaggcagacgacctgctcctcactgggctcaggcagggtcacccgcccagtgccgctagctgcaaattgctttacatacagtgacccaaagagcaagtcatttcagggccccaccactctgattggaagtcataagcttgacaactgattggcctctgtcacccaagcgggtgtggggacactaggcccgcaggtgccactggaagaggcgttcagaagcactgcggtgctccagctcctggatgcagatatctccccacaaacctaaacaatttcgagagggacttgtgttctgcaaccagtcacagaatatcaggtgagctgggcgtgtcttcactgacccacccgcccagggatgctgcactcctctccaccctgctcagaatcactagaatgaccgttctgtggctacagccctaaaagagctactaaaaagaccagaagtagtatgagaacttatgaatacgaatataaataaaggacatctggagaacatgaaa

SEQ ID NO: 102639 - DNA, 440 bp, Homo sapiens
  misc_feature (1)...(440): n = a,t,c or g
natcatgactgacgcaatngcggnggcattcggatatcaccgggtgggccaggctggtctcgaactcctgacctcaggtgatccttttgcctcggcctctcagagtgctgggattacaggtgtgagccaccatgcccggtctcagtacttttttgtttatgtctaagtcagttccaggaaggctgccaccatttgctaccaaaacaatccttacacaacaatagcaagtctccttccatctcctctattctggtccttgaaaccttatcaatggtgaggtcacagtcattgtttgttgttcggttgagaactgagggggtggggtaggaggaagaaggtctatttttaaaaatcacacacactaaaaaaggttcaggctctgagaacctgtgaaatcttgactaattttggctttccccatgggaacccaccagaaaagt

SEQ ID NO: 102640 - DNA, 462 bp, Homo sapiens
  misc_feature (1)...(462): n = a,t,c or g
nactgagactctagtcgaagccgttgaattcggaggaggcagggcagagaagccagctgcccgccccgcaaaacccgcccgaggctccgacagcgctggcctcaggccactcagccacttctgacccccaggtctcgcattcccttccccacaggtctttgggtccccggcctcggcctcatgtcctgcagaactgccgaggccagggaatcggacaggcatggggaaggggatgtgagatctgagggccagatgactgccccctttttcttcaattattttcactgtggtaaaatacacataaaataaatttaccatcttanaaaaaaaaaaaaaaaaaaaaaaaaaaaaaaaaaaaaaaaaaaaaaaaaaaaaaaannannnnaannnnnnnnnnnnnnnnnnaaaaaanaannnnnnnanaaannnaannnnnnnnnnnnnccccccccctcgcccccg

SEQ ID NO: 102641 - DNA, 476 bp, Homo sapiens
  misc_feature (1)...(476): n = a,t,c or g
nactgagacctgaggaaccgtcgnggaanccggacagaaaaaggctgggagacggagctgggacagcgccctagaaggagggaggtgggtgaaggcggcgaccgaaagtggggagggcggacccaacgacggcgaaccttcgcgctctgttcagcaccaggagcaacgctcacgtcctcaataaagatggcggccccatcnaaaaaaaaaaaaaaaaaaaaaaaaaaaaaaaaaaaaaaaaaaaaaaaaaaaaaaaaaaaaatatnngaacccccccccataaaaaaaagggcccaaaaaaaccccggaaaaccccccggggggttttttaaaaccccccccttttgggggcccccccccccccctcttttttttggggcggggggggccccccccctcagtttttttaaaaaaaaaagagaggaccgcccatccattgggggaaggtgtcttatcttttgccggnnagttaccgc

SEQ ID NO: 102642 - DNA, 530 bp, Homo sapiens
aaagaattaaattatccttcaagagtgcatacagcaatagtaaagtgtgataagcatttgagctgagagcaaaagaatttaagaaacaggcagaagaggacctcaaggaacagactgagaaggagcaggtagagagatgaaaggaaaaccaaggagagagcctgtcgtggcatgtgtctcaggagtgatggagagttcggggaggaaatttggtttattttctgaccctgattctttaagttccaaaatttcttcatgctaatcaattcccattcttttaatttttacccatcttcccccacaaaaagttatcgggtatgaaatattgcaagatatcaacagctactttaataaaaaaattcacaaaattatcaaacagcaagaatgcccttaattattattaggaaagatcagcatgtttgtaatcccaaatagttggtaggctgaggagggaagattgtttgaactcaagagtggagccctgcagtgagttgtgcttttgccactgcattgcagcctgggtgacagag

SEQ ID NO: 102643 - DNA, 519 bp, Homo sapiens
ctgtcgccttaatccaagcctacgttttcacacttctagtaagcctctacctgaaaaatttttaaaaaaaaaaaacaaataaaataaaaatggggggggggcccctcccttttaaaatttcccccccctttttaaaaaaaactctttcttggaaaaaaggggccccaaaaaccccccctttggaaatggcccccttttttttcccccagggggggaaaaaaaattccccttttaaggggggaaaaattttttttttttttttccctaaaaaaacctttataaagggcccccctgggggggaacacaccccccccctgggggggggccctcaaattttttctcttcccccacccaagggggtcccccaaaaaaaccccccccccttgttgagaggggggctctttttcacaatttaaaaggggggaaaagggtggtttttttccccaccaacaaattctttttttaaaaaaaaattttttttttgtttgagggggggtttattttttatttaaaaaaaag

SEQ ID NO: 102644 - DNA, 1067 bp, Homo sapiens
attttagctgttaatggcgagaccctggaaggtgttactcatgagcaagcagtcgccattctaaaacaccagagagggactgtaaccttaactgtgctgtcatgagcctcgggcctgatcacaagatagatgttgttgtttagaatatccacaggcagatgaagttctgagtgggtatgaaaagcaccctcaactaaaatgcaccttcattcttatttcttgccctctctgctcaagagaaatggctgaggtttcatgtgaatttcccaaatcaacaatcatctcctaatgtttcccagttcctgtcacctgttggcgaggttgatttctaaaacttaaatgagtctacctgttttgcatttaatttcagtgttccgatttctttttttttttttttttttttgagacggagtctcactctgtcacccaggctggagttgcagtgagccaagttcgtgccactccactccagcctgggttgacagagcaagactctgtctcgaaaaagaaaaaaaaccatgaaggatgagtactagagtcagtaatagaagtagttcagcattatttaactacaacacaatgctgcaaatatttcacagtaattatcaaaatttaatgggctctaatttaaaatgttatttaataagtatagattttaattgagaattatctttgagtagatgtaatcacaaagtgcattaactcttgttggaatattttatggctattccaaagtatagagtgcctaaattttgtgttgaaaatgtctttcatgacggtattaagttttctgaaattacacatggcttttaaaatttctaatgtatccaagatgtgcaatgttgttaggatctcattcttcagtgcatgaaaagctactaccctcagaacattttgtgttaattgtacctgcaagaacacctcaggcaagccaagaagaaatgaaacccaaataaaacttgaaaatgcaccttaaaaatatatatacatataatagttttgaaatgggattctgctttattttgatggaatggccattaaatacacattttgagataaaaaaaaaa

SEQ ID NO: 102645 - DNA, 416 bp, Homo sapiens
ttttgaagagatggggtattgctatgttgacagggctggtcttgaactcctgggctcaagtgatcctcccatcttggcctcctgaagtgctgggattacaggtatgagccatcagcctggtgccacactactcttaactgaaattattctatgtccagccagtgaacaggatagcatttttacttctttgttctttttattttttgtgtatgcccaaaaggtaacatttattgtctttaaaaaggcaaatcttacataaataaataacaacaacaacaacaacaaaattcccatttaattctacctcctaagatacaaccaccattaacgatttatattttttcactctttggagccagtctgctagggaccaaattctagctctgccaacagctagcaaccttggacaagaactg

SEQ ID NO: 102646 - DNA, 422 bp, Homo sapiens
cccacgcgtccgataaatattatactagcatttaccatctcacttctaggaatactagtatatcgctcacacctcatatcctccctactatgcctagaaggaataatactatcgctgttcattatagctacccgtatttaccctatagcaccccctctaccccctctagagccagaaaaaaaaaaaaaaaaaaaaaaaaaaaaaaaaaaaaaaaaaaaaaaaaaaaaaaaacataaaaaaaacacaaaaaaaagaaaaataaaagcaaaacgaaaaaatttggggggggggggcctttaaaacatgctccggggggggtttttctctggggggggagggaaaaatttttttttttttttggggggggggagaaaaaattccggggttgttgataggggaaactctccttttagggggggaag

SEQ ID NO: 102647 - DNA, 483 bp, Homo sapiens
  misc_feature (1)...(483): n = a,t,c or g
cacacataagatcactatattcatgataaatctgatgctgcagtgtaatgagaaagggacttttttctataaatgattctgtaataaacaaatgtccatattaaaaacatgttataacctctttctgatatcatactaaaaaattgattccaggcagcttgcagatgtaaatgtaaaggcaaaacaaacatcaacacaaaacacccagaagaaaacaaaagaatatctttgtggcctggtttaggcagttttcagaaacaggacatatctaacaccnnnnaaaaaaaaaaaaaaaaaaaaaaaaaaaaaaaaaaaaaaaaaaaaaaaaaaaaaaaaanngggggggggcctttttaaaaaaatctcgggggggcccccatcttccccggggggggaaaatttttttttttttttttttggggggctttaaaaaaccccctgggggatttttggaaaaaaccctttcttggggggggaaaaaag

SEQ ID NO: 102648 - DNA, 421 bp, Homo sapiens
  misc_feature (1)...(421): n = a,t,c or g
atatttcctattcgcctacacaattctccgatccgtccctaacaaactaggaggcgtccttgccctattactatccatcctcaaaaaaaaaaaaagggggggcccgtttaaaagaacccttggggggcccaaatttaaccggggcgggcaaggtaatatttttttccttatggggggcggtttaaaacccaacttgggaattttgggaaggaacctttctttggggggggggaaaaattggcccaacctccccccaaaaattaaaggctttagggaaaataaaaatttttaaggggtatagggggaaaaacaacctccttttcctggctgttaaaaattatgnnnncnnnncnnggggcacctctatgagggggtgtgcaagcacggcaccttatattaggaaaccaaaagcctttaggct

SEQ ID NO: 102649 - DNA, 411 bp, Homo sapiens
ctgagttctgcgattctgctctttgaaatctgccaatctgccctcacagaagagagtggttacagtcaggcaatgtgctaaacaataagactggagtgggacctggtacctggggtgttattgggggcagaagatggcaaacatccagacttcggagccactttgtatatgaactaggagggtttcttatactaaaaaaaaaaaaaaaaaaaaaaaaaaaaaaaaaaaaaaaaaattttggaaaaaaaaaaaaaaaaaaaaaaaaaaaaaaaaaagggggggggggttttttaaaaattttttgggggggccaaatttttccggggggggggaatttttttttttttttttttggggggggttttaaaaaccctttggggtttttttggaaaaaaccttttttttgggggg

SEQ ID NO: 102650 - DNA, 396 bp, Homo sapiens
  misc_feature (1)...(396): n = a,t,c or g
atttaccatctcacttctaggaatactagtatatcgctcacacctcatatcctccctactatgcctagaaggaataatactatcgctgttcattatagctactctcataaccctcaacacccactccctcttagccaatattgtgcctattgccatactagtctttgccgcctgcgaagcagcggtgggcctagccctactagtcaaaaaaaaaaaaaaaaaggggcgcccgtttaaaagaatccttggggggccccaaattaacccgggatagcaagaaaaaaccttttcccttaaagggggtctaataaaaccctggctgggaatcttgggaaagaacctttatttgggggggggcccctatgggaacaacctccctccaaaaattagaggctn

SEQ ID NO: 102651 - DNA, 316 bp, Homo sapiens
  misc_feature (1)...(316): n = a,t,c or g
gaaaaaaacctgattcccctccnnanacctgatccgccntgcaggaattccgcacgaggagagagagagagagagagagagagagagagagagagagagagagagagagcagtggcgtggttcgtgccaaattccgaagcaatttttctgctggggccattgcacacacaatccgagtgatgctgcccccctcagggatttactctaacgaaaaatctataaataagtgtggatttgcgctcttgtttttttaagtggattaaaaaactctctaccttaaaaaaaaaaaaaaaaaacctcgggggggggcccggcc

SEQ ID NO: 102652 - DNA, 472 bp, Homo sapiens
  misc_feature (1)...(472): n = a,t,c or g
attttgaaaaaccctttgatacgccctgcggaattcggcacgagctggagacccccatgggcaacttggcaggagagatggtgccgtaggaggtcgtggatggttgatgccaagagaggccctccacccgtggtgggcaaatgtccaggcctgggctggcagcccagggctgtttctgggtgctccctggccccagggtggcgtctggttaccatggctgtgtgtgtccatgtctgcaagcagttcttcaataaatggcctgcctccccaaaaaaaaaaaaaaaaaaaaaaaaaaaaaaaaaaaaaaaaaaaaaaaaaattctgggggggggggccgggcccccaatcccctttttggggggggttaaaaaaattcggggggcggtttttaaaaaggggggggggggaaaacaangnnntnnnnnnnnnnnntnncnnttnnnctctctttttctttttcttatatgtacac

SEQ ID NO: 102653 - DNA, 442 bp, Homo sapiens
  misc_feature (1)...(442): n = a,t,c or g
natgagagtgtgagcattcgacgacttactcgcacttcgcagggggtgggggcccagtcatggttgggggggacgcagatgccaggtccaaggccttgctgggagtctgcgtagggtcaggcacggaagcctatgtcctggtattggaccctcactactggggcactccaaaaagccccagtgaactacaggctgctgggtgggtgggctggcaagaggtgagtgcagcctttgaccccaactccttctacaacctgtgcttgaccagccttagctcccaacagcagcagcgcaccttggactgaggacgaagttacagaactgagattctcgggtcccagacacgcacctatgtacctcccactggtgtccctgcaaagcctggcgcttttgacatcaataataaaagtggcagggctgagcaacaaaaaaaaaaaaaaaa

SEQ ID NO: 102654 - DNA, 461 bp, Homo sapiens
ttttttttttttggaagtaatgtctgtttattgatagaaaacaggccacgtccagagaggcccagggccaaaacctccttctggaaggccgaagtcccacagtgccggggagcgcaggagtcagctcggctccgtcttgccagggctggggggaccctcatcctcacccgcttccggagctgcagtggatgtgggggcccctgcagcctccagaaccagttccagggccccctcgcccgccacacggtgcacctgctcgcctctggccgtcaggatctcttcgatatttctcttcccattcaggtccgagaaccagcccaggttgtcagcgatgatatggtggttctggcagccggggcaggtcacaatgaccacgccttggtgataggccagcttggagatgcgcttggaggacctagtcccgcagaccttgcaggtgtagacgagctggtagtgcgccg

SEQ ID NO: 102655 - DNA, 477 bp, Homo sapiens
  misc_feature (1)...(477): n = a,t,c or g
caattgcaccgccatgnattagtcctgccatgcaggaattcggcacgaggagagagagagagagagagagagagagagagagagagagagagagagagagagagagagagagagagagagagagatttatttcttagcgctcttttcacaaaaagggagagtgcacgggttctttaaaacgccgcgcgggggacaaaaaagagagctgctttcaaatagagtgaatactttgtgcacagagtgagcctcatctttgtcttcccactgccagaacatggatccctctgagagagagtgatatatattcccttagagtgagagagccctctcttctggctctgtgactactatgggtgtatagaactactgataatcacgtattgaggtggtgtgcacacacatctgtgttcaccattaaagagcgggaggtatgttacacactctctaaaaaaaaaaaaaaaaaaaaaacgggggggg

SEQ ID NO: 102656 - DNA, 483 bp, Homo sapiens
  misc_feature (1)...(483): n = a,t,c or g
cgagagagtcctggagaatgtggaacattatcaggaattgaagaaaatggtccaacagtccgaccttggccagtatgtgaccttcttgaggtctttctcagacaaacagaaaatctccctcctccacagctgcacgtgtgtgctttacacaccaagcaatgagcactttggcattgtccctctggaagccatgtacatgcagtgcccagtcattgctgttaattcgggtggacccttggagtccattgaccacagtgtcacagggtttctgtgtgagcctgacccggtgcacttctcagaagcaatagaaaagttcatccgtgaaccttccttaaaagccaccatgggcctggctggaagagccagagtgaaggaaaaattttcccctgaagcatttacagaacagctctaccgatatgttaccaaactggctggataatcagaatgtttntaagatctccattaatgtcattnttatggaan

SEQ ID NO: 102657 - DNA, 485 bp, Homo sapiens
ctcgggaatggccggccgccccactgaaagcgctggggaaccgagaggtgtcttagaaagctgcatgagtggcagaacggtggctactatgacagagaggccgccgtgggcgaagagggagtgtgacattcttcagaattcatcctggaatcaatattatgccaaagaaaattttctgaaagctacacagatcataccactgcaactcagccaaccagcacatcggacagtgggaggaggaattcttggctaagagtactgagagatggggtttcaccatgttaaccaggattgtctcaatctcctgaccgcgtgatccacctgcctcagcctcccaaagtgctgggattacaggcgtgagccaccatgcctggccaaaattctgtatgtctttctaatctcacttcctaatggagataaaatagatctcaggcttatgtatttttctagaacattaaaatcttgttttttgtgtaaaaaaaaaa

SEQ ID NO: 102658 - DNA, 940 bp, Homo sapiens
  misc_feature (1)...(940): n = a,t,c or g
ttttttttttttgagggatgcacaagtctttattcctgctggcagatggaggtggtcctgtggctggcggagtgggcacctcaggctggcagctctcacctcttgctggccggcagcttcagccacttgggcaccttgcccaggctcctcttcacgggctgggccgtccctgggatgggctcaggggggaccagcgccccctcctcagcagctggctcagacttaggtgcagggtcaggggctggcaatggggaaggggacccggcggccctggacatgtacctggccaccagcacatcggccgcagatggggagatggcatgctccagcaggccaggctccaggtagacacctgccggctcctcggctcccaagttgcaaccagagcggccgggaagaggttcgccctgaaagagggtctgcgtgtggtcgtccaggactgtttttggaggggtgatgaacaggtaaaatgacagctcggggttccccaggtggctcctcacgaagtctcgcaagtcccccactgtctcgctggggcggaagaagccctgtaggacgtagcggtcggggaacaggaccctcagagccacctttgggtagcgctccagcttctcctttatctgcgcctccctgaaggccttggtcaccaagggggcttcttccaggcgcttccgctcactcttgagctgggccaagcgtcttctcacgtcgtccaccgtcagctcaaagaactcatcaggcagctccgctggccaggcctgcagccgctcctccaggtcggggtggcacaccaccggctcccggtccacgggctcccggtccacggngncgtcaccgctcctgctcctgctggggatccacgtcncngctcctgctcctgctcctgctggggatcctggcccgacttggacttctttggcttggaggggcctccagggct

SEQ ID NO: 102659 - DNA, 468 bp, Homo sapiens
cattgaccggctgtcatgagacggcacgaggagagagagagagagagagagagagagagagagagagagagagagagagagactttatctcacagaggacactctgcattctctctctctggagggtgcgcgcagtggtgccagtgtgtgtgtgcagagtgtctaccccactggtgcatcagcaccccattctatcatcaacgggcacaaacgagttctggtcttgtgtgtggagacagaacacaccttcccacttgctgaaaaggacagggccttcttgggagatacatctgtctttgtgggtgctgcccctgtgggtggtgccaacacaggtgcttctgctggtggtgcacccccatctaggggtgaacccaaagaagagtcgggagagtcgcacgaagatatgggatttggtctctttgtctaatcaccaaagagcaccccacttagcctgttatatgtgcaaag

SEQ ID NO: 102660 - DNA, 466 bp, Homo sapiens
  misc_feature (1)...(466): n = a,t,c or g
nattgtagaccatagaccacgtcggggaattcgccagggcaggagcttgatgggctatggccccccttcccagcccctcttggggctcccagatggaagtggaagggtgcttggtggggccctcaggaggagttagtgagggtaggtgtggcatcggtcgactgccagtctgagctggtcggagtctcagttaaagctggagggaggcagggaaggagcagagttagcctttgcctttcagacaccccttcgcccaacccaaaagtaggaattctcttgtcatagatgctacattaaaagttacaagctgttactttaggtgaagggttgcaaactcaagtgctaaagggccacgatagtaactgagtgacacaccagagtgccaggctccatataaggcggtggctgggctgggcacagtggctcacgcctgtaatcccagcactttgggaggctgaggtgggcg

SEQ ID NO: 102661 - DNA, 467 bp, Homo sapiens
  misc_feature (1)...(467): n = a,t,c or g
natcgtagatcgtagtcagtgcggnggaattcagaagttcaaggagttaaatgtcacattcatactcaggtaatagagaagaataaaacacatcaggtttgcttcatctatcctaagtggtgcttaggggttcagaaaaaatgtttcaagtacaggaaattaatgagcaatatttacaatgtattttaataaaagggatttttctagttaaaaaaaaaaaaaaaaaaaaaaaaaaaaaaaaaaaaaaaaaaaaaaaaaaaaaaccccgccctgaatatataaaatgacattaaaaaaccccattaatacccgtggcgtttttttataaaggcggccccttgaaccccgcccccccccccctttttttttttttttttgaaagccctttttttagcctcccctttctaaaaaaaataataagtggggggcgttccccccagcttgtttttttatttagagtggactca

SEQ ID NO: 102662 - DNA, 483 bp, Homo sapiens
cgccccccatggagaccttacgacaatggacgaccatagtgcacagccaagaagaggaagaggagcactttgaagtcattaaagatgaagtaaaggttgtggccagaaagcacgggcagcctgggactcctgttgccatagcaacccagctaccgccgaggacttctgcggcttttccagcccagcagcagccgctccagcccctggcacccaccactgtactgtctgtctctgcggattggaatgcacttctccagcgacctaacaaatacatatggggactccagtacctggagatgtgaattccataaaaatggaagcatctaagaggcagtgaacactggcgcccacaggagaaccaggtgcatcaccgcattgcggagctgaggaaagcaggtctgtggtcccagaggcgtctgctgaagctgcaggaggcccacgacccaagtcccactgtgactatctgctggaggagatgcagtg

SEQ ID NO: 102663 - DNA, 455 bp, Homo sapiens
  misc_feature (1)...(455): n = a,t,c or g
natcgagagcactaggccatggaggccttccattnactnggancttctttaatttctcccagcaatattttgtaacttcaagcatacgtttcccacttgtgcctaggtactttgttttccaatgcttgtaaatggtattgtatctttagttttattttccaattgttttttgctagtatatagaagtgcattttttggtatattaatcttgtatcctgtaaccttgataatgcatttattagttcatagtgttttttgcttcttttgttcttttctggtaaatgccttaggattttctttttctcccgactccccgccttcctcctcttctttttcttctgccttaggattttctttttcttctttctcctccttctcttcctcctcctcctcctcctcttctttcttctttcttcttcttcttctcttttttggttttaaattgagacaggggn

SEQ ID NO: 102664 - DNA, 288 bp, Homo sapiens
  misc_feature (1)...(288): n = a,t,c or g
cctttcaaagcctgagtttgttctgaatgcctttctggagtatgtaataatgcagggcagattttatgttttttcatgataaaattatagtgtacctttgttcacttgtttatctgctgaccttccctccactattgtcctatgaccctgccaaatccccctctgcgagaaacacccaagaatgatcaataaaaataaataaataaataaataaataaaaataagaactactcttggcccataggccatagctcgccatcccctgccctaaggcngagaaaaaaaaaa

SEQ ID NO: 102665 - DNA, 453 bp, Homo sapiens
  misc_feature (1)...(453): n = a,t,c or g
ntttcgccttgatnacattaggccagngcggtggaattcgaaatattctgtatttcaattgtgatagttacatgagtcaataatttttagaaaattatactaggttttattagcttcaccaaaaagagtaaactttactgtaaataaaaatagaaatgtttgaaatgtttaaatgttttaaaatgtttattatgggaggtggagccaagatggctgaataggaacagctccagtctacagctcccagcgtgagtggcgcagaagacaaatgatttctgcatttccaactgaggtaccgggttcatctcactggggattgtcggacagcaggtgcagcgcaccgagcgtgagccgaagcagggcgaggcatcgcctcacccaggaagtgcatggggtcagggaattccctttcctatccaaggaaagggatgacagatggcacctggaaaattn

SEQ ID NO: 102666 - DNA, 437 bp, Homo sapiens
  misc_feature (1)...(437): n = a,t,c or g
nctcgtagaccactagtcgagtgtgctggaattcgtgtttaaaagctagtggcaaacaattgacttagaggttggttaagcccctcctccctttatcattctgagtggttacatagaatttaagattttggagcaatgattcattcaatatttattaactacctactgtgggccagtgtacactccggacttgagtctgtagaggggcactcttattccaatcagtagaataaacgtggcgtgagctttacagtgttcctctgggtaaggcaagtaatgcttaagtagttgtacttttaatctagtgctaattaatggcctcttaaaagtgcagtgttgggtcaaatggtatttctagttctagatccctgaggaatcgccacactgacttccacaatggttgaactagtttacagtcccaccaacagtgtaaaagt

SEQ ID NO: 102667 - DNA, 466 bp, Homo sapiens
  misc_feature (1)...(466): n = a,t,c or g
ggtgtnnaattgactgagtacctaggccagngcggnggaattcctgggtttcgccatgctggccagcgtcgtctccagctcctgatcacaggtgatctgcccacctcagcctcccacagtgctgggattacaggcacaagtgaccgtgcccggcccccttccactttttaaacaacagaaatgaaacttattaagtaggggccttcgatctggaggctgggaagtccaaggtctatgtgctagcatattccttttttggtgagggcccttttcctggctttcagactgttcccttctcactgtatcctcacatattaggaagaggaagctttggtgtttcttcctcttataagggtgctaatcctatctggggtttccaccctcatgatgtcatctaaacctaattacttcccaaagatcccacctcctaatacaatcacattgcaggttggacttcaacatttat

SEQ ID NO: 102668 - DNA, 720 bp, Homo sapiens
  misc_feature (1)...(720): n = a,t,c or g
cgaaagggccgcctgagcaaggaggagatcgagcgcatggtgcaggaggcggagaagtacaaagcggaggacgaggtgcagcgcgagagggtgtcagccaagaacgccctggagtcctacgccttcaacatgaagagcgccgtggaggatgaggggctcaagggcaagatcagcgaggcggacaagaagaaggttctggacaagtgtcaagaggtcatctcgtggctggacgccaacaccttggccgagaaggacgagtttgagcacaagaggaaggagctggagcaggtgtgtaaccccatcatcagcggactgtaccagggtgccggtggtcccgggcctggcggcttcggggctcagggtcccaagggagggtctgggtcaggccctaccattgaggaggtggattaggggcctttgttctttagtatgtttgtctttgaggtggactgttgggactcaaggactttgctgctgttttcctatgtcatttctgcttcagctctttgctgcttcacttctttgtaaagttaagttgtaacctgatggtaattagctggcttcattatttttgtagtacaaccgatatgttcattagaattctttgcatttaatgttgatactgtaagggtgtttcgttccctttaaatgaatcaacactgccaccttctgtacgagtttggtcgnnnnnnnnnnnnnnnnnnngggcctgggcaaaag

SEQ ID NO: 102669 - DNA, 462 bp, Homo sapiens
  misc_feature (1)...(462): n = a,t,c or g
tgcggttnnnnntttgtagacctgagtancgtgcggaggaatcccaggctggagcacactgtcacaatcacagcctactgcagcctcgaactcctaggctcaagcaatcttcctgcctcagcctctcaagtagctcgaaccacaggattgcaattattgaacctacagtaggcatgcttctttagaaggaaagtatacgtggattcttaagcaactggataatgaaaagtgatcctgattttaggacttcatcatggactgctatggtaggcagaattctgaagatgtcccaagattcctgtcccctagttattcaaacatcgattgtgaagggaaattgcagatgcaattgaagtcccaagtcaatgaatcttaagatacaggagattatccaggtaggtttggcccaggcaggtgagtcttttaaaaagcagagtttttattctctgcctggcagtagaa

SEQ ID NO: 102670 - DNA, 460 bp, Homo sapiens
  misc_feature (1)...(460): n = a,t,c or g
ccccgcccgccnnnnnnntttganaatagatgtctcttagtcagtgtggtggaattccattaaagcagaccaggagttactaacctgcctgccttcctcagaggctcagtgttgagttggaagagaggggttttacagtgggccagtccttaaggtggtgtgggtgctgggctgtggttgtggccttaggtctgctggcgggtgtgctgcacctccttggcctcccctctcctgggctcaaggaagtaaacaagtcctctgtatgatggggaggccaggacctctcgtccctttaaggcagcttggtgcctgccagtcacctcagcgggcggcagtcagtgggcttgtgtgcatctgtaaactcagcactttgggaggctgaggcaggaggattgctggagcccaggagttcaagaacagcccaggcaatgtagtgagaacccatctctacaaaaaaata

SEQ ID NO: 102671 - DNA, 466 bp, Homo sapiens
  misc_feature (1)...(466): n = a,t,c or g
aggatgcgggccncncnnaaatgatgactacgaccctctcnccgngtggnggaattctgcacacacacacacacacacacacacacacacacacatacattcaaatgtgtgggtagtcatctacacactaacaatgactaataattcacagagctccaactgctacaatatttgtaacgtgataaagaaattataactttaatatgcaaagatgacttcatgatttaaaaaatgacaagtcgtatatagtagtgggcaaaagtcataaaactcgcaaaagaaggaagacagtgagagaattgtgttaaaatgggccaaggattgattttaatcggatatggtaagacatgcacacctggataattgtcaggaaagaactttatactcacattctagaaacaagagggcaggtcatgctcgggggctactcaggggagcaccgggccagtcaggaggcagaagagga

SEQ ID NO: 102672 - DNA, 498 bp, Homo sapiens
  misc_feature (1)...(498): n = a,t,c or g
agcttctnnnannnnagncnaggccnnnnnnncctggaaactcgagacccatatccagtgtgcgtggaattcatccaccatgcctggctaatttttgttttttaaatgtttttgtagagatggggtctcattatgttgttctggctggtctcatcctgggctcaagtgatctttctgctttggctgtccaaagtggtagggtcacaggcatgagccactgtgcctggcctgagattttttttctccttgaaaattggatcatcctatagtaatatttttcagttctctttttttgattccccaatatatcatgggtatctttccactttaattaatactcattgatccagttctttaatggctgtataataatctatttagtcaatcccattgttttgctataccaaatgatgctgcagccagctccttgtatagctgcccttgcacagctgcgtgaatatctctgttgcatagatccccagaataagataggacctt

SEQ ID NO: 102673 - DNA, 494 bp, Homo sapiens
  misc_feature (1)...(494): n = a,t,c or g
cacttgacgattgannngncntcngcagngncgnggaantttgnaggatttaattacttccttattcttactaaaacaaagtagtctagccaccatgaacattcaaactccctttaaaaacatttattttgacctcattataaaaacattatttttaaggttttttattttttgttttatttatttttattttttatttttctcatatggaggctttttttctttcttttttttttttttgaaagggagttcctttttgcccccacggttgaatggcggggccaaaatttgggttaattgaagcctccccttctgggttaaacccttttttcttgcttaaccctccgaagtatcggaaaccacagggcgccccctccaccccggcttatttttttatatttttttaaaaaaaacgggtgttcacaatttaacccgggggaatttaattttcttgacttcggcccgcttgggcctccaaaatggctgatatcaag

SEQ ID NO: 102674 - DNA, 491 bp, Homo sapiens
  misc_feature (1)...(491): n = a,t,c or g
cattgacaactgagagccntancccangngcnggaattcggaattcttcctttgtaactctttgattaatttgcttttgcttaatttagccatcatttcacagactctactggaatttttaaaaacataaatattgatattgtgttttcttcctttaaatgcctaaattatttcacactagaaatgtaatagttactaagttctcagaccattttggtttactgtaataacaatagcatgttctcttgagtgctgagtatgggaaggtgtgatatgtccatgtttggggtagagaaaggaaagagagagtgagaaagtgaggaaggagaaaaaagggaaagagagagacacatgcacacacacgcagacacacacacacacatacacacacacagagagagagagagagagagagagagagactttatggctatgttttaaagagagatttgtaagataatggaactaatttctcaagtaatgtttataaa

SEQ ID NO: 102675 - DNA, 502 bp, Homo sapiens
  misc_feature (1)...(502): n = a,t,c or g
ggggagcgcggcttnnnnncaatgaaaatgagtgcgtggcgggaaccgtgcctgggggggaggatgtagcagccaccatgggtgccaagtccatatcctgtcaccctcaccctggcgacacaagagggactggcctttaggaggccaaggtgtgaggatcacttgaggccaggagtttgagaccagcctgggtgtcagccccagaatatttgcctttgggcaatctcaaaccactggtgcggctctgccccaggtatgagcatggcaagtgttgaaagccagggggttcgtgtccacttcccactccagcagccctcagccagttactgataggagatagtcccccacctgtctgttgggctaacttggaagtgcatggcctatgcgggctccagagttccccagcagatgaatccccagttccccacagtggtctgggcttgataaaataccctttattggctgctctttcttctctgagtctcttcctgtctcccctacc

SEQ ID NO: 102676 - DNA, 331 bp, Homo sapiens
ctgctgaaaacactattctttcctgctctattaaatggtcttggcacctctgacaaaaatcaacagaccaaaaatatgagtttatttcagtatagttccatcgatctatatctagtgttatgctagtaccataccaccagaacttactttttaaaaaatatttgatagaaaaaaattgtttaattattattttaaaactatttgacctcactgggcgcagtggcccacacctgtaatcccagcactttgggaggctgaagcaggcaaatcacaaggtcaggagtttgagaccagcctggccaacacagtgaaaccccgtctctactaaaag

SEQ ID NO: 102677 - DNA, 362 bp, Homo sapiens
  misc_feature (1)...(362): n = a,t,c or g
ccttcctgtagtaagtggaaggatgccctctgcattccaccccctgcccccaaatggtgcatccactagaacctgtcagtgttactttgtttgggaaaagggtctttgcagctgagattaaggtaaggatctcatgatgagatcatccgggattagagtaggccccagattgcagtcaccgtataagaggaaaagcagggggaagatttcacatggacacagaacagaaggccatgtggggatggaggcagagataggagggatgctgccccaagccaaagaacatctggagccaccagaagctggcagaggcaaggaagtatcctcccctggagccttcagagggagcacgacccttgatn

SEQ ID NO: 102678 - DNA, 373 bp, Homo sapiens
cttagctctattcttggaattacattcatcagtaaaccaattaatcacacattgcttaatgacagggaaatgcatgagaattgtatcgttatgcaattttgtcactgtgttaatgtcgtaagagtgtagttacccaataccaagctagatagtgtagcctaccacacacctagcctgtatcgtatagcctattgctcccagactacaaacctgcatagcatgcacagtactgaacactataagaagttctaacacagggcgggaaaggtggttcacgcctgtaatcccaacacggagtttgagaccaaccagaccaatatggtgaaacccagtctctactaaaataacaaaaattagccaggcgtggtggcat

SEQ ID NO: 102679 - DNA, 369 bp, Homo sapiens
ctgggctcaagtgatcctcctgccttggcctcccaaaatgctgggattacaggcatgagccactgtgcctggctggatatgaaattttttttttttttttttttaaaacggggttcacctttttttcccacgcctggagggcaaggggggaaatttggttcattaggaccacaccctccggggataaaccagtcctctggcctaaccctccaaaagggcggggagaacaatttccaaaatattttaaaggctaacacaaccgcggagaaagaaaactccctttatgggtagccctctcgtggcaaatgcttacttcccagggggaaaaaggggttttacccatagggtccgggaaccccccggttaccg

SEQ ID NO: 102680 - DNA, 363 bp, Homo sapiens
gtccatttgtggtagtgccctgaagaccttctagtgggacaaaatgtaaaggtagaagacagtgatatgggtgatcctgaccgtaggccaatgtgtatgtttgcgtgtttttatttacttgtttatagacggtgtctagctatgttgcccaggttgtatttgaactcgtgggctcaagtgatcctcctgcctcagcctcctgcatcgctggaactactacaggcacatgccacaacacacccagctctgtgtcttagtttttaacaaaaaaagttttaaaaagaaacagaaaaaatacagaataaagcttacagaataaggatataaagaaaatatttttttggccgggtgtggtggctcccg

SEQ ID NO: 102681 - DNA, 375 bp, Homo sapiens
tttttttaaataatagagacaaggtctcgctatgctgcccaggctgatctcgaactcctggactcaagcaaacctcctgccttggcctcccaaagagctcggattataggaatgatccactatgtgcagcctacacagcctttctaaactctaggacttttcatgaggagaaaaaagctatcccagctagacacacacagaaatctcatgattttattaagaatttctttgactaaatcgaacttacgaataagcttattatggccactgtgctgggattaccagcgagagccaccacacgtggcctaactgttttttttaaagaatagagacaaggtctggatatgctgcccaggctgatgaaaaactctcaga

SEQ ID NO: 102682 - DNA, 364 bp, Homo sapiens
ctcggagttggccctgccttattaaattttaatcaattatctttctaagcatcaagatggccatgtaaacactgtttttaagaccacgtctaccggctgggcacggaggatcatgcctgtaatcccagcactttgggaggccaaggcaggaggattgcttgagcccaggagttcaagaccagcctgagcaacatggcaagaccctgtctcaaaaaaaaaaaaaaaggtttcctccctgtttttaaaaataccaaaagggccccttttcccccctttttttaaaaaaaaatggtttaacttttgccttaagggtgggaccttttttttttaaaagggttatttttttataccattttattatacg

SEQ ID NO: 102683 - DNA, 343 bp, Homo sapiens
cacaggggtaagactgcctagaggatgactagtgccgtgacggaaagcagatcgttcctttttggtctaaagccaggatcctagcctcaagacgaggctttcatgaactcatttgtagaagtgaaactgagacaccatatagagaacttcatttctcctggggggcccatgaaacatatcttgcactaagcttattctgtttaaaacgcgaatttgcatgggcggatgcagaggctcacgccttgtttaccagaaatttgggaggccgagacgggcggatcacaaggtcaggagatcgagaccatcctggccaacatggtgaaaccctgtctctattaaaaat

SEQ ID NO: 102684 - DNA, 367 bp, Homo sapiens
  misc_feature (1)...(367): n = a,t,c or g
tcctgctgaacaatatcttgggtgcttccagttttttgcaattatgaataattggtgataggaacattcatgtgcaaagttgttttgttttgcttttgagtctgggccttactctgttgcccaggctggagtacagtggcatgaccatagcttactacagtctcaaactcccgggctcaagcaatcctcttgcctcagcttcccagcaagcgcaggtttttataaggaaagcccaagtttttataaggataaaagttgtcatcatttgggcaaacactcaggagcataattgctgggtcgtattgtaaaactgtcatctttttaggaaactgcaaatgcacttttccaaagacatttttgttaaatn

SEQ ID NO: 102685 - DNA, 168 bp, Homo sapiens
gtcttcaccacgttgcccagatgggtctggaactcctggcctcaagcaatcctcccacctcagcctcccgctttgggaccacaggtgagagccaccgcacctggccaccagactgaattttaagcttagtgcagaaccttccgatgcagtatccagtcgacgcggccg

SEQ ID NO: 102686 - DNA, 337 bp, Homo sapiens
ccggaggcctgggggccgggctgagcctcgggcccgcgtccgaggtgaccgggacccgcctgtgctcttacggcactacccacacatcttcgaggagtgcggctgagcgacaccgcacgctggagttgagcctgaccttggcacgaaggactgacggatccctgaggtgggccactgagttggggactccggaactgaagttaatgccctgggctttcctcaaggatccctcgagtttccaactttgtaaaagaaaagtgcctggaaagattcgaaaagattagactagccacccatctccccagtcttttgtttaacaaaaaaaaaaataaaaaag

SEQ ID NO: 102687 - DNA, 350 bp, Homo sapiens
ggtaaagtcagaaaaaatccaagcaattttatcagtcaaatggaataaagactaaagtgaaataaataatattttcatttgaaatcactagggtggagagtcagaggcagtatgttggtttttttgtgttttttttttttttaaactaaaaaaggagggggcccagggggggggcttaatccctgaaatcccacccttttggggggctgaggcaaagggcccatttggggccatttcaaaaccaccctgcccaacatgggaaaacccccgttttttccaaaagaacaaaaattaccccgccagggggccatggccctgtagcccccccccttgggacagctgaggcagag

SEQ ID NO: 102688 - DNA, 492 bp, Homo sapiens
  misc_feature (1)...(492): n = a,t,c or g
aggcgcgggnncnccncaatgagaccctattgagtgccgtggaannccctcaagcaagtccatgtttgatactaagagcttagccagacgattcttggaagatgaagcagtctaagcaagcaagaagataagagaaaggatatatcatgttctggttgctaaaaggagggagtggttagagatcagccacaaaggaggacagtgccctgataggaagttttgttctctgtgttaaggtttttggattttgtgctaagactaaagataaaccattcaaaaccagttttaagtatgatctgtaaactttgatctgaatcagaatcatctggtagagatattaaaaatacagctttggctgggtgtgatggctcccactggtgatcacagcatgttgggagatcaaggcaggaggattgcttgatgccaggagttcaagaccagcttgggtaacatggtgggacaccatctctacaaagtaaaaataaaaataaa

SEQ ID NO: 102689 - DNA, 443 bp, Homo sapiens
  misc_feature (1)...(443): n = a,t,c or g
nattgactagcagttntcttagngcgngcggtggaattatgctctgccatggtagatgtgcttgctttccctttgccttctgccatgattgtaagtttcctaaggttttccagccatgcttcctgtacagcctgcagaactgctctttcctttataaaatacccagtctcagatcgtgtagacttcagttggcagagttactcagtattatttacttggaaaatcctctgtaacctaaaagtcctagctctcctgacactaaggatgacaatggaacacttaaatggcctgttatttgatgaagatgatataaatagaagcagagcagcacatagtgtgaccacgaaaggccaaagagcacacactggagacctgaatgtcaaccaaactgcataatccctgtttatcttcattgtagaaattgccataaccttctggagaca

SEQ ID NO: 102690 - DNA, 485 bp, Homo sapiens
  misc_feature (1)...(485): n = a,t,c or g
nttcgagacccctagtccagngnggcggaattccaggaggctgaggcacaagaatcgcttgagcctgggaggcggaggttgcagtgagccgagatcgtgccagtgcactccagcctggcagacagcgagactcagtctcaaaaacaaaaaacaacaacaaaaaaaaccctgaagtcagctgatgagtcagcctgcccttctgaagaggacagagcaccccccacccccaccagactctgcatctctccctgtcccccaccacctaggggtatctttattgatgctcagtcattaattgtaaaaacaaaactagattggcatagctggctatgatatgtcaggattgggggatcagagaccttgagaaaatagtggccaccttttctcacctatttcctttgggccaggccctttgcaagattcttaatctaagtcatcccatttcatcatgccaggaccctatgaggtccatcctgttatcctcn

SEQ ID NO: 102691 - DNA, 485 bp, Homo sapiens
  misc_feature (1)...(485): n = a,t,c or g
accggggnnnccttgagncctcgataacatccgcagngcgnggaantcgtttgtgttcttacatatggatatccatttgtcccagaaccatttgtttaaaagactgccctttcctccattgaattactgggtacaggttgcgtttccctaatccaaaatctgcaatccaaaatgcttcaaaatcatgggccaggtgcagtgtcatccctgtaatcacacttgtggtctcagcacttcaagaggccggggcaggtagatcccttgagcctaggagttcaagaccagcctgggcaacatggtgaaaccacatctctctctctctctctctctctctctctctacatatatatatacatatatatatatatatatatatatatatacacatatacatatatatatatacacacacacacacacacacacacactctatatacacacacacacacacacacacacacttggtgtgggcacgtgtggtgg

SEQ ID NO: 102692 - DNA, 486 bp, Homo sapiens
  misc_feature (1)...(486): n = a,t,c or g
cgcgaaaaattgaaactgagagcnctaccagngncgnggaattcctagggggcagggccactacagcagccctcctcccagcccctggataggggaggcactgaggcctanagcaccaggcccaggggtgatttggctttgaacctggagcagggtagactgggaaggttgctgagctggggacagataccctggcatcctgcccaggcctgagcctctgagaaaaaggaaaaaggagtttgaaatggagaccagggcaggagcccaagctggttcccaggctagctccctgcagaggaggtgggtgtggttgggatggtgaaatgatctttctggccaattcaacattttgcacaaaaaatcataaacaagggctgggcgtggtggctcacgcctgtaatcctagcactttgggaggccgaggcaggcaggtcacttgaggttaggagttcgataccagcctggccaacatggtgaaaccctgtc

SEQ ID NO: 102693 - DNA, 475 bp, Homo sapiens
  misc_feature (1)...(475): n = a,t,c or g
gatggtccnccctgagaccctggactgatggcctacgcaagagacgaaagaannnnggcccccttgggaggaagataagacaagatctctcagagagtctgagtatcatgtgagcatccgcctgatcagacctgacatctgcctacattttcttggccgtctttgacttcagttaagaaccttttgctcttttttttcccccagcagcacggtatattaagtttggaacaagacacacctgaaatcaaatccctgctctgtgctgggtgatcttagaggcagtcttttacctctttctactttattggtctcataggaaaagtggaaatgaggccttttaccccagggttgttgagaagacagaggagaaaaagcacataaaaatgcaccttgtcgggcgtggggctcacacctgtaatcccagcactttgggaggctgaggcaggtgtatcgcttgaggccaggagttcaagac

SEQ ID NO: 102694 - DNA, 468 bp, Homo sapiens
  misc_feature (1)...(468): n = a,t,c or g
gtnaggtnntttgagnccttttcgtagtccctagtcagtgtggtggaattccctatccctcttattccatcatggctggaagtggaagtgataactatattaatatccaacaaaagaaaaagggcaacaaagggcattgttaaggaataatttggctcactttataacaaacttctattcacagtcaagatacaacagttctaaatttgtatgcttctaatgaaatagtattaaaatacataaagcaaaattaaactacggggtaaaatggctacattcactatcaataaggaaaacattagtgaagtgaaacattaatagaagatttgaacaacatgatgggcatggtggctcatgcctataatcccagcactttgggaggctgaggcagggggattgttgaggacaggagttcaagaccagcctagacgatatagtgagacccccatctctacaaaaaaaaacgta

SEQ ID NO: 102695 - DNA, 465 bp, Homo sapiens
aatcgaagaccctattcgagaacactagtccatgtggtggaattcgtttgagaccagcctgggcaacatagcaagatcccggctctttaaaaaaaagaggcagaagatatgattacatatgataaaactttatttcccctagatgaaataatttattctctccaagaaaacactgaacacattacgtactaagtatgccctgtaaggctattcattctatttatatattactttaaatctgggagatcatgtgctaaaatctcaagtttgtaacatgatctgaggaaaccgggtacaaagaggtgaagtgggccgggctcggtggctcacgcctgtaatcccagcgctttgggaggccgaggtggttggatcacctgagggccaacatggtgaaaccccgtctctactgaaggtatattaattagccacgcatggtggtgtgtacctgtagtcccagctactcgg

SEQ ID NO: 102696 - DNA, 407 bp, Homo sapiens
  misc_feature (1)...(407): n = a,t,c or g
gggtgaaacactgtcatgggagtatctaaatcatactatttgtcattgaagaaaagtaccataaagtgtatgctctgataattagctgaggtttccattgctttgaacataattacttcaggtccgtccaacagttgtcattaccgtgacaaatatcccgcatgtcctagggaatacagctattttcaaattaataacttttcattattagctttgtaactgttcttcaaaaaaaattgtttcagcagaattcttacatgctgagcacccccagggaagctgaaatcagcaaatactgcctcagaaaatcaacgaaggccgggcatggtggctcacgcctgtgatctcagcactttgggaggctgaggcgggcagatcacttgaggccaggagttcgaaaccagcan

SEQ ID NO: 102697 - DNA, 416 bp, Homo sapiens
  misc_feature (1)...(416): n = a,t,c or g
ggnnnnnnnnnnggagtttttaatccaacagttattttattaggattttatccctgggcccagagtgagaaatagggacgggggacagcccaccgaggctgggtcgggggtcaccccaggatgttccaaccacaggggcagcatctcctccactccaaatgctggccaagggcacaaagctgccgtatcgcctgccaaggggggggctcaatgctgctgccctggtcctgaatgggcccggggtgccgaaaacagacagcaagccttaggcgccgcgcctttgagctttcttgatttcctcataaagcgcctccttcaactctgggtaagcctggaccaggctgtcgttaatgatgaccacattaaacaggccgggctccttgctgctctccatgtcggcctgagcaacaaccatt

SEQ ID NO: 102698 - DNA, 531 bp, Homo sapiens
  misc_feature (1)...(531): n = a,t,c or g
agagtgccnttttgaccccactgaacccatcgcaangggcggaattcgatgtctaaaaatgactaacaaatgaattgattttcaaccagattaaagtgaattaaaaatactatatatcttcattggtacaaattttttaaagaatcctttaaaaccacaagaagttggtttcttactttaatggcgaataattaattttataaactcctcatgctaaaggtaaacataaccattttttcttattaggtcgagctgaactagcataaattccagaaggctatgtcccacaacactgggaatattataaggtttgtatatgacattgacaattacatactgttacatgccttgtcaacgcactatgtaatgtcttaattcagcaattatgatatagtcaagctttttgttttgttttttttgagacagcatctcgctctgttgcccatgctggagtgcactggcgcgaattcaactcactgcaacgtcttgcttccgcattcaagcgagtttcatgcctcaggctcccacgtc

SEQ ID NO: 102699 - DNA, 491 bp, Homo sapiens
  misc_feature (1)...(491): n = a,t,c or g
tggggggnnnnnnncctcgttcacttcgaagtgcggtggaattcccacgaggtctcactcactgcagactcgcgtaagagtcatctgattttcccccagcccaactatgccgacacgcttatcaaccaggagagctatgagaaaagcgagcctcttctgataactcaggatttacttgaaacgaaaggagaacccaggcaacttcaggtgagtttctttccgcctaagcgggaagagtaatctgatcttcccgcaacccaactaatcagacaggctcatcagctagatcggctgttatagaagcgaacctcttttggtacaggaagattcgtgattttgtaaagtggaagactcccttgttcaggtgagggtatcgttttttttttttttttttttgaaaagggattttctttttgtcccccagccggatttgggaattgaaggggccaattttgggttaattgaaggctccgttcccggggtaacccatt

SEQ ID NO: 102700 - DNA, 464 bp, Homo sapiens
  misc_feature (1)...(464): n = a,t,c or g
agggtgagggggcccgnnnncccaggggnccagttagacccgaagngcgcngaanttnngngggngngagccaccacacctggctaattttttgcagagattggttttcactatgttgctcacactcatcttgaactcctggcctggagtgatcctcccgcctgggcctcccacagtgttgggattacaggacaaattacctgtacttttgccctcctaagatgcattcaggttgacaatgaaaatacttacataagttttcaggaaatattctgtgcacaacagccaagtttttttggaattagatggatgagtcacactagccatactctggagcctggcaatgtgaggttttgaaaaagcattcttcactttagctgataccaaaaatgtttgtgttttgtgcggctactgggaatttgcctgcagccactaatcagctgaatctttaatcaccattttgg

SEQ ID NO: 102701 - DNA, 490 bp, Homo sapiens
  misc_feature (1)...(490): n = a,t,c or g
gtanggtnnaagcnagggcccccnnnaattgaaaaaactgagatcntacgacanngcgtggaattccctggcggtgcacactcagtaggctgaggtgaaaggattcctttaacctgggagactgaagctgcagtgagccatgatcgtgccactgcactccagtctgggggacaaagtgggaccctatctcaaaaaaaaaaaaaaaaaaggcctcccccccccacctcgggttggacatagggatattaggttaaaaccctcctggaaaacggaaccccaagggggttttattaaaaggttgggggaggggaaattttaaagggcggggggggaggaaaaaagaatataccctttccccgggggccgggccctgacagggtccaatttttttttgaagagggggaaaaaaaggggggctggccaagttaacctaggggggggggtatccatttggcccaaataaggaaacccctgcctggagggtggaccc

SEQ ID NO: 102702 - DNA, 466 bp, Homo sapiens
catcgagcccctattcgtagaccatagtcagtgtggtggaattcatgaacctgggaggcggaacttgcggtgagccgagatggtgccactgcactccagactgggggacagagagagactccgtctcgggggaaaaaaaagaagataaggatgtagctagaagacactgggtaggcagcttctacaatggaccccagtgatccttccctcccggtattcaaaccctctgtaatcccttccttcatgtgggctggactttgcaacttgctcttaaggaatacagtggggcaaaagtgatggatagcacctccaagactagatttaaaaagagacgatggctcatgtcttacatgccctctcttgctctctcacttgctgcctttgacctgccttatggagacgctcatgtggcaaggaacgaaggcctccagccaagagccaccaaggaactggttttcagtccaac

SEQ ID NO: 102703 - DNA, 464 bp, Homo sapiens
cacatttacaatagatagatgtgcaaaagacctttttgtagccaaacaagttggaacaaaactctcggtgaatgaaccactgtcattttctgttgagtctattcttaagaggccttcatctgccatcactcgtgtctctcagtgaaaggctgcttaaacagaaagctggattttctgcagtcttagagcattatagccatttgctactttttttaaaagttaagatgtttgtgtaaagaaatttctaatgtaaagatgatgattttgaaaaattttatatattcctaatatgcatgtactttttcttatcacatatatttaaacttacagatggaaattgcccaatgtgcaaattgttaagtaccacactttacacagcatttcaaaaagcaataaaattgacactgtcttctcaaagacccaaaaaaaaaaaaaaaaaaaggggcggccgctttaaagaatcc

SEQ ID NO: 102704 - DNA, 343 bp, Homo sapiens
  misc_feature (1)...(343): n = a,t,c or g
aatggtaatcaactctgctactggcatgatgaaatattacataactggtcattaattatgaacatttacttctccagtgcgtttttatnaaaatctggttgaaaattgtatgtgctatgtaaactcaacgatatgtttggttttcctgaaaataaatgattttaaataaaaaaaaaaaaaaaaaaaaaaaaaaaaaaaaaaaaaaaaaaaaaaaaaaaaaaaaaaaaggggggggggccctttaaaaaaacccttgggggggccaaaataaccccggggtggaaaaattatttttttttttttatggggggggtataaaaaacccccgcggggtttttgggag

SEQ ID NO: 102705 - DNA, 102 bp, Homo sapiens
acaaaacccaccccattcctccccacactcatcacccttaccacgctactcctacctatctccccttttatactaataatcttataaaaaaaaaaaaaaagg

SEQ ID NO: 102706 - DNA, 443 bp, Homo sapiens
  misc_feature (1)...(443): n = a,t,c or g
cacttgaacctgggaggcggagtttgcagcgagccaagatcgtgccactgcactccagtgtgggcaacagagattctgtctcaaaaaaaaaaaaaaaagaacggattcaaattttgggaacctaggccccaaaaggaaggggggggagggagaaaaaaacccccgggggtcccctaagggacccccacccccatttgggtatctgtttttacccccccccaaaaaaataaccagccctgcccacctggttttggggtttagttgggaaacccaaggcagccaggaacagttaaaggggtggaattttcccctgtggtattttacagagggccccacccctgctttattttaacccccacacattctgaaaaatactaaccttggaagggccagggggcaaaggcancctttctcacacactgttaacagcggggtaccttggc

SEQ ID NO: 102707 - DNA, 1303 bp, Homo sapiens
gcggccgcaggctacccgggccagcagcagaacttccactcggtgcgggagatgttcgagtcacagaggatcggcttgaacaactctccagtgaacgggaatagtagctgtcaaatggccttcccttccagccagtctctgtaccgcacgtccggagctttcgtctacgactgtagcaagttttgacacaccctcaaagccgaattaaatcgaaccccaaagcaggaaaagctaaaggaacccatcaaggcaaaatcgaaactaaaaaaaaaaaaatccaattaaaaaaaacccctgaaaatattcaccacaccagcgaacagaatatccctccaaaaattcagctcaccagcaccagcacgaaaaaaactttatttttttaaccgattaattcaaagccacctccactttgccttgtctaaaaaaacaaacccgtaaactgttttatacagagacagcaaaatcttggtttattaaaggacagtgttactccagataacacgtaagtttcttcttgcttttcagagacctgctttcccctcctcccgtctcccctctcttgccttcttccttgcctctcacctgtaagatattattttatcctatgttgaagggagggggaaagtccccgtttatgaaagtcgctttctttttattcatggacttgttttaaaatgtaaattgcaacatagtaatttatttttaatttgtagttggatgtcgtggaccaaacgccagaaagtgttcccaaaacctgacgttaaattgcctgaaactttaaattgtgctttttttctcattataaaaagggaaactgtattaatcttattctatcctcttttctttctttttgttgaacatattcattgtttgtttattaataaattaccattcagtttgaatgagacctatatgtctggatactttaatagagctttaattattacgaaaaaagatttcagagataaaacactaaaagttacctattctccacctaaatctctgaaaaatggagaaaccctctgactagtccatgtcaaattttactaaaagtctttttgtttagatttattttcctgcagcatccttctgcaaaatggtactatataggcagcttgctttgaggctagtaaaaagatatttttctaaacagattggagttggcatataaacaaatacgttttctcactaatgacagtccatgattcggaaattttaagcccatgaatcagccgcggtcttaccacggtgatgcctgtgtgccgagagatgggactgtgcggccagatatgcacagataaat

SEQ ID NO: 102708 - DNA, 390 bp, Homo sapiens
  misc_feature (1)...(390): n = a,t,c or g
cggacgcgtgggcgcttatcttttatcttcatgtggctattgactgggttactgagcatgaaaaataaatcatattctcaaaaaaaaaaaaaaaaaaaaaaaaaaaaaaaaaaaaaaaaaaaaaaaagggggggccccccaaaaaaaaaccctggggggggcccaaaattttcgtccttaggagggtattgtctttttttataaggggggaaaaaaaaaacacattcggggattttttaaaaaaaacctttttttgggggggggaaaaattgggaaaaccccccccaaaaaaaaaaaccccttggggaaaaaaaaaaatttttaaaggggaaagggggaaaaaacccccttttttgggggggaaaaaaaaatgnnnnnncccccaaaaaa

SEQ ID NO: 102709 - DNA, 406 bp, Homo sapiens
tgagaataaaagaaccccctattaatgtgtaatgtgcctggcactgcctactttattaaggggtgctgtgagaataaaagagaaaagacctactttatttgacagcgaaagaaaaaaaacggaaaaaaagaaaagaaaaaaaggggggggggaggaaaaaaaaacccctggggggggcaaaatttaccgggggggggcaaattatattttttttcttttgggggagaaaaaaaaaaacctttttggtttttttggggaaaaccccttttttggggggggggaaaatggggcccacccccccccaaaaaataaatccttttggggaaaaaaaaaattttggggggggaaggggggaaaaaaccccttttttggttggttgttaaaagaaggggggagaattcttaaa

SEQ ID NO: 102710 - DNA, 418 bp, Homo sapiens
  misc_feature (1)...(418): n = a,t,c or g
ctgggattacaggtgcccaccaccacacccaactaatttttgtatttttagtggagatggggtttccccacattggccaggctggtcctggcctcaagttatatgcctgcctcagcctcccaaagtgcttttaactccgtgggtaagggacagaacacgagacttggaggggggggatctatggtatggggcctgcctgggggcctgtctgcacctgggaccccaagcagcctctttcggccacggcattctgggtcctgccagtctgctttgctgcattcccaagcatgtccacatggacacactctccccaggtgtcaaacttcagtcttgtgacacgggagtggcattgagggttggggagaagagggagggcagtangtattacaggtgaggcagacccagctttccattctct

SEQ ID NO: 102711 - DNA, 653 bp, Homo sapiens
agatatgataagagaacagaagatataccataaatatttggcacagagacgtgaggaagaaaaagctcaggagaaagaatttgacagaatattagaggaagacaaggcaaagaagttggctgagaaggacaaggagctgagacttgaaaaggaggcaaggagacagcttgtggatgaggtcatgtgtacaagaaaacttcaagttcaagaaaagttgcaacgagaagctaaagaacaggaagaacgtgctatggaacagaaacacataaatgaaagtcttaaagaacttaactgtgaagagaaggagaattttgcaagacgccaacgtttagcccaggagtacaggaagcaacttcagatgcaaatcgcctaccagcagcagtcccaagaagcagagaaggaagagaaacgccgagagtttgaagcaggtgtagcagcaaacaagatgtgtttggacaaggtccaggaggtcctgtccacccatcaagtgctggctcaaaacattcatcccatgccgcaaggcatgccccagtaagcttccaccgtagttccgtgagcatcaatatatcttttcttggtcttttaatatttttaactacagtatgcttgtatgcttcttttaactcctggataaacttttcttttttccctga

SEQ ID NO: 102712 - DNA, 413 bp, Homo sapiens
  misc_feature (1)...(413): n = a,t,c or g
acagttcagatcgcgagcggccgccccaaacccactccaccttactaccagacaaccttagccaaaccatttacccaaataaagtataggcgatagaaattgaaaaaaaaaaaaaaaaaaaaaaaaaaaaaaaaaaaagggggggggggtttaaaaaaaaccctggggggggcaaaatttaagggggaagggaaaagaaaatttttttttttaaagggggggcaaaaaaaaacccctggggaatttttgggaaaaaaactttttttgggggggggaaaaattgggaaaaacccccccaaaaaaattaacgtctttggggaaaaaaaaaattttaaaggggaaaagggggaaaaaaacccgaaaatgggtgggggtaaaaaatttgggccncnnnggggaaacttatgcttcag

SEQ ID NO: 102713 - DNA, 423 bp, Homo sapiens
  misc_feature (1)...(423): n = a,t,c or g
agggatttctctaaagagctgataacttcgcttgatgagcttcaagggaaaaaaggtgtgggtgtgtgttgtaaagtaacctgcaacatggagggactccttccaggcaggaagggcagtgacggccagcaagtgggaacttctcttctgaggggggctgagggtttcctcatcgccctgcatttagaagggccaagagtgaatttggagttaatccatcagtttctttttggttaagctttttagagttgctgtaaccaaaataaataagtgaagtaaaccaacaacanancgcccaanaaaaaaaaaaaaaaaaaaaaaaaaaaaaaaaaaaaaaaaaaaaaaaaaaaaaaaaaaaaaaaannnannnnnnnnnnnnnannaaaaaaannnnnannnnnnnnannnaaaaaatatttttta

SEQ ID NO: 102714 - DNA, 382 bp, Homo sapiens
cagcaatgtagttttgtgcctgtaatctcagatgcttggcatgctgaagcgggaggatggcttgcatgataataaaggatgtgacttttaaagacagggtaacaaaccctgtttctaaaaaaaaaattaaaaattatctgggcatggtggcacatgctatgctcctacctgcttggaaggctgaaatgaggggatcttttgagcccaagagttaaagtctgcagtaagtttccatcacaccactgtgctccagcttgggcaacagaatgtgaccctgcttctaacttatggaattctaccatgcaaacaacaatgcagggggggcccttttaaaggactcctttgggggccactacttaagggaaccatacaaggaaattct

SEQ ID NO: 102715 - DNA, 393 bp, Homo sapiens
ctacgagccacagcttaaaactcaaaggacctggcggtgcttcatatccctctagaggagcctgttctgtaatcgataaaccccgatcaacaaaaaataaaaaaaaaaaaaaaaaaaaaataaaaaaaaaaaaaaaaaaaaaaaaaaaaaaaaaaaaaatggggggggggtttttaaaaaaaaatttggggggggccaaaatttacggggggagaaaaaaaaatttttttttttttttgggggggtaataaaaaaccccctgtggttttttaaaaaaaaaaattttttttgggggggggaattttgccccacccccccccaaaaaaatattccccctggaaaaaaaaaaaaattttttaggggggggggggggacaacccctgcttttggggg

SEQ ID NO: 102716 - DNA, 392 bp, Homo sapiens
tggtaataaggacagtggctgtccttgttaggagttatgactggaaggaggcaggagggagctttctggaaacactgtacatcttgctcttgagagtgcacgtatatacatcaagtgtttatcaagctgtgtggttaagatttgcacacttgtatatgttatacctcgatttaaaaaatctaaataagtaaataaagataccttcaaatctttaaaaaaaaaaaaaaaaaaaggccgggttggggggctcacccctgtacccccaccattttgggaggctgaggtaggaggattgcttgaggccaggatttcaaaaccagcccaggcaacaaagggagacccctgtctctactaaggtaattaaaacattaaaataaaaaaaaaatttggaa

SEQ ID NO: 102717 - DNA, 392 bp, Homo sapiens
aggggacccccgccccctgccctcccctttttgcaccgtactgtggaaaagaaacacgcacttagtctctaaagagtttattttaagacgtgtttgtgtttgggtgtgtttgttctttttattgaatctatttaagtaaaaaaaaaattggttctttataaaaacagacctctgatacttgaaattaaaaaaaaaaaaaaaaaagggggggggctttttaaaaaactctttggggggcccatttttacggggggggggaagaatttttttttttttttttgggggggggaaaaaaaccccgggtggggtttttggggagaaactttttttttgggggggggcattttggggccccccccccccccaaaatttaagcgtttgggggaaaaaaa

SEQ ID NO: 102718 - DNA, 396 bp, Homo sapiens
  misc_feature (1)...(396): n = a,t,c or g
cccacgcgtncgctgcactctagcccaggcaacagaacaagaacctgtctctaaataaataaataaaaataataataataaaaaagatgttttccctaggaaaagaagaggaagaagaaaaaaaaaaaaaaggaaaaaaaaaacaaacagaaaaaaaaaaaaaaaaaaaaaaaaatagggggggggcgccaaaaaaagaatctgtggggggggacaaaaaaaagggggggggaaaaaagatgttttttctttaaaagggggggaaaaaaaaaagacgggggggggattgaggagaaaaaacacttttggggggggggacagggcgaccgaaccccccccccgaaaaaaaaagcggcggggggaaaaaaaaaaaattgggggggggggggggggaaa

SEQ ID NO: 102719 - DNA, 435 bp, Homo sapiens
  misc_feature (1)...(435): n = a,t,c or g
acagggaggctgcagaagccatttctctttgtagataaaaagcattatctatgattgttgtataataaattgatttttacattaaaaaaaaaaaaaaaaaaaaaaaaaaaaaaaaaaaaaaaaaaaaaaaaaaaaaaaaaaaaaaaaaaaaaagaaaaatacgaaaaaacaaaagcctactgaaaccaaaaaacgtcaacccaaagagacgtaaaaaaaagccccctattagatctcaaacacttgcgagggggccgttcactcgcctgggcctataacggtttccggtattacactactaaaccaaaaaccataataatttaggaatattagcggtagcactcaactttccctgcttcctttttgctgctggacgggaggtgnnggnngccgngccagaaagggaacccgccccaccccttgggactgtcctcg

SEQ ID NO: 102720 - DNA, 430 bp, Homo sapiens
cagttttgtacatatggaacatgaaaaagctgtattactactgaagagtttccagaacacagtagacctaggtattcaacgtgagcttactgtctaaatattttttataaatagtgaagatacgtctagccggacctaatgttcaaaaataaatttatacatagaaacaaattttgccaattgctggaccaatggcaaacattagtgccaaatgtataatactatatgttagcactgaccatccttaaaaaatgttaactctataaatatgatgttcatgtggttatgtattagttttaattgtcagcctctggctgtgcattcgggcagatttgtttctgtttttgtttttgtttttaatcaaataagtttcttctcagaatggatttccaatatttcggagcacggaagcacacacaagctctttatg

SEQ ID NO: 102721 - DNA, 404 bp, Homo sapiens
gcgctttggcttaatatgctgggcagtaaggatacagcatccatgtttgagcagaggaagagatggacagagctggacttctggaaatcattagcactatgtagagtgccgatctgaaaaaaaagtaaaaaaaaaaaaaaatcgttagcactatgtagggggccgccctgaaaaaaaaaaaaaaaaaaaaataaaaaaaaaaaaaaaaaaaaaaaaaaaaaaaaaaaaaaaaaaaaaaattggggggggggtttttttaaaaactcctggggggggccaaaaaaaagggggggggggaaaattttttttttttctttattgggggggaaaaaaaaaaccctgggggtttttttagaaaaacccctttttttgggggggagaaaaatggccccccctcccccccc

SEQ ID NO: 102722 - DNA, 359 bp, Homo sapiens
caaccagtaagctacccttttaccatcattggacaagtagcatacgaactatacttcacaacaatcctaatcctaataccaactatgtccctaatagaaaacaaaatactcaaatgggcctattaacaccaaccaaaacacatataataaaaactaaacaaaaacatgggcgtctgatctaaaagaacccattagggggccttcgctctaagagtaaaaacgccctaacccactttttaccacagggcacacctatatcccttatgcggatactattgaaaatcaactccttttggggggggaaaaaaaaagacaaacctccccccaaaaatttaaaccctgggggggaattaaaatta

SEQ ID NO: 102723 - DNA, 372 bp, Homo sapiens
caaccagtaagctacccttttaccatcattggacaagtagcatccgtactatacttcacaacaatcctaatcctaataccaactatctccctaattgaaaacaaaatactcaaatgggcctaaaaaaaaaaaaaaaaaaaaaaaaaaaaaaaaaaaaaaaaaaaagggggggccccttttaaaaaatccctgggggggcccaaatttccccggggctaaaaaaaaaaacctttttcctttaagggggggaaaaaaaaaagaccggggggttttttaaaaaaaaacctttttttgggggggggaaattttggcaaccccccccccaaaaaaataaaccccttaaaaaaaaaaaaaaatttttaaggggaaagg

SEQ ID NO: 102724 - DNA, 428 bp, Homo sapiens
  misc_feature (1)...(428): n = a,t,c or g
ttctagatcgcgacgggccagccgaggctacaaaaactaaccctggatcctactctcttattaaaaagatttttgctgacaaaaaaaaaaaaaaaaaaaaaaaaaaaaaaaaaaaaaaaaaaaaaaaaaaaaaaaaaaaaaaaaaaaaaaaaatgggggggggggggccataaaaaaaaacccccggggggccccaaaacctaccctgtaaaaaaaaaaattttttttttttttaaggggaaaataaaaaaacccccttggggtatttaaaaaaaaaaattttttttggggggggggaaaaaaccgaaaacccccccaaaaaaaaaaaggggcgggaaaaaaaaaaaaattttttggggggaagggggggcaacctctcctttggtggggggggaaaaaaaaaggggnnnnnnnnnnaaaaaccaaat

SEQ ID NO: 102725 - DNA, 385 bp, Homo sapiens
  misc_feature (1)...(385): n = a,t,c or g
ctagtctcaatctccaacacatatggcctagactacgtacataacctaaacctactccaatgctaaaactaatcgtcccaacaattatattactacaaaaaaaaaaaaagggggcgccccttaaaaagaacccttggggggcccaaatttaacgggggtttgcaaggaaaaagttttttccttatgggggggcgtataaaaacctccttgggaattttgggaaagaaccctttttttggggggggaaaaaattggcacaacccccctccaaaaattaaaccctttagggaaaaaaaaaatttttaaggggaaaagggggaaaaccaacctcaataggctggcggttagaaaattttgnnnnnnttnnnaaaaaaactttcttttg

SEQ ID NO: 102726 - DNA, 400 bp, Homo sapiens
cagaggcctgtcatggttgaaagtcagtgttgggaggctgtgtttttatgtgaatatattctcatcagtgaaaaaacttactgaggccacacttgaactacattcttactaatgaatcaactaagaaaatgaaagttaaaaatgcttcataactatctttttgcaacatcctcagaactgacaatgaaagaaaatgcattttcttaagacagcagctcttggggacaaccatagcaaccaaatcaaagccagagtattacacagaggagagaagccaactgtgaatggagtcttgctctgtatcccaggctggagtgcagtggcatgatcctagctcactgtaatgtccacctcctgggttcaagatattcttgtgccttagcctcctgagtggctggga

SEQ ID NO: 102727 - DNA, 398 bp, Homo sapiens
  misc_feature (1)...(398): n = a,t,c or g
atgaatgtttccctaattctcccaatatgaatgggcactgtaacttgttggttcaaagtacaagtccctcaatttcaactatgccatgtcccaagtatgtggctttggaaaaggtgtttcttctcaatgtgctttggtttttttatcttaaatatagggataataggccaggctcagtggctcacacctgtaatcccagtactttgggaggccgaggtgggtggatcactggagcccaggagtttgagaccagcctgggcaacatagcaagacccagtctcataaaaagaaaaaaatataaattattttaaatagggatattagtagtatctatctccaagtgctttaaagatgaaatgggcatggtggctcacatctataataccagcactttgnga

SEQ ID NO: 102728 - DNA, 436 bp, Homo sapiens
  misc_feature (1)...(436): n = a,t,c or g
tggtgatggatacgcaagccaatacgtagataaaactgcaaaaaactaaatacacacacacacactctcacacactcacacactcatatgctcacacactctgacacattcacacacacacacacacacacaaagtataagtaaaatggcaaatctgaataagatctgtggattgcataaatgtcaatattttaattgtgacattgtaccacagtttaacattagggaaactgggtaaaagagtattttttgcaaatgcatgtgcatctataattattgaaaaagtaataaaagtcaattaaaatatgtttatgcaggtgtatgcatttaaaagactagaaaggatttatcgacattttagtatagttaactatccagtaggacattgagcatcttgctttctaccttttactttactttctctgccaagattttn

SEQ ID NO: 102729 - DNA, 412 bp, Homo sapiens
  misc_feature (1)...(412): n = a,t,c or g
cggacgcgtgggcagctgctgaggaggctgaggcgggagaatggcgtgaacccgggaggcggagcttgcagtgagcctaaatcgcgccactgcactccagcctgggccacagagtgagactccttcggggggggggggggggggggnnattattttntcccccggaggcggagcgtgcgattttcctacaacccaccactgggctcctgggtggggcacaaaaagagactccttctccttggggggggggaaaaaaaaggaccccccccccccccccccaaaaaaaaggaccttgttttttgacaaacccccttttcttggggggggagggaaaaaaaaaaatttttttttccccggaaaaaaaaaaattatcccgtcccgcccctnnaaaaaagggccagggggcggcccg

SEQ ID NO: 102730 - DNA, 409 bp, Homo sapiens
atccacctgcctcagcctcccaaagtgctggggttacaggcatgagccaccacgcccagccaattgagcctcttcgatgttccagccatagaaccacctagaaccactagacactttacaagtgctgctgcatttggccctcacagcaaccctggaagagagcttttattcccattttacagatgagggaactgaggctcagagaagcaaagttacctgcccaagtccacatagcttgaaactggctagctaagcatgcttcttccacgaatttgcactgcttccatgggagttaatagctgggccagttccccgtgtccccatcccacacaccgtggagaggaaggagaaaatcctgcgcacagacgtgcttgaggcctcctctgtcggcttccctggcaggggtctt

SEQ ID NO: 102731 - DNA, 396 bp, Homo sapiens
  misc_feature (1)...(396): n = a,t,c or g
tcgaaaaaaaagaagaacttgtctggaaatgataataagcaaaaactcatgaatataataaacaggggttattgtaataaaaaatcatttgtattagaatattctttctcatagacataatataggccaggtgtggtggcccacgcctgtattcccagcactttgggaagccaaggcaggattgcttgagaccaaaagtttgagaccaccttgggcaacataacaagtccccctctctgttttaaacattttttaaaaaagaagaaataatataaaagttggtaaattatttgacaagcataaaaacctatttagccatactgtgactaaactctaatgatgctctcaattcagtctcaatagacacttttaaatttccgtgctaaagtacacacn

SEQ ID NO: 102732 - DNA, 341 bp, Homo sapiens
cggtgctaaatgtgttagtgacaggatcaagcatgctttccttatcaaggagcagaaaatcattgtgaaagtgttgaaagcacaagcagggagtcagaaagctaaataaaagatgaagcttttttgagtaataaaaattaaaagactttttaaaaaaattagaaggcaggaacccagatgggaagcgtcttcctaatgctcttggccttggagggtcctttctgtgagttcaattgacaaaatctaaaaatgcgctagcttggcaaagagaaatgtttatagggtctagctctagtatcacaaaggaaagcacaggaagggtggatttggaactgatagac

SEQ ID NO: 102733 - DNA, 384 bp, Homo sapiens
agatgggatttctccatgttggtcaagctggtctcaaactcccgacctcaggtgatttgcccgcctcggcctcccaaagtgctgggattacaggcgtgagccaccgtgcctggcctgtgtctggctttttttgctcagaagccaaggagtgcttttgggaggagcagctcattaaccttgacaaaaactcacaaaagtgagttttacgtattaaacagctcaatgtttcagagttctgtatgtattctagtattattcctttgtcagacatgtggcttacaaatgtttttccccactttgtagctttttttcatcctcttacaagggtcttttgcagagcaaaattttttaatcctttttttttttaattttttgagaaggccg

SEQ ID NO: 102734 - DNA, 404 bp, Homo sapiens
atgacctggctgagtcaactcagagtactccaactgcaaagatcaggatgggaggattgggtctttcattttttttttttgccgggcagggaccactgcacaccagcggggggacaaagcaaaactctgttgcaaaaaaaaaaaaaaaaatttaaaaaccccccaaaattttggccccccaaattaacaatggcgggaagaaaaaaccccctaaaaaaatccattaccaaattggcccggccaaaaaaacaaaaaatttgaaaaacccgggggggaaaataatccgggggggggggggccaaaaaaaaaatggagggaaaaaaggggaataaaccctaggggcccggaaaaacatctttggaggccccaattttccctttagggggaaccccaaaaaaaaccaa

SEQ ID NO: 102735 - DNA, 386 bp, Homo sapiens
cccatctttattacaattactataatattaggacttattctgccatttaattttatatttttcatgtactgtgccttctttgttgtttctttccccacctttgttactttccattacatagagccaacattcttctcatgttttgaaaactatacattctattttcttgttaatgtagttgctttaatttgactttatgctacttcattgaataatttttaattatttatattcttcctaataataaagttcctttcacaccctcctaaaaaaaaaaaaaaaaaaaaaaaaaaaaaaaaaaaaaaaaaaaaaaaaaaaaaaaaaaaaaaaaaaaataataaaaaaaaaaaaaaaaaaaaaaaaaacacccaacaaaaaaaagaggg

SEQ ID NO: 102736 - DNA, 611 bp, Homo sapiens
tttcactagtaccctgtattctccttgatccctgacacctggatttatttttagatgttgcccacaaatgctactgtaaattttttttaaaaaagccctaacagttaatattaattaccttgtttgttacgagaatgaatggctcggatgtgagccactgcgcctggtcaagaggtagtttttaaattcataaaatgggctgggctgggtgcagtggctcatacctgtaatcccagcacttcaggaggccaaggtggagggttgcttgagcccaggagttggagaccagcctgggcaacgtagcaagaccctgtctctgcaaaaaatataaaaattagctgggtgtgctggtatgcacctgtagtcccagctacttgggaggctgaggcaggaggatggcttgagcctagaaggttgaggctacagtgagccatgatcatactattgcattccagcctgggtggcaagcaagatcctctctcaaaaaaaaaaagggactggattacagttttgattaaaatatgcttgaagttaataacctattctggcttactgaacacaaaaataagtaaaatacttagtgtcccaggtgttgtgtaacaggaaaagtg

SEQ ID NO: 102737 - DNA, 370 bp, Homo sapiens
cgggaggcggaggttgctgtgagccgagatggagccattatactccagcctgggcaacaagcgcaaaactctgtctcaaaaaaaaaaaaaaaaaaaggtttttggaaaaatcttgtcttaccccccttttaaaggcttaaaggaatataaattttcttggaaatttttgggggaaacaaacggtggcaaacgggggatttttaaatcaaatattttattctccttttataagcgggttttttaatgcaaaaaaaaagttttttttggccctgtccctttcctttaaaaattttaaaaaaatggaaagaaacacaggggttcggtaactctaactattttggggctaagttattcaaaattgggccagggg

SEQ ID NO: 102738 - DNA, 417 bp, Homo sapiens
ctgttttgagaagagttgtaattatatggtgacatatgcacattgtttaaatctgttctccctttcctagactggaaagtccatttggggctgggactgtagccattttgcagcttgcctagcatggagcctgccacgtagtcagcactagataaatgtttgtagatggaatgaatgaattcctattgtataattggggaaactgaaggatgaagagatgatgacttgccctagatcacacagtgagcccataaagaaccccccaggtggccaggtgtggtagctcatctgcatggtatgcctgtaatcctagcactttgggaggctggggtgggaggatcacttgagaccaggtgttcgaggtcagcccgggcaacatagtgagacccccatctctacaaaaaataaattagccag

SEQ ID NO: 102739 - DNA, 395 bp, Homo sapiens
aaacaccaggagttctatcttggtcttgttgctgcctgccttggcctcccaaggtgctgggattacaggcatgagtcaccgcacccggcccacttttgctgttttttggtccatgtcttcgtggaccaaaatctcaaggaggcttctgtgattccagcaagggtggctttgcgggttggtgaaagtcgtatctagccaggtccaagcgagatgggcaggatttcgcctctggcgtgtctcactgatgggtcgtctaggggtgctctgtagaaaggtgactcttgaatattgagaggaaagtatccctcactgagggtcatctggagcttgatgtccagaaggtgacaggaaacaaattgggttatcagatttagaagacatggaccaaaaagaag

SEQ ID NO: 102740 - DNA, 395 bp, Homo sapiens
  misc_feature (1)...(395): n = a,t,c or g
ctggttgcagccatcgtcctgggcggcacgggctggggatttaaaaacattcgccgaggaaggtccggaggggcctaagtgccaccctcctccctccaagcctggcacccaccgtctcggccctgaaccacgaggctgcccccatccagccacggagggaggcaccatgcaaatgtcttccaggtccaaacccttcaactcctggctccgcaggggggttggggnnnnnnnnnnnnnnnnnnnnnnnnnnnnnnnnnnnnnnnnnnnnnnnnnnnnnnnnnnnnnnannaaaaaaaaaaaaaaaannnnnaaaaaaaaaaaaaaaaaaannnnaaaaaaaaaaaaanannnaaaaaaaaaaaaaaaaaaaaanaaaaaaaaaaaaggannacgaa

SEQ ID NO: 102741 - DNA, 377 bp, Homo sapiens
ttgcctcgaggcatcaagctcctgttttaactctgccacacggagcgccagatcttctttcgtccccgtcaagctgacatcacggttcacctgttcacccaccgagcggaggcgggcaatcagttcatctttcgacatggactcctccacaaagaaacaatggccccgaaaggccatgattacgccagttgtgcggacaccaactcatcaggggcagccagcagcatcaccggggctgactgaataaaggggaactcacgcgccggatcgccggggggcacccaaattttcgggtaacgggcagagagcgtaaagacttcgcgctgtgcgtccgcatccctgcaggggtcaggcctgtcgacaattcacaatcatgg

SEQ ID NO: 102742 - DNA, 384 bp, Homo sapiens
aaattactctctagctggctcttgaggaaaaaaaaatgggggtaggaggagctggggccttcccttatttatacaagcagatgaagaggtcctagacttttggagagtcacagtaaagaaagaaaaccagccacctgatttaaacaaacaatatattcaggtttctgaatctagatttctagttccagtctttgaacagaaaaaaccttttagaaaaactctttgctctttacctgggcatgggggcttcatgcctgtagtctcagcactttgagaggctgaggtgggaggatcgcttgagtccgggagttcgagaccagcctgggtgacatattgagagccctgtctctacaaaaaaaaatttttttaaattagctgggcatg

SEQ ID NO: 102743 - DNA, 389 bp, Homo sapiens
ctagttctagatcgcgagcgcccgccttcatgcccggctaattttttgtattttagtagagacggggtttcaccgtattatccaggatggtttagccaggatggtctcgatctcctgaccttgtgatccaccggcctcggcctctcaaagtgctgggattacaggcgtgagccaccatgcctggctgggaccaatgatagtcttaatggacagaattgtgaggataaacgaaacgtgcttaaagacctggtgtatagtcagtgctaaataaataaagcttttattattcatactatgttaaacaccgagtcaagatggtaactgaattcttctatgtattttgttattttgaggatctgtgataattaactttacaaaggaagttaatt

SEQ ID NO: 102744 - DNA, 384 bp, Homo sapiens
gcgaaaaaaaagccatacatggtggagggcacctgtattctgagccgagctatttgggacgctgatgagagaggatggcttgagcctgggaggtggaggttgcaaagagcccaaatcatgccactgtaatccagcctgggcaacagagccagactgtctcagaaaaaaaagaaaagaaagcccatacctattagtagtcactccacctgatagtagctactccccatttttttttctgctcctcccagcccccgacaacaatgactactttctgtcttaatgaaattgacttttctggacatttcaaataaagggagtaatataatatgtgaatgaagtctcttttaatatgtagacttatcctccctcttttttcctctcttt

SEQ ID NO: 102745 - DNA, 380 bp, Homo sapiens
  misc_feature (1)...(380): n = a,t,c or g
cgagaggctgagacatgagaattgcttgaacctgaaaggccgaggttgcagtgagccgggttggtgccactgcactccagcctgggagacaaagcaagactccatctcaaaaaaataaataaataacgtatcactttaacccttttgaagacttgaactgttaattttttagacattaaaaattgtatccacaagtatccaagatatctgaggtattatgttaatatattagatacttaaaattaatttgtgtttaaaaactgctgtaaacctcctcatccaaaagttcagaataaagattagggaatgtgatataggacaatttcactgtatcttttatgctttcatgaaaaggctttgttgattgccttaacctaatn

SEQ ID NO: 102746 - DNA, 370 bp, Homo sapiens
cccacgcgtccgcccacgcgtccgcggacgcgtgggattacaggcgtgtgccaccatgcccagctaatttttgtattttgtatgttagccatgttggcaaggctggcctcaacctcctgacctcaagtgatctgcccacctcagcctcccaaagtgctgggattacaggagtgagccaccatgcccgaaccccaacttatgtttgacttacaatgtttggactttatgatggtgcaaatgttatatgcattcagtagaaactgtacttcaaattttgaattttgatcttttatttttattgttacaaaattggctttgtgtttgatgatgttgcccagtttttggctaatgaaagagttctgagcatatc

SEQ ID NO: 102747 - DNA, 310 bp, Homo sapiens
gatttgggcaccagatttatcttactgcaacaggagccatggtgggagccacccccataactcttatagagctggtgggccaccaggactgccagatatatatatatattttttgaaacagggtcttgctatgttgcccagactggcctcaaactcctggactcaaaggatcctccctcagcctcctgagtagctgggattataggcacataccaccacgactagctgccagatcatcttatcttggaccaggcttctaccattaattcacatgctttaaaaaaattaaaaattaaaaaaaaaaaaaagg

SEQ ID NO: 102748 - DNA, 416 bp, Homo sapiens
  misc_feature (1)...(416): n = a,t,c or g
acattcctatgttttagagttgcagtaaaactttgatgataacctcaataatagcaaagttttcgtctttgaaaaggggatttagcatttgctttaagaatgatagataaatggatattaagctctctacatgtaaaactatgaaatctttagacttattccattaaaaattttgcttaagctccaaaaaaaaaaaaaaaaaaaaaaaaaaaaaaaaaaaaaaaaaaaaaaaaaaaaaaaaaaaaaaaaaaaaaaaaaaaaaaaaaaaaaaaaaaaaaaaaaaaaaaaaaaaaaaaaaaaaaaaagggaaaaaaaaaaaaaaaaaannnnnnnggggggggggggggaaaaaaaaaaaaaaaaaaaaaagggggggggagaaaaaaaaannattttttatgggaaaaaaaaagagg

SEQ ID NO: 102749 - DNA, 405 bp, Homo sapiens
cggacgcgtgggcggacgcgtgggttttttttgtatttttagtagagacagggtttgtagtagaggcggggtttcaccatgttggccaggctggtcttgaactcctgagctcgggtgatctgctcacctttgcctccgaaggtgctgggattacaggcgtgagccactgccccctgccgcaccattctatttctgtctctatgaatttgactactctaggcatcatatataagtggaatcatacatcacagattatgtttttacctgtgagtgtctttcacaataatgaagaatctcttgaaccccttcaggaaatttaaaaagttttcgtcattttgtatgatatatgatgaaaaagaaacttgaagtaacaaatactttattatggatcagtacattgttaaa

SEQ ID NO: 102750 - DNA, 413 bp, Homo sapiens
  misc_feature (1)...(413): n = a,t,c or g
agaactgagagtcatattcaggaataattcatctcttgttgtagaaggcagggatcatagtcttattcttatgtacccagtgcttggcacatggttgaaaactcattattgaattatagagatggcaactccagacctatagtgagaacaactagacattttatggctctactcttagaattattctgacatcaaaagagtagttctgccatttctttaactcaacagaaacaaagcatacataaaaaaaaaaaaaaaaaaaaaaaaaaaaaaaaaaaaaaaaaaaaaaaaaaaaaaaaaaaaaaaaaaaaaaaaaaaaaaaaaaaaaaaaaaaaaaaaaaaanannagggggggggggcccttaaaaaaaaaccccccccccccccggggggggggagattttttttttttt

SEQ ID NO: 102751 - DNA, 402 bp, Homo sapiens
  misc_feature (1)...(402): n = a,t,c or g
cggacgcgtgggaaaaatctcctacattcccactacttagaaataactactaatcacatagtagtatatattcttctatacttttttctgtgaatacacacacacacacagagatgtgtgctgttttcaaaatgagtatggaatatttaaaaaacaaatagacttgcatatgtaataattaggttttaaattcatactggaaaacaccctaaatgctacagaaactcttattcagtcttattcttagcccnnaaaaaaaaaaaaaaaaaaaaaaaaaaaaaaaaaaaaaaaaagggggggggctttaaaaaaaaaaaaaatttaaaccggggggggggggaaataattttttttttttgggggccaaaaaaaatatttgggggggggggtttaaaaaaaggg

SEQ ID NO: 102752 - DNA, 372 bp, Homo sapiens
cccacgcgtccgcccacgcgttcgcccacgcgtccgcaaagggcttttttttttggtttttcaaaacatcagtctttaggctttaaaaatgtttccatggagagtaactcagtgtcaagagatgtgcaaaaaatccaaagaagggtaaggttgcccctggtatcaaggaaataagaaccagaagtcatcaggacagtgaagatatttagcaaagaaatgtaagtgggaaaacatgtaataaagttagttttgtgatttaataaataaataaaatgtttgcggatgcatcgcttcccagaagccaaaaaaaaatgtagaaataaatgtgtataaaaaatttatgcggggcgccccttatagacaccccctttc

SEQ ID NO: 102753 - DNA, 189 bp, Homo sapiens
caaacactgcggaaggccaaggccgcagggtcctctgcctaggaaaaccagagacctttgttcacttgtttatctgctgaccttccctccactattgtcctatgaccctgctaaatccccctctgcgagaaacacccaagaatgatcaataaaaaataaataaattaattaaaaaaaaaaaaaaaaagg

SEQ ID NO: 102754 - DNA, 402 bp, Homo sapiens
agaatacagttattaagtggccctgcttccgaaacccatattcctatgtgatactgatggctttcacccttttaagaaacaaaaccaactacagtttcaacgcactgcccttagagatagagaaacagacccaagaaatgtgctcaattgcaatgggccacatacctagatctccagatgtcatttcccctctcttattttaagttatgttaagattactaaaacaataaaagctcctaaaaaatcaaaaaaaaaaaaaaaaaaaaaaaaaaaaaaaaaaaaaaaaaaaaaaaaaaaaaaaaaatgggggggggggccctttaaaaaaaaaaattttttgggggggggggggggggaaatttttttttttttgggggccccaaaaaaaaaaagggggggggg

SEQ ID NO: 102755 - DNA, 398 bp, Homo sapiens
aatggcaccaagagcctgtgactaggcctttcctttaagctcagaagaagactgacaaatggggaagccaagcagattctatggcccttttgttacgttcatgcttcactcatttgttcagaagtttgtagagagcctttccttgctgagcaagaagacaggaatacagagatagatgctcaactgaaagattgcagacacaggctggttgacacatacttctctcagctgccacagaagggattcttgccttagataaagaagatggcctttggaagccctcataacctgagctctggtcttgttctgttacccacattggagtgcagtagcacgatcctggctcactgcagcctcgacctcctaggctcaagcaatcctcccatctcagcctccag

SEQ ID NO: 102756 - DNA, 400 bp, Homo sapiens
tttcgtggattacaggcgtgtgccactatgcctggctaatttttgcatttttagtagagacagggtttcaccgtgttggccaggctgatctcgaacttgtaacctcaggagacgcgaccaccttgcgctcgcattaggcgatgaatacatacatgcgccagcatgcgtggccataaagacaccttttgactgcccagatgcaaacaactggcttccgccatataccctaaagaatgtgaaaatcctagcgcacacatcttaagccaggtgaaaacgccaccactttctctagctggacatagaaagaagaagctcggctccaattcccaacaaattcctcatctccatatgagaccacctcaccctggaccttatcgcacatatcactatcaacattttg

SEQ ID NO: 102757 - DNA, 447 bp, Homo sapiens
  misc_feature (1)...(447): n = a,t,c or g
actgaaaacctgatgacntcggcangnncnnnnnnnnncggaattccnnnncgacgatttcgtggggcggggtcggcggggccgttttgctttgtttattgtttcaaaagcgctgggcggcgggcgtccctgagagaaattaacacagtctcactctgtcacccaggctggagtgcagcggctcaatgtccattcactgcgacctccacctcccaggttcaagcgattctcgtgcctcagcctcccgagtagctgggattacaggaatctggaaactgttcttcaggaagaaacccattagtttggaactggagaattcctttgcatcagatactaaaatgaaagaaccacttttaggtggtgagtgtgacaaggcagtggcatcacagctggggctgctagatgaaattaagacagaacccgacaatgctcaacttcacagttgag

SEQ ID NO: 102758 - DNA, 405 bp, Homo sapiens
tgcgagtttctcaaactcctggggccccgcgggggcttggagtttcctcctcctgagcccggaggaaccctctcccgataggttccagcgtgactccgtgccactccacccttttcctttcttcttcctctttttttttttttttttttttttaaaaaaaacattttttttttttgttttgaaccttaaaattgtggccccctaactttcccaggggttaattttttgggaccccccctttccccccccaaaaaaaaaaacccccccccttttttttgaaaaaaaaaaaaaaaaaattttggggggggggttccgaattaactttttttccgaaaaaaaaaattttttgggggggccttttttaaaaaaaaaaaaattttttgaaacccccccccccctttggga

SEQ ID NO: 102759 - DNA, 418 bp, Homo sapiens
tttcgtaccgcagcctctgcctcttgggttcaagcgtttctcctgtctcagcctcctgagcggctgggactacaggtgcacaccaccacacctggctaatttttgcgggtttttttttttgaagttttttttttttttttttaaaaaaaaaaactttttttccccaaggggaagggggggggctttaatttaatttattggaagccccccccccgggggaaaagccttttttttggcttaaccccccaaaaaagggggaatataggggccccccccccggccggggatatttttttttttttttaaaaaaaagggggtttaccccttggggccaaggggggcctcaactcctaaaaatttaaaaccccccccttgggctttcaaaaggggggagttaaaggggggaaccaccccccct

SEQ ID NO: 102760 - DNA, 334 bp, Homo sapiens
aggaggcacagagtcttgctttgtcgcccaggctgccgtccagggttgcgatctcggctcactgcaatctccacctactgggttcagcgaaactgcttctcaaactgtggatccagacaaggtgaaggaccctggtaaactgaggacaatgtttgtagcagaactccccaaaactatcgtcaccgactcatgacatcacacaggtaataatgcaggagcacacatgctcctctggtggagagaacttttggatcttgttcactgctaccatcccaggacttaacagggcgcttgataaatgtttgttaaataaataaacgcacatcacgcattt

SEQ ID NO: 102761 - DNA, 414 bp, Homo sapiens
tttcgtggtttctctatgttggtcaggctggtctcgaactcctgacctcaggtgatccgcccgccttggcatcccacagtgctgggattacaggcgtgagccaccgcgcccggctgcaaacaggcatttttagggcagtttgatgagtgctgacttaatggtatgggcaagactcattcaaccagattcttttaagcatctgctgtgcgccagacattgccctggacacaggacattgtaaaactctgggcgacagaaaagccacttgcttggcctaggagcatcacatgaagactttgcataagcaaaaaaggagctgtgggggtgttggcggcagaaagtgtttctctagaaacactccagcatgtagaggctggagctgcaggacctatctgggatgacaggggcaggagg

SEQ ID NO: 102762 - DNA, 404 bp, Homo sapiens
tttcgtggctttgctaggcccagagagatactagcttggggttggggctgtggagactggaatggaatataaataaaaatcaataatcatatgcctaaaagtgttcccttcatgacctttcagccttggtcaaagcattttggggtttttttgtttgttttttattttttatattttgaagagatggggtctccctgtgttgcccaggctggtctcaaactcctgggctcgaatgaccctcccaccttggcctcccagagtgctgggattataggtgtgagccaccgtgcctgactggtcaaggcattttgtattgaaaatttccgtctcagacatagacagaataatacctaacacttacaccatgtaaaaggatggacttgggcatttaatgctacttactg

SEQ ID NO: 102763 - DNA, 494 bp, Homo sapiens
  misc_feature (1)...(494): n = a,t,c or g
gaggctcggctttgcaanncctggggagcttagnagtgntctnccggnttggagttaccgggtcgacgatttcgtcccggagctgttgctggacccctggcagggtgatggccagccacgtggaccttggaggaagcaggagacttgctgtagggcctgggcccacttggcaggagcagcacaaggcctccaggggtcaaacagggatggggcccagtgtcccgggaaagcatggccttagacaggagcatgcccagcacatccacagccaagaagggaggcagaggactccctagggtgggctggaacctatgggtaggagtgcttttctcatggtttccctttctagcagcttttccttgaaataagaactaaggccaggtggctgacgcctgtaatcccagcactttgggaagctgaggcaggtggatcacttgaggtcaggagttcgagaccagcctggccaacatggttaaaccctgtctctactanan

SEQ ID NO: 102764 - DNA, 397 bp, Homo sapiens
tttcgtaaaatatggtatatatacacaatggaatactgtatagccgtaaaaaagaaggaaatgctttcatttacaataacatggatgaacctggaggactttatgttagtgagataagcagatacagaaagactgcatgatctcccctacatatgcaaaataaaaaagttgaactcagaagtagattgtagaatgtagctaccaaggagaaggggggatagtgagggttttagggagggggatatttgataaaaagggtacaaatttttcagttagataggaagaataaattaatagataagttaataagttagtagataagaaatatattgcaggccaggcacctgcttgaattccggcactttgggaggctgaggcaggaagactacttgagcct

SEQ ID NO: 102765 - DNA, 386 bp, Homo sapiens
acgcttttctcccaagattgttgggaagatttaataagataatatatagtaggcatcttgcatagtgtctgagaaataagaaatgctcagtcaatagtggctctcattagccaggcatggtggtactcgcctgtagtcccagctactcaggaggctgaggcaggaggaccgcttgagcccaggagtttgagactgtagtgcactatgatcacgcctgtgaattgccactgcactccagcctaagcaaatagcaagaccccatctattaaaaaaaaaaaggggctattattagctatatcaaaaatgtctgactcacaagcctgtgttctttccactgaagaggaaattacttttcagtgttcttttttaaaacgtggatcctgaag

SEQ ID NO: 102766 - DNA, 397 bp, Homo sapiens
  misc_feature (1)...(397): n = a,t,c or g
cccacgcgtccgctggatgccagaagagggataaaaaatgaaatagctaagttgcgactgggtcatgataagtctgatcaatctggagaaagatgatattctgattaaaattaaaaataacctccgtagccatcaatatcacttatccgggttctatatctctgctttcttgctgatgaaaaatcagcatttttctgattccttttatgtctgtatgcttggatgagggagctttacatatctaaaagtgccagatctttaaaaatgccatttgccagagaatcacttgaacccgggaggcggaggttgcagtgagccgagattgcgccactgcactccagcccagtcgacagtgtgagacttcgtctcaaaaaaaaaagccatttggtgtttctcn

SEQ ID NO: 102767 - DNA, 428 bp, Homo sapiens
  misc_feature (1)...(428): n = a,t,c or g
cggacgcgtgggcggacggggcggcagggcagaggtgctccccacatctcanacgatgggcggccgggcagagacgctcctcgcttcccagatgtgatggcggccgggaagaggcgctcctcacttcctagatgggatggcggccgggcagagacgctcctcactttccagactgggcagccaggcagaggggctcctcacatcccagacgatgggcggccaggcggagacgctcctcacttcccagacggggtggtggccgggcagaggctgcaatctcagcactttgggaggccaaggcaggctgctgggaggtggaggttgtancgagccgagatcacgccactgcactccagcctgggcaccattgagcactgagtgaacgagactccgtctggcatcccggcacctcaggaggccgaggctgg

SEQ ID NO: 102768 - DNA, 414 bp, Homo sapiens
cggacgcgtgggttttgctccaggcttgaaagaaaaggtcaagtgtggtggctcatacctgtaatcccaacatgttggggggcagaggcgagaggaccacttgagaccaggagtttgagaccagcctgggcaacatagcaaggacctgtgcctacaaagaaacaaaataaataaatgaataaaaagactattcaaatgatggatagtttggttttaaaatatgaaaagaacccatagaaactcaaatgaagaaagagaatctcaggaaacaaagtttagcttggcaataattgaaccaaaatcactggggatccattctttctcttttattttgtagatgagttatcttgcatatatttctgcatattgctttacttttctttgctgcagcctcacttccaacatgaaaatctt

SEQ ID NO: 102769 - DNA, 396 bp, Homo sapiens
agatacttgaaattatttcacttctcttaaatttgtccagactagttttgtggcctaacatatataataaaggtatatatttttcatttattaaacaattatatatttgataccttttatatatgccaggcactgtttttggtacctgacctaaagaaagttccatgtgctcttgagaagaatctgtattctgttgctgttggatggaaaattctacatatgtctgttaggtccatttggtctaaagtgtagctcaagttcaatatttgcttattaattttggttattttttatgtaatcttaaagtttacctacaatataaaaactttagcatgaaatatatatatattttatttaagttccaggatacatgtgcagaatgtgcaggtttgttac

SEQ ID NO: 102770 - DNA, 388 bp, Homo sapiens
ttgccctctcacccccgtactcatcagagtgctgcaaactggggagcttcaacagagaattatcctctcccagccctggaggccagaagtctgagatcaaggtgtcagcagggccacgccccctcccaagagtccagggggatccttccccacctcttccagcttctggtggccccaggtgttcctgggcttgtggccaaatcactgcagtctctgcctctggggttacacacccgtctcctcctcttctccatgtctgctgtgtgtgtctaatataaggacacttgtaatgggacttagggtccacccacatagtccaggatgatctccaaatctcaagatccttaattacatctgcacaggcactcttcaaggaaaaggtcacacc

SEQ ID NO: 102771 - DNA, 402 bp, Homo sapiens
  misc_feature (1)...(402): n = a,t,c or g
agaacagaggattcaaacaaatgtctctaatagattattttagcttcatttagtgtgattttgggtctgaagtgtttgccattaacgttctagttgcatgtttgtcttccttgctttcgtgaggagcaggggcagtgggagtgagtaggggagaacaggcgatggctagggaaggatgtancactgatgaaggtgagtgagtttgttcctagtatgtttctttcttttttttttttaaacggagcctgggcgaccaagcgagactccttttaaaaaaaaaaaattagttggggggggggggggccacctgtacccccaattgtttggaaggttgaggcagaataatggcgtgacctcaggaggcaaactttgcaggggccaaaggttgtgccattgcatttg

SEQ ID NO: 102772 - DNA, 415 bp, Homo sapiens
cggagtttcaccatgttggccaggatggtcttgaactcctgacctcaggggacccgcccgcctcggcctccgaaagtgctgggattacaggcgtgagccaccgcgcccagcaagcttgcaggtttttacatttctttgaaggcacatgtttcctttcacaagagttaagctatttgaagttggggagggatactataatttgttgacagggaaatctttcggatcatctataattggcaggtattaatagctctggtaacattagtaatatagtaggccttacaagattgagagattatacaaattcttagctctatgaagtttgtgattagtgattaaaaactcatctagttttcactctgcacgtggttactgagctcaactttcacaagtttatgtttatgtatattttggg

SEQ ID NO: 102773 - DNA, 431 bp, Homo sapiens
  misc_feature (1)...(431): n = a,t,c or g
catacccccattatgtaaaatccattgtcgcatccacctttattatcagtctcttccccacaacaatattcatgtgcctagaccaagaagttattatctcgaactgacccccttcctacctccagaataaagaatctcaacctggaaaaaaaaaaaaaaaaaaaaaaaaaagggggggcggtttaaaagaaaaaagttttatttccgggggcggggggggaaaaattttttttttggggcccccaaattaaatttcgggggcgggggtttaaaaacgggggggggggaaaaaccggggggtacccaaataaaatgggttgggaaaaaaccccttttttccgggggggggaaaanaaaaaagaaggggcgggnnnnannaaaatgggtnnaaaaaaaanattttttnttattaaaaaaaaaaattaataaaa

SEQ ID NO: 102774 - DNA, 397 bp, Homo sapiens
  misc_feature (1)...(397): n = a,t,c or g
aggcaggagctgggccttaagggctgtgggccaagtaggagtttaaattttatcctgaaggcagtagggactatttatggtctgatacctcctttgccctcgcatctaaggtgtattggtaggcagccctcttaggaccaggtttcactcccaacttcaagccgagggggctgaggaaattggggttgtgacagtggtcatgggggatggggtactgccggtctgtgttgtcttagaagtagatgtgtgatggccagaataaaagccaaaatctgttnnnnnnanaanannnaaaaaaatttattaaaaaatttaattaaaaaaaaaaaaaannnnaaaaggggggggcttttaaaaaaaaaacaatctccaccccccgcccagaagattatatttt

SEQ ID NO: 102775 - DNA, 1153 bp, Homo sapiens
  misc_feature (1)...(1153): n = a,t,c or g
tcacgctttttgtgtttcttgtaccaaactcatttgcagtgatttgggaaaagtcctcatctacttgggaagagccttgtttgccatttgatcacgttggggagaacagtccaaactgaatgagacagacttggtttannnnnnnnnnnnnnnnnnnnnnnnnnnnnnnnnnnnnnnnnnnnnnnnnnnnnnnnnnnnnnnnnnnnnnnnnnnnnnnnnnnnnncacatatcccacagttagtagtgcctatgacatccttactctgtattaaatactgtgttaagggctcaagacataggagctgttagctttgcaattgtggctcacacagcatttcagcaaggatcctctctgctaaacttggactcaaagacattgaacaacggacccaaggtcatgcagaaaagtcagtactgagcctggaggatccttgagctcttcatcttaaccttctccttgaagtgccaaaattgctggccagcccctcagagcaggagcagccatccttgtcctgacagtccacccagggcagcagtgagcctccctgtgtgggatgggaccaaggcttctgtctgattcccaaccctatccagccccctctctccagcccttcccacctgtttgcctctacccgcgtcagagttctgacagtctaactctctcccacactactgctctggaccttgacgcagcaaagcagtcacagtcgtcaacccactggaggacacatagcctggagcccaggtgaggcttgcagactcagtagcttggagctatcagatggccatcctgcattactgcaagccctgcccagaggctgagtgaaggccatcaggctgaccgagccacagctctgaaagaatgccgcagctcagtggctcccagctttgccgcacctcacaatcaccctggggagctttgaaaatgtcccagtgcctgggctgcacaccctaccagtgaaatcagaatatctcagggtgggagtcaggcagcagtcgttttggttttgttttttcttttaaagaacccaggtgatgtaatcccagcactttgggaggctgaggcaggcggatcacaaggtcagcagttcgagaccagcctggccaatatggcgaaaccccgtctctactaaaaaataaagaaaaaaaaaa

SEQ ID NO: 102776 - DNA, 402 bp, Homo sapiens
  misc_feature (1)...(402): n = a,t,c or g
cactgacaagggggaagaaaggctgagcaagagcctggaagcttgccattctctccaggtattttgtctagaacatgaaagaaatgtggtcagggccttcatcaagagttgctcaaatatgtctcagcattttacaaaatgcttagcggtggttttttgcatctggcggtgatctgtggaggaagataagcatgttagagtggaggcaatttgagaccaggcctacatgtggctgctgaggaagcagatttaggctgctctttgaaaaaaaattacttctggtttagattaaaagttctcatcctggctaacatggtgaaaccccgtctctactaaaaatacaaaaaaaattanccgggcatggtggtgggcacctgtagtcccagctacttgggaggctgn

SEQ ID NO: 102777 - DNA, 409 bp, Homo sapiens
acttgaccttgtgatccacccgcctcagtttcccaaagtgctgggattacaggcgtgagccaccacgcctggcaaatattttaattatttaatatcaaactaaatatttaattatttaatattttaattcaattaagacaaatttactaggctccctcttcatgaattctgcttttttttttttttttttaaaagccggggtttggttttgccccccaagggggttgggggggggaaaataatattttatgggggcctcacctttttaagctaagggggctctcttacctcaccccccccttatttagttccacgggggccccccaccgcccccttttttttttttttttttttaaaaagggggggggtatttgtcgtcccaggcaaactttttgggttttaacgtccg

SEQ ID NO: 102778 - DNA, 384 bp, Homo sapiens
cttcctatctccctcccttccttccttccttccttccttccttccttacttccttccttccttccttcctcctttcttccttttttctttccatcctctgtgactccttatctgaaataagcagcaagaacttttaactgttttattcctacaatggctcccccattctctgagggtcaggcttcccttcatgcctttccccatcacttccctcaactcagaatgacttctacccatgttgcgtccacaaagaagaggtgcttttccatagaaaacctctggaaaggtgttcacctaactagaagtagtttctccttttcagagccctgtataccttgctcacatgtacatatagtctctagttctactgactatcctagaaat

SEQ ID NO: 102779 - DNA, 406 bp, Homo sapiens
acattttgttacaaaaaaggaataatttttaataagactgtcatcatggccggacgtggtggctcacgcctgtaattttagcattttgggaggccaagatggaaggattgcctgaggacaggagttcgagaccagcctggtcaacataatgagacttcatctcatttaaaaaaaaaaaaaaggaagaaaacttcttatttgatggggaaacaaatgcttttatcctaaaggctttgttttatgtatgttatatggatattgctataatggaatataggaggatgtttttacaagttatccttctcctggaaaaaaatcatacattttttgatttagaagggaaaaatattgaataatacatcagattagcttttattatttacgtttattattattgaaaatatcg

SEQ ID NO: 102780 - DNA, 383 bp, Homo sapiens
gctaattttttattttgtagataatatgctggtcagggctggtcttgaactcctgagctcaagtgatcttcctgccttggcacccaaagtgttgagatttacaggtgtgagccaccacaccaggccagagctatatttccaaaggctgctggccccaggcacactcctcatcaattctcaggctgcagggacaaactttccgatagggctcagtaggatcaagccgacccagagtgggcatgggatgctccaggaggtctggggtaccagtgggctcagatgaagctcttgtgctcatgtatattatgaccttctgtgtttttgtttctgacttgaataatttatcaatggtgttgaataaaagcaagttcaataatgaaaat

SEQ ID NO: 102781 - DNA, 402 bp, Homo sapiens
tttcatcttttagattgtgttaggttaataagacatccaatagtgtttgtgtgtgtgtgtgtgtgtttgtgtgtgtgtgtgtgtaagttgtaagcaaaccctcatgtgttgttttttagaaaactttgatgtttaagtgtttttctttaggtgccacttttcctaatgttaaaagaggtcgtaccaatccataagaaaaatatagctcaataataacgacatgaatagaaagttcacaggaaaggaaactttttttagccatttctttcagtagacatgtgaaaaaatgcctaaatatactcataacggaaaaaataaaatagcaatgagatacactttcatcttttagattgtgagaggttaaaatttttgagcactcatctgagtgttagagagaaatgt

SEQ ID NO: 102782 - DNA, 468 bp, Homo sapiens
  misc_feature (1)...(468): n = a,t,c or g
ggggagggcgccngnnnnncctgaactagngcctcgacgaccggncggaattccggtcgacccacgcgtccgattttgaaccctttccaccaccccacagtaaggcaaagagttcaaaatctgcccaagactgtggggtggtggaaaggaggctttaggagcagccagagcagggttcaaactccagccctgccagggacaactggccaaaaggtcgtgaactaatgactcagtgagttttctcatttataaaataggatgtttcctcccagggtgggggtgaagtgggtgagatgacccatttgaagcacagtggacccttgaacaatgcaaaggttgggcagtcaattcacataaaacttttgatctgagttgggcagatcacctgagattaggagtttgagaccagcgtgaccaacatggagaaaccctgtctctactaaaaatacaaaattagccgggcatggg

SEQ ID NO: 102783 - DNA, 428 bp, Homo sapiens
  misc_feature (1)...(428): n = a,t,c or g
tacgaactctgtancctggannnncnnaannnggncgaccacnctnccatatatagagttttttgtagagatggtgtttcgctattttggcaaggctggtctcaaggtcctgatctcgggtgatctgtgtgcctcggcttccccaggtgttgggattacaggcgtgagccaccacgcccagcctaaataataatcttgaaaaatcatatttttaataccctcagagagctggtgaagcaagaagggccagcagacctaaaattctagagttcggagaaccataaagaagccagctaacaattgcaacagaattctccctggggtatttactaattctacaattgagcaagaggctaagaatccaagctttgcccagacaaggttgcagaaaagccagctgagctgagtcatctcataacactggagga

SEQ ID NO: 102784 - DNA, 469 bp, Homo sapiens
  misc_feature (1)...(469): n = a,t,c or g
ggaggggtgnnctcgcgncccctgntttcgtagtccctagtccatgtggtggaattcgagaggggccgggcggagtggctcacgcctgtaatcccagcactttgggaggccgaggcaggtggatcacgaggtcaggagatggagaccatcctggctaacacggatttctggactgggtgaatcttatctgcatttggcaatcatgattctgagactgtgagtggctaacgtcaaggaagcagcctcctttacagaacaacccttctgtttatttctgtctggcaggatgcaatctctctttactgccgctattcctgtatataccttctagtttcattttttgctgacccttgagaactggctcttaacccctactccatgccaacagaattattaggaaatcatcgagaactgtccttcactttgtgacagcaggagactctaagtacaaaatagcaggtcactctga

SEQ ID NO: 102785 - DNA, 470 bp, Homo sapiens
  misc_feature (1)...(470): n = a,t,c or g
gtataaatttgtcccctnntttgtggtccctattccatgtggtggaattccataaagagagagaggaaggaaggaaagaaaagaaagaaaaagagaagaaggaaggaacaaaaagaaagagaaagaaaagaaaggaaggaaaggagggagggaggaagggagggaaaagaaagaggaaggagggaggggaaaaaaagaaagaaaaataaaagaaaaaaagtagggcttattggcagtccctgtattgttttcacctggcaggccgcgtattgtgaggagagtggaggggtctggccaggaggggagactgaacacacacaagagggattagtccaatagtgaaacatattgaaagtggtgggagtcaggcttttcattgttggaaatgagctgcagggtgaatgataagacaactaatctgaaccttatggtgttggattggaattaaaggcattggtgcaaactcatgg

SEQ ID NO: 102786 - DNA, 311 bp, Homo sapiens
  misc_feature (1)...(311): n = a,t,c or g
gccagggcttgagcctgggaggcgggggttgcagtgagccaggatcgtgccactgtactccagcctgggcaacggagcgagactccatctgaaaaaacaaaacagaaaaaatcttgagaggatactaagtctgacacaaggaaattaagccatgggactctgaccagatattctgtctacttccttctctgctatgggcaacttggaggcagcaactactatcagtttatctgtaatgtgagaatttatattacttatcacatactggggatataaggaaccatggattataggtactacgtttcctcatn

SEQ ID NO: 102787 - DNA, 302 bp, Homo sapiens
cggacgcgtgggaataaaagcattgatgatacttcaaattttgatgacttccctgaatctgatattttacaaccagtgccaaataccacagaaccggactacaaatccaaagactgggtttttctcaattatacctataaaaggtttgaagggttgactcaacgtggctctatccccacctacatgaaagctgggaagttatgaaggaagaagtcgttctacccgaaccagagaacaagaaaatgaagaaaaagaaaaagaggaaaaagagaaacaagataaagagaaaaaaaaaaaaaagg

SEQ ID NO: 102788 - DNA, 431 bp, Homo sapiens
gcccacgcgtacgatgccctgctgctgctgctgctgctgttgctgttgctgctgctgccgctgccttttcatgacaggggttctttttacctgttgccataaccaatttgagaatcattctggatgtcttcccaggcagatatgaattgcagcaggctaaagtgaatcctcttctcagagcaaaaataccacctcccggggctccagcagcaaagccctgcacacatgaaaaactgtgcacacccactcaaccacaattcaggtgggaataagaagttggagctgcttatgaagtcagacaattcttgataatagctttgatttttgtgttcttttgattataaaattcttgtcagaatgttttaaaaaaagaagtgagacacagaattcccaactagatgactgtggcagagggaacacaagatgccctt

SEQ ID NO: 102789 - DNA, 723 bp, Homo sapiens
tatgcagctaaggaacttgtgcatgaccgttaccgtcctactatagaaatggaaagaaggaggggattgtggtggcttgtgcccagactgagcctggaatgatgcagctcagtcaaggagcagcagacctggcactggaacagggttgaaaacccagggttttgtacttggagaggaaagatgccaagctgcttcttaatcaatccaaatttcatttacagctctggaacactttggggctgatttgtctctttaggggacatccccaacatggttaattccaactctcagatcttgtgctttagttagtacatgtgactcaccagatggggtccttagatcctattcctgctcccagtgggaatttgcttttctttgtcattttgggaaaggggcttggtttctgagtgtcttgccttctcatctttttttttcatatcctttttctcaaaaaagccatcagatctgactttcatggaagtgttgctgaggtcagcctggtgcaagttgggatacaaatgaaacttatgcaggatgtgtgagaggaagcagttaattgtttctgaatatctcagggtaggaaccatgtggagccacacattccctgaccacagggaagcacctggctcaatcatgtcacacagcagtggaaagaatacggactcttaagtcacacctaccactgagcagctgtacgactttggagaagttgttaacattttc

SEQ ID NO: 102790 - DNA, 993 bp, Homo sapiens
ccctgaacgccgtgcagaggatggagtggcagctgaaggtgcaggaactggaccccgccgggcacaagtccctgtgcgtgaacgaggtgccctccttctacgtgcccatggtcgacgtcaacgacgactttgtattgttgccggcatgacaccgcgggacggccgcaggacgcatgcgagggccgcacggctgcccaggactgctgctgagccccaggggcggaggagggagcgccctgtccacccgggcggggagagaccccgagagagactgcacttggccacagcgcctccatcccttccagactggtccagacgtcggggaggtgaaacacgtctcttctctaccagctgccgcggcgggggcaaagcccccagagcctcactggccccggcgggatgaggagaccatgccgggcgcgcacacacggcagcttctgtttgaaaacggcgaccttcgggcccttttctccagcaactgcagaggcatttcaggagttggagaacggagtacatttttaaaattttttgttccattctgatcaactaaagaaaattaaggtgtccacctctcacaaacagtgacctgcaggtcggaggggcaggagccccatcccagccgtggttctgttgccgccgagctgcgacggcctcagactgggcttcagacctggtgcggagccaggcggagggacacagagccaggactcccagccgtattgaaatggagtcaaatccgcgtggtttgtatcttctttcctttaatcttgggcattttgtttctctttctgagaacgtaacttgaaacactacagagccaataatcatataaaaagtgtatccgtaaacgctgtacagttttatataccttcacaatgtacttttgctgccttctagataatttattttgcaacacattactgcacagttgtaaataacttatgtactgtaacatcactttcagttatgtgtaaagaaataaataaattaatt

SEQ ID NO: 102791 - DNA, 390 bp, Homo sapiens
cattttgaaaagttattcagagaaatgttactggtaggcaggacttttgtatctgatggaggaaaccgatgtagggtttggataaaataagactagcaggctgggcacagtggctcactcctgtagtctcagcattttgggaggacaaggtgggaggatcacttgataccaagagttcaaggttacagtgggctgtagtcatgccactgtactccagtctgtgccacagaaccagaccctgtctcaaaaaaaaaaaaaaaaaaaaaagggggggccctttttaaggaaccaatttttaggcccgggggtggggaaggaaattttttttttttggggccccaaaaataaattccgggggccgggttttaaaacgggggggggggaaaaacc

SEQ ID NO: 102792 - DNA, 419 bp, Homo sapiens
ctcaggctggtcttgaactcctggcgtcaagcgatcctcctgctttggcctcccaaagtgcttggactacaggcatgagccaccgccaggcccaccccaagggtattttgagttcctactgtatattatgcctcgggtgtactgaaggtatatgtatgcttcttggagttcatgggctacattggcaaggctgctggacctttagtcacatgggggactgaactcagatccatcaggactgctagataggattggaagtgcagacttttctaaccagagggtcagacttttctaacagaggttctgtttcttcataaatgaaggctgtacataatcatgccaaaaatgaggtagttgtttctaattagctacttggtatttcatgtttctggatattgcattataacttttgatggact

SEQ ID NO: 102793 - DNA, 530 bp, Homo sapiens
tttagatggagtcttgctctgtcgccaggctgaggcaggagaattgagcctgggaggtggaggttgcagtgagctgaaagtgcgccactgcactccagcctgggcgaccagagcggagactccatctcaaaaaataaatgaattaattaaaagtatggctgttgagctaacagatgattttataacatgacccaatgctatcttgatccaacttaagcctaagaatcgttgctccccaccccgttcatcaaaaacatcagcagagactttttgggcatgcaaggaaatgttttttatttcataattattttgagatttattttggtgatgtgtttctgactgactgccatattctttgttctcataatttctctactagtattttcactcccaacccccgtgccattcccacttgatttttatgtctgctggcagtgagaggctaaaatggccaacttaagccaaagctgtaaacaacagttgaagtaagtctttcaataaagactagactatatgataaaaaaaaaaaa

SEQ ID NO: 102794 - DNA, 413 bp, Homo sapiens
aaattcgattaatatataacatacatggagaaagatgtacaagtcatacgtgtatagttaaatgaattatctcaaacacactcctgtgtaaccagcagtgggctcgggacactcggcatttccagccccacctcggtccccagcccccaaggggttctcgcgttcccgggtcggctccccaagggtggctgccgtgctgccttccaacatgtagatgggtttgtggagcttttgaactcttacgtgggtagagacacacaacagtatgtatgtttgtgaccagcctggccaacatgaaaccccgtctctgccaaaagaacaaaaacatacgggcatggtggccggtgcctgtggcaccacctacttatgaggctgatgcaggagaatagctttaactcgggaggcggagggtg

SEQ ID NO: 102795 - DNA, 471 bp, Homo sapiens
  misc_feature (1)...(471): n = a,t,c or g
ggagatctagttcgtggcagtggcgaggaacncagctccagggcctcgagtcttggggaatggagcgctgcgccctgcctggctaccccgttgtcttcaccaacctgtgcaagtacagaagctggattgaggaaacgatgcgggacaaatgatggtcttcacggtgggatggacctcgtcagctgcccaggccctcctctctctactcaagacccaggagtccaggccccagcccctcctccctcagacccaggagtccaggcccccagcccctcctccctcagacccgggagtccaggcccccagcccctcctccctcagacccaggagtccaggccccagcccctcctccctcagacccgggagtccaggcccccagcccctcctccctcagacccagagtccaggccccagtccctcctccctcaaacccaggaattcaggcccccagcccctcctctctcagaccag

SEQ ID NO: 102796 - DNA, 432 bp, Homo sapiens
tttgagacctgaggaaccgtcgaggaatccctagaaacatcttggaaagggcccaaggcttttccataacatgtggactgggaggctctcgggaatgaccccagactggtgaacttgggaatatgcaagctgaaggcatctgggatacacgagtgggtgcacacacgcacttgcgcacacacgcacatgcacactcacacgcacacatgcacacactgcagatcccctagagtagtggtcctcaaccttggctgcacatttgaattgcctggggctttaaaaaatgccagagcctaccctcaccccaatgccaccaaaccaatgacatcagaatctgtgggaatcagacccacacgtcaggttttcaaagctcccagggctgagcagcattgttctacagcctgacagctccagctgcctggagagcagatg

SEQ ID NO: 102797 - DNA, 496 bp, Homo sapiens
  misc_feature (1)...(496): n = a,t,c or g
agagcgggnnnnnnnnnaattgatnactgantaactttcgagagnggcggaattcctccggcggctgtccgtggcggtaggagttggctgcgggatgtgctcagccggttagctgctgcggggcggcgacggcggggaacgcgacgaggacggggacgcgctggcggagcgggaggcggcagggaccgagtgggatcccggcgcgagcccgcggcggcgcggacagcggccgaaggagagcgagcagtcagaggaaaatgttaactactgaagaatggtcaaagaggtgcagtactgctagctttgaagatgaaagaagaggagccaaggaatgtgggcagctctagcaactggaaaagatgttgaagactcacagaaccacactggtgagccggttggagatgactacaagaaaatgggaacactttttggtgaactgaacaaaaaccttatcaacatgggcttcacaaggatgtattttggagaacgaatagtg

SEQ ID NO: 102798 - DNA, 528 bp, Homo sapiens
  misc_feature (1)...(528): n = a,t,c or g
agcggggattganccccatagaaccactatcagagaggacgaattcggcgggcgcccctcccccagcctcgctgccgccttgcagtttaatctcagactgctgtgctagcaatcagcgagactccgtgggcgtaggaccgtcggagccaggtgattctgacatgcaaacaagcctctgggccaaagttcctgtgtccaaggattaaaaaaaaaatggagcataagtctgaggctgtgaacgaggctcctcctgccctctggagcttgctggaaggaaacacagcccaagaagtggactaaagagttgttccaacaccactgcctacaagatgaactgcttccaaatgatgatagaggaaaaactttcaggctgataacatcacatcatagcccatgccagtgaaaatctttcaacaggaagagtgaagaagagagaaaaggtcaaaagactgttttacttcacgaatttctgtaggtctagcttaattcaggagtgaactttagagtatctaaatgggaggatgaaan

SEQ ID NO: 102799 - DNA, 476 bp, Homo sapiens
  misc_feature (1)...(476): n = a,t,c or g
atcgagaccactagtttcgtgnggcgctattctaatctcctgannncccatttgctagtatcattggaaaagcacagtattaggatgggagtggcccaattttccaggtgccatctgtcccagcttcccttggctagaaaagagaattccctgaccccttgtgcttccggggtgaggcgatgcctcgccctgcttcggctcatgctcggtgggctgcacccactgtcctgcacccactgtcctacaggccccagtgagatgaacctggtatctcagttggaaatgcagaaatcacccgtcttctgcgtcgctcacgctgggagctgtagactggagctgttcctattcggccatcttccgctttaagttttttataatctttttgggaaggaaaggccatgtgaaaacatggcgagaagacagtcatctgcaacccaaggagagagacttcaccagacactgaccctgctggcacc

SEQ ID NO: 102800 - DNA, 421 bp, Homo sapiens
  misc_feature (1)...(421): n = a,t,c or g
tcgcccacgcgtccgcccacgcgtccgcccacgcgtccgcccacgcgtccgctccatgggaactgactgtcctgcttttcacaacattgagaaacaggcccagagcctgtctcatgtgccaggtgcagtcacattattgttaaaataaagtggcttctgaccaaaaaaaaaaaaaaaaaaaaaaaaaaaaaaaaaaaaaaaaaaaaaaaaaaaaaaaaaaaaaaaaaaaaaaaaaaaaaaaaaaaaaaaaaaaannggggggggggggcttttaaaaaaaatattttttttggcccccgggggggaaaaattttttttttttttgggggcaaaaaaaaaaaaggggggggggggcgtaaaaaaaacggggggggggggaaaaaccccgcccccccaaaataatttgggggggggggttnta

SEQ ID NO: 102801 - DNA, 391 bp, Homo sapiens
  misc_feature (1)...(391): n = a,t,c or g
cggacgcgtcccacgcgtccgctgaagcttcaccggcgcagtcattctcataatcgcccacgggcttacatccccattctcctcctatcaaaaaaaaaaaaaaaaaaaaaaaaaaaaaaaaaaaaaaaaaaaaaaaaaaaaaaaaaaaaaaaaaaaaaaaagggggggggaaagagaaaaaaaaaaaaaaaaaaaaaaaagaaanaggggggggggggtgtaaaaaaaaaaaggaagaaggaaggggggaggagaggatattttaaatattaaaagggatagaatgaaaaantnngggggggagaaaaaaaaaaaagggatgggaaaaaaaaannttgttttnaaaaaaaaaatagggggggggggnnnnttannnnttataaagaaaaaa

SEQ ID NO: 102802 - DNA, 377 bp, Homo sapiens
  misc_feature (1)...(377): n = a,t,c or g
attcattcaacttttgaagcgccggttgtgtgaattgggctacgaagttttgcctcatccatcatattcacatgacctcttgccaaccaactaccatttcttcaagcatcttgacaactttttgcagagaaaattcttccacaaccagcaggatgcagaaagtgcttttcaagagtttgccgaatcccaaagcatggagttttatgctacaggaataaacacacttatttctccttggcaaaaatgtgttgattgtagtgtttcctattttgattaataaagatgtatttaggcctccnaaaaaaaaaaaaaaaaaaaaaaaaaataaaaaaaaaaaaaaaaaaaaacnnaaaaagggcgccccctcaaacaacccc

SEQ ID NO: 102803 - DNA, 400 bp, Homo sapiens
cccacgcgtccgcaacctcaactgtcttcttcaccactgtacccctgcagtgccttgaacaatgcctggcacacagtagactgcatgaatctatgctgagcaaatggtgctaaggaatactaaagattgacaattgccaagtaagtttaatcgagttgcaaattatagcctgccttcctctccagctgaggttggattgacaatgtcaaaggccaaagggtgaaccatgagtcaacacagtagtgagaggagctgcataaaagaaaattaggtcaaccagcctgggcaagatggggaaaccctgtctttactaaaaataaaaaaaaataaaaaaaatagcccggttttggtggagggcacctgtagtcccaactgcttgggagactgaggcaggacaatc

SEQ ID NO: 102804 - DNA, 387 bp, Homo sapiens
  misc_feature (1)...(387): n = a,t,c or g
atttatacaacagaaactttgtaatagattttttcagctttgtgaaatcgaattttttttcatcagggctggttggatttcctttttaccctgtaatccaagcgttaatagtttgttagaagatgggttattgcatgtcactttttttttttgtaaaaaaaaaccttcccttccaaaaaaaaaaaaaaaaaaaaaaaaaaaaaaaaaaaaaaaaaaaaaagnnnnncncaccctttttttaaaccctttttcctttttatgcgggggcccaatttttaatttttttgggggggaataaaatccttttcggggggaaaaacccggggtgccccgaaaaaaacccctttcccacaaaaaccannnttngtgggggnnnggcagtcccgt

SEQ ID NO: 102805 - DNA, 418 bp, Homo sapiens
  misc_feature (1)...(418): n = a,t,c or g
aaagatttcagagtacaggtctggtacaatcacagttcattgcagcctcaacctcctgggtttaagcagtcctcccgcctcagcctcccaaagtactgggattacaggcatgagtatttacattgtattcagctagccccttaaaggtaatgaccatttataaattattccttcagttggctatttcttgacataatcaaacttctgcaattgttatgattaagcttaaaccctgttagcaaaactgaaaactgaaatgttctcaatatcaacatatttaatttggactctttagaatttatacactaataaatttaaatgatgtttaaaaaaaaaaaaaaaaaaaaaaaaaaaaaaannnnnnnaaaaannnnnnnnnaaaaaaaaaaaaaaannnnaaaaaaannnnnnnttttta

SEQ ID NO: 102806 - DNA, 411 bp, Homo sapiens
  misc_feature (1)...(411): n = a,t,c or g
aaatctccttagatatctgaaaagtcatactggatggaatctgtaggaaacggttctattttgagggaagggggattcctttttgttttttaagtgaattcagaaaatgttataaataaatcttttggtttattataaaccttctgcttgctgattttttcccacagcatgtgattctgaaaatgtaactacaatattgacataaaaaataaacagtagtttttcttgttgaaacatanaaaaaaaaaaaaaaaaaaaaaaaaaaaaaaaaaannaaaaaaaaaaaaaannnnnnnnnnnnnnnnnnnnnnnnnnnnnnnnnnnnnnnaaannnnaaaaaaaaaaaaaaaannnnnnnnnnnnaaaaaannnnnnaaaaaaaaaaaaannccgaaaaaaaaaaaaannnna

SEQ ID NO: 102807 - DNA, 413 bp, Homo sapiens
ctctgggtctcttatctttgggttgatatatatatgtatgtgtgtgtgtgtgtgtgtgtgtgtgtgtgtgtgtgtatatccctgctgactatatcatcaacaattttgtcaaaggtgaagtcatctcataaaaaattcacttcaaaaaataatttatggtttacctcaccttaatctgaccacttttttttgaatttcttaccacccaagtaattggaatcttctatgatataatcacaaatcactgcacatttgcgtggtatgagactctgtgtggattctatgctacattaaaataaaaaaaaaaaaaaaagggggggggccgctttaaaggatccaattttacgcccgcgggggggcgaggttttattttttttatggggccccctaaattcatttcgggggccggtgtg

SEQ ID NO: 102808 - DNA, 420 bp, Homo sapiens
  misc_feature (1)...(420): n = a,t,c or g
cccacgcgtncgcgaaaatgttctaaaattagattatggggagggttgcacaactctgtaaatatactaaaaaccaatgaattatacgctttacacaagcgaattttatggtttgtaaattatatctcaataaagctttgagagcaagaacggatcataagtgctcataaaagccttgacccagcactccccttctaggaactgagcagaagaaaatcatcagaagtgggcaccaagactgacataaggtgttcatcccagggtcatctataccagcaaaaaagttaaaaatgggctgggcgcggtggctgtaatcccggcactttgggaggctgaggcaggcggctcacctgaggtcaggagttcgagaccagcctggccaacatggtgaaaccccgtctctctaaaaatacaataata

SEQ ID NO: 102809 - DNA, 415 bp, Homo sapiens
  misc_feature (1)...(415): n = a,t,c or g
tcttaaagagctgggcatggtggtgtgcacatgtagtcctagctactggggaggctgaggcaggaggatcatttgggtccaggagtttgaggctgcagtgagctatgattgtgcctgtgagcagcctctgcactgtagtctggataccatagcaagaccctgtttcaaaaaaaaaaaaaaaaaaaaaaaaaaaaaaaaaaaaaaaaaaaaaaaaaaaaaaaaaaaaaaaaaaaaaaaaaaaaaaaaaaaaaaanggggggggggggcttttaaaaaaaaaatttttttccggggggggggggggaatttttttttttttttggggccccaaaaaaatattgggggggggggtttaaaaaaaagggggggggggaaaaaaccccctcccccacaaatttttttttttgtggggnnn

SEQ ID NO: 102810 - DNA, 406 bp, Homo sapiens
cccatgttttgagcattactgaaccaggcacaaaggagtgtagtaaaaggacatttcttaccctgagcctggaaagggcatggcatttgcagcctggcagagtctgattttcaccccattccatcccatctgacttcatagatggggtcctgctatgttgcctaggatcatcttgaacacatggcctcaagtgatcctcctgcctcggcctcccaaagtgctggaattacaggcatgagttactgtgcccggcctgtttatttacttaaaatgcatgaacagaacaagttacttctccagattggaataaaatagagaatgaattgtttctccagcttggggtaaaagatatccctaatattttaatttttgtaattagctacccctcatacttatgttaacaacg

SEQ ID NO: 102811 - DNA, 373 bp, Homo sapiens
tgaaaactaaggagaactgaggatagatcctggagaaatccaggagtcgatgaaatagactgaggaagaggagtcagagagattggaggacacctggaagggagtggttgcaccaacaccaaagaaggtttagggaaaggagcaggcagttctgttaagcatagccaagttcaaattaaagttagaaaagttgtcttttgattatggttacaatgagtcatggtgatcttactaggaaaatattttcagtgaggtagtggttgcaaaattgttttctttatgaaaaggattgtgcatcttttttggccaggcatggtggctcgtgcctgtaatcccagtactttgggaggctgaggtgggtggatcacgaggt

SEQ ID NO: 102812 - DNA, 396 bp, Homo sapiens
actctgttgcctatgctggagtccagcggcactatcatggctcactgcagtctcaactacctgggctcaagtgatccttccacttcagcttcccaaagtgccaggattacaagcgtgagccactgcacccagccccctttacctttctaaaaaagatgctttacgcgctttattacatgcagctattttggtgaatgattaaggataatttctaaagaggagatcagcttgtctcagctgaaacgggtcgttactaagagcttttcctttggctttataaaggcctctttgtttatgctgcacacttactcaggttaagatggctgtcagtagatgtgaaaactagtctgtgctgcttttcaggtgaagcagggaactttttatagatgatgggcg

SEQ ID NO: 102813 - DNA, 526 bp, Homo sapiens
  misc_feature (1)...(526): n = a,t,c or g
gcgggcgcccctcccccagcctccctgccgccttgcagtttgatctcagactgctgtgctagcaatcagcgagactccgtgggcgtaggaccctccgagccaggtgcgggatatcatctcgtggtgcgccgtttaagccagtcggaaaagcgcagtattcgggtgggagtgacccgattttccagtttgctcctttcctctcatgcctgngcagccagcctgcatgaggttctctacgtttgagactggcttctccacggaacttggtctgtagccacagagcaaactgcagggccattgacagagaatgaagaggagagtgaagagtggaacacatctaatgtgttctctggaggttcatacagtcaccaggaagcccatgtcttggcatgataacctggaggaacctgcagatgccaggtttctgaatctcattcaccatgctgcccagggaccaagggagaagtacccagagacacagactgaanaccaggaagttggatgggacttagagcccttgatcacn

SEQ ID NO: 102814 - DNA, 388 bp, Homo sapiens
ttccaacatgttggccaggctggtcccaaactcctgacctcaggcgatctgcccgcctcagcctcccaaagtgccgggattacagtcagcaaccgggtccggcctaaaacaaagaatttctatacagggaatactaggccaaattaaggcaagagtagtctcttgaaaaaggggattacgtgagtgtgtgattactgaatgctggaataatcccctgccttttctctccactgggctttcaaaacactggcacccaaatctttactctccatgcagaaattttagaagactcttttctggagaatctgacaatccccaggatataggtttaagaggtttcccaacaaattgcccatgtagaataccctgcagtgaatctcaaagtcta

SEQ ID NO: 102815 - DNA, 394 bp, Homo sapiens
attcaggaaatcctcaaatagtgacagagccacagcggcagtgagtgacaggcaggagaactataggatgctggaagtgcatacaaccggggtgttacctagtctgggactggtggtcaagggggcttttttgaggcctggacaacccacagaccgagggtgggctagtgagagccagtgagggacactcttcaagatcccagcacttaaaagattggttgggcatgatgactcaggccgggaaccccagcactttgggaggctgagatgggaggattgcttgagcccaggagtttgagaccagccctggcaacaccgtaagaccccatctcaatgaaaagtaaattagtcagggccgggtatggtggctcatgcctgtaatcccagcattttg

SEQ ID NO: 102816 - DNA, 396 bp, Homo sapiens
gtttcaccactttggccaggctggtctcgaactcctgacctcaagtgatctgcccacctcagcctcccaaagtgctgagattacaggcatgagccaccacacccagcctagaatggttttctttagcaattttagttccactgcacagtgctgatttcagcctgccctcaggataaaagtcataaaaatgggtagcttgccccataccacttttttctcaaagctttaatgcctctcaagatctatctgcctttagatctttcttttttttaaattttgtccagcatttataaatgttctctatgggcaggctgggtctggtaggagcttcatcagccatactagaacagaatttattaatttcttgataatggaataaactgtcagcaacagaga

SEQ ID NO: 102817 - DNA, 391 bp, Homo sapiens
ttctttttattggcacttggcattttcatcttacatgccatctatctatctatctatctatccatccatccgccatccatgcatccttctctttctatttatctatctatctatctatctatctatctatctatctatctatctatctctctatctctctctctgtctatctatctatctatctatctatctatctatctatctatctatctatccgattttctctcctctgctagataatactccccctaaacataagatttctgggccgggtgcagtggctcatgcctgtaataccatcactttggtaggccgaggcgggcggaccacctgagggtaggagatagagaccagcctggccaacatggcgaaaccctttctctactataag

SEQ ID NO: 102818 - DNA, 420 bp, Homo sapiens
accgtggagacctcatcacggagccctttctgccaaagttgctcaccaaggtgaagggttcctagccgctgggattgaagacattggcctggcctcgttctctcttcttgcccttggcccagctgggaccaaactctgatcagtattaggggtagagtgaggtagacactggactccctgtccccaccacccctgccccacccagggccaacatgactaagctctctcatgacccacctcagctcagccccccagcccctgccagctccacactatctcttagctgagtttttgcaaataaaatgtgttgtgtatcttgcaaaaaaaaaaaaaaaaaaaaaaaaaagggggggcccttttaaaagaaacaaatttaagtcgcgggggcggggaaggtaatatttttttttgggggcccaa

SEQ ID NO: 102819 - DNA, 416 bp, Homo sapiens
  misc_feature (1)...(416): n = a,t,c or g
nacactcttctattaatatattagtattttagaactgcgtggaaccaagcatggtggtatgtgcctatagtctcagctacttgggaggctgaagcaggaggattgcttgagcctacaagttcaaggctgaggtgtgctgtgatcgcacctgtgaatagctactgcacttcaacctgggcagtatcatgagacttcatctctaaaaaagaaaaagaaaaacgaactgcatggaaagtgctgaaaccgggaatggatttcacttttatactgaaatttaatcattcacatttgagattatgaacatttatgaagtagcctttcccctgggtctagcatgttgggagattttttttttttttcacttaatcccccacggcatttgaggtacccaattgatccctaaatttccttgaaag

SEQ ID NO: 102820 - DNA, 675 bp, Homo sapiens
  misc_feature (1)...(675): n = a,t,c or g
ctggcctgcagagaggccccacaagcagtacaggtgatcctgatacgatttaaagtttaacaaccatgttgttttttattttttatttgagacggagtttcactcgttgtccaaggtagagtgcaatggcgcaatctcggctcaccacaacctctgcctgtgtgatggagcaagactccatcacaggagggggggaaaaaaaacaaaaaaacaaaaaacactccccagctgatcccagtatgcagtcaatgtcatgcaccgctgctcagatccactctacacactgcttaaggcagagctctgcacataatgccctctgctcagaaacctcagtagctttcagttggtaatcaatttagaacttagagtagaatgcctaattcccatcctcatcctaggccagtgactctcaaaatgttggcagagaccagagatactggtgtcacctgttagatggtggcatctgttagaaatgcatgccaaggctccatccctactcaatcagaaactgggggagaggccccacaagcagtacaggtgatcctgatacgatttaaagtttaacaaccatgttgttttttattttttatttgagacggagtttcactcgttgtccgaggtctgccactgcaccactccagncctgnttgatggagcaagactccatcacaggag

SEQ ID NO: 102821 - DNA, 427 bp, Homo sapiens
  misc_feature (1)...(427): n = a,t,c or g
aattttttgtagggttgggttctccctatgttgtccagactggtctggagctcctgtgttcaggcaatcctcctgcctcggcctccctaaatgctaggattacaggcatgagccaccaggtccagcctaatactggacgactttccttctatcttggaagctctatttatggctcaatacatgcgatgatttaagttagatgacaaagctaaaatctaaagtagattttgtatgttctactgtaaaatttttaataatgttatattttagtgtggagtagaaaatcgtgttggttttgttttttacatgtcaaaatgaagctttttagttttgtaattatataatgccgcagccaagaatgtaggcgncctttttttctcctggctttgatttttttaaaagacatgtctcttgccgtgatgcccgg

SEQ ID NO: 102822 - DNA, 380 bp, Homo sapiens
ggaaccaccgtgcaaaggccccgaggggaaatgtgcccagttctggaaggaggctggtgtggccaaagcatagtgaagcaggcaagtggtgggagataaggctgcagaggagggcagggcacagccgaccaggcagggcattgagggccttggcaaggatgctggctttgtgctcaatgaaatgcagtgtcactgaaggattttagggagggggtgacatgagctgatgtacacttaaaagctcaatgtaggctgggtgcagtggctcgcgcttgtaatcctatcgctttgggaggctgagacgagtggatcactggaggcaggagttcgggactagcctggccaacatggtgaaaccccatctctgctaaaggtacgga

SEQ ID NO: 102823 - DNA, 406 bp, Homo sapiens
caaccagtaactactactaatcaacaccctcatgttcatacacctatcccccattctcctcctatccctcaaccccgacatcattaccgggtttgagggataggaggagaatgggggataggtgtatgaacatgagggtgttgattagtagtagttactggatgaacactcgtgggtggagcatatattgccgtagagactgctgcggggaatccggcatgtgattaggagcagggcgaaacatccatgggagagatgctcgcagctcaatcacaggggtctatagaattattttacatagagtccaaaagaagaaggctttggaaagtgtcccagtcttgatgctaccagaccctaaagaaagagacctcaaaaaagggtcccgtgtctacagagggataacaca

SEQ ID NO: 102824 - DNA, 412 bp, Homo sapiens
  misc_feature (1)...(412): n = a,t,c or g
aattcttttaacagcctgtcctcccggcatcaggagtcattgaacaatcatggattgttgtgtttgggattttttttttttgggctttgtttttggtttttgggggggggggggggggctgcatccccatccccccaaaacttacggggggtttaggggaaagggctaccaccagggccaaggccattgtaacctatatttcatattgggggcctcattgttttcaaaaaaccggggtttcccatgacggaaatattttttttggggaacccaccggggtaaaaattttgtttctcaaaggccctgctacttgggcgttattacggggtccccaaaaactcgtggggcccccctgggaattagtngtaaaaaaaaaaaaaaaaaaaaaaaaaaaaaaaaaggggggggcccc

SEQ ID NO: 102825 - DNA, 404 bp, Homo sapiens
attctggagaacaagcacatctgcatcaagtactgtttcattcttgggagtttcatatgcttgctagatctactttcatcatttggagtaatattttttaaataatagcatgtcccatttttgaaactagaggctagttttcaaaaagtcactgaattctaaattaaagcaaaggaaatagcaatactgactgatgtgtttataatttgcctagaattacctcttggttatttatactttgtatttcacaaaccacactcttaatgtatgttttctgaaataaaaatgggctgggtatggtggctcacacctgaacccccagcactttggttgggaggccaaggcaggaggatggcttgagtccaggagtttgagaccagcctgggcaacatggcaagaccctg

SEQ ID NO: 102826 - DNA, 374 bp, Homo sapiens
aaagttttaaacttttaagaattaagaaaatttaaagcatttagttattgtatatgcctgtaatttgcaggagtgtttgcagcaatggaaagtgggagaaaacctaaatgtcagtcagaaggggaatggataggtcagatgtggtgtctcatgcctgtaatcccagcactttgggaggctgaggtgggaggattgcttgaggccaggggtttgagaccagcctgggcaacatagcaagacccccacctctaaaaaaaaaatgtgggtcggggaggggaatggataaattatggtacatctgaactgtgactgtcatgtagctgttactgacatggaaagatctccaaatagaaacaaaaaaagcatgtcagaac

SEQ ID NO: 102827 - DNA, 389 bp, Homo sapiens
cagcactgctgaaagaagttaacagctctagtcttctctcagaaaagtacaggaaactgttctggagatgggggtggcatctgggactagtcagcctaaggtgtgggacttttatttcattacttgtgcctttattcattcattaaatatacatttacctggcagccactgtgtatactaggcaaattttatgttatgtatagtttatcacaatttaaaaaaagaattaaaaaattatgtgtgtagattaaaaaaaaaaaaaaaaaaaaaaaaaaaaaaaaaaaaaaaaaaaaaaaaataaaatttaaaaaatagggggggggggcccccttaaaaaaaaccccttttccccccgggggggggaaaaatttttttttttttttggggcg

SEQ ID NO: 102828 - DNA, 382 bp, Homo sapiens
tgcagtggcgccatcttggctgactgcagcctccacctccacctgggttcaagcgatcctcccgcctcagccagtgcacaccaccacacccagctaatttttttttttttttggaatttaaaaggccagccgggccaacagggaaaaatcccatttttgtaaaaagaacaaaagttggttgggcaggggggaatgctcttgtactccaaaacatttgggagtctgaggcataaaaattgcttgaactcggggggggaattttgcagggagccgaaataaccccactgggctccagtcggggggaaaaagggaggctccatcccccctcaaaaaaaaaatcatttttttagggacggttaatctttgaaaagcattcattata

SEQ ID NO: 102829 - DNA, 397 bp, Homo sapiens
cagtgagtgactttagaacattataccagtctttccggcagaatttaaaattattttctgtaccttttctcctttaaaaagcattttatcttgaatcatgcaagtctataggtaagattaaaaaaaaaaaaaaaaaaggggggggctcacacctgtaatcccacccctttgggaggccaaagggggcggatcacgaggtcaaaaaatccaaacaatcctggccgggggggggaaggcccctctttactaaaaaaacaaaatttggctgggcatgggggcgggggcctgtattcccgggttcgggcaattctcccgcctcaacctcctggggggggggaggtgggggccctgcccccccccccacttgttttttttttttttaaaaaagaggggggtg

SEQ ID NO: 102830 - DNA, 411 bp, Homo sapiens
  misc_feature (1)...(411): n = a,t,c or g
attttttgtacagacagagtttcatcatgttgcccaggctgctctccaacttgtgagctcaagagatccacccacctcagcctcccaaagtgttgatattacaggcgtgagccactgtgcccagcctgtaattgtttcctgtgatgaccaagtcacattggtccagagaagacaggtcacagtgacctctttgatagctttctgccaagttgcttatccaaagggagcaaaatcacaatggccccagtcattttttttctcctcccctttcctcttctctttataaatcttgattttacttttatttgatgaaaacaatctaatgccagtttccttctatattaatggagaatgagcatgcagacaagtgtctccgtattactagcctcgacggatttctttcagaggctn

SEQ ID NO: 102831 - DNA, 391 bp, Homo sapiens
acacatgaaaaaatgctcatcgtcactggccatcagagaaatgctaatcaaaaccacaatgcgattttttttttttaagctcatcacctgttattaggggattttatggggggcccaatacaattctttttccagggaggcccagggaagtcgaaagattggacacccctgatttaaatagtaagggagccctgggggggctttttccctatgatatttaacttaaacaatagggttaactgccacatggcactagtttattcaggcagggagtactttaaagtcctagggtagtacattaaagaacaggggatgggaaaacagagtcatgcaaaaatgccattgatcgttggttgaaaggaagaattatttcctgaaattttttgttctt

SEQ ID NO: 102832 - DNA, 376 bp, Homo sapiens
agaaatacagttcattgcatatttatcagttactttactaggtatttccatttgttccttttagctaacctgtcctccctatcttatagatgaggactcggggtggaccttgaagtgcagagaggttaaaaacttctccagatcaacctagtaaggggcagggctgggatttgattccagctttatacagttttgcagcaaacaaagactcttttcctgggatatttatagatgagccaggaatactgggttagtgatatgaatatgatttaggccaggcacagtagctcatgcctgtgatcctaacactttgggaggcagaggcaagaggatcatttgagcccaggagctcaagaccaacctgggcgacaaaggg

SEQ ID NO: 102833 - DNA, 420 bp, Homo sapiens
  misc_feature (1)...(420): n = a,t,c or g
atcagcatcggcttgtaatttccttcctcagacttctaaacctacaatcttcccacccatttctaagcattttggaatttctgttcccaaatcttgactgaggaagctaaagggaaggaaattcagatcaccgtagcttaagttagaaaaaagaatagttttttttacttaaatggtaaatcaacagcaaatcacctaataaaaaatatttatgagtaaaaaaaaaaaaaaaaaaaaaaaaaaaaaaataaaaaaaaaaaaaaaaaaaaaananngggggggggccttttaaaaaaaaaaaaattttcccccggggggggggggggtttttttttttttttgggggcccaaaaaaaaaatttcggggcccccttttaaaaactcgggggggggaaaatccttgggttccccctttttttn

SEQ ID NO: 102834 - DNA, 405 bp, Homo sapiens
  misc_feature (1)...(405): n = a,t,c or g
cggacgcgtgggaagtaattcaatgtttatattcactctacctgaagtctgtctttttaaaacctccgattcaaaatataaatttttttcctctaagttttacgtggatgactattttttgtgacacaaaaccaaatagattaacttttttatttggtctcatatttactctgatatatttaaaataattttgtattttaagttttaaattggaatactgtataaaaacatgatttctgtccaggcataggggttcacacctgaaatcccagcactttgaaaggctgagctaggaggattggttgaatccagaagtttgagaccagcttggacgacatagtgagaacccatctctacaaaaaattttaaatttagctgggtgtggtggcaccgtcctatagtccn

SEQ ID NO: 102835 - DNA, 405 bp, Homo sapiens
tgagcatttagcatgtgttctttgatataatattcttctcaaaaaccctatgagataaatattattattctattttagagctaggaaaagtgagatttagggaggtaagttaacttgcccaggtctaagagttgaaaatgtaagaggggcagggcagggtggctcacacctgtaatccctgcactttgggaggccaaggcaggaggatcacttgtgcccaggagtttgagaccagcatgggcaacacaatgagaccccatctgcaataataataatgatgaggaggaagaaaatgtaggtgataaggttctcatattgggccttttgacttctgttacgaaagctgttcattattatacatggctattgtatatgtctaattgagattacagataagcgctctaa

SEQ ID NO: 102836 - DNA, 393 bp, Homo sapiens
  misc_feature (1)...(393): n = a,t,c or g
atgttgtacaggctggcctcaaactcctgagctcatgtgatcaacctgcctctgcctcccaaagtgctgtgattacaggtgtaaaccaccatgcccggcctctgatttttctatatgagatggactatggatcaagaactgtgctcatcatcagaaaatgggatgacaatgaacagagcaacaggactatatttctgaaaaaggatgaacttactggaaacaggagtgcgtgcctgaaatataccccaatggatattaatgtcaactcaggtctgggctggagatatagattcggaatgcaccatcaatgcagatggtaatcctggcatgcgagcaggtgagatcatccagggagaaggcctataatgagagcctacaacatgtactggtccn

SEQ ID NO: 102837 - DNA, 402 bp, Homo sapiens
cggacgcgtgggtttgtctgaaaaggatcttatttctccttcacttatgaagctcagacggagtcttgctctattgccaggttggagtgcagaggcgcgatctcagctcactgcaacctccgcctcctggattcaagcaattctcctgcttcagcctcccgagtagctgagactacagatcacaagaccctggttccagagcggtcctgctttacaccgaaggaaaggaatgtcatacagaaaggccaagaagaatctgaagagatgtccaatcaccttttcacgtggctgcccattcttcattgaacctaagcattaaaatagacagtttcccctgggtctttgggtcttcatttctgaagactccatgtcatgtaaaactttgattaaataaatgtatcg

SEQ ID NO: 102838 - DNA, 402 bp, Homo sapiens
cttcccgagtagctgggactaaaggtgcgccaccgactctggctaatttttgtactttcagtagagacggagtttcaccatcttggccaggctggtctcgaactcctgacctcaggtaacccatctgctgggattacaggcgtgagccactgtgcccggcccacatcccactcttaaggccgatgtcccatggcgtagtggcccggtttcctagtgatagctagttttactattatcccaaagcatgcaggtgactctggagggttacaaacagccccacagagtgcacaggacccctcttgcctcgcctgagagccagaatcattcatcaggtttcgtaagtgattgatttctcttcttcagccttcctgcagaaggaacttttaactttgtcgctcattg

SEQ ID NO: 102839 - DNA, 403 bp, Homo sapiens
accatgtcggccagactgttctcagactcttgacctcaggtgatccacccacctcagcttctgaaagtgctgggattacaggcgtgagccaccgccccaggcaaatttttataagcttatttaccatctgtattaggtaactttgataaagtaactgtataaatcttttgagaatttttacttggtttatttttcttactgttgagtttgagaactttatatatttgggataaaaaccttttatcagatatgcatcttgaaatgtttttcttgtcttgtctttttttttttttttgaagggggagtttctttttgtgccccaggttggagaagggaaaccccattttattgaattttccccctccaaggtaaaaggatttctcctgctcaaccccccaaagag

SEQ ID NO: 102840 - DNA, 418 bp, Homo sapiens
  misc_feature (1)...(418): n = a,t,c or g
cccacgcgtccgcagggccctgaccagctgacctcttgagaaaggtgtcccttgattgagaatcccccttacgtttgggggtgtggtaaagggagaagaggaagacagggctgttatgcacctgagactgtgtggcgatgacagcccaatgagtgaatctctgcatttcattaaacttcctaggactgtccttgtggatgaagatgccaggcctgaaaaaaaaaaaaaaaaaaaaaaaaaaaaaaaaaaaaaaaaaaaaaaaannnnnngggggggggcggtaaaaaaaataaaactttccttggggggggggaagaatttttttttttttttttaaaacaataaaaaaaattccgggggggaaactttgaaaaaaagaggagaaaaacctctcttccaccccctttttttccccttc

SEQ ID NO: 102841 - DNA, 400 bp, Homo sapiens
gaaaaacgggcctctggaccagcacacgccctgtgcggagagacactgtctggcatctcgggatcatgtgaggggctcccactgcccagtcacacgtctaaagcatcctagttcttacctattgtagcacggccggaaagtgagccgccttagctgctgattgtactagagcaggcaatacaagagtcggcccatcctcaaaaccactgataggatgtgagtttcactaaccccgttttacagatgaggaaattgaggcaaggccagggctcacacctgtaatcccagcactttgggagtccaaggttggagggttgcttgagaccaggagttcatgaccagcctgggcgacatagtgagacccccatcttcccaaataaaaataaataaatcagccgga

SEQ ID NO: 102842 - DNA, 412 bp, Homo sapiens
  misc_feature (1)...(412): n = a,t,c or g
ttcccaaagtgctnaaatacaggtgtgatcctccacgcctagcctggtttttattttttgtgcagagcttgttgcccaggctgggcttgaactcctgggctcaagctttcctccctccttggcctcccagagtgctgggattacaggcatgagccactgtacctggccttgaagttgcatttagaaatgatgactctgtcattctggaaggtgatgagataaaaatgcccccaaagaatagatatgattataattcggaaaggatgcttgagatctctggttttagaaagcctggctccctgaggttaactgacttgcgcctgtcccccagggaggagatagaacagtctgaatgagaaccacttgttctttcaatcacaactcactgccctcgacatcccaatttggctgc

SEQ ID NO: 102843 - DNA, 976 bp, Homo sapiens
aaagctgacttcatgagaccgaggatctcgttcgttgatcgatgctacatattcagcatgttagataatgaggttggagcgaatccacgcggaggtcaccagtgtggaagtgctttaagctgtgacgagggagttcctgcagctcagggagccagtagtgagaaaccccacgaatgcacgaagtgtgggaaagccttgtgctgcagatcggacctcagggtacatcacggggtccacgcgggggagaagtcctctgcgtgcagtgaacgggggagtggtttcagggagaagctttgccctgacaaacagggaactcacacaaaggagaaacccgctagagacagcagaagtggtaaaacgatcttccggaagacacgcctgtgtgtcccgggcacagttcacgccggagcgaagccttacaagtgttgggagtgtgagaaaacctcccacaagtcgcgcctcatcgagcaccttcgctcccacacgggggagaagccctgcggctgcagggaatgcggaaaggcctttttccagaagtcacacctcatcctgcgtcagaggactcacacgggggagaagccctgcggctgcgcggagtgcgggaaagctgctcccaggactcctgcctcctgacccacaggcggactcgcggggaagaaaccgtacgagtgctcggactgcgggaagacctcccggaaggcgaacctcatccgccaccacgggatccacacgagggagaagctgcatgggtgaagagaccgtgggatcgtcacaaagtcacatcacgaggtcgccgaacctctaggagggacatcgccagggaaacagccctcaaccaaaactacgacgccaccctaggcagaggtcccatatcggggtgaaattcggccactttggtggcttaaggaaggcatggtcagctgggcgctgtggctcacgcctgtaatcccagcgctttgggacgccgaggcgagtg

SEQ ID NO: 102844 - DNA, 392 bp, Homo sapiens
  misc_feature (1)...(392): n = a,t,c or g
cactgtgtgtcaatcggtgggtccgggagattcccagctggcttgcttcctggtaggcaggtatgaatgtatgctgctgttctctcttttaaggttgggggtggctgtttgtttagctctgaagtatagacggctcagtgctagcagacacattttcaaagggtcatattcttggcttgttggtaatcacaatcgggcaggagaagtggggtggatgcacaccagctgaccacactggcaccaccagcagtttcagtttcatcttgattgtaaagaggaaatatctaatcttaaaactcattaggggcctggcgcagtggctcatacctgtattcccagcactttgggaggccgaggcangcagatcacccgaggtcaggattttgagaccg

SEQ ID NO: 102845 - DNA, 415 bp, Homo sapiens
ccaggtaatttttttgtagatatgggggtctcgccgtgttgcccaggctggtctcaaactcctggactcaagcaatcctctcgccttggcctctcaaagtgctgggattacaggcatgtacccatcatttttttttaatggttaattcaaatgctgccaggataaagactattgaaatgttgttgtctgaagatgttaatttctttgtagcactgctatgccctagttttactatttcccattttcacttgtagtttttcaatcagcattattgaggtataatttacatgtagtacagttcacctattttaagtgtacaagtctgtgacaactgtgtattcagtagtataaccaccaccaaagttcaccattgcttcaaaaagttccctcatgcccccttgcaggtagtgttctt

SEQ ID NO: 102846 - DNA, 488 bp, Homo sapiens
  misc_feature (1)...(488): n = a,t,c or g
ggggaaggcnccccgctccggccaactgatannccaattagcccgcagnaccaccggnnntgaantcccgggnccacccacgcgttcgcggacgcgtgggccgcacttggccagagatatctttttaatgaagtgttaaagttaggggccagtttccaggtaaatctccagatgcccatcttaatttgtgccaggctatactataaacctcatttccctggggaaagagggttgagagttccaacatgagatactttatttttttattttattttatttttaaaanagagacagggtcttattatgttgcccaggctcgtctcagactcctgggctcaagcaaccctcctgccttggcctttcagagtgctagaattacagcagtgagccaccgcgcccagctgacatgtattaaatacacatttctcttcactcacattccatagngagggtccttgacagcaaatttgcagatctggagaatgagg

SEQ ID NO: 102847 - DNA, 408 bp, Homo sapiens
atcctatcatctggaggctcattcatttctctaacagcagtaatattaataattttcatgattggagaagccttcgcttcgaagcgaaaagtcctaatagtagaagaaccctccataaacctggagtggctatatggatgccccccaccctaccacacattcgaagaaccccaaccaaagaaatctgaaatatatagtaaatgcttttttttttccgtttttgttcattttggaggctggggctaaacctccaagggtcatgatttaaaaaaaaaaaaaatttaggcccttcttatttatttctaggaggggggggggataacattttggcttttttatgggactctttttgaaaatgggcaagaagaaattcctcaaaagtaaaatttttacccttcggaggaaaag

SEQ ID NO: 102848 - DNA, 410 bp, Homo sapiens
  misc_feature (1)...(410): n = a,t,c or g
cttctttattcatatctacattgggcgggtaggcatctgatatgtggtgacacatgataaaataaagaacttcttcccatcgcaaaaaaaagaaagaaaaaaaaaaaaaaggacgaaaaaaaaaaaaaaaaagaaagaaaaaaaaaaaaaaaaagggggggggcctgaaaaaaaaaaaaaaaattttcccggggggggggggagaaaaatttttttttagggggggaaaaaaaaaaaaaggggggggggggaaaaaaaaaacggggggggggaaaacccggggggaaaaaaaaaaaaaggggggggagaaaaacccctttttgggggggggggaaaaaaaaaaaaagggggggnnnnnnnnttctaaaacacacaaggaaagagaaactgggggagaaaaaaaaaaaaag

SEQ ID NO: 102849 - DNA, 415 bp, Homo sapiens
  misc_feature (1)...(415): n = a,t,c or g
ttggctgcggactgtggctccaccactgtctagttgtttggctttgggcaagctagctaacttctctccacattagtttctatccagccttataagggtgttatgaatattaagtgagatgatataaacaaagagctcagcacagtgcctgggatatagtagatgtgcaacaaatgtcagctattgttattttgaaatcatctactcatagcaatctagtatctagctgcaagactgtgcagacactgcacagggacagagtagcagcagacaattgaaagttgactgtgaggccgggcacagtggctcaggccggtaatcccagcactttgggagcctgaggctgacggatcacctgaggtcgggagtttgatactagcctgaccaacatggagaaaccccatctctactgaan

SEQ ID NO: 102850 - DNA, 408 bp, Homo sapiens
gtttttttcccccacttaaaaacaatgggaatgtccatatctcacctctctcatgctttgttggttttccccaagttgttctgagacttgtttataatgggaagttattccctgaggagacctctggcttcttgggggctcaccctacccagggcacttacctgtaagttaaaaagaaccttgtaaagggatgacagctatgacatcattcaagataaacagaagaggctggccaaggtggctcatacctgtggtcccattactttgggaggctgaggcaggagaattgcttaaatccagcagctcaagaccagcctgggcaacatagaccccatctctaccaacaaaaaaaaaaacccgggggggagggcaccccctgtggccccatttcctaaaatggttggggca

SEQ ID NO: 102851 - DNA, 402 bp, Homo sapiens
  misc_feature (1)...(402): n = a,t,c or g
agagcttcatatacccctgcccaccctgtccaccccactcccagtctcccctgttagtaacatcttatgttagtgtggtacatttgttgcaattgatgaatcaatattaatagattagactgaaccgantaaaaaaaaaaaaaaaaaaaaaaaaaaaaagggggggggcccttttaaaaaaaaaaaatttaattgccgggggggggaaaaaaaaaattttttttttggggccccaaaaataaaataagggggcggggtttaaaaaaggggggaagggaaaaaaccggggggaaacaaaataaaatggtttggaaaaaaacccctttttgggagggggggaaaaaaaaaaaaaaccggggnnnnttnntttattnttttnntatttattaaatttggtgaaat

SEQ ID NO: 102852 - DNA, 393 bp, Homo sapiens
gggtcgacccacgcgtccggggactcttatccccgttttatagagttgaagagaggggagaaaacttgcttcaagttggacagttaataagtagtagagcagggatttaaataaggcagtccatcctgagttcatgcttgctttttttttttttttttttggggaagggggtttgtttttcccctttggggttgcccggggaaacccggtttttttttaaaaccccaaaaaaaattcccttggcctggggggaggccccttgggtcccccttcctcgggggggtgggggcggaaaatgggcttaaccccgggggggggatttgtgtggggcccaaaatccccccccttgcttccgccggggggaaaaaagggaattttgtttaaaaaaaaaag

SEQ ID NO: 102853 - DNA, 458 bp, Homo sapiens
  misc_feature (1)...(458): n = a,t,c or g
nttgaaaccgctcgttggaggtcctctggcggaactcccgggncgagccacgcgtccgccacgcgtccgggcccctcttcctcctctttcctctacccacccctacccccctgcctttctttgtgtctccgccctgctttaggaagccaaggagcggccagtcctctcggggctctgtctgccaccctggatttggggactgtgattccctatactgaaaactcacttcaggctgggcacagtggctcacacctataatcccaccactttgggagggccaggtgggaggaacacttgttcaaaattcaagaccagccttggcacatggggggaccccttttttcacaaatccgagaactgcctgggctggggggtccccaactgtggaccgtgtttttggggcgctcaacaaaaaagtgcttggtctgaggggttgtgattccatccctcaagtgccc

SEQ ID NO: 102854 - DNA, 403 bp, Homo sapiens
  misc_feature (1)...(403): n = a,t,c or g
ttaagtaactgaccaaaagtctaacagcaggtagagtggtggagtcaggaaacaaaatcaagaaatcttactcctgctggatgcagtggcttgagcttgtagttccagctgctggagaggctgaggcaggaggatcgcttgagcccaggagttggaggctgtagtgtgccatgatcacacctgtgaatagccactaccataatccagcctgggttacacagcaagacctcatttaaaaaaaaaaaaaaaaaaaaaaaaagggccctgttcccaaaccttgttttttttttacccaaaaaaaaaaaaggggtggggcccgccaataaggcttattcccttaaaccccaccttttgggggggggggggggggcaaaccacggggggggggttcccaccccccccn

SEQ ID NO: 102855 - DNA, 423 bp, Homo sapiens
agacgggctttcaccatattggtcaagctggtctcaaactcctgaccttaggtgatccacctctctcagcttcccacagtgctgggattacaggcgtgagccaccacgcctggcctatgcatcttgaatcttattggagagttcaatatccatttatgccccaagtcctctacttttgggcaccctctggtgcccagcactgtgctcagatcatagaaaatgctatccccaccctgctgtcaaggccgcaggaagagccagcatcagaagcctaggagacgatgtaggcgggagagacaagacgcccccatctccttcacttcaagaacacgtgtcccccagcatggagggcaggatagagctgctcatttcatgttagcccttttatgtttctggtttgaaatttgatgttcaaaagctcac

SEQ ID NO: 102856 - DNA, 406 bp, Homo sapiens
  misc_feature (1)...(406): n = a,t,c or g
ggggccnnnaatgatacgtcagcctaganagaccanganacgacaagncacgggcctgagccctgcatggatgcggacgcacagcgcgaaggcattaacgtttctgcccgatacccgaaaaactgggagagcaccgtcgatccggcgcgtgagttcaccatgattcantcagcaccgctgatgctgctggctgaccctgatgagttcgcgtccgtacaactggcgtaatcatggcccttcttggccattgtttctctgtggaggagtccatgacgaaagatgaactgattgcccgcctccgctcgctgggtgaacaactgaaccgtgatgtcagcctgacggggacgaaagaaaaactggcgctccgcgcggcagagctgaaagaggagcttgatgacacgaggcc

SEQ ID NO: 102857 - DNA, 417 bp, Homo sapiens
  misc_feature (1)...(417): n = a,t,c or g
tgcccatcttggcctctcaaagtgctgggattgcaagcatgagttgtcgcgcctggcctctcctgctttgaagaagaagatcagattgttattgtgcctgctgtttttcaagtgcctttaactcaacatagtcaatatgccagaggtgcatattttagcccaggctggtcttgatctcctggcctcaagcaatccttccaccttggcctatcaaagttgtgggattacaggcatgagccgcggtgcatggcccccaggcatctttcattcctacagacttggctcatggtctttgtggtcccttttggcaattagagctccagccatcacatctgtgttccaggcatcaagtcagagggtgggacagagaacatgagggtaccccactggccaaaacgtagtcacatggccatgccn

SEQ ID NO: 102858 - DNA, 415 bp, Homo sapiens
  misc_feature (1)...(415): n = a,t,c or g
atttttaattattgcgttttttcttctggagttgctcttgcatatggaatctataagcaggatcttcctgccttaaaagagaaaccaagaggtgtagtttttgtagacatgggccactctgcttatcaagtttctgcatgcgcatttaatagaggacaactgaaagtaagtatatattttttttccagaagactgttagtagtatggtaattaggaaattttgagagacaatgattttttctcatctacaatatgggagaaacaatgcctaccttacagggttattcagaggaggcttttttcttttctttcttttttttctctttttttttcagaaataaaggggcgctcttgttgcccacgctgaagcgcantggctcgttcttggttcaccggaacctcccccttccaggtt

SEQ ID NO: 102859 - DNA, 416 bp, Homo sapiens
atttttaatttttgcgttttttcttctgtagttgctcttgcatatggaatctataagcaggatcttggtgccttagaagagaaaccaagaaatgtagtttttgtagacatgggccactctgcttatcaagtttctgtatgtgcatttaatagaggaaaactgaaagtaagtatatattttttttccagaagactgttagtagtatggtaattaggaaattttgagagacaatgattttttctcatctacaatatgggagaaacaatgcataccttacagggttattcagaggatttttttttcttttctttcttttttttctctttctttttttgagataaagttgcgctcttgttgcccaggctgaagtgcaatggcgcgatcttggctcaccggagcctccaccttccaggttt

SEQ ID NO: 102860 - DNA, 380 bp, Homo sapiens
  misc_feature (1)...(380): n = a,t,c or g
gagtcttgctctgttggcaggctggagtgcagtggcgcggtctcngctcactgcaacctctgcctctgcctcccggattcaagcggttctcctgcctcatcctcccgtctctgctgaaaatacagaaattggccgggcgcggtggagggcgcctgtgatcccatttacttgggaggctgaggcggtataacccctagaacccaaaaagcacaggttgtggggagctgaaatcccgcccccgcccctatagtgtgtgagagaggggtactttatttttcatctataaaacaaaagagtttggccacccctaccccttattaaaaaaaaaaaaaatcccccgagggaggttgttccccaaaaaaaccctctcaccatttgaa

SEQ ID NO: 102861 - DNA, 379 bp, Homo sapiens
tgttcctgggcttgtggaagcatcactgtatctccgctttcccctgcatgtggccttctccctgcacgcatgtcctctgtccaaatgtccccttctgataagaccccaaatcctactggataaggatgcactctaatgacctcagcttcactaattccatctgcagtggctccatcttctttctttctttctttctttctttctttctttctttctttctttctctctctttctttctttcttttttttttggacgaaaccttgttgggccaccaaggctggagggcagccaacccctccctccggaattaaaggaatccccctgcctcaccccccaaagatattgaataacaggcatgtgcacccatccccggttagt

SEQ ID NO: 102862 - DNA, 403 bp, Homo sapiens
cttttccattgtgtcggtgtcttttttacatgccctggtccaccggaaggccggcgcctcctctgtcagtgccgtgtacgtgtttggtcaaacgttcctaatggtgcctgaacctacactgacgccactcaggtagtagacggataggaaacaagtcatactgttggaagtgggtgtgctagcctagcatctgcctcgtacctgtggaaactcaatagccattgcaagagtatttttgttcctcagtaagagaaataaagaaattcgcagccctttgttttaaaaaaaaaaaaaaaattaaaaaaaaaaaaaaaaaaaaaaaaaaaaaaattggggttgggtattataaaaaaaaaatgaaagagggggggcgcgtggagatacttgttttttttggttgggg

SEQ ID NO: 102863 - DNA, 394 bp, Homo sapiens
  misc_feature (1)...(394): n = a,t,c or g
tttagtagagaccgggtttcgccacattgcccaagctggtctccaactcctgagctcaagctatccgcccacctccgcctcccagagtgttgggattacgggcgtgagccaccagcctggcccctcttttcactttgaaaggaaaagtttaggtttaaagacattacttttgtgtgtcaaagtaggagtgcgtgcttgctttgctttgttttttcaaggctcatcttaaggattttggcttacgtattttctaagtaggcgttacattcccgcggttcaaaactcaaaaggtatgcggttaaaaattttggtttggttttttttcctctctctcatctcagnttccctccttagagaatcagctcccagcgtcttgcaaaggaagggcataaan

SEQ ID NO: 102864 - DNA, 406 bp, Homo sapiens
tgcgtatattttagtagaatagattttcctggaattgaggttgttgaaatatagggtatgcgggcttaaaatcttttcttaaaggcttcaacttatccttcagaacatttatatcatttacctccaactccaatagtatatataagaaaaaggctggatgccatggctcacgcctgtaatcccggcactttgggagaccgaggcgggtggattgctcgaactcctgacctcaagtgttctgcctaccgaggcctctcaaagtgctgggattacaggcatgagccaccacgtccggtccttgtatagtgtctgaatgaagctagtttactgctttagtaagaatgttatagagtgaatcaaagttcagatgtcttgaatattgggttgattttacattttttcatat

SEQ ID NO: 102865 - DNA, 397 bp, Homo sapiens
aacggtgttttaccatgttggtcaggctgctctcgaacttctgacctcaggtgggccacctgccttggcctccgaaagtgctgggattacaggcgtgagccaccatgcccagccattccttctaatacttgtaatttcattattcccttgcaaccaatcttttcacatatctccttacagattttcttttacacaactgaatcatggtttcaatacagttttgtatcctttggtaattaacatttcagaaatatttttctgaaatatttagtgtgattccatttttcttaaaaaaaaaaaatgtacatcaggtgcggggcttacaacctgatgcccccccctttgggaggctgaggttactaatcacctcatcccactaaatttaaaccaatctgcg

SEQ ID NO: 102866 - DNA, 404 bp, Homo sapiens
ctttagcaagaacttgcggaatagcaggaaagaacatagaaacaggcaataggaaatcattagaaaagaaaattgccagaactcatgtatccagattcaaacagctcaccacatgcctagcccagaggataaaaaaagactcaccccaaggctcatctgattgaatttctgagtgccaagagacagcctcagaaacttccagagggaaaaaacagagtacctagaaaggatcaggaaccaagagtgccatccttcttctcagcagctgtagagcaggaccttcacaattccgatggaaaatgatttcctgccgggcacagtggctcaaacgtctaatcccagcactttggggggccaaggcaggaggatcgtttgagtccaggagttcaagaccagcctgggca

SEQ ID NO: 102867 - DNA, 399 bp, Homo sapiens
  misc_feature (1)...(399): n = a,t,c or g
cgaactcctgacctcaagcgatccccctgcctcagcatcccaaagtgctaggattacaggcatgagccaccacaccaggcttaagtacattgtatatagagtttccaggaagtctaaaaacataccactcaagcatattggtatacaaagttttccctaataagctctaaattggctaaacaactcctcttttctagaaatcagttgcaataaatcttataatttaggtctagtgtggaaaggaatctgtacaagcaattcagccaaatcaggaatagtgattaccctcagaaactggctaggtctaaataatactgatattaaagaatgtangcatgagggcactggaagagaaacgccctagacgatggtattaactggtagcgaagcccctgcatg

SEQ ID NO: 102868 - DNA, 388 bp, Homo sapiens
ggcctcactgtgtttcccaggctggtctggaactcctgggctcaaatgatcctccctccttggcctcccaaaatgctgggattacaggtatgagccactgcgcccagcctttgtagtttagaaagccttcccaacaggtgatctaaatactggctttagaaaaatgtgtcctaggttcttatttctaagaaccctgcatgagatagcaagcagagggtggtatcttgttatgcaaaagaacctgctgcatcttaaagcatgactttgacttgagctatttgaggaacaggagtaaccacgtgtttatctcagtcataaaatcacctgtatcttgttcctggggaacctttcattttcaacagaaatgcattgtaacagatctagtaag

SEQ ID NO: 102869 - DNA, 396 bp, Homo sapiens
ttttaggtgagacggggtttcaccatgttggccgggctggtcttgaactcctgaacaaggtgatgcatccgccttgggctcccagggtgctgggattacaggcgtgagtcactgcctgcccagccactttcagcttttaatgtttaacttaaccacacagtccctgctgaaatagctgtcatggaggcctgcgttagtgagacctgacctgccacacaatgaaggagatgttcttcattgagataatgtgggtgtccgaatcaggatccacaggtcagtgtcccagctccaccattgactagctgtgtgattccgatggagcctttgggaggtgatgaggtctaagggaggtagtgaaaaattttggaaatagtagtgagaattgcacaacattgt

SEQ ID NO: 102870 - DNA, 406 bp, Homo sapiens
taagaactcaataaatttacttaaattatctcattcggtcacctcaggccaaccctgtgaggaggaaggctatgcctcagtgaaatccaatgataaataccaattggcaaaactcagagtgaacctaagtgtttatactatactgcctatacatttaaaaattacagtttttggctgggtgcggtggcttacacctgtaatcccagcactttggccaaggcaggctgacctcatgatctacctgcctcggcctcccaaagtgttgggattacaggcgtgagccactgcgcctggcctggtaatttaatttttaaaagtaacttataatgggcctatattaataagttggtctcataaatatttgagacaatgttatcaaatatggtaactgaagctattgaaggag

SEQ ID NO: 102871 - DNA, 383 bp, Homo sapiens
tcgacaggcctgagccctgctgggatgcggacgcacagcgcgaaggtattaacgcctctgcccgttacccgaaaaactgggtgaccaccggcgatccggcgcgtgagttcaccatgattcacacagcaccgctgatgctgctggctgaccctgatgagatcgagtccgtacaactggcgcaatcatggcccttcggcgccattgcttctctggggaggagtccatgtcgaaagaggaactgagtgcccgcctccgctcgctgtgtgaacaactgaaccgcgatgtcagactgacggggacgaaagaagaactggcgctccgtgtggcagagctgaaagaggagctttgtgacacgaagcctaagcttggtacatgccgtcgat

SEQ ID NO: 102872 - DNA, 413 bp, Homo sapiens
acaggtatgagccaccacagccagcctgtattctcacatttttgagtgactacatatgctacattgttgtaacttttgggatgcatcagtaaacaggaattcctcactcatggattccatattcttacagggagaaaacaaaggataagcaataacagaaaggcaatgagcacaactaagtacatcatgtagtgatcagcactaggaagaagaagtaggtcagggtaagagagattgagaatatgtcaggtaatttgcagtttcaaatatgttggtcaaaataaggctctttgagacagtgacatttctgtaaagacttgaaagaagtaaggaggatcacttgaacccagaagttcaagaccagcctgggcaatatggtgagaccttgtctctacaaaaaaaatttaaaaatt

SEQ ID NO: 102873 - DNA, 400 bp, Homo sapiens
  misc_feature (1)...(400): n = a,t,c or g
ggtctcactatgttgcccaggctggncttaaactcctgtactcaggcgatcctcccgcttcggccttccaaagtgctgagattgcaggtgtgagccactgtacctggcccactggatctttaaacaagattcagaacaatattcactccaggatatcatccatgtaaaataaaatacaacttaacacattacatgtcttctgtagctacacataaatgtatataaatgcatttaaataaatctggaggtaaacatatcacctgatagctagtgatttcctgggggtgcttaagaaggaattagcttttgtccacagtttttaaaaatttcatttgaagaatatatttgggcaggtacagagggtctttcctgctcactaacactttgggaggctgaaagc

SEQ ID NO: 102874 - DNA, 360 bp, Homo sapiens
tcgtttggcctttgccctgcagggatgcggacgcacagagcgaaggtattaacgcctctgcccggtacccgaaaaactgggtgaccaccggcgatccggcgcgtgagttcaccatgattcactcagcaccgctgatgctgctggctgaccctgatgagttcgagtccgtacaactggcgcaatcatggcccttgggggccattgtttctctgtggaggagtccatgtcgaaagatgaactgattgcccgcctccgctcgctgggtgaacaactgaaccgtgatgtcagcctgacggggacgaaagaagaactggcgctccgtgtggcagagctgtaagatgagcctgatgacacgaggcc

SEQ ID NO: 102875 - DNA, 392 bp, Homo sapiens
cggacgcgtgggcaaatcagtttcctcttctataaaatgaaagtactaattatgattgaggattagaaatatttgtaaaaggtttagcattgagcttggcacataaagtcttaaatgatattcttactaatgcttttattattatgaataattgattttattttattcctcccatcatggcttaagtgcaagcccccatgaccacctctgaaagttacacacagttcaatatattctatataaagaaattaaaaaatcatggctcacgtctgtaatcccagcactttgggaaaccacggctggtggattgctcgagtccaggagtttgagaacagtccgggcaacatggtgaaaacctctctctccaaaaaaaaaaaaaaaaaaaaaagcgg

SEQ ID NO: 102876 - DNA, 419 bp, Homo sapiens
  misc_feature (1)...(419): n = a,t,c or g
aggttttatgaaatatggaaatgaatctgaaattaaaacatcttatttgggaggaaagaattgcaatttggggcatccatgtagaccgggtggtgttcagtatgtctcaagaacaaagagaaggttagaggttttatgaaaaagaacttactgttcttggagaaagttccttggtactaactagttaggtcttggggagctggcacgtttggattggcaagtgaaggcagtgggtacaacacagcgggttgtttcagtagtcatttgcttgttaactaaagaaaaattcatggctgtgtctagtggctcatgcatgtagtcccattactttgggaggctgaggtgagaggactgcttgagcccaggagttcaaaaccagcctgggcaacatggcaagaccatctctacaaaaatttaan

SEQ ID NO: 102877 - DNA, 397 bp, Homo sapiens
gttacttattttctggaaggataaatgtgggcctgtttccagtaaaagtgacttccaagaagcatgagccttcttgaatactgacccacttccggatgtgatcctggctgcggcagtttccagaatatcatcagggtaactttcccgctgtgcggtctatgttggaacttacatcgtctttaaaaggcacaaatagctgaataacataatgtaacctgatgttctgacaaccccacttatactcaggctaaatttaaaggtcaccattgcagggaaatagtggcatgagaataaaagtgccttaaacatgagaaaaaaaaaaaaaaaaaaaaaaaaaaataaaaaaaacaaaataaaaaaaaaaaaataaaaaaacaaataaaagaatgataataaa

SEQ ID NO: 102878 - DNA, 392 bp, Homo sapiens
cccacgcgtccgcaccagcctagaccacagtgacctttaaaaaatttgcactagccaggtgcagtggtgcatacctgtattcccagctactcaggaggctgaggcaggaggcttgcttgaggctaggaatttgatgctgtagtgtactgtgatcgcacttgtgaatagccactacaggccaacctgagcaacatagcaagaccccatctctaacatataaaataagtgaataaataaataatttaattcccctacattgttctggagtttaaaggaaaagtaaaaattcataaaacatatcacactgtactacctgcttgaaccttaccagtagttcttattaaacatagaaaaaaaaaaaaaaaaaaggggcggccgttttaaaggatcca

SEQ ID NO: 102879 - DNA, 402 bp, Homo sapiens
ataaagtgaatttcttggccagcagcatcgttgtgtgagatactatatattagttacattaacatagcatatgggccgggtgcagtggctcgtgcctataatctcagcactttgggaggcataagcgggcggatcacttgaggtcaggagtttgagaccagcctgggtaatatagaaaaaccctgtctctactaggaatacaaaacataaaatataaaataaaaataacctttcagtccagatttctgtgaaaagaggcatattcaaaagatgctactgaagagagtttagcaaaaggcccgttcacaaagcgtcagcatggttaataaaactaaccagggatggcaaagcatcctggggatagcactgacaggattaccattcttatgtctgaaagggaag

SEQ ID NO: 102880 - DNA, 425 bp, Homo sapiens
  misc_feature (1)...(425): n = a,t,c or g
ataacataggaaggggcttgggttaagtttatttctgcccaaagggaaaaaatgatttagatgtagcttcagatcagcaaggccagcaggtgcttgncattcactcattctctctctctctctctctctctctctctctctcacacacacacacacacacacacacacacacacactatttatatgaataagtgaacaaacttgcggggggcatattaatcacaggggacccacataatctatgtatttaactttatttagcgatctgagtctaaaaaagaaatattctaagtgacacagaggatatccctcctcccattttatgagtatatgccttagaacaaacgagaaacaaactctccgattctttcaattaggccgtgtgtgcgcatctctcagtgcgcacgcacagcttattaatgagg

SEQ ID NO: 102881 - DNA, 418 bp, Homo sapiens
aaatttatttttagtagagacaaggtctcaccatgttgcccgggctagtttcaaactcctgagctcaagcaatcctcccacctcagcctcccaaagttctgagattacaggtgcaagccaccgcacctggcctgaagtattcttctaggtagataagtacaaatgcagtcccttacacagaataagagctcaaaggaatgttgttatgaggcatttgtgttcttcattaatttagaagaccttgaagaccctagaaacaaagaggtatatgataatgtatgaaattaactcattcaatactgcagtcttggaagaggtcatttatcatatggggcatgtgcttcctgaaaggcagctttaaacattaatgattaatttaaaagttgatgaactatttataaaaaaaaaaaaaaaaaag

SEQ ID NO: 102882 - DNA, 393 bp, Homo sapiens
  misc_feature (1)...(393): n = a,t,c or g
cccacgcgtccgtatggcaccatttggggcagcagcctagatggtgctgtacttggtgggggacaacccctcacccccaagcattttgctgcttctctctggctgacgtgtttcccttttaatgtgtactataaaagaaaagaagaggaagaaagagagaggaagggagatgagggagagtgggaaggagaaaaaatattaatttttgttcttatgtgaaattaacgtcttacttgctttgtgtctcctcttacccaagttggctgcagtgatgccctctctgacacagtaggtcagagaccctgaggntcgttcgnnctttctttctttctttctttctttctttctttctttctctctctctctttctctctttctctctctctctctccc

SEQ ID NO: 102883 - DNA, 429 bp, Homo sapiens
aagacaaggaagggcattccaggcagagagggctgcgcggtcaagatcctggagagtctctccacagccaaaccacttcaatgtcttcctactggagagaggaagagaaaccaggagaatggcagctaataagtgttgaatgattgactgaactcctggttcctataagattctgtctcttgctgagtattagccaggatgcctcttatccgaacaacaacaataacaacaacaacagcaacaacaaaaaccttaagagatctattcaccaagtaatgcttgcttctttcagtctaaccaggcttcttggctaggagacagatgtaatgctggaggtacaacggccatcttgggtccacaaggcaacaacattatcctattccgaatgaaaacacagaaggattctgggtttctgaagacatcctggag

SEQ ID NO: 102884 - DNA, 411 bp, Homo sapiens
gatgaaaaaccaaataatgataggatcacaatttccgcttgtttgttagcactctttatagaacagaggtcaagtgctacttgctgcttcatgctcatatagccccttgccagtgtgtggatatacatggaagtgactgggaattaaccacatgtacacacaggtgacaagcaagcctgacatgaccttttacctcacgtaaaataaatgctccctccagccttaaactcctgtcagtccgtgtaaatatgggcaaaatgccagggtcacacgtgccaccccgcccagctaatatgtatatatattttgtattttagtagagacggggtttcaccttgttgcccaggctggtcttgaactcctgagctcaggcaatccactcgcctcagcctcccaaagtactgggattac

SEQ ID NO: 102885 - DNA, 413 bp, Homo sapiens
gttttgttgtggtcttctgattcacctcatatattgcaaaactgagtattcaggccagagcacagtggctattcacagatgcaatcatagcgtgctgcaacctcaaactcttggcttcaagcagttttcccacctcagcctcctgagtagctgggactacaggtactcgccactgtgcccagcctatatttttaatttatccattggttattaaatgaagagtcatatctagacctaaaattctgggactttagagcacaatatggtgactagatgagttttgaggtttcttcttttggggagaaagagagtgtgttttcatttgtggaagaaaaatttgcattgtcatgggggggcactttttaaagtatatgaaaatgtgtgtgtgtgtgtgtgtgtgtgtgtagagaaaa

SEQ ID NO: 102886 - DNA, 411 bp, Homo sapiens
  misc_feature (1)...(411): n = a,t,c or g
cttgagaggccccaggccacctgcttcccttcacttcatagaacacgaagacccctccacaggcctcgcacgtcaaggaaactgccctttaggggactcgggaactggatggcatcatcctatttgctctcaaaacatctcataaaaagtaagagaatcacaaaatagagattcgccaggcacatgaactctccgcacgaggaacggttgccgccccctgcaggaatcagagtccgccctcctccacagcctgcagcgtcccttggccctcccaggatggctccaagcatttcccggaggttccaaatgaccccatattacaaacacaatgattttgctggccaggcacagtggctcatgcctgtagtcccagcactttgggaggccgaggcgggtggatcatctgaggtn

SEQ ID NO: 102887 - DNA, 374 bp, Homo sapiens
aaagatgctatcacaaaattcaggctcttacctcctgtatcctccttatgtaaggttcccccagacaagaacaacatcctgggctggtccaggtctgcccaaccagagtgtgtgtgtgtgtgtgtgtgtgtgtgagtgtgtgtgtgtgtgtgtgtgagagagagagagagagagagaggggggtgggggatgtagttactccccctctccacatcatggaaagtgggtggcaaaccctctgagaacatgtttgtggggctcttggccatctgattctctttcaagaaaaaagaggaggctagaccccacgcagtgggtttttctcaagatggctctggagggaagggaaagaagaatattctctcttttctacg

SEQ ID NO: 102888 - DNA, 413 bp, Homo sapiens
atggggtcccactctcttgcccaggctagaatgcaatggtgcaatcagagctcactgcagcctcaacctcctgggctcaagcaaccctcccccttcagccttcccagtagctgggactataggcacgtgccaccgtgcctggccagtattttttttttaaaactaaattatcattaatgttaaaatttaactgaccatgtatataactgtgtaattgctgctttctcacagaactgtctaggattcattcaacagaccacagaaatgagggctggcttttaacagactaatgatagaagaaataaactggtttatacaagaatatcaaaatactgtcatgtggtttagtgtagctcaagttatgaattagtgccaactcttgctgcagtgtctctcacacaattttatcttgg

SEQ ID NO: 102889 - DNA, 411 bp, Homo sapiens
tgaaaatgctttggaattagattgagttggtgggtgcacaacaccatgaatgtactaaatgccactgaactgtcaacttaaaatgattggtttgatgatatgtgaatttcacctcaagtttaaaaaacaaaaaatagaaatattacaactcgacaacaaaaagacaacccaattagaaaatggacaatggacttgaacagaggtttctacaaagaagatacacaaatggccaatatgcacataaaaagatgcttaacatcatcaggcattaggaaaactaaattgaaaccacaatgaggccagttgcggtgactcacgcctgtaatcccagcactttgggaggctgaggtgggtggatcacctgaggtcaggagttcgagaccagactgaccaacatggtgaaaccccatt

SEQ ID NO: 102890 - DNA, 384 bp, Homo sapiens
ctggtaatatttcatatggctagtatttttttttctaaagaggctcagttatcttttgtggggcatctctccagactaccaccttttcttcaaaactgggaaacagaatcagaactgtttggaattgccagcagactgttgagcaaatatactttttacagtgaccccgttacagggttaggggagtttgatagaaaataaaaggtttcaggccaggcgcaacggctcatgccggtaatcccagcgccctgggacaccaaggtggaaggactgctatagcctgggagttcacaattagcatgagcaacatgggaagaccctgcctctacagaaaatacaaaaattagccaggcatgttggtgcacgcttgtggtccccggtaca

SEQ ID NO: 102891 - DNA, 389 bp, Homo sapiens
  misc_feature (1)...(389): n = a,t,c or g
agggaaggaaggagagcaaaatcttcggaaggtgtttcttgtacctgagggatcctgccctgaatctccatagtctccactgtgaactgaggaggggaggggtgtgctggggaataaatcttgtatgagaacaatcttannaaaaaaaaaaaaaaaaaaaaaaaaaaaaaaaaaaaaaaaaaaaaaaanaaggggggggcccctttaaaaaaaaaaaaatttaacgcccggggggggggggaattttttttttttttggggccccaaaaaaaaaattccggggcccgtttaaaaaaagggggggggggaaaaaacccggggaaacccaaaataaaggggtggggaaaaacctctttttttggcggggggaaaaaaaacaaaaaaccgan

SEQ ID NO: 102892 - DNA, 414 bp, Homo sapiens
  misc_feature (1)...(414): n = a,t,c or g
ttctgagaagttttatttgtgtttaaagttttcaattgtggggacatttgaaagttcctagaatcaggcctaagcgggcagatcacctgaggtcgggagttcaagaccagcctgaccagcatggaaaaaccctgtctctattaaaaaaatacaaaattagcagggcatggngnnnnnnntcctttttctcgnttcccctnctcccgttttctccttttttcctttttcaagagccttcctgcctgctaggctaaaatacatgcgcggtgccctgttgtctggactacttaaccctcccttgaagtgattctgggttgctttgtatcgccggaatctcttgcttttgatcctatgaaacacaaaattattcgtgcgcctggttcgcctttcagcatggttccaactcttgcttgt

SEQ ID NO: 102893 - DNA, 375 bp, Homo sapiens
  misc_feature (1)...(375): n = a,t,c or g
atgagaagccggtgtgagcagggcgggaatcaaacccaccaaggatctcttgagggtgtttctgagcaacactgaacagctttatggagtgtctgatttgggtgagaacatgcacacttatgtgagtgtgacattgtgtgttcttcctgggacctgtaaaaccatcaccccgtcacacttctggtgaattaaatgcttccaaagtgctgagagtggtggggggcagagagtgcacggccaggcaacaatgtaaggactcagggatgtcgggtgcggtggctcacgcctgtaatcccatcgctttgggaggctaaagcaggaggattgcttgaggccaggagtctgaggctgtantgaaccatgatcacaccactg

SEQ ID NO: 102894 - DNA, 433 bp, Homo sapiens
cgcgtccgttttgtatttttattagagaaggggtttcaccatttgaccaggctggtctcaaactcctgacctcaagtgattcaccctggccaggctggtcttgaactcctgacctcaggtgatttgcctgcttcagcctccaaaagtgctgggattacaggcgtgagccaccatgcccaaccaatttcacatttttaaaaatgcatttctaacagtaccaagtgaatgctgcattcaaggatttccccaaatttatgtgagtacttttataatctgccgttttgggtttctgtaaaccaacaaaaactcagaaagggagcacctttcaaaatattgaaagctgcaaccaatagttttatatatctgttgatgtctgccgtgttagtctgtaaacaggtgtatttttatatgcatggtgtatttttgtgaaaac

SEQ ID NO: 102895 - DNA, 414 bp, Homo sapiens
  misc_feature (1)...(414): n = a,t,c or g
attttttcttagctgaatttcaatgggagttttatcttgtctaagtgagtagtcatggagatagtcttactttcaccatgtgtttaatcattaatatatatttttccttttgtgagagaaacacttttgtgatctgaaggtaattttcagaaagatgtataattctggattttttttcaatttttctttaaaagcattgttttaaaaacacataacataaaatttaccatcttaaatttattgaagtgtacatcacagggtcaggcatggttgtggctgtcgtctgtaatcccaggactttgggaggccaagacaggaggattcctgtagcccaaaggtttgagaccagcctgggcaacatatggagacccatttctgtannnnnnnnnnnnnnnnncnnnnntnnngnnnncn

SEQ ID NO: 102896 - DNA, 411 bp, Homo sapiens
atcgtccgcgctttatttccttattcaatattttattgtaatcagaaaatgtgacctgtgtaattcctgcctttaagaattttaaactggcctgtaatcctagcactttcggaggctgaggtgggaggattgcgtgaggccaggagtttgaagctgcagtgagccaagattgcaccactgcactccatcctaggtgacatggtcagtttttataacttttcatagaaacttataagttgaaaacaacccatattctttttacattataaaattcagtatctacctgttctaatataaattatttcaaatgctttgtccttatttattatgctagttgatattagtgcactaaaattttcccatccattttctttccatttaggttatgttatattctccaaggcatctgtt

SEQ ID NO: 102897 - DNA, 337 bp, Homo sapiens
aaaaaatcagagttgcgttcttttctgtttaaataaatattcaacttctgcctgcagcctcagactcctctgagtgatcttcccactgcagacaaagggatgtatttagaaaaaaaggagtttccttagaacctttcaggataagatccaaactccttagaaaggcagactcggtatatatatatacacatacatatatatgtatgtatgtatatatatgtgtatatatctgtatatgtatgtatatgtatgtgtatatatatgtatatgtgtgtatatatatatgtatgtgtgtatatatacatatatatatatgtatattttttttttgaaatgg

SEQ ID NO: 102898 - DNA, 501 bp, Homo sapiens
  misc_feature (1)...(501): n = a,t,c or g
gggattccgcttcccnnaccctgataaactgagagcgtncncagncccgaattnccgggcaagcaggtttttcttgctgtattaagttcccaatgtccttaaaggagcttttaaaaaatgagcattgtgtgtgtgtgagactataaaaatagtgtatgagaatggtgtaaaatttggaaataagagtgaatataaagaggacagttctcattattagctttaaatttttcttctaaattttttaatatccagatattaatgtaaatgaaatccttatgtacaattaattttgtatcctcccattttcccttaaaacaacaggccgggcatggtgcctcatgcctataatcccagcactttgggaagctgaggtgggtggatcacttgaggctggtcttgaactcctgacttcaagtgatccgcctgcctcggcctcccgaagtgttgggattacaggcatgagccaccactcctggctcttatctaaatttaaaaaaaaaa

SEQ ID NO: 102899 - DNA, 416 bp, Homo sapiens
  misc_feature (1)...(416): n = a,t,c or g
aaaaaaattagttacataaattgtgtaataaatgtcaggattacttattacaacactgtacaaaaaaatgcagtattttggtcttggtaagtcttgttttgttcttagtatttgtgtatgttaactcaaggggagacctgttgtctctgtatcgagttgtctgctcctctggtggtgggcactttcacactcataggaggctttcattcatctgtctggataataatggctaatttcacaccctgacttttaaggcattgtttctcaaagtgtattccacagattgttactagatggtgatgtttaaagggttccttgcactttgggaggctgaggctggaggattgcttggggccaggagttanaaaccagcttgggcaggcaacatatggagatcccatttttacaaaaaaaaa

SEQ ID NO: 102900 - DNA, 441 bp, Homo sapiens
cggacgcgtgggtcgcgagcggcccccttttttttttaccgttttttttttttgggggtccccccccggtttctttttttcccaaaaaaatttttttttaaataaaatttttgaaaaacgggcccccttttttttgtcaaggggggtttgaacttcgggggcaaaaccattcttcgggcttggccctcaaagggggggggaataacgggggagccccccccccccccccctttttaaaacccccaaccccaaaaaaaaacccccttttttttttaaaaaaggccggggaaaaaaaagggggggggggggcaaaattttttgccctttataattaaaaaagggattgttggaaaggggggccccccctttaaattaaaaaaaaatggggggggtttaaaagggggggaaaggaatccccctcccagaggggggggggaaacg

SEQ ID NO: 102901 - DNA, 427 bp, Homo sapiens
gcatgagaatcgcttgagcctgggaggcggaggttgcagtgagctgagattgtgccactgtactccagcctgggcaacagagcgagacttcatctaaaaaaaaattcctaataagctttgaattgatcatgatttgtgattctgcgtttctgtgcaggctttaatatgattgccttctaattgctgtagttatttcttttatcagacttctcaggtagaagctttgccaaatttgaaggaaaatttttggcaacctcagtatttcttcccatctctatgaactaccaagaacatttgttggaggttggggatttcatcatacatattcattattggagcaagagtaacctttacatactcttctttattggtggccataaaaatacgttttttggaaagtggtatatggcagtatgtataacgtacc

SEQ ID NO: 102902 - DNA, 420 bp, Homo sapiens
  misc_feature (1)...(420): n = a,t,c or g
gaattcagagacctggatgtgagcccagctctgtcctcaactcactttgaaaccttgggttggtcacttctgtgctctaagcctcagtttcctcatctgtaaaacaatagcttggaacaaatggtctcaaaaggtcctttcaagctcagtctatgaacccaacacccctacacataccacatacaacaaagaataaataaataatataaaaataaaaaaaaaaaaaaaaaaaaaaaaaaaaaaaaaaaaaaagaaaaaaaaaaaaaaaaaaaaaaaaaaaaaaaaaaaaaaaaaaaaaaaaaaaaaaaaaaaaaaaaannnggggggggggccccataaaaaaaaaaaaatttatcccgggcggggggggggaaaaattttttttttttgggcccctcaaaaaaattgccaggcggccgc

SEQ ID NO: 102903 - DNA, 388 bp, Homo sapiens
gcaagaacacttaatgagatctaccttctcaacaaaattttaaaagaacaatataatattgttaactgtaggcacaatgctgtaacaaacatctcgaaaaccttttcgcccttgcataacaaaccttgtaccattgaacatcaagctcccattccctggcaaccaccactctactctgtttctgactttgactatgttagatgcctcctataagtggaatcatacagtatttgccccatgactggtttatttcacttagcatagtgtcctccagctttatctgtatcacagcatatggcaggactttcttctttttaaaggctgcgtaatactccagtgcacatatatgccatatttgctttatcctatggacacatttaggttgctc

SEQ ID NO: 102904 - DNA, 408 bp, Homo sapiens
ctcaactcctgggctcaagcgatcctctcacatcagcctcccaaagtactgggattacaggcgtgggccaccgggcccagcctccattctcttttgatgtctatgggagtaaatttggtgcttcctaaattgagaactttggaaaaaaattaagacagcactttaaacagaaacgtgtgcaggggcagggagatgccagtttaccccccccgttaagtctgaggtgacagagggctgtaggaagactgcttgttggcttttcagcctcaatatgtggaatatttggcaattcagtgaggcacctgctcttgttttctatcttcagaggacagcacaggtttgaatctctttgctcagtgtaagacagcatcatctcagcaaactggcaggtatcttaagtaaatattg

SEQ ID NO: 102905 - DNA, 392 bp, Homo sapiens
  misc_feature (1)...(392): n = a,t,c or g
gaactatggttgtgaatgcagaaggtattcccatccgaacaaccttggacaactcaacaactgttcaatatgcatgccttcttcatcacctgacaatgaaagccaaaagcacagttcgtgatattgatcctcaaaacgacctgacttttcttaggatcagatcaaagaaacatgaaatcatggtagctccagataaggaatatcttctgatcgtcattcagaatccatgtgaatagacctgcgatggccaaggctgtttaagcgacactgggttggaaacacttggctctctcatgagtattaaaattctatttcaatctaaaaaaaaacaaaaaaaaaaaaaaaaaaaanggggggggggcccttttaaagaacccaacctcccccccccc

SEQ ID NO: 102906 - DNA, 252 bp, Homo sapiens
aaacatacaaaatatgtgttaatcgactgtttatgttactactaaggcttctggtcagcagaagggtattagtagttaagtttttggagagtcaaaagatgtacgtaaggccaggcttggtggctcctgcctgtaatcccaccactttgagaggctgaggttggcgaattgcttgagctcaggagttgaaaaccatcctgggcaaggtggtgaaacttcgtgtctacaaaaaatagaaaaaaaaaaaaaagg

SEQ ID NO: 102907 - DNA, 426 bp, Homo sapiens
  misc_feature (1)...(426): n = a,t,c or g
aaaccattgcaggtgccagagtcccatatgttcctcctgacagtttgatgtgtccattctgggcctctcagtgcttagcaagtagataatgtaagggatgtggcagcaaatggaaatgactacaaacactctcctatcaatcacttcaggctacttttatgagttagccagatgcttgtgtatcctcagaccaaactgattcatgtacaaataataaaatgtttactcttttgtnnaaaaaaaaaaaaaaaaaaaaaaaaaaaaaaaaaaaaaaaaaaaaaaaaaaaaaaaaaaaagggggggccgataaaaaaaaaaaaaaaacaaccccnccaaaaaaaaaaaggggggggggggtttaaaaaaaaaaaaaaaattccccccggggggggagaaaaaatttttttttttaaaaaacccccacaa

SEQ ID NO: 102908 - DNA, 394 bp, Homo sapiens
  misc_feature (1)...(394): n = a,t,c or g
nnttaagacgtccgccagacctgagtacgaattgacgacaggcctgagccctgcatggatgcggacgcacagcgcgaaggcattaactcttctgcccgttacccgaaaaactgggtgaccaccggcgatcctgcgcgtgagtgcggcatgattcactcagcaccgctgatgctgctggctgaccctgatgagttcgtgtccgtacaactggcgtaatcatggcccttcggggccattgcttctctgtggaggagtccatgacgaaagatgaactgattgcccgccttcgctcgctgggtgaacaactgaaccgtgatgtcagcctgacggggactaaagaagaactggcgcttcttgcggcagagctgaaagaggagctcgatgacacgaggac

SEQ ID NO: 102909 - DNA, 410 bp, Homo sapiens
  misc_feature (1)...(410): n = a,t,c or g
aggctggggncncccnaacagaaacctaagacttaccagagnacgaangggccacaggccggagcccggcagggatgccgacgcacagcgcgaaggcattattgcctctgcccgttacccgaaaaactgggtgaccaccggcgatccggcgcgtgagtgcaccaggattcagtcagcaccgctgatgctgctggctgaccctgatgagttcgtgtccgtacaactggcgtaatcatggcccttcggggccattgtttctctgtggaggagtccatgacgaaagatgaactgattgcccgcctccgctcgctgggtgaacaactgaaccgtgatgtcagcctgacggggacgaaagaagaactggcgctccgtgtggctgagctgaaagaggagcttgatgacacgaggcc

SEQ ID NO: 102910 - DNA, 401 bp, Homo sapiens
ctttttaatagaaaccctaaccggaaagtgttggaacttctaagttggttggcagcattctctgttgacagtgtgtgctgcatgcagcctgttaaagcaccagttggcgggccctgtgctctgctttccctttcattgtgagggactgctttgggtaattctatacaggtgtaattaaggggccaggggaagagttctttttgtttctgctgtgaattagaggactatgtccttgctcttttggcgcaaagccaacctttcagatttctaaattttgaaggctgagcatggtggcgtgtgcctgtagtcgcagctaggcgggaggctgaaatgggaggattgcttgggcccaggagttcaaggctgcagtgacctatgatcatgtttgtgaatagccactg

SEQ ID NO: 102911 - DNA, 408 bp, Homo sapiens
ctgggcttcctgtctttttctcattgatttgcaagagtagtttataaattttagatattaatcccttttggatgttgatgttccaggtatattcacctaatatatttgccttctgtcaagtttatctgtgacagtactcaaacttcagcaggcatcagaatctcctggaaggcttgctaaaacacagatgtctgagccccactcctagagattctccataagagaaggggaagggcctgaaaatttgctttttcttttttggggggacagagtcttgctctgtcacccaggctggtgtgcagtgacgcaatctcagctcactgcaacctctgtaatcccagctacttggaaggctgaggcgggagaatcgcttggacccgggaggtggaagttgcagtgagccgagaa

SEQ ID NO: 102912 - DNA, 403 bp, Homo sapiens
ctcactgttctgtgcactttttctacctacataaacacacgcattccacctcagaaaaaaaaaaaaaaaaaaaaaaaaaaaaaaaaaaaaaaaaaaaaaaaaaaaaggggggggggccccttttaaaaaaaaatttttttccccccgggggggggaaaattatttttttttttaggggccccaaaaaaatatctccggggccggttttaaaaaagggggggaaaaaaaaaaccggggggacacaaaaaaaaacttgtttgaaaaaacccctttttttggggggggaaaaaaaaaacaaacccccccattttcaactccggggcttgtgatataaacccctttttacactaaaaacatacatctcaaaacacaccactctcctccaaaaagacaaaacaaaaac

SEQ ID NO: 102913 - DNA, 406 bp, Homo sapiens
acttttttggtttcattggtgatttctgtgcaacatttaaggaagaaatatataagttctctacagtgtctttcagaaaagagatgcaaagggaaccttcttaacacttttgtaaaaggctgttttttctctaatcttaaaagcatatgaagaccttgcaaagaagaaaaaccacacactaatatccctcataaatatagatgcaaaaatccaaatagaatgcaacattgtatgaaaataattggatgctgtgaccactcaaggctggtcagagtttggaaatcaattaatgtggccgggtacgttggcttatgcttgtaatcctagcactttgggatgctgacgcagatggattacctgatgtcaggagtttgagaccagcctggccggcgtggtaaaaccctgg

SEQ ID NO: 102914 - DNA, 413 bp, Homo sapiens
cttcattctgtactactcccattcttttatttctgtgtgtgtgtgtgtgtgtgtgtgtgtgtgtgtgtctgtgtaaaacataaatatgtgagggcagggggagctcctgggagatgaaggaaggagttgctggataccacaccatgtatctcttttgtagcacgccagattggagaggaacccacacccaaagtatctggtaatctaagagtaaagaaagggtggcagactgggttccagggttctggtgagaagtgatttaagatcccagatgcctggaaattgctttgttctcaggggctgatctcttaagttacctgttctgcgttagcctctattactcgtctaagagaggagactagttctgcatgatttctcagcaggcccaaattctcattacacccagctttttt

SEQ ID NO: 102915 - DNA, 181 bp, Homo sapiens
attcatctttcttttcaccgtaggtggcctgactggcattgtattagcaaactcatcactagacatcgtactacacgacacgtactacgttgtagcccacttccactatgtcctatcaataggagctgtatttgccatcataggaggcttcattcactgataaaaaaaaaaaaaaaggggg

SEQ ID NO: 102916 - DNA, 432 bp, Homo sapiens
gcagaggttgcagtgagccaagattgcgacactgcactccagcctgggtgacagaaggagactgtgtctcaaaaaaaaaaaaaaaggttcctgaggcttgggggtaaaacctttaaaaatttttttttttttgagcgggccccagggactttcgcctgtaatcccaccatttgggggggccccgggggttaaatcccgtggggtcgggagtttgaaaccaccggggccaacatggggaacccccttttttactaaaattccaaaaaaaaaaaaaaaaaaaatttgaaaaaccccccgggggggggcgggggcctggcccccttgaatcccccttttttgggggggtggaaaaaaaaaattctttgccccccagggggcaaggtttcaaggaacaaaaattggcccttttgccctccgcctgggcaaaaaagg

SEQ ID NO: 102917 - DNA, 376 bp, Homo sapiens
tatgcttacagtcatagctacacaggaagctgagaggggaagatcacttgagcctgggagggtgaggctgcactgagccatgatcacgccactacactccaacctgggtgacaggaaaaaaaaaaaaaaaaaaggggggggccctttaaaggtttttggggggggaccgaaataaacccggaaagggaagaaaagatttttcctgctaatggggggagggattatgacgctggcggaaatgttggaaaaaaaccctcatttttggggagcataaaaatgggccaccccccctacaaaaggttaccgtttgagggaaaaaaaaaactcttaaagggccgaggggaaaaaataacgcctgtattcccggctttttaaa

SEQ ID NO: 102918 - DNA, 384 bp, Homo sapiens
ggagggcgttctgggagggaacagcctgagcaaaggcatggaggacagaactgtaaaggcagtaaggaaacctctgtggctggatgaagagtatggcttgggataaccctgtggttagaaaggcagactggggccagatcagggagagccttgaatgtcaacccaacacaggcatgctcaaaaaaaaaaaaaaaaaaaaaaaaaaaaaaaaaaaaaaaaaaaaaaaaaaaaaaaaaaggggggggccttttttaaaaatttcttgggggggccccattttgggggggagaggaaagatttttttttttttttttggggggggcattttaaccccccggggggttttttggaaaagcccctttttttgggggggaaaaaaaaaag

SEQ ID NO: 102919 - DNA, 392 bp, Homo sapiens
  misc_feature (1)...(392): n = a,t,c or g
atcattggacaagtagcatccgtactatacttcacaacaatcctaatcctaataccaactatctccctaattgaaaacaaaatactcaaatgggcctaanaaaaaaaaaaaaaaaaaaaaaaaaaaaaaaaaaaaaaaaaaaaaaaggggggggtttaaaaaaaaaatctgggggggccaaaaaaaaaaggggaaaaaaaaaaaaaatttttttttttaaaggggggcaaaaaaaaaaccggggggggttttttgaaaaaaaaactttttttggggggggaaaaaaaagggaaaaaaccccaaacaaaaataaaatccttaaaggaaaaaaaaaatttttaaggggaaaaaggagaaaaaaaaaccctttttgggggttctaaaaaaagaga

SEQ ID NO: 102920 - DNA, 412 bp, Homo sapiens
  misc_feature (1)...(412): n = a,t,c or g
ccacattttaaattttacctggtaagaaaannaatctgttttatgttatggcagaaattttacacactcacattcaactctgttgtcaagtaaaattgcatttatctgtcccccgccccagcctcccccttctctgttgttggaatttctctcttgttttacatgaacactcccagccggcctcagaaaaaaaaaaaaaaaaaaaaaaaaaaaacaaaaaaaaaaaaaaaaaaaaaaaaaaaaaaagggggggggtttttaaaaaaaaacctgggggggcccccttttgcggggggggggaaaatttttttttttttttttttggggggggtttaaaaaaaccccggggggtttttggaaaaaacacctttttttgggggggggaaaaaaggccccccccccccccatatac

SEQ ID NO: 102921 - DNA, 402 bp, Homo sapiens
  misc_feature (1)...(402): n = a,t,c or g
cccacgcgtncggtggatctacttgttgatgatagcgttaaagagtccttgattggttatggaccaaccgaagattccaaagaattttcatgagatcagctaacttgcaccaactttgaagtctgattttcctggacagttgtctgctttaatttcatgaaaagattatgatctcaaaaattgtatcttagttggtatcaaccaaatggagtgacttaatgtacatgaaaacgtaaagaggacgtgtggcattttcacttttggcttggaaagcacagacttttttttttttttaaacaaaaagcgggtggtgactaatgaccttttacttccaaatgggttcccgaacccggaagagaatccacttctcctggctcctaagggaccaggaatgcccccacg

SEQ ID NO: 102922 - DNA, 5729 bp, Homo sapiens
gcacaagccctgtctgaggccgtggtgactggcgacagccgggcagtggagggccttggaagctgaagggtggtcttggcatggactctggtccttggggtgcaggctcttgggtcccagttctgctcggggtggtcctgtgaagcactagactcctagcgggtcatctgggaggttctagcagagctgaacagcccaagggtcatcagggctcagagagtctaaggttatgtcaacctggcctgcccagaactgcatcgggcaggggcactgctctcagccctagcaacacacactgacacttcgctgccaacactgacactttgctgccaaaagcctttaatatgccctggtcccaggctgtgttcatgaaagcggacacagcagtgcttccagcttcatggttcccaggttcaggttcctcccagcggaggtgggagggcagccctcacacctggcacccctgagtgccatactcctggaggaagtcgttgagctgggcacaggctgcccgctggcgggtgctccggcacaggcgttcagagggcatctcctcgatccagctattcgagtccagcaggtactgggggtgtccctcgaggtcataggtggccccatccagacccatgcccatgatcaaatattctttcccaggttccaagcgaaggcggcaggaggctcgaaccaggaagttgcgcatctgattagcagcggccttgacatccttggtgaagtgcaggacttgggtgatcttggtctcaaagaggcggaaagcagctctgctgtcttctcggagaaccttaacctggaagccgtactccacacgggggtagtagcaggcaaacttcatcctgtagccatcctcgtcctgcagaccccgctccagggcgcgacgctggcgagggcacttcccctcagcacactggcagacttcagcagaacacaaggtggccaagagtctgctcttacttggtgccccgtaaaacacagaacatctgcgctcggggttgtagtagtcgtacagggttgcgctggccggctgcaccagccccaccggcacttcctgcacagcctcaaagcccacgcactcccgggaggtggggaccgagtcaaaatacagcaggacgtggggcccctcggtctcaaagtgactcacgtaacggtcagagagggaggtcagcttctccaggtcagcacgcagggcgtggaatccactcaggagggtgacgtccgcgatggccatgccagacagccccaccttgccgttccgccagatgcacacggtgtagtgcaccctggactcctgctcctccaccaccttgggcgcctccctcctgcggcggttcctccgaccctcaaacagctgcaggggtgtcacgggctgcagaggggcatctgggtcatccttggctggaagctcatcgtactcatagtcctcatagtcctcgtttgcttccatcgtgtactcgacgtggcctttgactgtcacttctatctgtaggtcctggcaggtcgtgttcttcatgtccaggacattgtaggtacgaaggaccttcagggttcctttgctgtttcctcccaccttcacattgatcttgctgcccaaggaaaactgcagctcctcctccaggccgcgaatctggcggttgttcagctgcagcgcgtgggacttgaacccattccggcctgtggagctgagagtcacattgagacccctctcctcagtggtgtgggaggcaatccagtaggcagacagggcatccagggcaatcaccgtgtcttgggtactgcggaatcccccttggaagctgccctgacgggtgagccaggccgcagcctggtctgccatctctgctttgccctcgtgaagcaggaggtgcagcagggcgtaggctgtggtttcaatccacagggctggggcctggggcatggggtcggatgggttgcgaggagccggggtgggcgacacggcattgctctgagaaccagtgactgagccccagtacaggttatctccagtctcctgggccattgccatgaggttgttgtgggcaacaccgagcaggtccacaggcgccttggtcagtgtcagggcataggccgtgatggcagctgcgtgggcacccaggagcccagcacttgctttctcccccaaaaatgagtttgcctttgagatggaggcttccactctctgcttcaatggctctgcaccctcatcctggaagacggccagcccatgatgaagggcgatggtcacaaaggctgtgagtgccacagtctcatcattgcccaccaaacccccctgcatgctcctgtctaacactggacaggggtcctggaacgagccgtcagcctgctgctgggacagaagccagttagatgtctcctgcagtttctcaggcgagcctcctacctgctcctgggccaaactcaggaccttcaacacaaaggctgtgagccaggtgctgctgtcccgtgacaaccaagccgcataggaaccatccgccttccgaaactgctggatccgcatgtagcctttctggatcagatccacggcgtggtccttggtctcgggaggcagtgtgctccactgctctgtcttgtccaggtagcgggaagcagccagtgtcggagccaagtagatcatggtttgctccccacagcctcgaggaagcctcaagagggaggccacgcctcctggtgacaaggccccctcagagcctaaagtgtccaatggatctgaggctgtaaccctgacgtagctgttaaagtccccatcagggatcatattgggatcagagttgccaggtatttccaaggtccggcctcggtggtccaaggggttgagttcatagaccagctcctctctatggatggccccttccttctcaatctgcagaaccttggacaccgcatctcccacagggaattcgaaggaccctcgagccaccaccttcagagacacagcggcggctgccgtgggcaccacagagaaggcaacaggccgggcagagcccgcaggcaccagcacctgctgggccagccctccgcccccagccaggcacagcccctccactggggacacgtggacgctcacagtcaggtttttatccaggtagttatagaggacaggccgcagctccagctgctcaaagcggcggacagacatgggcaggcggaggtgcaggtggaactcgcggaacacccggagctggactggggtggccacacataggcctttggttttggacaggctcaggccatggatctcccacgtggtcagagagtcggggagccacagtgtcaatatttgaaagcggtccactgtttccactctccagagccagttctctgggaagaagctgcgcacgggaatgtcatcctcatcaatcaggtcctcctcctgcaggatctccagggctcgttggaggcccgcctggcccttgtccctgctcttcttgcgcagactctcagcaaattggcagcaggacaggaagggctcccggcagtccagctgctgcacgcgggctgcccgctgctcgcaggaacgcatcatgggcagacgtgtcaccccatcctggcagcagcgcttggctgtcggggaagcatactgacccaatttctcattaatcgccttttggaagttcacgtttctctttttccgggttgtcttctccttgggacagcttagtctctttctggataaggtccactggtctccatcagaaaaggccaggcccgctgcctggaacacctgaagggcactgtccccacccccaggaccacagccgaggtcatagctgttcatagcttcaaagaccttgcccatgttgaggggcttgtgggacttgctgcctgcagcatacagagctgtgtccaaggctcccagcgccaccagggctagggagtcggtttctaagtggagcttcacggactccccgttccggtactgcttggcaccgtccacgctgagctccagcttgccctcgcaggccccagcctggacatccactcgcagggagttggccactgggtggtctccatggtagtagaaggccacaaagtagaaggagggtgccaggtgatggtccacaaacaccgagaccgaggtcagggtcctcttgggctctcgattcatgaacacgatctgccctcgggataggatcatgtagtagtaatgagaaaaggtggccccactgcccacggctcgcaagttcaggttcagagtgtccccaacacgaggaggtcgagaatccggccgctcaatagacagaaacccggggcctcctgaaggtggggctgccacagtgagcctggctatcgctggatgtggggagcctgcagatactgagagctgcagctctgagatggtctgagggataattattggaatgctgacttggccgctcccgtctgtgttttgctgaatgtcctggacttcaggaacagacccaggagaagacaccgtggcagaaactttgacaggaatgccagaagctggggagcctgacatctcacggaccaaggcctgcagcaggaagggggccccaggcacaaggtgtcgcttggtcttgctaagatccaaggagaagggagatgacacaaaataccaggatgtgagctctgcctcctccatctccccacctggatactcaatgatggctgcagcaacgtagaggcgcagcccctggaggtcagtaatgcccatattcagcttctccagggcgtcctggaactctgcctttgagagggaaatgtggctctgtccattcaccagcttggtctgactctccagcccccgaaagaaagtcttcttaccatcctcatctaggagcccaaagcgcacatatgccaccccctgcactggcttcccatagatgtacctggcctggatgtctaactgcatttcatcaagatggcctggcaccgtcaggatgtagggctttccaggggtgatcttcacctcaaagttgggaaggacatatttcttcacctcaaactgggtgctgctgttggattccaggccatctgagaatcgggctgagatcttccaggtccctggctctgagatgtctgggatcacaaagtcatcctggaagatggacgagggcatgtacacctccttcttccgcacgcggaggccgtgagagttctccaccatgactgtgatggtgtcagtgctcgggcgcatcttctgatccagagcaaagacccggtaccgaacccgctggccagggttgtaaatgggctggtccgtctgcaaaaagaggtgcccccggcgagaggagaagagcaggttgataccctggatgtttgtcgttctggacagagagtcctttagccatggcgaatgggccaccagctggacctcagggcctctgaggagttgatggaggccacagctcttcgcatctttcaagggcacctggagactgaggagtgcgaagtctctttctgagctaagggtgaagtccacctttggggagcaggggacattattacgagatgggtttctcaggaacactgatcctttcactacctgtcctcggggcacatcctggagctgcacccccaccgatagggggacccccagatgaaccacagaaggagagaacaagagcaacctgggcttctgcagagataaggtgaagaaggtagcagacagacagacggatctaacctctcttggatcctccagccatgaggctgctctgggggctgatctggtc

SEQ ID NO: 102923 - DNA, 486 bp, Homo sapiens
  misc_feature (1)...(486): n = a,t,c or g
gcgaaccnaattagaccttatcagcgtgctggaattcccccatgatccaaatacctcccaccagttattacatttcaacatgagatttgggtggggacaaatatccaaaccatatcagactgggtcttaatctgttgtccaggctggagtgcagtcacacaatcacggctcgctgcggcctcaacttcctgggctcaagcaatgtcctcatcctcctgcctcggcctctcaagtagctgctattacaggcacacgccgccatgcctggctaattttgttgcttttgtagagacaaagttatataccatgttgcccgggcttagctagttatttttaaaaggcttctgaatttcctctctgctcatttgtatctttcattggaacatcctatgtgaatttctataattttgtgtcacattggtgtgtttgtctgttttgtgttgctataaaggaatacctgaggcttggtgatttataaagaaaaan

SEQ ID NO: 102924 - DNA, 395 bp, Homo sapiens
ggcacgaggcaataccctggagggacttgaaaatctgtggattttggggaatcttgaagcaaatggttaatctttaattccccccaataaattaaataagcaaataagcagtttctgttaaatacaaaacttttttttaatacccccacccccaattcccaacccataaaacatttttagaggctttgatctgtcgcccacgctggaatgcagtagcacaattttagctcactgctacctccgccttccaggttcaagcaattgttgtgaggcttacattttaaaagacataaattgaaagcttgttttcttctgtgggaaacagcgatatctacttctcatagttgatataattacctaagataacagatattatgcaccacgcagcatgcctg

SEQ ID NO: 102925 - DNA, 395 bp, Homo sapiens
ggtacatagggtgaggtctggaaaggtcccaagcactggagcttctgaccctgtggagatggggtgcacgaccctccctgtacatggaagagttcttcttcaccttcctcttgccctatacatgttcagctatctggaagcttactgaaccctctcttcttgggtttttatggaagcttcatgacattatcatttcttcccacagggtatagggtgggaccctctcatgggagggtattaagacccacaatcagaaaaggtaggggaacatgagacaggaactgtggattgtggatgttggacctttgttgggtgcatagttggcaaatattttctcccattctgtagggtgtctgttgataatttcttttgatgtgcagtctgttgataatttc

SEQ ID NO: 102926 - DNA, 453 bp, Homo sapiens
  misc_feature (1)...(453): n = a,t,c or g
cgaggccgnnncctgaganactgataccctactacgccacgcttggcacgaggctaatatactgttaagtggtggtctcttagatgactgggagagtattttagttgtaaggctcttgtataattaaaacagaggtaatgaattttttaggcatataactttgatagaatttcaagtgagtggcttttaagaagaaaaacagatctctggaatatgctgtcccatcctctcctgcttttatttcatgcccagtgtgcctcagagtgttacgaagtgtgagaaccactggtagagagaagacaaggaggagagggagagctgggagcacatgttgagacctttactatggctaggccttataatagaccaatttccccttgtataaatattgtctctactaaaaatacaaaattagccgggcatggtggtgcatgcctgtaatcccagctactt

SEQ ID NO: 102927 - DNA, 539 bp, Homo sapiens
  misc_feature (1)...(539): n = a,t,c or g
accgatctcggtctgtcatctacacttctctcaccnactactagttgtgtattagtcactactcttgcctgccctatattctatactcggacttagggattcgaagtcttgacttactctcctnnnnncctgcaatttcattattcattcattcatttgtaatttctcttggtatacagatttgaggtatggaggccactaaatttttccttcagagcctccacacagcttatggcgcagttcacacttcccagcattttgacatcacacaccactagctcataatcaccaccccattttctctgtggcaacctgagaggctaaattntttttttttttttttttttttttttttttttttttttttttttttttttttggtggggggctttttttttttgcccccttgtatacacccgggggcaacaaataaaaaactaaccctttcctttgtggattttttataataagaaaaaaacttttttttcctcgtgaaaaaaaataaaaccccccttcggggggcccctcttttttttatt

SEQ ID NO: 102928 - DNA, 471 bp, Homo sapiens
  misc_feature (1)...(471): n = a,t,c or g
atcgatatcactacgccagngcggaggaattccccgacttcaaactgtactacaaggctaaccaaaacacatacagaggccaatggaacagaacagagacctcagaaataacaccagacatctacctaggaatacaactggtctcgaactcctggcctcaagtgatcctcctgccttggcctcccaaagtgctgggattacaggcatgagccactgtgcctggcctattttagcctttattacctgttaatttctaaagccatttcacttagtcaatgtagatagttgaagtgatagaaatacagttttagagttttactccaaaattttatttaaaatttaatttgttgaatgccttcatactatcctgcctatatgactgaatttatagattttatgtaaacttagccaccaagttgtcaatgttttagacttacttaccatttctaaaatggatggccggccttccag

SEQ ID NO: 102929 - DNA, 407 bp, Homo sapiens
  misc_feature (1)...(407): n = a,t,c or g
ccgcgcccgccactcggggcccctgccgcgcatcctgcagcccgcttatgcgtatgtgcacggggccgcccgcctggacctggagaagggacctacggacgcctggaagctgcgacgccctgcactgctcccgcctccaccagcgcctcccactgatgtcgtggtcccgggcctggcccaggggcccctttacatgccctctcccttttataaaattttccattaaaaaccacctattttctaaaaaaaaaaaaaaaaaaaaaaaaaaaaaaaaaaaaaaaaaaaaaaaaaaaaaaaaaaaattaaaaaaaaaaaggatatatataagaaaaaaaaaaatttttnnttttgggacccccccctttaaaagaagggccataaaaaccccttggtgccccccggggttt

SEQ ID NO: 102930 - DNA, 433 bp, Homo sapiens
  misc_feature (1)...(433): n = a,t,c or g
ctcgagcccactagttagagcgcgtaattaggcaatctgctgctttaacagactctttttttaattttattttattgattttatttatttatttattttttgagacagggtctccctgtgtttcccaggctggtctcaaactcctgggctcaagggatcctcctgtctcagcctcccaaagtgctaggattataggcgtgagccatcgtgcccagcctgctttaacagactttccgtccatctcattctagcatctcctttcatccctacttccagaggtacctgcgactgccagtcctgagccccctagtgtaatctggatggtttttgtttaatacggatggccagcttaggattcagttttctcaggtctgctaaaacattaagtatttattcatctgctgccactttaaaaattccatggtggttcccn

SEQ ID NO: 102931 - DNA, 482 bp, Homo sapiens
  misc_feature (1)...(482): n = a,t,c or g
aagttcttngcgnncccgcnatcgagatccctagtccagcgtggtggaattcattttaggacaatttagatgactccatggaacacatacaaactctggtagatggctacaaggaaatgaagaaaaaaggataggtcagaggggagaatttctttaaaggattgacagacttggggaaaggcacagagaaagtgggaagaatgggattctcagagtttttaatgtgggtgaagaataaggaattacagttttaagtgcagaatgagaatcttaagattttgttggacttttcagatactgcaatcttttaaacatgagaaagtacaggggccgggcacagtgactcatgcatgtaatcctaacactttggaaggctgaggcaaacagataccttgaccttatgagtttaaggccagactgggcaacatggcaaaaccttgtctgtacaaaaaaattagcctggcatggtggtgcatgcctgt

SEQ ID NO: 102932 - DNA, 463 bp, Homo sapiens
  misc_feature (1)...(463): n = a,t,c or g
natagaagacctctagnccctgcggnggaattccctaaggtcacatggcagntgtcctatctcttgcatctcaccatcccccagcttgcaccggatgctgctcgtgaatacttggattctgaatcctgcattttgttgccagtcctggatccacctcttccctgcctttatgcaatgccccaccctatctcactttcagggaccctctggcaactccccacctcctcacaggcctccacggcagctctacttacctaagcttacaatatgggcttctgagtaggatttcagtagggaaaaaacaaaaaaggtcttgcttttttaaacgaagtttgctggaggccgggcgcggtggctcatgcctgtggtctcggcgctttgggaggccggggcgggtggatcgcatggggccaggagttcgggaccagcctgaccgacgtggtgaggccccgtctctactaag

SEQ ID NO: 102933 - DNA, 489 bp, Homo sapiens
  misc_feature (1)...(489): n = a,t,c or g
gctgatggnccttgatnccctccctgagaccctcgnaagnngcgnggaattctctgacttgttgattgtgtcaccccatcacagctcagtgttggtggcatagttccaggtgcgtgaaagtatttgctgattctttgaagattgggaaggctcagaagggcagagttgaagaaggcatacctttaagagaagccctttgaataatcaagtgctaaaacaaaatcaggtgcttttttaaaacagcttgattgagatataatccacataccttaaaattcacacatttaaagtttttagtgtctccagacacagtggttcatgcctgtgagactggggcaggaggatcacttgaggccaggagttcaagatcagcctgggcaatatagtgaaaccccatctcttaaagaaaaagttagccaggtgtgatgatgtgcacctatagtcccagctacttgggaggctgcagctgtggctgtggctgaagctggn

SEQ ID NO: 102934 - DNA, 470 bp, Homo sapiens
  misc_feature (1)...(470): n = a,t,c or g
cttccatagcactcgccagngcggggaattcccaaagtgaatacagaaagacctcattttattgacagcatcatagttcgtattgtggatataaattatttaacatccacatattttgatctacatcctattgatttaagttgtttaaagcaatactgtgactgggcatggtagcttacgattgtaatctcaagattttgggaggcagaggtaggaggatcgtttttggccaggagttcaagaccagcctgggcaacatggtgaaatccctgtcttaatcaatcaatcaataaacaaacaaatacacatactacaataaatgtacttatttatcttgttatacttgtgcttttattttagcagttctgaaaatggcttccttgtaagcgaagtctatctatatttaaaattttaatagatattagtaggtaaaaacatttttaaaaacttgattactaataaaaatttan

SEQ ID NO: 102935 - DNA, 477 bp, Homo sapiens
  misc_feature (1)...(477): n = a,t,c or g
ccgcggcccccnnnnnnattgatnattgtagacattaggccangcggtggaattcgaggcaggagaattgcttgaacctgggaggcggagattgtagtgagccaagtttgtgccactgccctccagcctgggcaacagagtgagactgtctcaaaaaataaaagttattcttatgccttatccgtggcttgtgaaatggttttatactgccctttatctataattattcctcttctctatcttcactattgttctcatagatcaatgggtcttaaatctgtctgcacattagaatcagctggggagcttttaacaattaccagtgcccagatctctccccagaacaaaccagaatctctaggggtgaggccaggcatcagtatttttaaaagcttcccgggggactctgatgtacctccaagggcgagagccactgtcaaagctgctcaaggagtgctatcccagcagagacgtcan

SEQ ID NO: 102936 - DNA, 427 bp, Homo sapiens
  misc_feature (1)...(427): n = a,t,c or g
cggacgcgtgggtttttttttagagcgcttaaaaaatccggaaaaatggggtttaaaagaactgtctctttcagtctacatttttgtttaatacgcttgagcaataaacgctgacttgcagacgtgaaaaaaaaaaaaaaaaaaaaaaaaaaaaaaaaaaaaaaaaaaaaaaaaaaaaataaaaaaaaaataaaaaaaaaaaaaaaaaaaagatcatgtggggggggggctattttagattattttgaggggccaaatcttacacggggaagaaaaaaaatttttttttttttttttaggggaaaaaaaaaaatacattgcttgctttgttggaaaaacatcctttttttggggggcggatgaagacgacccacccatcccattgagactgggtcgggttcgaaagaaaataatgtttggggtgggn

SEQ ID NO: 102937 - DNA, 400 bp, Homo sapiens
cggacgcgtggggtcttaaagcaagccttttcattttagattagcaacgcagaaataatcttggttaagcgcaaagcaattaattgaggaatcaatagcgagagataaccagaaaaaccctatactttcaggaattttagaatatactgctagatacattatgagtcaaaaaaagaaaactaatgggagttagataatatttagagctgaatgataacaaaaatactagataccaatatttggaccatgcagctaaaggggtgcttagaaaaaattttgtagcataaatccttacattaagaaaggaaaaggtgacttggcatggtggcttatgcctgtaatcccagcactttgcaaggctgaggtgggaggatcgcttgaggctaggaattcaatacta

SEQ ID NO: 102938 - DNA, 406 bp, Homo sapiens
  misc_feature (1)...(406): n = a,t,c or g
ctctaattttatttatatatagnctaccagaagaccaactgtagctttttaaatatatgtgacatatatctggtacagcgaggtgtctcacgcctataattccagcactttgggaggccaaggcggacggatcactggagcccaggagttcaagaccagcctggtcaacatagccaaaccccttctctattaaataaataaatatatatgtgacatatatctaagtagcatagaggatattatttatgattttccctacacattatctttatagatgtcagctgggaagatttttttggctcaagtcagcctcattctaagaccaagtcagtcagtcacattctgagaccattcacagaccttcttgccttgtgttgccacttggattggcttatattgccactta

SEQ ID NO: 102939 - DNA, 373 bp, Homo sapiens
aatgaggcacatttaattcatattgaaaaactttctgacaagctgtgctggacattatagagtagtcttaagaaggtagataatcctgtcattgaacaagagggagcaccagttaatctgtgagaaaatgaagcaggattctcacaagaagagaagttgggtaggtaacttatgaattttcttccatttgttttttattatttgatatgtggccttctattaatatgggtgatcagtagttgacattattgtgggtattactattattataactgacacaatggtcttgctctgttccccaggctggagtgcagtggcaccatgataattcactgcagccttgaacccctggctcaagcagttctccttcctc

SEQ ID NO: 102940 - DNA, 477 bp, Homo sapiens
  misc_feature (1)...(477): n = a,t,c or g
tgggcangnanaattgatnactgcnagacattaccccagngcggnggaattccggctcagcctctcaaagtgaagggatcacaggcatgagccattgtgcccaacccagcccaggaatttgaggccagcctgagcaatatagtgagaccccaggtatagatagataggtagatagataggtaggtaggtaggtagatagatagataggtaggtgggtaggtaggtggctanataccgttttttctttcctcggtacatactttttattattcgaatatagcttttattcattcggttggtcgttcgtttttagtggttcattttgtctgtctgcgggcttctatctttatttatattattggaatatggactatatgcttattgaaaatatctgtggtccttctatcttgcatacaccgtttgcttctttgattgtgttttgttttatgacctcttttttgtttttttttttttaaa

SEQ ID NO: 102941 - DNA, 493 bp, Homo sapiens
  misc_feature (1)...(493): n = a,t,c or g
gaggagaaaaanggtcgagaccctgtcgaggtccntgaatactaacatgaggcaactaacgtggtacaactctcctgtgattgtgattttctggattttagatgttaagaatttagactttaggactgggcatggtggctcatgcctgtattcccagcactttgggaggccaagtcaggaggatcacttgagcccaggagtttgaaatcagccggggcaataaagagagaccccatgatatggtttggctgtgtctccaaccaaatctcatcttgaattgtagttctcataatcctcacatatcatgatggggacccagggagaggtaattgaatcatggaggcagttacccccatgctcttctcatgatagagagtgagttctcacaagatctgatggttttataaggagcttttccccctttgcttgcgcttctccttcctgccacctcgtgaagaaggggacttgcttccccttcacattctaccatgcn

SEQ ID NO: 102942 - DNA, 397 bp, Homo sapiens
ttttttttgagacggagtctcactctgttgccaggctggagtacagtggtgcgatctcggctcactgcactccagtgataaaactgtatttatatacataactccaatgtagattctttacattcatgccactcagtgtaggtccagtactgtcagcatcagtgtaggtgggcagttgtaagaaatgcaagttctagggactcacctcagaccttctgaattagaatttgcattttaacaaagtgatttgcatatattcaagcttgagaagcaatgctttgatgcccaattattattctcctagcccaaactgctgcaaatcttaatatccacaaagctgttttcttatactgctgggattaatagacattattttaccttctgggttcttaccccc

SEQ ID NO: 102943 - DNA, 355 bp, Homo sapiens
  misc_feature (1)...(355): n = a,t,c or g
ggactgcaggtgctccaccacgcccggctaatttttgtatttttagtagagatggggtttccccatgttggccaggctggtctcgaactcctggcctcaggtgtgatccgcccgcctccgcctcccagttactcgggaggctgaggcatgagaattgcttgaacctgggaggtgaaggttgtactggcgccatcttggctcactgcacctccaccttacgggctcaagcgattctccagcctcagccatcgtgcccagcccctcagtaggttttaaggagcccccagccctcctcccttctgggcccgaccagcttatactgctccatctttcccggncacatgccccgccaagg

SEQ ID NO: 102944 - DNA, 241 bp, Homo sapiens
ggcgagggctcggctcactgcaacctctgcctaccaggttcaagcaattctcctgcctcaacctcccaagtagctgggattaaaggcgtgagccaccgcgcccggcccaactagagatgtctttatcttttgatccaggaaattacactcaggaatttttcttaataaaataaagccatctacagtcatgaaggcatcatctaccgtattacttattacttactaaacgtcgacgcggccg

SEQ ID NO: 102945 - DNA, 363 bp, Homo sapiens
gtcgccttaatccaagcctacgttttcacacttctagtaagcctctacctgcacgacaacccttaattaaaaaaaaaaaaagacttaatttgtgggccggggccgcaattcccaaaatttaaaggccaagaaaccgaaaacccccggaagttttttaaagaggggaatggggcgccatcaaatttttttgacttaaaaactggatgggccttttttaagagggctataccccaaaaatttgaacttttgccccagaactcgggattaaaaaaatttttaaaaggacaaaaaaaagggcccttttttttttgggcccaaaatttttaaggaaaaaatttaagaggggtttattaaaaactttgc

SEQ ID NO: 102946 - DNA, 348 bp, Homo sapiens
aaatggagtgacaaaagtagaatgggggttcccacggggcactgaacaagggaaagtacaaagtttctgttttaggtttgcaagatggaaaagtttgggagattaattgtacaataatgtgaatgtacttaatgctcctaagctatacattttaaaatagttaaaatgggaatttttttgttgggtatgtgtgtgtgtgtgtgtgtatatgtgtgtgagtgtgtgtgagtgtgtctgcgctgttatcatttattttttttagagacgttggccgggcggggatttcctatctatgtttaggtaacttctcttcacctacctttgctattttctcttgtgctcttgcat

SEQ ID NO: 102947 - DNA, 464 bp, Homo sapiens
cgggactttgccccatgacccgcctgcaggatggcatcgatcacactcagcaactgcgtggacttcaggttgtccttcgcttcgcgcggggtatgccccttactgcttcctttacccattcctcacgctccataaatgacaaaaccgcccgcaggcggtttcacataaaacattttgcatcagcgaccaatcaccacaacctgaccaccgtccccttcgtctgccgtgctgatctcctgagaaaccacgcgtgaccccacgcgcatttccccgtacagaacaggcagaacattgccctgggcaaccatgttatccagtgaggagaaataggtgttctgcttaccgttatccgttgtctgtatacggcgagttctggctttcggtgccagcatctgcgccacaccaccgagcaccatactggcaccgagagaaaacaggatgccggtcataccaccggccccaag

SEQ ID NO: 102948 - DNA, 469 bp, Homo sapiens
  misc_feature (1)...(469): n = a,t,c or g
acgggncanaattgacctgcgctgccgatttcggcacgaggagagagagagagagagagagagagagagagagagagagagagagagagagagagagagagagagagagagagagagagagagagagagagagagagaggggcgcgccccccccccccctcttttttttgggggaggggggccccccgcgcgcgcacacgctctctcccccccgcacttggggcgcccccctctatatacatattttttttcatatgtgcgcgcgccccccacagagagatctgcgcgcacacagagagaggcgcggcgcgctctcaagagtgtgtgtgtggtgcgcgagagagagacacactctctcccgcgcgcccggtgtgtgtgctcacacccaacggggtgcgggggcgcccctggtgcccgcgtctctctttcacagagcgcacactgttttttgtgtgtgtgtggggctggg

SEQ ID NO: 102949 - DNA, 472 bp, Homo sapiens
gctgtgatatgatcgcattgaggactttcgcacgaggagagagagagagagagagagagagagagagagagagagagagagagagagagagatactgtatgccccttattctgccccacagggggatttattctaagagaagcgcgtgtgaagagtgggtgcctctgtttttagagagaccagatgtttatctctgtgtggggtgtctctttaaaaataagtgaatttatttggggggtgtgccgctctactatttcttagaagacacagttttttatagataagagagggagtgcgcacgcgtgtgttgacaaactctgtttatagcagatgagtgttgagactgcttttctttcgcgttcgcgtgggagcgcatatatagagctctgtttttttgtcttgctaacaatatttaacatctctaagagaaaaacgcccctctctctcacactgttatttctgtcacagtctg

SEQ ID NO: 102950 - DNA, 496 bp, Homo sapiens
  misc_feature (1)...(496): n = a,t,c or g
ggggggccgattgaccccctaatagaccgcctgcggaattccgcacgagacacctcatatcctccctactatgcctagaaggaataatactatcgctgttcattatagctactctcataaccctcaacacccactccctcttagccaatattgtgcctattgccatactagtctttgccgcctgcgaagcagcggtgggcctagccctactagtctcaatctccaacacatatggcctagactacgtacataaccaaaaaaaaaaaaaaaaaacctggggggggggccgggcccccaattccccttatggggggcggaataacaatccacggcccgcggtttaacaacggggggacgggaaaaacaccccnnnnnnnnnnnnnnnnnnnnnnnnnnnnnnctncnnncnnnncnnnnnncncccnctnncnncnnncccccccctccnccccccnnnnnccncncccccccccncccctccccccnccnccccacn

SEQ ID NO: 102951 - DNA, 412 bp, Homo sapiens
  misc_feature (1)...(412): n = a,t,c or g
acnnnnacccagaatgttagtaaattatgaaaatcaatttttcatttttattcaacctgaagttgtgattcccccttgcaagaatgttgcatacacacacacacacacacacacacacacacacacacacacacacacacacaccttttcagtgatataaagacacacacctggcgtgagtgggcactctctctctttttattaacagaggaagaggggggaggcactctctttcagggcacactgatttttggacatactctgttctgggacaaacccctctggcaaaaagaattctgaatgtattggggacccctttttaggccttgataagtctcaaacacaacacagctcacccagctttgtgtgcgagtgaagattcagaaacaacacctacacaccgctctgaggt

SEQ ID NO: 102952 - DNA, 429 bp, Homo sapiens
ggacttgtccgtgggcctgaggtccccggaggatgacctagcattgaaaagccccggccggcctccccagggtccccgaggacgaagttgaccctgaccgggccgtctcccagttctgaggcccgggtcccactggaactcgcgtctgagccgccgtcccggacccccggtgcccgccggtccgcagaccctgcaccgggcttggactcgcagccgggactgacgtgtagaacaatcgtttctgttggaagaagggtttttcccttccttttgggggttttgttgccttttttttttcttttttctttgtaaaattttggagaagggaagtcggaacacaaggaaggaccgttcacccgcggacttagggttggcggggggactccaggaccctgggtccagcatggaggggggggacccgcaccacct

SEQ ID NO: 102953 - DNA, 430 bp, Homo sapiens
ggctaattctgaaagttttagtggtaagtacagcgtttatgtacaaatccattttatgaaactggtatatactacataatatataggaatacaaatatgaagagttgcttctaatctaagatatcaatatattttgtgcaaataggcaaggattgattaataaatatgtgtacctctgtgttcagtagccttattacaaatgtgcatgtgatgtaagacttcaaaatataggagttagtattatagccaatttccagttatttaaaaactaggccaggtgtggtggttcatacctgtaatctcagcactttggaaggcctatgctggtggatcaagagttcgagaccagcctggccaacatggtgaaaccctgtctctactaaaaatagaaaaattagctggctatgatgacgcaagcctgtaatcccag

SEQ ID NO: 102954 - DNA, 1080 bp, Homo sapiens
acagtatcacttctttgcacccatgaatgtgatctatttaggtctttaacatcctttggtaccttacattctctgtagggttctggtaccatttttaaagaattattctttgatgtgtcttatggggtattttaaaatttcattttctaacttgtatatgaactaacttgtatatgaagtttcttttttgggggaaattttgaatgtaggcaattttttaaaaaatgaagttacataaacatgttaccaaaaatagaaaacaggcaaaaaggaaatcaaaatccataggacttaccaccccccccacaatgtaggcctaaggtaggtattttaaatttttgaggacagggtctcactctggtcccccaggttggagtgcagtggggcaatctcagctcactgcaacttctacctcctggcctcaaacaatccacctgccttagcctcccgaagtgctgggattacaagtgtgggctaccacccccagccagtttttgttttgttctttagtacatgtctagtttttttcttttgtcattttacaaccataacttttaaaattatactggaggcgagggagatgcatcttcctagccatggcactcctggggaaaggctgacttggcttatggctgtcagtgcacagcagcgccagtatgcagaatgcctgtgcctctgctggagcagctcagtgaggcggacaccaggtcactttaactagttttggtggcaaactagttttgtgagatagctgcagaagtgctcgtttctgtctgttgccacttcacttttggagacagggtcttgctctgtcacctaggctggagtgtaccagtggcggccatcagagctcactgcagccttggcctcccaaagtggtgggattacaggcgagagccactgtgcccagccagcttcactttcatttgttttaaaatttggtgttctgtccacatagttcagaattcaaaactgcttacaggggaaaatttcctcctacctgtgtccccagtgcagccagcattagggcttttgtatttctgcagagattatgtgcatttgtgggcagctgcgcccgtg

SEQ ID NO: 102955 - DNA, 425 bp, Homo sapiens
ggcgtatttttttgatggagaccgggtttcgctgtgttggccgggctggtctccacctcctaaccgccgagtgatccgccagcctcggcctcccgaggtgccgggattgcagacggagtctatttcactcggtgctcaatggtgcccacgctggagtgcaatggcgagaactcggctcgttacaacctccacctcccagccgcctgccttggccttccaaagagccaagattgcagcctctgccaagccgccaccccgtctgggaagtgaggagtgtctctgccgggccgcccatcgtatgggaggtgaggagcccctctgcctggctgcccactctggaaagtgaggagcgtctctgtccggccgccatctcatctaggaagggaggagcgcctcttcccggccaccatcccatctaggaagcg

SEQ ID NO: 102956 - DNA, 498 bp, Homo sapiens
  misc_feature (1)...(498): n = a,t,c or g
cggcagcttgaanaccttgaatcggtagngcatgcggaanaacaacaccaagctcggctcgaggcctgaggagagccaggaggaagccacagggcctctatgaactcgcgtctaaagccacacaccatcacttctgctttcttctattcattacaaaggaatcactcggtggggtggggggaggcggcggggattaagctctaattcttaaaggagtatcaaagaatttatagatacattttaatcaaaaaaagcaaccagtttaatccaaaaaagaactttattctcgaatctgccaggcacggtggctcacgcctgtaatcccagcactttgggaggctgaggcaggcagatcacctgaggtcaggagttcgacacctgaggtcaggagttcaagaacagccttaccaacatggtgaaaccccatctctactaaaaacagaaagttagctggacgtggtggtgcacgcctgtaatcccagctcctcgggaggctgn

SEQ ID NO: 102957 - DNA, 460 bp, Homo sapiens
attgtagacttgaccacgtggggaattcctacacacactatacacaaatacacacatcatatacacaaatatatacacacacatgcatacacacaccacacacacagacacaaacacatatacacatacatacatactgatatggtttggctgagtccccacccaaatctcatcttgaattttagctcccataatccccatgtgtcatgggagggacccaatgggaggtaattgaatcatgggggtagatttttcccatgctattcttgtgatattgaataaggaacacaagatctgatagttttgtaaagggcagctcccctgcacatggtctgcttcctgctgccatgtaagacatgcctttgctcctactttgccttccaccatgattgtgaggccttctcagccatgtggaactgtgaacccattaaacctgtttttctttgtaaattacccagtc

SEQ ID NO: 102958 - DNA, 467 bp, Homo sapiens
  misc_feature (1)...(467): n = a,t,c or g
atgatacctttganattagagcatccgaagngcgnggaanngagaatctatccacctcgggctcccacagtgctgggatgagagttttagccactgcattttgtcactttatatatatgggtatatatacactggatatacgtggatatacacgtatatatacatatatacgtatatacacgtatatacacatacacgtatatacacgtatatacacacacacgtatatacacgtatatacacacacacgtatatacacgtatatacacacacgtatatacacgtatatacacacacgtatatacacgtatatacacacacgtatatacacgtatatacacacacgtatatacacgtatatgtacgtgtatatatgtacacatacgtgtatatacatgtatatatgtatacatacatatatatacatgtatatatatttgtttgtttttaagacagagtctcgctcg

SEQ ID NO: 102959 - DNA, 1057 bp, Homo sapiens
  misc_feature (1)...(1057): n = a,t,c or g
gcggatgagaccatagaacagcgtggaggaattcctaaatttgtccatgataattatgtgattcggaggacagctgttgatagaggaatccctctcctcactaattttcaggagaccaaactttttgctgaagctgtgcagaaatctcgcaaggtggactccaagagtcttttccactacaggcagtacagtgctggaaaagcagcatagagatgcagacaccccagccccattattaaatcaacctgagccacatgttatctaaaggaactgattcacaactttctcagagatgaatattgataactaaacttcatttcagtttactttgttatgccttaatattctgtgtcttttgcaattaaattgtcagtcacttcttcaaaaccttacagtccttcctaagttactcttcatgagatttcatccatttactaatactgtatttttggtggactaggcttgcctatgtgcttatgtgtagctttttactttttatggtgctgattaatggtgatcaaggtaggaaaagttgctgttctattttctgaacnnnnnnnnnnnnnnnnnnnnnnnnnnnnnnnnnnnnnnnnnnnnnnnnnnnnnnnnnnnnnnnnnnnnnnnnnnnnnnnnnnnnnnnnnnnnnnnnnnnnnnnnnnnnnnnnnnnnnnnnnnnnnnnnnnnnnntagactatggatttctttaaggaatactggtttgcagttttgttttctggactatatcagcagatggtagacagtgtttatgtagatgtgttgttgtttttatcattggattttaacttggcccgagtgaaataatcagatttttgtcattcacactctcccccagttttggaataacttggaagtaaggttcattcccttaagacgatggattctgttgaactatggggtcccacactgcactattaattccacccactgtaagggcaaggacaccattccttctacatataagaaaaaagtctctccccaagggcagcctttgttacttttaaatattttctgttattacaagtgctctaattgtgag

SEQ ID NO: 102960 - DNA, 354 bp, Homo sapiens
  misc_feature (1)...(354): n = a,t,c or g
tttttcagcgccaagcttaggcctcgtgacatcaagctcctctttcagctctgccacacggagcgccagttcttctttcgtacccgtcaggctgacatcacggctcagttggtcacccagcgagcggaggcgggcaatcaggtcatctttcgccatggactcctccacagagaaacaatggccccgaaagngccatgattacgccagttggacggacacgaactcatcagggtcagccagcagcatcagcggggctgactgaatcatggtgaactcacgcgccggatcgccgggggtcacccagtttttcgagtaacgggcagaggccgtaatgccttcgcgctgtgcggccgg

SEQ ID NO: 102961 - DNA, 402 bp, Homo sapiens
aagtctttaattaaatacaaaggatatcaggtggcccccgctgaattggagtcgatattgttacaacaccccaacatcttcgacgcgggcgtggcaggtcttcccgacgatgacgccggtgaacttcccgccgccgttgttgttttggagcacggaaagacgatgacggaaaaagagatcgtggattacgtcgccagtcaagtaacaaccgcgaaaaagttgcgcggaggagttgtgtttgtggacgaagtaccgaaaggtcttaccggaaaactcgacgcaagaaaaatcagagagatcctcataaaggccaagaagggcggaaagtccaaattgtaaaatgtaactgtattcagcgatgacgaaattcttagctattgtaatcctccgagggggcgagct

SEQ ID NO: 102962 - DNA, 204 bp, Homo sapiens
caacatactagtcacagccctatactccctctacatatttaccacaacacaatggggctcactcacccaccacattaacaacataaaaccctcattcacacgagaaaacaccctcatgttcatacacctatcccccattctcctcctatccctcaaccccgacatcattaccgggttttcctcttaaaaaaaaaaaaaaaaagg

SEQ ID NO: 102963 - DNA, 385 bp, Homo sapiens
aaactaaatatgcaacaaggatatggatagataacccatgatatattcataaagcatcatattatatagcctttgagaataatgggggggactaggcatgttggctcatgcctgtaatcccagcactttcggaggctgaggcaggcagattggttcagccgaggaggttgagagcagcctgggcaacatggcaagacctcatctctactaaaaaaaaaaaaaagggggggccgttttagaggatcaattcttacaaaccggggcaggcaacatatatatttttttatggggccacctaaattcatttcccgggccgggggttacaaacggcgggactgaaaaaacccggggggtaccaaatttattggcttggcaccacatcccg

SEQ ID NO: 102964 - DNA, 387 bp, Homo sapiens
ccagcacaatctctgcctttaccaccagcacaacctctgcgactacaaccagcacaacctctgctactacaaccagcacaatctctgcccctacaaccagcacaactttgtctcctacaaccagcacaacctctactactataaccagcacaacttctgcccctataagcagcaacaagcttcataaaaaaaaaaaaaaaaaaaaaaaacaaaaaaaaaaaaaaaaaagaaaaaatgatgacacaaaacaagatacaataactaaaatacatagcggggggggctccttataaaggattgacaagagtctattttctatggggcaatatttttatttaagcagccaccttaattaaagtggggcggctggtactaaggccatgcgag

SEQ ID NO: 102965 - DNA, 488 bp, Homo sapiens
  misc_feature (1)...(488): n = a,t,c or g
agtggttnnnnaacctgaaggctccgcagaggcatgataccatnggcagggncgacccacgcgtncgngaacacacacacacacacacacacacacactcacacacacacacacacagtcatctcccagagaggtttttttgtgttctaaattcactttagataagtgcactgattcagcttagagatttttaacactctgaaaagaagtgagaaaagaacaccaagacgcacagaggatagagtgagtggaacacacacctctactattaatttcggcaaaagacaatggagagagtggggaagaaactatatgcagagagctgacagctaataattttccagaactggtgggtctgtgactcctcacgctgaagaggcacagtggtttccacacagagaaaatataaatctctttatacctacccacgttggagagaaacttcttgacaccaaagacagtgagaatattctaagagacaccacaga

SEQ ID NO: 102966 - DNA, 336 bp, Homo sapiens
  misc_feature (1)...(336): n = a,t,c or g
tttccagtgttttgcttagacctcgtgacatcaggctcctctgtcagctctgcgagacggagcgccagttcttctttcgcccccgtcaggctgacatcacggttcagttggtcacccagcgagcggaggcgggcaatcaggtcatctttcgtcatggactcctccacagagaaacaatggccccgaaggccatgattacgccagttgtacggacacgaactcatcagggtcagccagcagcatcagcggtgctgactgaatcatggngaactcacgcgccggatcgccggtggtcacccagtttttcgagtaacgggcagaggccgtaatgccttc

SEQ ID NO: 102967 - DNA, 320 bp, Homo sapiens
attcattttaaaaaatcatttgggttctgagttgtttttcataaaatggcattaatggttttcacacatttaccatgtgtgaaagtactttgtgttttaagcactagagcctgtgttctaagtgctaccccatttttatgatggggtttatgcctttttcctccccattttgtactgagggacctgattcatacaaagaatgataggccgggtgtggtggctcacgcctgtggtcccaacactttgggagcccgaggcggtggatcacctggaggctggaggtcggggccaggctggcccacatggtgaaacccggctct

SEQ ID NO: 102968 - DNA, 441 bp, Homo sapiens
  misc_feature (1)...(441): n = a,t,c or g
cgggtcgacccacgcgtccgcggacgcgtggactactacacacctaggctatatggtatagcctattgctcctaggctacaaacctgtacgacatgtcactgcgctgaatactccaggcaactgcaacacaatggtaaatatttgtctatctgaacatatctatacatagaaaaggtacattaaaaaatatggtgtgataatcttatgagaccactgtcatatatgcggnctgtcgttgactaaaacatcattatacggtgcataactatgtatgccacgtgctacacaagtaccagaaacactaaatatgacaaacattcaccttctgagtaagaagtgagcagctgggtgtggtggctcatgcctgtaaacccagcacttttggaagctgaggcgnatggatcacttgatgtcaggagttcagaccaacctggccaaat

SEQ ID NO: 102969 - DNA, 392 bp, Homo sapiens
gcggaggttgcagtgagccgagattgtgccattgcactccagcctggcaacagagcaagactccgtctaaaaaaaaaacaaatggccaacagatacatgaaaaaatactcaatgtcactaatcagggaaatgcaaattaatgagatatcacctcacactgttactatcaaaaaaatgaaagaggctgtggtggcatatgcctgtaatcccagtgctttgtggggctgaggcgggaggatcgcttgaggccaggagttcgagaccagcctcggcaagcatggcgagaccctgtctctattaaaaaaaaaaaaaaaatttaagaaaaatttccttggtggggggggcttgcctccagccaaactaattggggggcttaagggggaggatccttt

SEQ ID NO: 102970 - DNA, 404 bp, Homo sapiens
  misc_feature (1)...(404): n = a,t,c or g
ggtnagaaaanattcggttacctctgatacccctcgaaacacaagnngaaggcatgagccctgcagggatgctgacgcacatctcgaaggcattattttctctgccttttacccgaaaaactgggagaccaccggcgatggggcgcgtgagtggaccatgagtgantcagcaccgctgatgctgctggctgaccctgatgagttcgtgtccgtacaactggcgtaatcatggcccttcggggccattgattctctgtggaggagtccatgacgaaagatgaactgattgcccgcctccgctcgctgggtgaacaactgagccgtgatgtcagcctgacggggacgaatgaataactggcgctccgcgcggcagagctgaaagaggagcttgatgacacgaggcc

SEQ ID NO: 102971 - DNA, 395 bp, Homo sapiens
cttctgcctaaacctgtaactagcaaagtgaatggaattaccatggtgggtaggggtacacagcatccacccctggaactgaggagcacactggctcccagtttctgaacaaaattaaggctgtctttgcctgaaagagaagagtggccgtttgggaggtacccagcaatatctgcctcaaaaccgtatttaaacttttggttcacctgtgatcccagctactcgggaggctgaggcaggagaatcgcttgaacccaggaggcggaggttgcagtgagcaaatttttgtagagacggggtctcattatgttggccaggctggtctcaaattcctgggctcgagcaatcctcctgccctagccacacttaaattttcgatagaaacacactcagcc

SEQ ID NO: 102972 - DNA, 466 bp, Homo sapiens
  misc_feature (1)...(466): n = a,t,c or g
gcggtcagaataatgggccgtccgcnaatacgtaagctgtacgcatgcaccaccgggtcaagaagagggtcgacagaagcttgaacctggcaggcgtaggttgcaatgagcctacatagtgccacagctgtgcagcctgggcgacagagtgagactccatctcaaacaacaacaacaacaacaacaacaacaacaaaccacaaaattatttgactactgtgaaggatcatttgtctaacagttcattccaatcagaccagggaggagctttcctgtttcatacgtttcagggctgcacagttggtctctttaatgtcggggtggagatccaaagtgggttgtggaaagagcgcccataggagaagggagaatactgcgaaaaacggatgttagcattcattatagtatgaggatgactcccaacaaggttctttggaaggaagacgaatacaatggagtaatgaaa

SEQ ID NO: 102973 - DNA, 434 bp, Homo sapiens
  misc_feature (1)...(434): n = a,t,c or g
cgcacgccacctactgatgcagctaagtggaggcgccaccctagcaatatcaaccattgaccttccctctacacttatcatcttcacacttctaattctactgactatcctagaaatcgctgtcgccttaatccaagcctacgatatcacacttctaggaagcctctacctgggcgacaacacatataaaaaaaaaaaaaggggcgctgcttttgaagaaacaaaatttactagcgcgggcatgcaaagcaaaaatttttttttggggacgcttaattggagatgacggcgccggtgctaaaaacatggggatgggaaaacacttggtgatgacaaactaaatagtattggagcagatccctttttcttagcgtggggtaaaagcaaagaagacgggngntaaagcttacgctttgccatgtaaatttcccaag

SEQ ID NO: 102974 - DNA, 412 bp, Homo sapiens
cactcttctagggatatgaaaatttcttattacccaccctacatacacagacacacgcgcacacacacacacacacacacacacacacacacattcattctaaagatccaatggaatactgaaaacaactctctttcttgaagattttattaaaaaacaaacacacaaacaaaacgcctgcccaccctagaaaatcctttctctacttggaacgtcaatgtgtgtgtaaaaaaaaccatcttatgctgtgtggctccagggtttttgttactattttatgcacttgggagaaggcttataataaaagatgaagcacattgtgctttcacatatattgagtggccatctatgccaaggtggtgctattgtttctttcagaaagctcttgactaaaaaaaaaagaaaaaaagaa

SEQ ID NO: 102975 - DNA, 408 bp, Homo sapiens
caaaatgttggggttacaggtgtgagccactgcgcctggcccccctaaggtgtttcttcacacctggaggaattagcctcacctcaggtcctgctctgttgtccaatgcgtctgccttggcagaggtcagaggtcagcagctctgccctcccaccccattcctccccacactcatcgcccttaccacgctactcctacctatctccccttttatactaataatcttataaaaaaaaaaaaaaaaaaaaaaaaaaaaaaaaaaaaaaaaaaaaaaggtttttttaaaaaccggccccaagttatttccttttaggggggggaaaattaaactgggccctggcccgattttaaaacccgtttgggtgggaaaaatacttttctttttagtcacccccgtcctggtgtccg

SEQ ID NO: 102976 - DNA, 594 bp, Homo sapiens
tttgagacagagcaactctgtctcaaaaagaaaaaaaaatatgctattcgtatacttagaaaattatgacatacatgctcaccctgagtacctcattattattcagatactcattttaatattttacaatttctaaatgtttattttcacagaaggtataaattaaaagattaagaaaaatcctgccaagatcacgtcttaggcacacacagagagcagttgagcgtctgccacacctgatggtcttgagccgtgatggccttaactctgagccccagtgccctgctccgtaattgatgctgtccactaaggcttgttaggcctaaaggagggaagtgtaagctaagtgtggtatctggtaggaaacccactctgggttgggtgtggtggatcacttgaggtaaggagtttgagaccagcctggccaacatgacaaaactccgtctctactaaagatacaaaaatcagccctgcatggtggcgcacacttgtaatcccagctattcaggaggctgagacaggagaatcgcttgaacccgggaggaggaggctgcagtgagccaagatcaggccattgcactctggcttaggcaa

SEQ ID NO: 102977 - DNA, 383 bp, Homo sapiens
  misc_feature (1)...(383): n = a,t,c or g
ctttattttgttttccaggttcattgttttatctgagaataatagtaacttcagtcacttttctatggttacaatatttaaccttttttttttccctttttctttctttttaaaaaacggggtttcaccgtattggccgggagggcctcaatctcctgacctcgggatccgcctgcctcaccctcccaaagggttggacaggcatgacccaccgggcccagcccttaaccctgttttaggtctttattacatgggccggaagttccaagacttggttaaacaaaagacggggctttgcctggaaaagactctggcattaatatttttacagncagggatgatgcccgctgttgaattaagagaaaaattattatttctttctt

SEQ ID NO: 102978 - DNA, 283 bp, Homo sapiens
accacagcaatgaagatatggaaatatgttgttaatttcccaatgtttagggacatttctagataatcttaattgttactggcttctaatttaattctgttatagtcagagaatacactctgtaatatttcagtcatttgtaatttattgagacaagttttatggcctatcatatggtctatcttattgaatgttcttatatgtactggaaaaagaattttttttacagttatcaggtatactagttaacatgtttgacagcattctcaaaccttatatagcc

SEQ ID NO: 102979 - DNA, 399 bp, Homo sapiens
gctttccagactgcttttgagaattgaattgaaacaagactgatcatctttgacagtatactttatgtacctttcttccatattaaaaatagtaaagttaaatttatttgccttttatttcatccctattatgatttctaaattgactaatagagaatttcttttttccactctcacccgggctggagtgcagtggcgcgatctctgctcactgcaacctccacctcccgggttcaggcaagtctcatgcctcaccctcctgagtagctgggattgcaggcatgcaccaccatctctactaaaaatacaaaaattatctgggtgtggtggtgggtgcctgtaatcccagctactcgggaggctgagacaggagaattggttgaacctggctggcggagg

SEQ ID NO: 102980 - DNA, 416 bp, Homo sapiens
  misc_feature (1)...(416): n = a,t,c or g
acccccctcagaagagcgatcccccctacaagttggttcctgtacacttagatagtattctctaaggcatccactgcatttcctttcatttgacatagcttctgttacaattgcatccacgttttcttttcttttgttgattttcttgttcccgtagaagaaagaagaaaggtgtttggagaattcgagtgcctaggatgccagaccagagttgagacaaaaagaaataagattattttctgctttgtagttctgtacttttcgagagaagggaatagggaagacagcaaagaaagattcagatttctaaccctgcaacttttgccaagctttattgccctgtgttcacagcaataaaaccacttcctgctgcttctanannannnnnnnnnnnnnnnnnnnnnnggggggggggc

SEQ ID NO: 102981 - DNA, 461 bp, Homo sapiens
  misc_feature (1)...(461): n = a,t,c or g
tgtactcttgccgtaccggttcggannnaccgggtcgacgatttcgtttcgtgctttggatgatttgtggttatgttttacttactcataataggcccatttctttaaaaatttccaggccagaaattttgcaggtggttcacacctgtaatcccggccctctgggaggccaaggtaggcagatcacttgaggccaggagttcgagaccaacccgggtaacatggggaaaccctgtctctactaaaaataaaaaattagcagttagttaagcctcaagtggacttatctactttttgcaggcctacattatctttcaaacagaagggaagggctgcacgtctaacagaaacgctgccggcttctatcaagccaccactaaagaacaagaccacgtggtctctcataagcccaagggtccctactcctctccctcctttgacaaggaactggaaactagggc

SEQ ID NO: 102982 - DNA, 428 bp, Homo sapiens
  misc_feature (1)...(428): n = a,t,c or g
aatgacgtctctggccgnnnnnncgggtcgacgatttcgtaaaaaatattttaacacgaattgtccgcggaattttcatgttgggctcgggtagcttcttagttttctcggtaaaaaggcgttttactacctctggtgtgaaggctgggaaatggcaagtgggaagttggttgataaaattaggagtttggctgtctttattactacttttttttttttttgcccccccccccttttttttttaaaacccccccccctttgggtggggttaaaaaaaacggtttgttttgcccctccttaaaaaaaaaaacccggggggggggggaaaatttatttttttctttaccctttgggggccttttgggggggaaaatttccccgagggggggggctttttccttttggggggggttggggtttcccaaagg

SEQ ID NO: 102983 - DNA, 480 bp, Homo sapiens
  misc_feature (1)...(480): n = a,t,c or g
gcccgatgtaccgcgagcaccgttccggaattaccggatcgacccacgcagtccgngtgaaaatatttagataaaatgggctaattcctcaaaagatctataaaaactcatacaaggagaaatagaccatctgaataggcctgaatctattaaagaaattgaatggggggaggagccatgatggccgaataggaacagctccggtctacagctaccagcgtgagcaaggcagaagacaggtgatttctgcatttccatctgaggtaccaggttcatctcactagggagtgccagacagtgggcacaggtcagtgggtgcacacactgtacgctatcccaaaccaggggggggaatggatttcttgggaaaccccaggggtcaaggagtttccttttccagtcaaagaaaggggtgacggacagcacctggaaaatcgggtcactcccacccgaatactgcgcttttccgacaggcttaag

SEQ ID NO: 102984 - DNA, 416 bp, Homo sapiens
ccgtgtttcccaggctggtcttgaactcctgggctcagatgatcctattgtgttggcctcccaaagtgctgggattacaggcatgcacaaccaggcccagccattttcttcctttgttaaactcaaaatataaataaaattagcatactctgtacctgttttttgtgtttttaaaatttaggaatatatcctggagagcttctgtataattatttaggcagggtgtggtggttcatacctgtaggccaaggttggcagattacttgagctcaggagtttaagaccagcctggctaacatggtgaaacaccgtctctaccaaaaaaaaaaaaaaaaaaaaaataaccgggggggggggggggcccccaaaacccccgttatctgagaaaggggggggggaaaaatcttttaacccgg

SEQ ID NO: 102985 - DNA, 397 bp, Homo sapiens
ccgtgcccggcttgaggtgcttttttaactaatacattgtagcactattgctggtatgtggattcacataattgagtggcaagatagtataggactcctttccgattcctaaaaccattagtatctactaaattgacgctgaaattttgtatttttggtggagacaaggtttcaccatgttggccaggctggtctgacgctcctgacttcaagtgatccggcctcccaaagtgctgggattacacgcgtgaggccagaaattttaactctaaaacggtatcacttcccatctggaattctgggcactgaggggatggtgatagaaatggcttatcttttaaaggtttagattctggatcctccacttactattctgtggctcagtttcattagatta

SEQ ID NO: 102986 - DNA, 404 bp, Homo sapiens
  misc_feature (1)...(404): n = a,t,c or g
gctcgaactcctgacctcaagtgatctgcctgcctcagcctcccaaagtgctgggattacacgcgggagccaccacgcccggccatctttcacatttagatgcgtaattcacctggaatttaatttcatgcgtggtgcgagggaagagagacttcatttctattgcagatgggtaatcaggagactcacaacatttggaagaggctatccttcccctgctgcttcggactgatttctgctgtgttgatctacttgcttatcttagcacctgctccattctgtgttcatatttgggaaagactgcccttttaattttattttgtttttcaagcttgatttaactaatcgtggccctttgtatttccctatatactttggaatcagcttgtcaatttttatgcaan

SEQ ID NO: 102987 - DNA, 391 bp, Homo sapiens
ctttaagatgggagattgcattccttcgtgagcaaggtgcctagaaatcaattccaactcttgatatgatcagagagattgatggatacctaagtgtctgaaatgataatagttcatcttgtctaagggcattcccccatttgtggcacattgtccttgacgatcagtcttctatttattttattattttattttttacagatggggttctcgatgtgttgcccacgctagagtgcagtgactgttcacaggcaacatcattgcacactgcaggcttgaactcctgggctcaagcagtcctcctgcctcggcttcttgagtggctggcactacaggcatccaccactgtgccaggctcagtcttctatttaaataatgctgctactttaga

SEQ ID NO: 102988 - DNA, 435 bp, Homo sapiens
tggggtttctccatgttggtcaggctggtcttaaactcctaacctcaggtgatctgcccacctcggcctcccaaagtgctgggattataggcgtgagccaccgcgccggctgccttaaatctatttatctgacgttcccaactaggaaattttttgtccaaatgagtatatgtgattttaaagtagaaatcgaaggtaaaataggatttatctcagttcctatctcccttcaatctattcttcatattgtcaataatttttttttttttttggaaacggggtctttccccccgggctggagggcatgggaaaaatttgggttaattgcccctttggcctcgggggttaagggaatttttctgcctctccctcgggagaatttgggatggcggccttcccccatcccccccgcgtaaatttttatttttttaagag

SEQ ID NO: 102989 - DNA, 409 bp, Homo sapiens
gagtttgcagtgagccaagattgcacaactgcgctccagcctgggcaacagagtgaaacttcatctcaaaaaaaagtaaaaaaggaaaagaaaaattattttgataacttgtattaaaaaaatgctaaaaattgccaggcacagtggctcacgcctgtaatcccagcacttcgggaggtggaggtggaataatcacttgagcccaggagtttgagaccagcctgagcaacataataagaccttttcttacaaaaaaaaaaaaagggggggcccttttaaaagaaaaaattttaaggcccgggggggggaagggaaaatttttttttagggggcccaaaaaaaaaattccggggccgggttttaaaaacggtgggaggggaaaaacctgggggtacccaaattaaaaagg

SEQ ID NO: 102990 - DNA, 419 bp, Homo sapiens
  misc_feature (1)...(419): n = a,t,c or g
cagctctcactgccttccttggttcccggtcccccagcccatccgccatccccagcccgtggtcaggtagagagtgagccccacgccgccccagggaggaggcgccagagcgcggggcagacgcaaagtgaaataaacactattttgacggctaaaaaaaaaaaaaaaaaaaaaaaaaaaaaaaaaaaaaaaaaaaaaaaaaaaaaaaaaaaaaaaaanaaaaanaaaanaaaaaaaaaaaaaaaaaaaaatataaaataaaaaaaaaaaaaaaaaaaaaaataataannnnttnnnnnnnnntttaaaaaaaaaaaaaaaaaaacacccccccccttataattttttttttattnnnnnnnnnntntnttttttnnnnnnncggggnnttataaaaaaananaaaataaaaaaaccct

SEQ ID NO: 102991 - DNA, 411 bp, Homo sapiens
ttaccagtggctctctagttggggcagagttcacctacacgtgacagccagtcagaggtgagagaagatgtcctgtagacattgtgtgagtccctggaaccaggcatcactgaactccagtgatgcatgctgataaatcctcctttgtgttggcttaaacttgtggattggatttctgccactggcaactgaaagtcctggctctcttttccttccattttggaatgcagcagtgattctctctcttcttccattaacaaagggaaactgaaagggtgtcagaagtaaaagtcaaaactggaaaactttatttaggttgggttatggtggctcgtgcttgtaatcctaacactttgggaggccgaggcaggaggagcgcttgaagccaggagttcaagactagcttgggca

SEQ ID NO: 102992 - DNA, 418 bp, Homo sapiens
  misc_feature (1)...(418): n = a,t,c or g
cggacgcgtgggcggacgcctggaagctgcgacgccctgcactgctcccgcctccaccagcgcctaccactgatgtcgtggtcccgggcctggcccaggggcccctttacatgccctctcccttttataaaattttccattaaaaaccacctattttctaaaaaaaaaaaaaaaaaaaaaaaaaaaaaaaaaaagataaaaaaggggaaacataaaaaaaaaaaaaaggaagaagaagcgggggataaaaaatatatttttttagatggaaaataaaaaatattttttttggggggggggtcgtaaaaaaaaaaaaataccacccccgcgccccccaaacaaaaatttttttttttaaaaanannnntntttttttgggcggggcggggggtataataggggggaggggaagagccgg

SEQ ID NO: 102993 - DNA, 407 bp, Homo sapiens
tgaaatcttgtcatttcagacaacgtgaatgtacctagaggacactaagccaggcacagaaagacaaataccacatgatctcattcataggtggaatctaaaaggatgttctcatagaggtagagagtataatggtagttatgagaggacgagaggggagcagggaaaaacgggtagggaaggatgggataatgggtacaaaaaagttgggaatatgtaacaagaaacataaaaatagttattctctttgatagacatttaggttgattccatatcttggctattgagaataatgctgtagtaaacataggagtgcagatatctgtaaaacatactgatttcattttctttggatatatatacccagtagtgggatttatcggatcatgtggtagttctgattaaaa

SEQ ID NO: 102994 - DNA, 380 bp, Homo sapiens
aaaatagttctctgctgtggctagcactggagtgcttcactatcccttcctattttctctcaaccttgcctgcacatttgtaaatagtcccttcattaaataaacatcacatctttttacatattatctatttctttccaggacccttagggctaaagttgcattttaatatttttaaatggataggtgaactaagtgattgaaactcttcatttagttgtttttttttttttttaaagggagccccactttgccccccaggctggagggcaggggggaaatttgggttaattgaaccctccgtttcccaggttccagggagcccccggcctcaccccccggagaagtggggactaaaaacccgtgccaccgggcccatt

SEQ ID NO: 102995 - DNA, 370 bp, Homo sapiens
aatatttgtattctttggtagaaacggggtttcaccatgttggccaggctgggcttgaactcctgatctcaagggatccatctgccttggcctctgagagtgctgagattacaggcatgagccacagcattcagcccaaaagtgctttctatatacaaattccagagacattctggcagcctgcttttaaataattaattgaacaattattgttactaatttatcactgcgattaaaagcaattctcttttttgcaaggcatctcttatatgcaagttaaacctatgtggatcaaactgcgattgattattgaattgctgctctccctcttccgtagctgatgactctttgagtcaggtctacccaattg

SEQ ID NO: 102996 - DNA, 371 bp, Homo sapiens
cggcacgagcagtattcaaatactgacatcaataaatatattgaaaccctcagggcaaagcagcatgaaaacttgaattgttttttacaaataaattgaaatgtcccaggtgaggggttggaggataggacctcaagttgtctggtcatctgctttggtgaggcaggttcaggacaggtcagattcagctctaaatacattttatacattttattatacattttggtccctttctctctctttctttcttcttttttttttcttccgagtttcgctcttgtctcccaggctggaatacaatggcacaatctgggttcactgcaacctccatttcctaggttcaagcgattcttcagcctcagcctcctgaa

SEQ ID NO: 102997 - DNA, 374 bp, Homo sapiens
aggaaatatgctgccttagttttgaagaggaaatactgaaattttgcctggataaaagggcaatttttaaaataaactttttgctttgcttatcataatccagagtatgggcaaccatttttgataaatttaggatgtgtgctatatttgatcaccagtgttttaagttttacttttgaacactaagaaagaatacaaagttaaccttatgggccaggcatggtggctcatgcctgtagtcccagcactttgggaggccaaggtgggaggatcacttgagcccaggagtttgagaccagcctgggcagcatagtaagaccctgtctctataccaataacataataataaaataaaaaacaaagtaccttatagt

SEQ ID NO: 102998 - DNA, 397 bp, Homo sapiens
ggagtgtgagatgagaaacagtagccttttctttgtctgtagcatctcaagttttatactctctgggatcttctctctgattagaaagtgcttcttttccacctggcaaggtggcacacacctgtaatcccaacactttgagaggctgtgctgggtggattgcttgggcccagaagtttaagaccagcctgggaaacatggcaaaaccctgtctctacaaaataaaataaaataatgcaaaaaaagagagagcaactgcttcattgcttttctaaaacgttgttgagctatttaaagcctatgataacgggggtttatttgcacttacttcccttcattttagttgaattcaagcttatgtcttcagatttttattgacttagttaccttatactgt

SEQ ID NO: 102999 - DNA, 409 bp, Homo sapiens
ctcgagcccaggagtttgaggctgcagtgagctgtaattgcaccactgcattccagcctgggtgacagagtgagaccctatctcaaaaaaaaggaactatctggcttcatcctaagagtagttgcattttaaactctcagtcagcttcttttactgtaaaatgggaataataattaacagtctaaattcctaaagtgattatgaaggctgaacaggtgatgcctgttcctcaggcccctcccttggggccccttcagccccatgtgtcccaggctaatctcaaactcctgggctcaagtgatctgcctactttggcctcccgaagggttgggattacagacacgagccaccactcccagccagggtgctattaaattttacctttttatccaggagcgtgggtcatcat

SEQ ID NO: 103000 - DNA, 359 bp, Homo sapiens
tgtatttttagtagagatggggtttctccacgttggtcaggctggtctggaactcccgatctcaggtgatccacctgcctcccaaagtgctgggattacaggcgtgagccaccacgcccaggctctgacattcttgaatatccctatcaacccctctcacccacccaaagcctgctgctcaaagcagctctaagcagaagagatggagaaacattcagactgggtggagcatggcccaggctgtgttgctgcccacttctgtctagatgggcagttcttgacttccccgcctgacgctgctgagcagccacagtcccgactgcattctggctcgtaccctttactatagtgccagccac

SEQ ID NO: 103001 - DNA, 426 bp, Homo sapiens
  misc_feature (1)...(426): n = a,t,c or g
ggaagaattgcttgaaccttggaggcggaggctgcagtgagctgagattgtgccattgcactctaacctgggcgacagagtgagacttcatctcanaaaaaaaaaagctaaagaatttttttttggcccccggaccctttcccctttttccggggtaaaaccaaaaggggcggcgggccccttttttaaaaagggggcgagggttacccccggggttccccaaaaataaacctttggtaacggggccggttaaggggggggtttttccctggaggggggaaaaaagccccccaaaccctgatcctataaaaagggcccatttttcaatattttccggggttaaaaaggttaaaaacctttggcctccttatttcgggataaaatttaactggaaaaggaacccctttttgacaatttaaaaaaaat

SEQ ID NO: 103002 - DNA, 371 bp, Homo sapiens
gagagagctagcaccatgagcttcaataccctgctccaaaaaaccatggtttgtatattaaaaagcaaagaatgctccctcctttacattcacaacaaacttccattagaaattctgctgtgtggtgatgaacagaaaggtagtcccatccagctcggtgtcttctgaaacgtcacctgccccctccacaagagaaccgctggctgcataataatggcaccaggagaccgcggtgctgggtcttgttggtttgaacaagcaaaatgtctgcatggtatctcggctccgcaaagaacctgtcaatgcattctccacaccaggcggacaatgtaacgtaacagtcgtaagataaccattcgtgggtggtcttc

SEQ ID NO: 103003 - DNA, 513 bp, Homo sapiens
cgaactcctgaccttgtgatccacccgccttggctcccaaagtgttgggattacaggcgttgagccatggcgccctggccccacagctttttctagttgtgtttaggtgcttaggctcaggatatggggtttagtaaataagccttccatatgcatattgtcagacccaaatcagtccacagctatcttactggaagtggggtcacaaggcaatttctagaaagcaagttctgataaaggtaaattgattcactggaagatcttaagatatataaaatatctccaataccatgtgtttaattttagtgaataaggaataatattagtttctttttaaaaggctaggcacaaatcaagtaataaaacccagccaaaggcacacacaaaaatataggctagccaggtgtggtggcacatgcctgtaatctcagctatatgggaggttaaggcaggaagattgctagagcccaagagttcaagaccagcctagtcaacatagcgagattccgtctc

SEQ ID NO: 103004 - DNA, 377 bp, Homo sapiens
tgaagaatttttaaaaagttattaaactagaagatgtagcaacagaaaccacccaaaatgaaatgaaggggaaaaaacaatgacagcaaaaatgagacatgacgcaacactaagcagcctaattaatatacatgtaattggagtcacaggaggaaacgaaaaggggagtcagaaaaaaaattaagaagtaaaagccaaaaacttaccaaatgtgatgaaaactacaaactcacatacatgcagaaaagagttaacatacaaaaaatacaacaattagccagacgtggtggcacatgcctgtaggaccagctactctggaggctgaggtgagaggatcacttgagcccaggagatcaaggctacagtgagctacgatc

SEQ ID NO: 103005 - DNA, 417 bp, Homo sapiens
tctttttatgcttattgtttgtggattttgtttcattcttacgaatgccctccttattccatgactataaaatatttgctaatggtttcctgtggtatggtttgagttttcttttttacatttaaatgtttgatgttcctgaggtgtgattcgatttaggttgttaggtatagttcaaatgaatttttattatttttattattttacctatttaagtctaattttactgttttttgttgttgttattgttgttgttgttgttgttggagacagagcctcactctgccacccaagctggagtgcggtgtatgatcatagctcacagcagcctcaaattccctgggctactcaggaggctgaaatgggaggatcgaatgagcccgggaggctgagggtgcagttagctgtgatcttgct

SEQ ID NO: 103006 - DNA, 355 bp, Homo sapiens
gaaagcattgtcaaagtaaattttttacaatagccaaccacccaaggaggagctaaattaaatccaacattgagcaccccatggcaccttgttggcacactgtttggctgctatttttggggtaggacaacatgctctccccaggaaacaccattatctaaagaccctcatcattctgtgaatttctgcatgattctgtccctgaattagctctacctatgaaagccagatttgaaaaatccaggagaagccaggtgtcgtggctcatgcccgtaatcccaacattctgggaggccaaggtgggcagataccaagcccggagtttgataccagcctgaccaacatggagaaaccc

SEQ ID NO: 103007 - DNA, 357 bp, Homo sapiens
gggggtggggggtgcagtgagccgagatcgtgccattgcactccagcttgggcaacaagagtgaaactcggtctctttaaaaaaaaaaaaaaaataaactttctttttgttcccccctttatttttttaaaaagtaaaaccggggtttaagggcctttaaaaaacccaaagtcccaaatttttttttaaaatttttcaagaatattggctaaaaaaaaaaaaaaagtttttccaacgccttaccttgttaaaaaattaaaggaacatttggcccaaataacaaaactttgggttcaaatccacctgtagggcaaacttttcctggggcttaaaccctaatttttcctggaaatacca

SEQ ID NO: 103008 - DNA, 335 bp, Homo sapiens
acttgagcccaagagttcaagaccagcctggacaacatagtaagacctcgtctctacaaaaaaattaaaagttagccaggtatggtgatgtacatctgtagtcccagctagtcgcctggcttaaaaatttttattcttattttttgtagcggtggagtcctgctctgttgcccaggctggtctcaaactcctgacttcaagcagtcctctctccttggcttcccaaaatgctgggattataggtataagccactgtgcctggcctttatacatcattttttattattttctgctttaactgagggagaaggcaattcacctcttgggagagttgg

SEQ ID NO: 103009 - DNA, 335 bp, Homo sapiens
gtttagacggggtttcaccatattgggcaggctagtcttgaactcctgacctcgtgatccgcccgcctcagcctcccaaagtgctgggattacaggcatgatccaccatgcccagctgaacattaattcctaaatcatatcagcttctacttaatttaactttatcttttttccccacaaattagtaatataagcaatttcactggacacttccttgagattctgacttctttgagtgtgtttatgccagtttttctgtggacagttttctgaattcattaatactattttttcaaattgcatctcttctgtagaaactagattcatcctaacaa

SEQ ID NO: 103010 - DNA, 416 bp, Homo sapiens
cgcttcgcggactgtacagcggagcgggcattattcgctttgaggcgaaaaagtggaacgctttagccctctgggcctgggatattgcgggggataactgtgccatctgcaggaaccacattatggatctttagacgggatctcgctttgttgcccaggctggtctcgaactggcttcaagtgatcctcccactttggccttccaaaatgttgcgattataggcgtgagccactgtggctggcctgaaattttctagtatccacattcataaagtaaaaagaaaataaaaaggtgaaattaatgtattttatttaaccttatataggcaaaatagttttacttcaacatgtaattgatgtaaaaaaaaaatgagatattttaaaaaaaaaaaaaagaaggaaggagctttttttcg

SEQ ID NO: 103011 - DNA, 410 bp, Homo sapiens
  misc_feature (1)...(410): n = a,t,c or g
atattttgattctaggaggcggaggntgcagcgagctgagatcttgccactgtactccagcctgggcgacaagagcaaaacaccgtctaaaaaacaaaagcccaataaatgtgtattgagctgcacataaagagattaccaattaaagaaggttttagagacaaagtataaaatttcataattgtgatttgattagtagtggcgatttttttccccttttacttactatgagttatagttgtgtgtttttcaaaatttggaaataactactaataaagttcataattattttaatctaggttttgagagattacctgaagttgcactcaaaagcaagatatactactaactttgaaatggaataaggtgagttggtggattagttccaaagtcacattgcagggaggaat

SEQ ID NO: 103012 - DNA, 378 bp, Homo sapiens
agattttttcaccttggcctttcaaagcactgggattacaggtgtgagtcaccccatgctgggacaagaaatgaagttttgatatatgctacaatctggatgaactctgaaaacattgtacccaatgaaataattcagacccaaaggacaaatattgtatcattttacttatatcaggtaggtagaataggtaaattcatagacagaaggtagatagttggcaaactatataaacctcaagctcttagtgtgggagcagtcatgagaataaacttctctctgtgaacccctagctgatggttcttcttactcaacagctatcaccagagaacagctatcacagaaaacagaggtcagcctaatgaccaggatgggaca

SEQ ID NO: 103013 - DNA, 480 bp, Homo sapiens
  misc_feature (1)...(480): n = a,t,c or g
ggtgattgatctagcaagtccctaacagtgccattaagctgtcctgtagtacatcttatttagttctctcaataactacatagtatgttgtcagtcctattttatagatgagaaaaccaagggaacaatttgatagaataatgtttccaaaatcagagatctaatcttagaaggcttagttgaataacattggatatattactctgcggttcctaagtctatgaattaatgggaattttgaaatctaattgaaatccaaggagaaagtgatagaaataaaattgtagtgagcgatgtcggctcactgcaacctccacctcccagggtttaaggcgattctcctgccttggccttccgagcagctagggttacagggcatgcaccaccacggccagcttatttttatattttttntaggagacggggtttttaccctgttnggccagggctggttcntcggaactccttgaccnggaggtg

SEQ ID NO: 103014 - DNA, 383 bp, Homo sapiens
ggcttttttttatttcagggggggggtcaccatgctggccaggctggtcttgaactcctgacctcaggagatctgcctgcctcggcctcccaaagtgctgggattacaggggccgggcccaaccagggaatttttgttgccttagaaagtcctatggagagtgctgctttgctgcatttgcatgtagttttatcatctccatgcagttaacagaatgttttcaggaggagaattccctaaggtgagaaactggttttctcaggagactatttggacaaatgacaaccatgttatttagtgagagtgaccaccaatggagccctatacaactgtcactggcactgcctgaagggaatttataaccacgagactattgctgtttt

SEQ ID NO: 103015 - DNA, 631 bp, Homo sapiens
  misc_feature (1)...(631): n = a,t,c or g
taacgacaaaatgtgtaaatgatcctaggcaacattctctccccataaagaacactacactatgggggcaactgccaaaaacggaatggagtcatatgnnnnnnnnnnnnnnnnnnnnnnnnnnnnnnnnnnnnnnnnnnnnnnnnnnnnnnnnnnnnnnnnnnnnnnnnnnnnnnnnnnnnnnnnnnntgcactacagttttcaaataatggacttcatgccaacaacgtttaaatggtgtagaaaataagctatttgtaccatacctgcaagttttctcagttattgtcaagaaaaataaataaaggtaataagaccccaaaattgcggcccaaaccccatccaggatggcaactatcctagctccaaagacatcaaagacatattctctggggaccagtgaatatggagacttggtactgacaggtatcaagcacaacagaaaataggtttgaggcacaggactgaaaacaaaagtgaaggctgagcacagtggctcacaactgcaagcctagaactttgggaggctgaggcaggaggatcacttgagcccaggagttccaggctgcagtgagttgtgattgtgccactgcattccatcccaggcaagtgagcaacaccctgtctcta

SEQ ID NO: 103016 - DNA, 416 bp, Homo sapiens
  misc_feature (1)...(416): n = a,t,c or g
cggcatttgagaattccttttaaatagcatgtgatggttaggtttgtgtgtcaacttggctaggctatagtacccagttatttaatcaaaccctaatttgggtgttactgtgaaggcatttttataggtatgggtaacatgtacacttagttgactttaaataaaggagattactcttgataatgtgggtctgttgaaagccttcagagtaaaactgaggtttctcagagaagaagaaattctgcctcaagactgcagcatcgggccaggtgcagtggttcacacctgtaatccgaatgctttgggaggccaagatggaggaatcgcttgaacctgggaggcagaggttgcagtgagccgggattgcgccattgtactccagcctgggtgaagaagtgagactctgtcttaaaaan

SEQ ID NO: 103017 - DNA, 366 bp, Homo sapiens
cagagaagtcttgcaacacatcttagtttgaatgacatcttgactttcaccgttagcttacttcctgagttatgttgcaggatgtaaggctgaaaatctgctggcgagccaagatcaggactacaggatagcctggttttctctctgcccactccagcctccattggcccagaatgtcatgcacacttgatgctgtttgccttgtttacattgaattttaaaagttcattatcttagtctgggcctggtggctcatgccagtaatctcagcactttgggaggcccaggcgggaggatcgcttgagaccaggcgtttgagcccaacctgggcaatgtagcaagactcctatctctataaaaaaaaga

SEQ ID NO: 103018 - DNA, 915 bp, Homo sapiens
cagggttttgccatgttggtcaggctgctctcaaactcctgatctcaagtgatctgcccacctcaccatcccaaagtgctgggattacaggcgtgagccattgtgcccggctgacaaggcttttttcttcacatgagtaatttttttggcttcttctcctccactctagtatttccaccctcagtaaggaatggaaacctgtcccgtctggggtgtgaagtgccctctgctttttcccccacattgtttgggggttcccagcacctcagccacattgcatgctgggttttcattgtcattgttgcaaatgaaatggagtagacatgtgaaatgctaacctatctaggacctgatctatgccttcttgggaactgagaatgaagaaacagaaatagatggtggaagaactgcctaaggtgtgaaaagctgaagattctaccacttgaagtactgaatatgttgtctagttgtgagactagtgtgtaaaatatatgttttctaggatgattttctgaggacttgttgatggacaagggaacctgacctaaccccatttttcataaagacaaagaacagcaatgttaaattggcccatatgaagagaaacactagtgatgtgccgtggtctccttgcctcttgtttccttccctcttcctcactgacttcccccttgcacaggggcttctgttttatcccatttattatttgtggcgcctatatcaatgtggggtttgtaataggtgagaaatattggcttggagaagctcctgtgcggttagcctggcaatgagtggccgaccatgtgggaacgctcagtttgtcgtatgtgctggaggcctttatgatgaaagtaagcctagacataaaatctggagagaaccatgcaataagcaagtatttttgaaataaattaa

SEQ ID NO: 103019 - DNA, 366 bp, Homo sapiens
gggtgcaggacagtgggtacagcccacggagcatgagctgaagcagggtgaggcatcgcctcacccaggaagcacaaggggtcggggaattccctttcctagccaagggaagctgtgagagatggcacctggaaaactggggcactcccaccctaatactgcacttttccaacgttcttagcgaactgcacaccacgagattatatcccgcgcctggctcggagggtcccacacccatagagccttgctcactgctagcacagcagtctgagattgaactgcaaggtggcagcgaggctgggggaggggtgcccgccattgcggaggcttgagtaggtaaacaaagcagctgggaagctcgaactg

SEQ ID NO: 103020 - DNA, 315 bp, Homo sapiens
gtcttaccatgctgccaaggttggtctcaaattcctgggctcaaggatcctcccatctcagccccccaaagtgctgggattataggtgtgagccattgcactcaggcctgaaagatattttcttggaataaaactttaaagtcagtacttctcaaaccagagttccaaattcttaagaatcagtgtttcttcctttccaaaatgtcagtagtatatttgtcaagtctgagaaccattttttacacataatctatccccaaacctagtctaatatatttcattcatgtattttacagctttggtttaatacctgtt

SEQ ID NO: 103021 - DNA, 384 bp, Homo sapiens
ggtgtttgagagataagtctttaataagaagttaacagataatatatcaatttgttaaatcaatgaatagcattacatatatattatttactattatgaattaagtcaatgccagaagaaagagcaaatagagtctaaattggttccctctagaaagaggggataaagaagtggagatgtataggacagggaactctttatgttatcagccttctagttccatttgactttcaaaactatgtgcattgtataattttaataagaattagtttaggccaggcccagtggctcatgcctgtaatcccaacactttgggaggccaaggtgggcagattcttgagcccaggagtttaaaactagcctgggcaacatggcgaaacttaa

SEQ ID NO: 103022 - DNA, 429 bp, Homo sapiens
gacatttttaagactcactaaaatactagaggcttctaaaaattcctttggtttataagcttctttctccttggagctttgaggttctttttttttaataggctaacttttgagcgtatgacctactggcataccataaacttggttctttaaattgctgccctgtgtaccaggacgagggcattccctgagactgttttatatccaaacctttaaaaaaatgttatccccttaaattaactttgtccatgcccacttcaagtttattttaaaatattctgggccgggtgctgtggtttacaccggaaatcctaccactgggggaggctgaggtggaacaatcacttgagttaagaagtttaaaaccatcctggacaacagggggaaattccatctttacaataaaaaaataacctagggggggggggg

SEQ ID NO: 103023 - DNA, 665 bp, Homo sapiens
gtttccatgagcagttcagtggaatgaggtttgtttgataaacactgccctcctgtggttaacgtaagctaacagttttgcaaaactactgtagtcatttccgcttgtggtaagataatgtaatggttcatacagcatgtttgctcagtaatatatgtggccaagaaagggtttttttccctcattctctccctcttggttttttcctagtgtgtctgcacattcttctcatttctatccatgcacattttctttctttttttggtgggggaggcagagtctcattgtgtcaccgaggctggagtccagtggcacgatctcggctcatggcaacccccacctcccaggctcaagcggttctcgtgcctcagcctcccgagtagctgggataacaggcgtgtgccaccatacccagctaatttttgtatctttagtagaaccagggtttggtcatgttggccaggctggtcatgactgagcccggcccatgcactttttcttatgtgaattataagagttaaatgtaaacgaatacagaaaaagtattaagctatcaaagggagggaagctacatttaagtgtaaacatgcttaaagaaatagaaaagaccagtcagttacaatacataaaattaataaaaactttaatggaaaatcaatagtgat

SEQ ID NO: 103024 - DNA, 390 bp, Homo sapiens
taaaataatataaataggcattcaaatgcttaccatatataataaactttaatagctggagttactttacttacaacatatttaaaacacaactaaagcctcaccctggtgtctttcctaaaggaaatctctgccctgaagatggcctataacatcctcattcctgtcttggattttattatgtatcaatgatgataaggataaaataagggcatgtattttataacacatatataaatattaccatactgcgtatgggctttctcaactaactttatccatctaatattatctttaaattcgaatccgagtaacacggtgtgtctgcacccacctgtagtcccagctactctggaggctgacgcaggagaatcacttgaacctgggagg

SEQ ID NO: 103025 - DNA, 370 bp, Homo sapiens
  misc_feature (1)...(370): n = a,t,c or g
ctgggtgaaaaagattttataatattagatgagttgagagaaccaatgtgaattaaagctgactggcttaaaaaaaataaacccatcaaaattagtaagggaataatgttattcattgcctttttttcgttgagttatgaaagctcttcgaagatgaaggttttatgaaactcaagatctctccagaggccgggcacagtggctcacgcctgtaattccagcactttgggaggctgaggtgagcagattgcgagtccagaagtgagcagattgcttgagtccaggagttcaagaccagcctgggcaacatggcaaaacccctgtctctactttnntaacaaaaaaaaagaaaaaaaaaaaaaaatacccg

SEQ ID NO: 103026 - DNA, 377 bp, Homo sapiens
ctatctatggcagctatagccttcctgcctgcttctttccttccttccttccttccttccttccttccttccttccctccttccctcctttcttcctttctttcttctgagatcatgccattgcactccagtctgggcaacagagtaagactgtctcaaaaacaaacaaaacaaaacaaaacaaaacaaaaaaaccccaaagatcactgatagtggatcaccattacagatataataataatgaagaagtttgagaaattgtgagaattaccaaaatgtgacacagagacacaaatgagcacaagctattggaaaaatagcaccaatagactcgtttgatgtatgattgcctgccacaaaccttcaatttgtggaaa

SEQ ID NO: 103027 - DNA, 358 bp, Homo sapiens
ggagtgcaatggcgcaatctcaggtcactgcaacctctgcctctcaggttcaagtgattctcctgccccagcctgggcgacaagagtgaaactccgtctcataaaaaaaaaaaaaaaaaaaaaaaaccaaattttatttttttaccccccccgaaagacccttttttaacttgaatacccttggaaaaaagggttttccaaaaaaagggccctttttggggtttggaaaaaaaaaaaaaaaaaaaaaaaaaaaaaaaaaaaaaaaaaaaagtttttttttttttgggggggggagatttttttttttttaggggggtaatttttatttggggggggggggggtttaaaaaaaagaggg

SEQ ID NO: 103028 - DNA, 669 bp, Homo sapiens
tgcatttctcaaaacaagccttccctgtccctgaaatgaagaacacagggtttttactctgagcagcttttgcttttttagcttttaagaagttaacagcactttcttggtaagaaaggtataaaacctaatgaggatgagcagtgaattttggttctcaagacaggtccagccagctacttgttgtggttatttttcttttctttgggcttttctgtattttctgaacctcctgtgatctttgcaatcagaaggaaaagggaaacttcagcttaaagcaaaagcaattatctgaaggctcgtgtgctaatcgcccacagatgtaatcggtgtccagtgcagcctccaggaatttctgcttcctggacccctcctacctactggggctcggtaccctcccacccatccagcaggtgacagtttggggctcctagtgggataccaggcacacaacgtggagtcaggcagaccaggttggaatcctgatgttggcagtgactggctgtgagaagtacatttaacatgtctcaagttctcccgatctgttaacttgaaggttggactagaatgatctagaagactagattctagagggttgccagatttagcaaataaaaatgcaggatgtcttagtatgcatggacatacttaatcatctgttatctgaat

SEQ ID NO: 103029 - DNA, 371 bp, Homo sapiens
tatgagatttggtttctcgatgttggacaggctggtcttgaactcctgacctcaggtgatctttctgcctctggctcccaaagtgctgggaccacaggcatgagccaccatgcccggccacttaagctttttacaatctcagtgtcctcaaataagaaggtcaaatgctaatatctgccatctaggattggaatatattgcagctttatttctagtaatatggaagaagtaacgataatagtctgaagagttatcgctacattctacttatctggaatttttcacttcctacatttatcataaactgatgggtttaaaggattaaatttttttaaactgaagtacaatttacatacaggaaaatacactag

SEQ ID NO: 103030 - DNA, 343 bp, Homo sapiens
aaacatgtagaatctttgcattttcaaacaggctcaggatatgaatcaggcaggctattgtctaccttagcacaatactttgatggggatccattttcctttcttattttttattccattctatttgtttgattatttgggtaccagactcggggtcttgctatgttgcttaagctggactcaaactcctggcctcaagcagtcctcccacctcagcctcccaaagtgctaggattactagcgtgagccactgcgcctagcccatcttcctttattagaatcattccccacccatcctttctactccctgaaggaaatgttttttcattttatatgaagaaat

SEQ ID NO: 103031 - DNA, 364 bp, Homo sapiens
gcagttccaagatggccgaattggaacagctccagtctacagctcccagcgtaagctatgcagaagacaggtgatttctgcatttccaactgaggtaccaggttcatctcactggggcttgttggacagtgggtgcagcccaccgagcgtgagccgaagcagggcgaggcatcacctcacctgggaagcacaaggggtcagggaattccctttcctagccaagggaagctgtgacagatggcacctggaaaatcgggtcactcccaccctaatactgcgcttttccaagggtcttagcaaagggcacatcaacagattatatcctgtgcatgactcggagggtaccatgtccatggagcctcgc

SEQ ID NO: 103032 - DNA, 366 bp, Homo sapiens
gaaccacagaagattagcctagtgattttcaaactctaacccaaggcaccctacaagttgttcagaaattcttcagtgccactgcaggagagttggaaagatgaaaaggcagaattctcatctccatatctcactttaggaggagcatcttttatctcttttatattgagttttcaagaaaaaaaaattttttttttggaagaatttgaaagctgctgatccagagtcattcctttaagaaaatgggccgggcatggtggctcacacctgtaatcctggcacttcgggaagccagggcagatggatcagttgagctcaggaatgtgagaccagcctgggcaatgtggcaaaaccccgcctctacac

SEQ ID NO: 103033 - DNA, 380 bp, Homo sapiens
agcatataaagaatctggctcctttgagtcatctccaactttgtcaccttaagcattctttttttttcttctccccttttcttttgaaaaatgctagaggcaaagaagaagattgaacaacagggaggcttcacctttgaaaacaaaggagtcctctccgcatttaattttgggactgtgcccagcaacaactgaaggaaagaacatcagctgaccaaatgtcatcgctgcattttatttcacaagaggagtgtgagggtcaaggggatgaaatgaggggctgcttttagggccctcctgctgtgccagttaccatctggcattaggcagcacttttatctactctttcccctttgacctttgtcaccctgaaatatata

SEQ ID NO: 103034 - DNA, 356 bp, Homo sapiens
tgatcagaagtggctcttacgcatgttatttttgctatccgagagaatgttatgctctctttcactgctacagcatgatcgtttcctatgggccatactactttatgaatattgaccagaggcatgaatcgaggctttccacaatatatatttttaaatttgagataggatctaaacatgttgcccaggctggtcttgaacttctatgctcaagcagtcctcctgccttcacctcccaaagtgctgggattacaagtgtgagccaccacaccaggccccagaagattttcaatgttatatactcatgcgatctgcattttcaccctggaatagagggtccacaaaggtagacgagg

SEQ ID NO: 103035 - DNA, 382 bp, Homo sapiens
gtcacgctgagtgcagcagcatgatgatagctcactgcgaacttgaacttctgggctcaactgatcctcctgcctcagcttcccaaagtgctgagactacaggcataagctaccacgcccagccttactctacattttaacaaaacctccaggtggtacgcacattaaagtttaagaagagctgctacaaagcccaaagagaattaagagggaggaatacgcacaggtgcaacaatggacttttcccaattgatgcaacagagatatcttctggtttggatgacaatcacatggacaagaagttacaatgatctttccaccactgtctagaaagtatttttcttggtaactagaagaaagctagagtatttctagaaagtat

SEQ ID NO: 103036 - DNA, 395 bp, Homo sapiens
catctgcccaactcgctcgcgctttccgcccagggttctgaaaaatggaagaaaaaaggacaggctggagtgcagtggcgccatctcagctaactgcagcctctgcctcccgggttcaagcgattctcctgcctcagcctcccgagtggctgggagtacagttgcggaagaagactcgactcgaagagcggtccgccaccagggctcttcccgcagcgcccccagcgggcgggggtcttgggcggggaagcaggagagggccgaccgagcgcaacaaagctgagcggcgcgtcgcttcaggaacgaagaagcctcgttatgcaagcgaaaaacaaagatgctttgcagcctattaaggaagataggactgggaaggcccaggatgatgctttctg

SEQ ID NO: 103037 - DNA, 430 bp, Homo sapiens
aatacagtgtctctctcaaatgttaaagttctaacgctcggtatctcagaaataactgtctttggaaatagggcctttaaagaggtgatgaagttgacttacagcaagggagctcacgcacacagaggggagaggccttacaagacaccaaaactggtggcaccttgattttggacttttagcctccagaactgtaacaaatacatttctgtataatccagccaatttgtagtattttcttatggcagccctggcaaatgaatataattgcccctcccttggccttcatatataaacgattagtgaggcctagcatggtggctcacacctggaatcccaatactttgggaggctgaggtgggcggatcacttgaggtcgagtttgagaccagcctggccagcatggagaaacccagtctttactataaac

SEQ ID NO: 103038 - DNA, 417 bp, Homo sapiens
aatacaatgtgtgtgtgtgtgtgtgtgtgtgtgtgtgtgtgtctgtctgtctgtctgtcttcacttcatcgccatcttaggttgctcaccctggggaagccggctgccctgttctgtgagcagcccctctggaagaggcccaggtggtgaggacctgagccccctgccaccaaccatgagtgtgagcccagaagcagattttccacccctcgctgctgcagccccaggcaacatcatgactgcaatcacatgagcggcccagaggcagagccaccagccacactgttcctgcatttctgacctcagaaagggagaggtagggtgccctggtccactgtgcgctgaccaagaaacacagggtgcaaccgggccccgcttacggacatgcctgagtaggcagctcctttctcgccgtcc

SEQ ID NO: 103039 - DNA, 397 bp, Homo sapiens
aatacaggaggaggaggagaggagattagagttttctccagctgctttgcggaggacagattacaaaagggcaaagacaggccgggcgcagtggctcacgcctgtaatcgcagcactttgggaggccgaggcggttggatcacgaggtcacaaatatttttttgttaagtcatctgccctgaagattttccaggcccaatgtcaagttcactgatctgtggtttgcagaactcactttcttcctcttttaaaaaatggtcatgtcatctgcctctctctaaccttttgacaaggtcagaaaaccttctacgaagtcaggagagggtctgcatgatattcccctaaaacagaatctgactctaaatgagtcacctttttacaattctcccaaacagct

SEQ ID NO: 103040 - DNA, 396 bp, Homo sapiens
aatacacgtggtcttgttatgttgcccaggctggtctcaaattcctgggctcaagtgatcctccagcctctgcctcccaaagtgttgggattacaggcatcagtcactgtgcacatcaacaattaatagtttgagagtcactggcaatgacttgtaaaaattttaaagcaacgaggccaagacaaagtttaatatattgggactatattttgtctaaaaaaattagagaataaaaatgttatataactcaaactaataaaacacaatgggaattctattaccaagatcaatgctgacaggcaacactgaaatgaagttagaaaaagtcacttgcggctggctgtggtggctcacgcctgtaatcccagctacttgggaggccgagccagaagaatt

SEQ ID NO: 103041 - DNA, 394 bp, Homo sapiens
aatacagcctgtgtatccgctactaattatgtcctcaaagacacttaacatggtctttactctttgctgtttaccaaattatttactattacaagcttctatacattataaacatgaaatagatgggaaactaacaaggtccctttcctctaagactggggtccatagctaggaccaagggttcagggtaactgatccacctgacttcccatgcagaaatatgtgctatataatgtataagcatcttgggggtggtgaggagtggctcttaatagattctcaaaggtctatgacctcataaagtcaagaaccagtttacggagtttggcgccagacacacacacacacacacacacgcacgcacacgcacacacacgcttaatacatagagaag

SEQ ID NO: 103042 - DNA, 396 bp, Homo sapiens
ttcgccattcgtgctcgcttcagcaacacatatactaaaattggaacgatacatacatatatatatatatacacatatatatatacatatatatatacacacacacatatatatatactctctcaagtcttaatggaatatgaattttgatcctgtagttattaaacagccatttaccaacagttgagctgccaggaacttacttagaactgggaatttcctagtgtaaaagacaaaaagacacggctctgggggcacgcgcaatacctgcttagcacagagtagagccgctctaagtatttgttaaatgggtaagtgaatggttgacgcgactgagcaaaacgaatggatgaatgaatgaatgaacgagctcactgtctagcctagaagtcagac

SEQ ID NO: 103043 - DNA, 397 bp, Homo sapiens
  misc_feature (1)...(397): n = a,t,c or g
ataagaagtaatcttcgaatatgacctatacaaagtgtaaattcagtataggaagcagtttagacattgtgattagtgaaaggggacaaatacaaatcaaaaggaaaaataaaggttagcataactgaaatgaggctagaaggattattaacctaccaacagtagaaggattagtaacctagtaacagtagagttattgaacatatagtaacatcagactgaataaagataactagcaggagtcaggtgtggtggtgtgtgcctgtagtcccaggtactgggaggctgagacaggagtgtcccttgagctcaggagttggaggttgtaatgtattatgagcgtgcctgtgaatagccactgcactacagactgggcaatatagcaagaccttgtccn

SEQ ID NO: 103044 - DNA, 397 bp, Homo sapiens
  misc_feature (1)...(397): n = a,t,c or g
accaaccctgtggctacattactcgaatggcaggatgccctgtgtttcattccagttgggtctgctgccccccagggctctccatgatgagacaaccactcctgccctgccgtacttcttccttttagcccttatttattgtcggtctgcccatgggactgggagccgcccacttttgtcctcaataaagtttctaaagtatcanaaaaaaaaaaaaaaaaaaaaaaaaaaaaataaaaggggnaannggtaagaaactgtcacttanaaacantagggggctggggcttcctggaccttcaaatccactaacttgaacttacccccattggcaaaccgaggacctgagggtgaggaaaaccaggaccctcagttacccttctcttgtttctanacg

SEQ ID NO: 103045 - DNA, 373 bp, Homo sapiens
aaacttttggccttaaatttgtgttgtctttggattgtcaggttgtaagtttttaagatatcctggattctgatccttccttactagggaccataaatgtgagggtttactcctgggttctaggttctgttccattgatcaatgcctgtcctgtgtcagtactatatggtcttgtttattgtagttttgtcgttttgtttttttgttttttgtttgggagccaggatcacgccactgcactctagcctggtgacagagcgagacttcgtctcaaaaaaaaaaaaaaaaaaaaaggggttttttaaaaaactttttttcccccaccaatgggttttttaattagggttggccccccctcccaccactctagggg

SEQ ID NO: 103046 - DNA, 366 bp, Homo sapiens
tacttctaattttgttcagtatcaaaatgagaaacaggcctgattctccagcactcttgtcaacacaacttccccccatatttatatatatacacacacatatatatctttatatatatacacacatatatatctttatatatatatatttatatatatatctttttgcatatatacatatatatgtatctttatttcctttgaaataaagataaatatagctgatttctttggcttcgacacttactatttgcatgactaagggaagctagttaacctttctgtgactcatttccttgtccataaaatgggaatattaattgtacatgtcttatggattggtgtgtgaattcagttagcgagtgt

SEQ ID NO: 103047 - DNA, 372 bp, Homo sapiens
ctttcccacattgtattcattttcactggcatttgacaggccctataggtgctcaaactgtctctgactgtcctattagccagagcttgttggggcttgtattgtcattctctgaattgatttatttaataaccaagtatttattgagctcctatgtactggggatagaaatgaactcatcatcattcctgccttcaaggaatacagtatagtagaggaaatgagcacataaacaagtgcagtgccttgtggtgaacactgttagagtgagctcactcagctgtgcacgttggctcaggcctgtaatcctagcactttgggaggctgagatgggcggatcacctgaagtcaggagctcgagaccagcctggt

SEQ ID NO: 103048 - DNA, 414 bp, Homo sapiens
  misc_feature (1)...(414): n = a,t,c or g
cacaatgaccatggtaagttgtggtcttgtttgggatgtgtttttggaagtggaaggacagggctggtgggtaggttagaggtggagaagaagtgaaaggaaatgaatcaggaatgactcctttgtttttggcctgagcaagagtcattatttcttgatatgtgatgtatttgcaattaatcatattctgtagtccgcggatgtgtgtgtgtgtatgtgtgtgtgtgtgtgtgtgggtgtgtgcatatttgtgtgtggcctttctccagagaagaccagcttcttaaggcattcctctttgattaatcctatatttcacctatatgtggtcatgctctatgcaaaaattgctcatcggtcaccctatgaccgtgtgtgcctagaaacaagatttatttngttagcacagtgttn

SEQ ID NO: 103049 - DNA, 418 bp, Homo sapiens
tcaagacagagcttaaaatgaaatttactaatattttagaaagctcatttttaatgaataataaaagttaattatctttttgagctaacatgtgatttttaaaatcattttgactactgggtgtataaatgtgtttgtgtgtgtatgtatttatagatgttctttaaggtacccttgaaaactctacattatgtatgccacataatgacatttcagtcagtggtagactacatatatgatagtggtcccataagattataatggagctgaaaaatttctatcgcctagtgatgtcatagcctagtgatgacatatgtattgcaatacatcactcacgtgtttgtggtgatactggtgtaaacaaatctattgcactgccagtcaagtaaaagtacagcaattatgtcctgtacataag

SEQ ID NO: 103050 - DNA, 392 bp, Homo sapiens
cagactttcactctgtcccccagactggagtgcaatggcacgatctcagctcactgcactccagcctgggcgacagcgagactccgtctcaaaaaaaaaaaaaaaaataaaaaaaaaaaacggggggggggggacaaaaaatttttcggccccctgcaaatttaggattttcttggggggggaacaccgggggggccaaaaaggaaggaggattaaaattttcttggggggggggggggggaaaaaaaaggggactttttttttttggggggtatattattttttttggaaaaaaaagcgccccccaaacaagaaaaaggcttatttaaaaagtttttgaaacctcggggaaaaaaaccccccacccctctaaaatatgccatttttatatc

SEQ ID NO: 103051 - DNA, 381 bp, Homo sapiens
atgcctgcaggggtgattctgggggacctttagtcacaagggatctgaaagatacgtggtatctcattggaattgtaagctggggagataactgtggtcaaaaggacaagcctggagtctacacacaagtgacttattaccgaaactggattgcttcaaaaacaggcatctaattcacgataaaagttaaacaaagaaagctgtatgcaggtcatatatgcatgagaattcaactatttagtgggtgtagtacaacaaagtgatattaaattactggatctagtaacatgaaaaaaaaaaaaaagggggggcccgtttaaaagaaacaaatttaacggccgggggctggcaaggtaatattttttttttggggcccctaaa

SEQ ID NO: 103052 - DNA, 370 bp, Homo sapiens
cccacgcgtccgcccatttgtccggattattctggctaacacggagaaaccccatgttttctaaaaatacaaaacttagccgggggtggtggcacacgcctgtagtcccagctactcagtaggctgaggcaggagaatcgcttgaacccaagatcgtgccactgcactccagcctgggtgacagagcgagactcgttctctaaaaacaaacaaacaaaaatagatgagggatcagatgggagaatgactttaagctatatagaaggcagaatgcatgcatcatagacttaaaacatgttgttactgttgtggttggaagtgcaactacccatcatccgctagtcggtccttgctctacctgactgaataa

SEQ ID NO: 103053 - DNA, 413 bp, Homo sapiens
ccggtatctaattccttggtcgacccacgcgtccgataatttccataagaagatatatgtgtttacctgttaattttatcagggcaaattaaaacatggatagaatcatgtttctcaatgtgaagaaatatttttatttgatgaatattatatattttcacgtgcagtggcttctatgttttgggttgatgctgaattagggagtgatatttaccttgatggtaagttaaaaaacagttttcttttatctttcttgggtttttttttttttttttttttgggaaaaaaagttttttttttttcccaaaacggagggctagggaggccagggcaataatcccgcttaattgaatttttaccttctggggtaaaggggattttctgccctacccccccgggggggtgggaacacc

SEQ ID NO: 103054 - DNA, 411 bp, Homo sapiens
  misc_feature (1)...(411): n = a,t,c or g
acgcccaaacgtgcgaatttatgatattttaatgcaagttcgtggtacttcattatagcagcccatggaaactaatgcaaacctcatttgtaaaatgattaataccaattcattcaaaagagctaatatgaggattaaatgaaataatatattacacataaagtactttgtcttgtctgtccagaaaaagtgctcaataaatgttaatttttttaaaatttgattttcaaacacctcatccctgtgacggacttggatctttttcgtttcttttcttttccttgactttcctttttggtcttggtttttgctttttgttttttgatttgagatggcgtctcgctctgttgcccaggctggagtgcagnggcataatcttggctcactgcaacctccgcctcccaggttcaa

SEQ ID NO: 103055 - DNA, 395 bp, Homo sapiens
ttcctctgaaggggaacagagcagcagatcatttacatatcgaaggaggatgggaggtgttaggcaaagtttatagaggtctgcttgaagggcttgtccaaaaaagttggggggctgtgtctgaaaccctgggggaggacagtccatgtgagctgttgggaaatgttggtatctggatccatctgggtaaaagcaaacaggttttgggaagaagggtatagaggtatagtgaaaaaggcatcttttttttttttttaaaaaaaaatttttttttttcccccaggttggaatgaggggggggggtttttttttactaaaaactccccctccggggtaatggcccttttctttctccaaccttttaaaaaaggggaaataaaccccccccctcttcg

SEQ ID NO: 103056 - DNA, 401 bp, Homo sapiens
cccacgcgtacggacaggtctttatggtttttgagaactcacaatcatggcggaagacaaaggaagagcagagggacatcttacatggcagcaggcaagagagcgtgtgcaggggaagtcccctttataaaaccatcagatctcatgagacttattcactatcgcgagaacagcatgagaaaaacccacccccatgattcaattacctcccaccgtgtccctcccatgtcatgtgaagattattaccactcaaggtgagatctgagtggggacacagagccaaatgatatcacctccaatgggcagcctcattgcaggagcacatcccattggcatcatccaggaggaggggggggccatcattggcatcatgggagggccccccagctggggtgctggca

SEQ ID NO: 103057 - DNA, 1428 bp, Homo sapiens
cctgcccgcttcaaagatctcaacctggctggaacagcggaggtggggcttgcaggctacttcatggaccacaccgtggccttcagggacctgccagtcaggatggtttgctccagcacctgctaccgggcagagacaaacacgggacaggaaccccgggggctgtatcgagtacaccacttcaccaaggtggagatgtttggggtgacaggccctgggctggagcagagctcacagctgctggaggagttcctgtcccttcagatggagatcttgacagagctgggcttgcacttccgggtcctggatatgcccacccaagaactgggcctccccgcctaccgcaagtttgacattgaggcctggatgccaggccgaggccgctttggagaggtcaccagtgcttccaactgcacagacttccagagccgccgcctccacatcatgttccagaccgaggctggggagctgcagtttgcccacacggtgaacgccaccgcctgtgctgtcccccgccttctcatcgcgctcctggagagtaaccagcagaaggacggctcagtgctcgtgccccctgccctccagtcctacctcggcactgatcggatcacagcccctacccacgtgcctctccagtacatcggccccaaccagccccggaagcctgggctgcctggccagcctgctggtccccgcgtgggttataaggcgctgcaaccctggcccgcacagcgccttggacccgttggacgcccaccatgccgccccgagggccagcctctgagctgctgctgctgcggctgctcctgctgggggcggctgacccgctgtctggcagaggtggtcacagaggtgctgaccgtgggccaggtccagagaggaccctgcactgctcttctccacaaggagttgtgcgggacagagccccacggctgtgcgtccaccgaggagaaaggcctgctgcttggggatttcaagaagcaggaggctgggaagatgaggtccagccaggaggtgagggatgaggaagaggaggaggtagcagagaggacccacaagtctgaggtccaggaacaagccatccgcatgcaagggcatcgccagctccaccaggaggaggacgaggaggaggagaaggaggagaggaagagggggcccatggagacctttgaggacctgtggcagcggcatctagagaatggaggggacctccagaagcgggtggcagagaaggccagtgacaaagagacggcccagttccaggcagaggagaagggggtgcgggtgctgggcggggaccgcagcctgtggcagggggccgagagaggcggaggagagaggcgcgaggacttgccccaccaccaccaccaccaccaccagccagaggctgagcccaggcaggagaaggaggaggcttcggagagggag

SEQ ID NO: 103058 - DNA, 378 bp, Homo sapiens
  misc_feature (1)...(378): n = a,t,c or g
agactccctcagtgtcccaggtttttttgtgtgttcagagacctccacactcaacgaccactggtgctgcagaagggccggtgcttacattccaattaacagacgcttttcccatctaatgcctcttgccttctcctaacaccacctcgggagtgtttatgtctattctaagagaattgcttgaacccaggaggcagaggttgcagtgagctgagattgagccattgccctccagcctgggtgacagagtgagactctgtcccnnnnnnnnancggggggaaggaaaagaaaaacctacgggggaggggggggttttttttttttaaaaaccccccctcccaaagggggcccgggtattttaaaaacctgggccgggg

SEQ ID NO: 103059 - DNA, 288 bp, Homo sapiens
cccacgcgtccggagctctcgctggcccttgaaaatccgggggagagggtgtaaatctcgcgccgggccgtacccatataacaaaactgcacatgtatccctgaactttattcaaaaaagagagagagagagaaagagatgaaagaaaagaaggaaggaaggggaaagaaagaaattaagaaagagaaagaaaggaaggaaggaaggaaagaaggaaggaaggaaggaaagaaggaaggaaggaaggaaggaaagaaggaaaggaaggaagctagttctagatcgcga

SEQ ID NO: 103060 - DNA, 402 bp, Homo sapiens
caaactcttatgtagctcttcctatctctgggcactgttttaagtgacaagtattaactcatttaaactgtcacaacaggccaggcactgacgcatgcctataatcccagcactttgggaggcagaggtggccagatcaccagaggtcaggacttcgagaccaccctggtcccaggagacctcaacttctccagagttctagcctcttcttaaagggccagagtcatgggaacccagatggggtgagggggtctcctgccacggcctccttacaatgatatgacttggcataaatttggatactacctccaaatacagatttatggtctggcgtgatagctcattcctgtaatcccaacgctttgggaggccgagggaggcagattacctgaggtcaggagt

SEQ ID NO: 103061 - DNA, 422 bp, Homo sapiens
cacaagtctatggagacaggccaaaaagaatgtggagaagaaaactgataaatacacagaggtcctcaagacccatggactcctggtctgtacccaaaaaagctgttcgttcctcaaaaacaaaaacaaggcttggctgggaaaacaggccaatgccccggcaagaaaggttgagatcagatgttaggaagaactttcaggtaaagtatgagaactatggagtccatcagcagagatagtagtgaagtctctccccagggaaaattttaaaaaggttgaatcagctgttgtagagttctatttggcaatctcatggttaaatgacttccctttgagctctttaattattggcaataaacaacttctttaaaagttttaaataaaatagcaaccaccaccaaaaaaaaaaaaaaaaaaaaaaa

SEQ ID NO: 103062 - DNA, 418 bp, Homo sapiens
  misc_feature (1)...(418): n = a,t,c or g
gagtgttttaatgttgccctggggtttaatctcattgtcactttttagttactgaattcatagttccttctgcaatttgttattcttcccctcctcttcttctttcgatttattttcctttctctttctcttcccccttatttttttcctctttttcattttttctccctaccccacatcccagtttctatgcaaaaaccgctgaccaactttctatcactatagatttgtttgtattttctagacttttatataaaaagaattatactgtgaaaaaaaaaaaaaaaaaaaaaaaaaaaaaaaaaaaaaaaaaaaaaaaaagnannnnnnnnaaaaaannnnnnnngggggggggngggggggggggggnagggnnnnaagggggggggggaaaaaanaagtgaggagggggggggcg

SEQ ID NO: 103063 - DNA, 431 bp, Homo sapiens
  misc_feature (1)...(431): n = a,t,c or g
cagaggtcagccagctcctatcagagaagagcctgccagaccccaaccctgtctcttgtccatgccctttgtgatttcagtcttggtagacttgtatttggagttttgtgcttcaaagtttttgtttttgtttgtttggtttttgttttgagggggtggggggggatacagagcagctgatcaatttgtatttatttattttaacattttactaaataaagccaaataaagcccnnnaaaaaaaaaaaaaaaaaaataaaaaaaaaaaaaaaaaaaaaaaaaaaaaaaaaaaaaaagggggggccctttaaaaaaaaaaccttttcccccccccgggggggggaatttttttttttttttttgggccaaaatttttttttggggggggcggtttataacaagggggggggaaaaaaaccctcccttccccn

SEQ ID NO: 103064 - DNA, 411 bp, Homo sapiens
  misc_feature (1)...(411): n = a,t,c or g
cccacgcgtccggttgtccaggctggtttcaaagtcctgagctcaggcaatccacctgccttggtctcccagtgttttaggattacaggggtaagccaccgcgctcggccccacctgctaaatttaagggcaccaaatctcccggtgctttgagaccatctaacaagatattccgtttctcctcttcctggattcctggngaaccaaagagatgggagaccccctggtgcttgctgaatggcttcctaacacacactggtgctagttctgctcgttcttccgtgctaaggggcttcctcaagatacggggagaagtatcctctcctctgcagccctggtgctgagtcttaattgccagcagagtccactccctcttgttatctgccttttggacttcatctttccccactc

SEQ ID NO: 103065 - DNA, 405 bp, Homo sapiens
  misc_feature (1)...(405): n = a,t,c or g
cggacgcgtgggtagacatgggcctgctgttgatgtgcatttattggttatggctagcgtatgacttcttcctattggaccacacagagttgaaaaacattctttttaatataaagtaataagtgtgggctgggcgcgggtgctgacgcctgtgaacccagcactctgggaggccgagtcgggctgatcacttgtggtcgggagtttgagaccagcctggccaacatggtgaagcctcgcctctactaaaaaaaaggggccgaaattaaaaaaaanggggggggggaaaaccggggggtaccccaatttatccctcttgggaaaaaaataattttttttttgtggggccaaaaaataaaataacacggggcggctatcacccacagggggaggggaaacactcgg

SEQ ID NO: 103066 - DNA, 391 bp, Homo sapiens
acctgcataacatgactgacgtccgtgtatccgtttttgttatgagtaaacatagccttggcagctgtgctgtggcctgtgcaatggtgagctctctggtgtcagtcttatgttttgtgggcattttacgtgacagcgacgagagtctgtaggcacaaagtgacctttttgcgcactacttgaaccacacatacaccataaacttgcttttacggttttgttttggttttggttaactgtagcgtttgtttaggcctgacacggtggctcttgcctgtaatcccagcattttgggagaccaaggcaggaggatcacttgagcccaggagttcgagatgagcctgggcaacatggtgagacccctgtctctacaaaaaaaaaaaaagggggg

SEQ ID NO: 103067 - DNA, 438 bp, Homo sapiens
  misc_feature (1)...(438): n = a,t,c or g
ccggtccggaattcccgggttgtaccagacgtccgcacactgatacgatgatggaaggccgtatatcctttattgtgatgagtaaacataatcttgtggcctgtgctgtaccctgtgcagagtggaactactcttggggctaccccatacgtaantggcggtcgctctacatgacagcgacgagagtctgtaggcacaaagtgacctttttgcgcactacttgaaccacacatacaccataaacttgcttttacggttttgttttggttttggttaactgtagcggttgtttaggcctgacacggtggctcttgcctgtaatcccagcattttgggagaccaaggcaggaggatcacttgagcccaggagttcgagatgagcctgggcaacatggtgagacccctgtctctacaaaaaaaaaaaaagggggcgcgttt

SEQ ID NO: 103068 - DNA, 397 bp, Homo sapiens
  misc_feature (1)...(397): n = a,t,c or g
acttatcctttccatatgtgtgtgtctttagcatggccagggttgcatataacttactcctagttaagttaatatatgtaattcctgttgtttccagccacagtgcagtagtgcttttaggatgggcatctgggctgggcgcagnggctcatgcctgtaatcctagcactttgggaggccgaggcgggcggatcgagaccatcctggcttacacggtgaaaacccatctctactaannaaaaaaaaaaaaaaaaaaaaaaaaaaaaaaaaaannnngggggggggcccttaaaaaaaaaatatttttttcgcccgggggggggagagatattttttttttttggggcgcccttatttttttttgggggcgggtttttaaacacggggggggggggaa

SEQ ID NO: 103069 - DNA, 405 bp, Homo sapiens
gcgctctaaccaaacaattcatttcaaccatggttggccaggtggggtggctcacacctgtgatccagcaatttaggaagctgaggcaggaggattgcttgagggcgggaattcaagaccagcctaggcagcacagtgagaccctcatctctacaagaaacttgaataaaaaagagaagaagcgagaagcatggactctggtgaactttacctagaacagtcctggaatcatcaccagctttcagttattcattgccagaggatacagaacccttctacctgggaaatcctttgatacacgtacatacaaagatgacattgcgtaggctctacctgcttgtggttctgcctagtacctgaccaattacattgtcttgggtactttcaaaagtactttttcttatg

SEQ ID NO: 103070 - DNA, 391 bp, Homo sapiens
  misc_feature (1)...(391): n = a,t,c or g
gcatgcaccaccacacccagctaattttttattctttgaagagaaagagtcttgctatgtcacccaggttagtatcaaactcttggactcaagcaatcctcctgccttgacctctcaaagcgctggcattacaggtgagaaccaacatggccatcctatgaactgtttaagtggatgaccaccctacgcaagaaagaagccatctctcccccatttaattctgaagaaaagaagcaaaaccgctggtggaggtgcctgggccctgcctataacccttcttatatatacgcgattgtcccccccacccccccctaattatttttttatttttataaaaaaagtggcctttgttttgccaccgatttatggctaactctcctcgccccaaccn

SEQ ID NO: 103071 - DNA, 399 bp, Homo sapiens
  misc_feature (1)...(399): n = a,t,c or g
gcatgcaccaccacacccagctaattttttattctttgtagagaaggagtcttgctatgttacccaggttagtatcaaactcttggactcaagcaatcctcctgccttgacctctcaaagtgctggcattacaggtgtgagccaccatggccagcctatgaactgtttaagtggatgaccagcctaggcaagaaagatgccatctctaaaaaaaaaaaaaaaaaggcggggaaaaaaaaatggggggttttttttcccatggcctgggggcccccccccctgaaatttttgaaaaaaagggattccccacccccccccggtttttttttttttttttaaaaaaagagatcttggtttttacccccggttattttctaacctctggcacaaaacaaatcn

SEQ ID NO: 103072 - DNA, 396 bp, Homo sapiens
cggacgcgtgggagagggtccagagctcgtgagccttctggtcctggatcaacacccagttgggacgagtgaccacagggatgccacacagctcggatttcagcctctgatgtcagatcttgggtccactggctccactgagggcgcctagactctacagccaggcagctgggattcaattccctgcctggatctcacgagcactttccctcttggtgcctcagtttcatgacctatgaaacagagaaaataaaagcacttatttattgttgttggaggctgcaaaatgttagtagatatgaggcgtttgcagctgtaccatattaattggtgtcattgtttctgttgttttcgtattattattttttttttttaagacagagtctcaggccagct

SEQ ID NO: 103073 - DNA, 420 bp, Homo sapiens
caaatacttttaatgtggataaaataaaagttggaagtatgcctttcatgtggcaaactggaaattagtggttagtactccattgcagcattaaataccaattctttacaatagggtgcacatatcagatgctgtttttcccttaacctttgcacttttcattgaaaatgttttcaaatcaaatcttgttttattgggtttcacatgattggactaatacttacatatatgcttctttttaaggtatttagacattgacaattagttatttccttatgagccatagctttgaaaaaccattttagaagaaatttccattttttaaacaaaagtgttgggaggccgaggcgggcagatcacgaggtcgagaccatcctggctaacatggtgaaaccccgtctctaataaaaatacaaaaaa

SEQ ID NO: 103074 - DNA, 401 bp, Homo sapiens
  misc_feature (1)...(401): n = a,t,c or g
ctgcaatctgggctcagtacaatgtttttatctcccctgaggccagagcccaggcagaagaggagaattatatcacctaagtgcttgggcctgtggtatgtcacagttcttttttttttttttttggggggcccgggggggggggattaaattttaattttaaaagggttgggaaatttaacccaaaaacttttttaaaaaaggtttttggagggttccaaaaaaaaaaaaaaaaaaaaaaaaaaaaaaaaaaaaagagaaaaaaaaaaannggggggtgcgtctccagaaaacccccccactaccggcgcgtgccaacaaacaaatttatttttttgactcccccaaaaaaataggcggggggcgtgtaaaaaaagacgggacttataacacagacccca

SEQ ID NO: 103075 - DNA, 377 bp, Homo sapiens
attgaaggtgataatattaaccagtgtggattgactaaaaggcacatattacatgtgtgagaaacattagttcttcttccatccttgtgggtggatgtcagaagttattatggtaatctagtacaaatcaagcaaataattgtttttttttttttaaaaaaagggggcttgccattttgcccaggggggctttgaacccttgggctaaggggattctcctgccttggccccccaaagggttgaaattacgggggggagccattgggcctggccaaaaataggttttgaactgaagaacccccgatccaccatgtttatagaaacgggggagggatttttttttcctataaaaaaggccatttaaaaggtcttacagc

SEQ ID NO: 103076 - DNA, 380 bp, Homo sapiens
  misc_feature (1)...(380): n = a,t,c or g
atagatcttttatttcatgtcacagttgggtagagctgtttttattataggtgaaatggacgtgtggaaggctgagtgttgtggaatacactggaattctgtcttatttatttagatcttttatttcttttattctttaataaagaagcacttatcagaaaaaaaaaaaaaaaaaaaaaaaaaaaaaaaaaaagggggggcaataaaaaagaaaaaaaaaaaaaaaccccctggcaggaaaaggcgggcctttttttaggggacacgataatttactcccggggggccgtcttaaaaaattctgggggggaaaccccaaggcacaccccctcgggggggttgtggccaagaagnagagtcacaaccactccgaaaccaag

SEQ ID NO: 103077 - DNA, 417 bp, Homo sapiens
  misc_feature (1)...(417): n = a,t,c or g
cccacgcgtccgaagacaatgtatttcttcactgctcccactctgatttgggctatgttttattggcagggactgcatcccttcaagattttagcttcttccagaagtcccctcctccatgactctagctctcactaggctccagaaatactatttcttcctcttgccctcttaggcctagggtaacagctacctgctattgctaacctctgggtgccacaaaattgcttgttgggtctcataatcttgcatatacctctgtaagtagtccctacattaaagtcccttgaaccatcnnaaaaaagaaaaaaacaaaaaaaangggggggggggccctttaaagggaaaaaattttacccccgggggggggggaaatttatttttttttaggggggcaccaaaaaagactcgcggggg

SEQ ID NO: 103078 - DNA, 398 bp, Homo sapiens
cccacgcgtccgaccgtttgcagtggcgctatgttggctcactgcaacctctgcctcccaggttcaagcgagtctcttgcctcagcctctcaagtagctgggaccacagcatgcaccagcacaccagaccctttttttttttttttttccctttaaaaaaaaaggggggggaaacaaacaaatcaaacggttttaagggtggggggggggaaaaaaaaccttttttttttataccaaagggctgaaatttaatttggaatggaaattggggttgggtattttccccttagataaaaactacttttttggggaatggttgggccccaacacccccctgaaataaaaaggagggggcggggggccccaaaaaaaaaaaaagaataaagagcagcgcgggg

SEQ ID NO: 103079 - DNA, 390 bp, Homo sapiens
tagagacggggtttcatcatgtaggtctttctggttttaaactcctgacctcaggtgatctgcccacctcagcctcccaaagtgctgggattacaggtatgtgtcactgtgtctggccccagtttgcatatttctgtcttttattggtgtatttagaccatttaaagtttacaataattatgttagtgctatgtctgctattttatgattagttttttgtgtttcctgttgcttctttcttggtttgtttgggtttttttttttttttgtcttaaccttttttaaaatcccctttgatttttttggcggggttctaaaaaaatatctctttgcattggggaacaaaattacacgggccgccttagtatagtaaatgctaattatgaatat

SEQ ID NO: 103080 - DNA, 423 bp, Homo sapiens
agagacattgtttcgccatgttggccaggttagttttgaacccctgacctcaggtgatctgccagcatcggcctcccaaagtgctgggattacaggtgtgagtgccatgcccagctggatgattaagttctttatagcattttactcttgtataaattgctgaagtaaaaaatcttagtatgtaattttgtgcagttacacttgtatttctgtagcacagcttcttagaggtggtttccaggtcagtgggcatacatgtttttagtagagatgccaaattggcctccagaagggttggattgatttgcactcctgcagcaggaatgaggacacattctttctttgtctctggctaacgctagagtgtactgatattaatgacaagcaaaaaccaatttttttttctctttttgtctatagctg

SEQ ID NO: 103081 - DNA, 473 bp, Homo sapiens
tggccatggctaaggacttcaaatatgcttccactgcagtgccacaggctatggcagcatttctaatgcccattcttttcaggtttactgggcaggagggcccaaaccacctccctcccaggggagccagtgtgaaccagcgtttgcagaaaagacagtcgccaactgtctggctctatggaagaggagggaaggcccactcggcaactgctctctttcagcgcgcgtccctggggacaggatggaggggagggaacgctcaaggtgacactccagctaaagccaagagaagtcaagtgcaggacgagcaagttccaggcagtggcaacagctggtgcaagctctgaggtggccacagcctggcacttggaaaggagggcagagggactagtgcagcaggacaggggatggtaggaaaacaggagcctggagggagagggaggagacagtctgcagtgcctgctggctgggac

SEQ ID NO: 103082 - DNA, 469 bp, Homo sapiens
ccatagctttgtgcggtggaattcgtatacatgaaacccccagcacacgaagaggccaaggcaccttccagaggctttgtggtgcgttacgcaccctggaccgccagcagcagtgagaagggccgagacgatggcatggggcctagagcatgaggtagagcagaatgcagaccacgccgctggatgccgagagaccctgctctccgagggaggcatctgtgtcatgctgcgagggctgaggacggggccctagtctctggttttctggtcttaacatccttatctgtgtccgccacggaggtgactgagctgctagcgagttgtcctgtcccaggtacttgagttttggaaaagctgactcacgcccatccatctcacagcccttccctggggacagtcgcttccgccttgacacctcactctcagctgaataactcaagcttgggcatcttcagactcgaattcttgg

SEQ ID NO: 103083 - DNA, 432 bp, Homo sapiens
  misc_feature (1)...(432): n = a,t,c or g
gctaccgttctggagttcccggncgnnnnagcgtccggattacaggtgtgaaccaccgcgcccagtttatctgtctttttatttacctttactggagaactttttgtatattggtgggttggagttactcttgagacttctttcatttctttctttcttttttttttttccttcctggaaaaggatttttctttttccccggctggaaggccatggcccaattttgggttaattcaacctttggcttccggggtgggggggatttcccggcctaatccccccagcaggtgggaattacgggccctgcccccccccccgggtgggttgggtttttttttttggaaaaaagggggtcccccgggttaaccaaaaaggggctcaaaggggggggcctaacctccggatttgggacccctctgctccaccccccac

SEQ ID NO: 103084 - DNA, 383 bp, Homo sapiens
ttttttttgactagtaatataaaatgatttctatgtcctgccatatgcttttttctgtaagtctatagcatggatatactttcatgagagggatttagattcatcttattcttttgttaccttattctttttttttttttttggaaaagggattttttttttccccccggggggggggggggggggggaaaataaatttcttgcccctttggggccggggttaaagggatttccccgcccccccccccaaaagaggggggaccaaaaagtgggccccccctcccccgttttttttttttttttaaaaaaaggggggtttccccttgggggcccgggggggtttgaacccccgcccctgggggaacccagggccttggtttcca

SEQ ID NO: 103085 - DNA, 553 bp, Homo sapiens
gacgtggggaggtcatgctttagcgatgtttatttaattctcagtggatttgaaggaacatatcagggaatccaaagcaccagtgcagaatcccacagctcagggaacctgcgccaaggaggctttttgatagagggaaacagtaggaggaggcagctgggaatgaggatgggggaagactacagcagtgtgtgactgtggtctacaacaggcacgaacctcaaaaatagcgttcaacgtgaaaggaaccagacacaaaagatcacatattacgcctgtaatatcagcactttgggaacactgaggtggggtggatcacctgaggccagggagctcacaaccagcctgggcccaacatgtccctacttaaaattacaaggaaatttagccagggcgtgggtaccacattgcctgttaatcccaggctacttgggaagcttgagggcagggagaatctctttgaacttgggaaggcggaggttgcagtgaaccaaaatcacgccacagcactccagcctgggagacagagcaaggcttagtttcaaaaaaaaaa

SEQ ID NO: 103086 - DNA, 427 bp, Homo sapiens
  misc_feature (1)...(427): n = a,t,c or g
ttgtaacgttcgagaaanngacgnnnnnnntnatgcggatctgtcagccttggcctcccaaagtgttggattttaggcatgagctaccaccccctggcaatcgtgggcaattttttagtaacaaagtatttttaaattaaggtatgtacgttgctttttaagacataatgccattgcacactgaatgtagtaaagtgtaaagataacctcctttacatgcactgggaaaccaaataattcatgtgacttgctttattgctatgtttatttattgaagngggctagaactgaacctgtgatatatccctctttatatatacatatatgaacatatacatagatatgtgtgtataaatatacatgtagatgtgtatgcacatatatgtatatactgaagtatttaaaagtaagctgcacatatgaccct

SEQ ID NO: 103087 - DNA, 252 bp, Homo sapiens
cccagctaatttttaatttttttggagagacagagtctcaaactcctggccccaagcaatccgcccacctcggcctcccaaagtgctgggattgcagttatgagccactatgcccggacactgtgatacttttttttttactttttaatttataaagggacatcccttcacttgaggtcaggtttgaggcctgcctggccaaatgggcggagccccatttttattttaaatctcaaataaaataaatatttt

SEQ ID NO: 103088 - DNA, 436 bp, Homo sapiens
caaccttgcactcctgggctcaagtgatcctcctgtctcagcctccccagtatctgggattagaggtgtgcaccaccatgcccagctaatttttttttttttttttggaaaaagggcctggtttaaccccccaggcgggagaaagggggaagaataacagtaaatgggaccctcaccctcgggggcaaaaaaaacccccccccctcaaaccccaaagaagggggaacaacgggggcccccccccggccgggctaaattttttttttttttaaaactttttttttttttaaaaaaaggggaattttttttgggccccaacccaatttaaaacctggggccaaaaaaaaaccccccccccccccccccaaaagggggggaaaaaaggggggggcccccctgggcccccccacgttctttggaaaagggaaagaccccc

SEQ ID NO: 103089 - DNA, 405 bp, Homo sapiens
atttatttatggtagagacagtctcaccatgttgcccaggctggtcttgaactcctggcctcaagcgatcctcccacctcggcctcccaaagtgctgggattcagatgtgagccaccacacctggcctccctcattcttttttaccgtgacattcttttcacccttgggttgaagtcagtctaaaggacagtgttcctcactttatatctgtttgaggagacctttcccaacccctgtctccacctctgtgtctgcagctgcactgtgtgcaactgtacctcctgcctctctgcccagcttcttcacagcatccatccacctgacattgatcaagcctggtgctataccacattgagtgttgggcactggagctagagaggtgtgtggcagctccagcctgtaat

SEQ ID NO: 103090 - DNA, 463 bp, Homo sapiens
cggcccggaatttccggaacgaccatttcgtgttcccattgtgcctaatgccactgccactgttctgtactttaagaaatggctaaaatggctaattgtatgttatgcatatcttactataaatagatgaatgcacacacacatagaaactacacaatttcaaaaataaagaaaaggcaaaaaaaaaaaaaaaaaggggggttaaaaaaaggggggggaaagtaaaaaaaccctttttgttgggggcgggcccccttttttgggggggggcaccaggggggccaagaaaaaaaaacaaagggcggcccttgccttaactttgggggggagccaaacccccccttcctgtggaaggggcggctcctttctcttggggggggaggccttgtcttccattctcccctggaaagttccccttgaggggtttcaaaggggcctttatttaaaaaaactttgtgtggat

SEQ ID NO: 103091 - DNA, 428 bp, Homo sapiens
tttcgtcctagccagacagcacactcactttcagatctgtgtccctctcgctgccacccggcagcctcctaagcacagaggcacaggagcccagaggggtggcccaagtccctggtccagaggctggaatacccagagtttgctcagtcagcctagcacccagtttacaggcaaaaaggcaaagacaccctaacccccagtaacagcttccaggctgggctccgcctggccagggcggggaggggaaggggcaggtcaggaagctcagtccaaagtggacccagcatttgaattgcacgcccagcaggggcaggtcagatgggaccaagtgacaagaatagctgatgggagggaatgcttttacacacacacacacacacacacacacacatacacatacacaatctgctccaaggagtgttctgcaa

SEQ ID NO: 103092 - DNA, 436 bp, Homo sapiens
tttcgtgaaagaagcaaacccagagtaggaagatcaggtctttcatgtcgctccttttaattagacgccctgttaaattgcagcaattttgcactgtggttccctctcagcgtgtcgagaagctctgaagacgctcttaaccaaggaagccaggagttcattttattcttttcctccttattttcttccaaaggccaatttactttttttttttttttggaaattttttttttgggcgggggggggcgggaaattttgggataaaaaaaaccccttttttaaaaaggggggggggggggggggggggaattctagggccccccccattattttttttggggggaaaaaaattggaaaaaaaattattttcccttaaaaggggagaaaattttgttttctcaaccccctccccctggaaaatataccccccggggag

SEQ ID NO: 103093 - DNA, 422 bp, Homo sapiens
tttcgtttgatctcctgagctcaagtgatccccctgccttggcctcccaaagtgctgggattacaggtgtgagtcactcgcatggccaaaaagtgtatatttgtaatatgtaaaaattgctcataaactgataagagaaagcaacttacttctgaagtaactaactagttcttgggactttttccctctttgtgtttgtctttgaacagctctcatctttagatttcctttgagaaattcccttgtaactcgttggttctcgacattggctacacattgaaagcactcggggagatttaagaaatgctggtgcatgggtcctgccctcagagattctcatttaatttgtctggagtgtggctggagcatacacctttttttttttttttttttttttagaaaaggggctttctttctccccg

SEQ ID NO: 103094 - DNA, 426 bp, Homo sapiens
gtatgtgttcccgggtcgacgatttcgtgaaagcaggaaagatctaaaattgtcttcctatcatcacaaataaaagaactagagaagcggggggaggagccaagatggccgaataggaacagcacaggtctacagctcccagcgtgcgcgatgcagaagatgggtgatttctgcatttccatctgaagtaccgggttcatctcactagggagtgccagacagtgggcgcaggtcagtgggtgcgcgtgcgagccgaagcagggtgaggcattgcctcactcgggaagcgaagggggtcagggagttccctttcctagtcaaagaaaggggtgacagacggcacctggaagatcgggtcactcccacctgaatactgcgcttttccgacgggcttaaaaaacggggcaccaggagattgtgtcccac

SEQ ID NO: 103095 - DNA, 439 bp, Homo sapiens
cggtctggagttaccgggtccacccacgcgtccgagcagccacacagaggctgagatggttgggttagggctgggaaatgctgtgggtgtgggctgactgctgccatcacctctaagaatggggggctgccccaggaagcccagtgttccatgccctgctgctgctggagcccacctcacaaatgttaagcccttgccgccgcgttgctgtgaaccgttgtactccctagcataaaccctgtgagtgcactggtgcactgtccactagggaggctgagtacatcagaacccacagttggccgggcgcagtggctcaaacctgtaatcccagcactttgggaggccgaagcgggtggatcacttgaggtcaggagaccagcctggccaacatgatgaaaccccatctcccttaaaaatacaaaaaaattggccgggcatg

SEQ ID NO: 103096 - DNA, 348 bp, Homo sapiens
caggagttcaagaccagcccggccaacatagtgaaaccccatctaacccaacgttgtccaataaaagcatgatgtcagccacatatgtcatttggaatttttttttttttttttgaaacaaagccttgctctgccacccaggctggaaccacattaaaaaggtaaacggaaggctgggcatggaaactcacacctgtaatcccaccactttgggaggccaaggccaggagtttgaaaatagtcttggcaacatagggagaccccatctttacaaataatttaaaaattgacccagcaggggggcatatggctgtaatcccagctactcagggggctgaagcagggagg

SEQ ID NO: 103097 - DNA, 415 bp, Homo sapiens
atttttttgtagagatggggtttcgctgtgttggccgggctggtctcagactcctgacctcgggcggtctgcctgtcttggcctctcaaggtgctgggattacaggtgtgagccactgcatctgacttggtcatcatactttaaaaacagtatgagttcatgtctaattcttcctttgagccagaattaatattttaaattaaaaaaaataaagtaataatgaagataaaacttaagcattatgttttcttaggatactcaatcttctaaataacttgtgctaattatttagaaatgtttatattttatgttaaaagtgattgttaagagtcaaattgcttgtctattttttggctcattgcattctctttcagaggatcagtaacttaataagtatagaatatgcacaaccatt

SEQ ID NO: 103098 - DNA, 420 bp, Homo sapiens
  misc_feature (1)...(420): n = a,t,c or g
actcttatccatagtgcaacccctatgtggtccttcatgatgagggatgtcctcttctagactttgagtgtatttgatttttaaacatatttatagcacctgtctagtgtttgatgtcatgtgtttggtcattaatataactgtaaggtgaaaatctcacccttactggtagaaggaagaagagggtataaacatactttaacttgtggggaggcagaggccaatgtgggaggcagtttagtgggggtggccatgggcatgtgtctgtgcagtctaaagaatgatgtgtattttggcctagcacagtggctcatgcctgtgatcccagcacattgggaggctgaggtgggtgaatcacttgagctcaggatttcgagactagcctgggcagcgtggtgggaccttctctctaccaaaaan

SEQ ID NO: 103099 - DNA, 412 bp, Homo sapiens
accccagcctcccaccttctaccccagtttccttccttctaccccagagcctcccgccttctacccgagactcccgccttctaccccagcctcccgccttctaccccagcctcccgccttctaccccagcgcctgccaccttctaccccagcctcccaccttctaccccagcctgggcaacagagcgagacttcatctctgagggaatgaatgaatgaatgaaaataattttaaaaaatagaaataaaggaataccctacggatgaccaagagacagacaaaaaggcacctgaaagcataagcagtcgaccaatcatggtctgttattctttggtaacacggagctctcaaaaccagaaaacaagccagcagacacatctcagaacgacaggggtccttggtctaagacccc

SEQ ID NO: 103100 - DNA, 415 bp, Homo sapiens
  misc_feature (1)...(415): n = a,t,c or g
cctgaaatgacttggcccttgtcctgtgggagtgtttgccttggctaaaggcgcttgactccatgtgggtaaacaggagctggaataccttccccctactttcccttagtatagtgggcattacctccatgggagaaggctggctgcctgccagtgagattggagcagcactcctttgtctaaatgactggtcccattgcctaggtatccaccattataactacaaccctttgacctttggaggcttccttccttccttccttcctcccttccttccttctttctttctttttctttcttttcttttctttctttctttctctctctctttctttccttccttccttctttctttctttctttcgntttctttctcagagtccagcctgggcaagagtgagactctgacttaaan

SEQ ID NO: 103101 - DNA, 418 bp, Homo sapiens
tttcatcatgttggctgggctggtctcgggctcctgacctcaggtgatctgcctgcctcagcctcccaaagtgcaaggattacaggcatgagccaccatgcccggcataggcatggttttgacaatctgtctctttgtgccctggctccttctccaactcctctttggaggaggcacaggaggaggggtcatttcactgttcctgaaaagtagacatataacctacatgcaactgccgggtgataagggccccatctgtctggcatgacgttggaggtccacaaaggctgattagatgaatgctcagctctggggcctccccacagagctcacagacaggcgtgaaggaaagcaggactcttattagaatatgttcagagttttcactgaagaagcctcctgtgtgggccaggcactg

SEQ ID NO: 103102 - DNA, 393 bp, Homo sapiens
  misc_feature (1)...(393): n = a,t,c or g
tccgtctcaaaacacacacacacacacactcacacacacacacacacaaaataataccatgtgtgacaagggtccccagccaccaggccaatgactgggacccatccctggcctgttaagaaccgggctgcataacaggcagtgagcaagcaatactgcctgagctccgcctcctgtgagatcaggggcaacattagattctcataggagtgcgaaccctattgtgaactgcgcatgcgagggatctagggtgtgcgctccttatgagaattgctggctcacgcctgtaattccagcactttgggattccaaggggggcagatcacctgaggttaggagttcgagaccagcctgtccaacatggtgaaaccccatctctaccaaaaatacaan

SEQ ID NO: 103103 - DNA, 436 bp, Homo sapiens
  misc_feature (1)...(436): n = a,t,c or g
tggaattnnnnccgatgatcagtccggtgcttctgtaagaggcgtttgaacctgggcaactccctttgtattaggagctgggtaaaatgaggctgaaacctactgggctgcattcccagatggttaaagcattctaagtcacgggatcaggtaggaggtcagcacaagataacgggtcataaagaacctgctgataaaacaggttgcagtaaagaagccggccaaaacccaccaataccaagatggcgacaagagtgacctctggtcgtcctcattgctacactcccaccagcgccatgacagtttacaaatgccatggctggccaggcgcggtggctcacgcctgtaatcctagcattttgggaggccaaggagggcagatcacctaagggcaggaagtcaagaccagcgtggccaacgtggcgaaaccctatct

SEQ ID NO: 103104 - DNA, 395 bp, Homo sapiens
aggtggctcacacctggaatctcaatgctttgggtggccaagcctggaagatcacttgaggccaggagttgaccagcctggacaacatagcaagacccagacttaaaaaaaaatccagatttctctattgtcttttaaaaattggcatctcacagggctctcaacctggattgcagacagcacgaggctagggagggagagaaggagagaagaggcagctgcgtgtgggagaagagcttcgggtggggaagagtagggccacggaaccgctggagtaatctctgctctctggggtgcatggcgagcccttcctcacctcgccaggcactcgtgggtacaatgctgggttctcattacccttgtgggttggctctggggggtgggagggatgctga

SEQ ID NO: 103105 - DNA, 413 bp, Homo sapiens
gtttctccatgttggtcaggctggttttgttctcccaacctcagatgatttccgccccacccacaccccccaaagttctgggattacaggtgtgagccaccgcacccggcctttaagatgttactttctaagactaaataatatcccattgtatgtgtatgcttactacattttgtttatccattcagtcatcagtggatatgtgggtggctgcactgctcattactgccaccccaggaaggttgtatagtggttaaatctatgcttattacacctggatatatacacctggatataaactggagtttcttgtttgccctcttgtgtacttacagtgccaggtttttcttaggaatgtcccatctgcccttgttatcagcatctatctagctacactctgacaggataactgc

SEQ ID NO: 103106 - DNA, 404 bp, Homo sapiens
  misc_feature (1)...(404): n = a,t,c or g
aaaaaacacaggggggggtggttttttgcccccacccctgcttttggcagcaacacctttggggaccccttcaataactaactgttggaggaggacttccttgccccccaaaggatcctaacagccaattaacaaggttggggctgaaaccaaaaccttccccaggggggaaaccactttaattgtttgcttggtggaatgggccagaaggggctaaggccctgtcccaaacaataaaggggccttcaccggagggggcccttgtccccnaaaaaaaaaaaaaaaaaaaaaaaaaaaaaaaaaaaaaaaaaaaaaaaaaaaaaaaaaaaaaaaatataaaaatttaaaaaattannnnnggggggggcttttacataaaagacaaaccaccccccccccccccg

SEQ ID NO: 103107 - DNA, 405 bp, Homo sapiens
accagatttttttggtgggaagattatggagttcctggcaatcagggtcacatttatctgtgcacatatcagtgcatgagctcagccttcccctagtcctggcacatagtaggcactcaataagtattggctgaatgttaactgaaaggaaagaagacaactgtcatcacagaggagctttgtgttggggggcgggaatggtaataggagtaaaatagacaagaagccttcaaacaagtgaggatgggggaggggatctcaccagtgccaacacccagcctgacccctaccaagaagtcattgctggccaggggctcccggtcccacacagtcagttccaggcacatatgctgtagatcttccagcctcacaccattgtagacaaatgtatggttgtagtgaggg

SEQ ID NO: 103108 - DNA, 388 bp, Homo sapiens
  misc_feature (1)...(388): n = a,t,c or g
agggcatcgagtggatggtgaattgtgtcgtgcggaatgtgcaccggccgccgcggcagagggacatcacgtaggcgcagccgcgctgccgtcgggacggctggtcccctggtgctggaggagtggcctcctgttggctcccatgctgctgatctggggggtgggtttgctttgctttggggttcttctatttactttgttttctcgaagacaaactttcctctaaaaaaaaaaaaaaaaaaaaaataaaaaaaaaaaaaaaaaaaaaaaaaaaaaaaaaaaaaaaaaaaaaaaaaaaaaanannnnngggggggggggggcctaaaaaaaaaaaaacaaatacccccgcggggggggggaatttttttttttttttgtgcgccaata

SEQ ID NO: 103109 - DNA, 418 bp, Homo sapiens
gctcacacctgggatcccaggactttgggaggccaaggcaggaggatcccttgaggccaggagttcaagaccagcctgggcaatctgcattccctttctgagcctgagtttttctgtaaaatgggggctaccataatctcacctattaaagctgatgtgaggattaagtgagttaatagctacagagcacctgcacctgcaccgtgctcagctcatagtagttgctttttacaatgtgctaacccaaggtgaacaggctaggattctgcgggcgctggcctgccaggagctctcccgggagcctccaggagcgagggttgcaggaccccttccacctccctgctgggcgccgcgtgcttgcctggtggccaccggggggcggtgatgcgccgtgaagggctcccaggactgcagagct

SEQ ID NO: 103110 - DNA, 878 bp, Homo sapiens
  misc_feature (1)...(878): n = a,t,c or g
atgtttgcggtcatcttgacttttacccaaatggagggaagcacatgccaggatgtgaagacttaattacacctttactgaaatttaacttcaatgcttacaaaaaagtggaaaacttgagccaggcatgacttacacaaaattaatcgatgcagatgttaacgttggaaacattacaagtgttcagttcatctggaaaaaacatttgtttgaagattctcagaataagttgggagcagaaatggtgataaatacatctgggaaatatggatataaatctaccttctgtagccaagacattatgggacctaatattctccagaacctgaaaccatgctaatctcagatacagtcttgatggatttctttagtaggagcaatgaagaaaagtgtctccttccacctggcatccagaccaaatttgacccttgtaaatgacttagtcatttacaagggtcttactcagagtcaagtacgggtttgctttttttctgtgtagaatgttcatctaactgcaccttaaaaacacactgaaccctgggacaaaagataattactatgatctgtaggaatctggatatcattgacaaaatagagctgttttggaattttcctgaataagaggaggtgatgcaaatgtatgttgagtgtataaactcactggacaaaagtaagcctctggcttgctgagtttttgaagtatattttcaggtataataatcattgttctaaaattatataaaactatntgttatgttgntaaatcttgctgaaacaaattatgactatagtgcatgatatatagtaaaatataacccttggggttgatgtgtctatctaatnataataaaaactaatgagatggcactagtatttcc

SEQ ID NO: 103111 - DNA, 423 bp, Homo sapiens
ttcccagcctaatgtttccatggttgaaactttcttttccggggaggcccaggggacggcaaacttacagccggtatcaaaccttggaactaaaaaaggagtttctttttaatccttattggacacgaaaacgccggatggaagtctttcatgccctgggactgaccgaaagacaagggaaaatctggttccaaaaccgaaggatgaaggggaaaaaggagaacaccagggataacctgccggaagcccaaaatgaggaaaaggtggaggaaaaaggaattgaggaaaaggaaaaagaagaggaggaaaaggaagaaaacagggactaaccaaaaaagaaggaccccccccccctttaccacctcctttgaagtttcgtttttatggaccaaataaatgggaaagtttacgactgccttttgt

SEQ ID NO: 103112 - DNA, 489 bp, Homo sapiens
  misc_feature (1)...(489): n = a,t,c or g
gctaaaacatcaatgaatgtaaatgaaatattcatggcaatagctaaaaaattgccaaagaatgaaccacaaaatccaggagcaaattctgccagaggaagaggagtagaccttaccgaacccacacaaccaaccaggaatcagtgttgtagtaactaaacctctagtttgaactagctggaatagtcttctgcttcctaaatgttaataacaatggaattggagcatttaaccagcccagtatgacttccaaaagaagagacttatgatagagtcaagtttctaatacagaattattttaagtgttttgaacttaatttttaataacatgcatgggtccctctcactaatgtttcaacaatagggaaaaatgagaactatgtggacacttgtttcattggaaggttagggggaataatttctcatcactaggaatatagacaaatgactgtctgggcccacacagttaaccagnccattcttcacacn

SEQ ID NO: 103113 - DNA, 404 bp, Homo sapiens
gccaagaattcggcacgagcacttctaggaatactaggatatcggtcacacctcatatcctccctactatgcctagaaggaataatactatcgctggtcattatagctactctcataaccctcaacacccactccctcttagccaatattgggcctattgccatactagtctttgccgcctgcgaagcagcggtgggcctagccctactagtctcaatctccaacacatatggcctagactacgtacataacctaaacctactccaatgctaaaactaatcgtcccaacaattatattactaccactgacatgactttccaaaaaacacataatttgaatcaacacaaccacccacagcctaattattagcatcatccctcttcttctttttcatccttctgtc

SEQ ID NO: 103114 - DNA, 473 bp, Homo sapiens
ggcaacgatgcttgggtttgcaccaatgacatgttcaggctcgccctgcacaactttggctgacctcctctcagctaggcactcacgctgtttcctcctccctcctcttcccaatactattcccactcctccagatgctccaaatatcatgcacaaatgagcagggccgcggtgggagtgggcgcagtgcgctgctgccactgaggtgttgtgcatgatgtttggatgctagactagttgcatctgacgggagaagtttgtgttgtaccagcgcatgccttggaaagacttaagtaatgcaaaaggttgtccttttttttttttttttttttaaaccaacggccaagtggctttagtaccccaaaaaagtgagggaaaaagcagttgcctaaccgcccaaactttgattggtccaaaggttcaaaggccctaggatccattaaacccccaaaaatttttttaccggttaaaat

SEQ ID NO: 103115 - DNA, 489 bp, Homo sapiens
ggtgacatcatccacaacgagaacatgaggcaaggccgggacaagtacaagacgctgcggcagatccggcagggcaacaccaagcagcgcatcgacgagttcgaggccctgtaacagccaggccaggaccaagggcagaggggtgctcatagcgggcgctgccagccccgccacgcttgtctttagtgctccaagtctaggaactccctcagatcccagttcctttagaaagcagttacccaacagaaacattctgggctgggaaccagggaggcgccctggtttgttttccccagttgtaatagtgccaagcaggcctgattctcgcgattattctcgaatcacctcctgtgttgtgctgggagcaggactgattgaattacggaaaatgcctgtaaagtctgagtaagaaacttcatgctggcctgtgtgatacaagagtcagcatcattaaaggaaacgtggcaggacttccatctgtgccatact

SEQ ID NO: 103116 - DNA, 427 bp, Homo sapiens
gtccaatgggaagaatcgagcgggcgcaaacacccgatcagaatattaatacgatcgtaatacagccacaccaaattcgtggtgtatttggtaaactttactgtatttttttattttttaaatagaagagctatagaatataatacataaggcgaacaggaactttgatcccctgtttcttccaaaggcagtaatgacaataaatacatatatcacttgaagctaggagtatttgcactttgcagcagtagtacccaaagggctgccttttgtaaacacgacagtcactggaagcacagtggggtcgtttcccggaaatggtgaaactggcgtgcctctaatcatgaaatatggcattgagctgggcactcatgactagctcatgatgtgaatggctatcgcaggacataatattgcctatggggat

SEQ ID NO: 103117 - DNA, 437 bp, Homo sapiens
  misc_feature (1)...(437): n = a,t,c or g
acagtgttcgngnnngttggctcaatcctccatagcggcctgaatacaagggacttcagcgttgagttgcttatttctgccgtcaaagagggcctggattttcatgggcgagggcagctcatctacttcaatcatgttgaaggcaaggccttttttcccaaagcgccccgtccgccctatgcggcggaggtaggtctcatagtccggctcctctccttgttttacagggagatcaaaggtcacaacaattgtgacctgcttcacatcaatccctcgggcgcaaacattagttggtatgagaaccttctctttcccatcccgaaacctctgaatgatggaagctcgctggtccacggtcagctccccgcttaacaaagacacctggtggccatcctgtatcatctccacggtcaaccacttatcggttcgacgaggtt

SEQ ID NO: 103118 - DNA, 632 bp, Homo sapiens
agagaagttctcataacaactaatgtttgcgcccgagggattgatgtgaagcaggtcacaattgttgtgaactttgatctccctgtaaaacaaggagaggagccggactatgagacctacctccacagcatagggcggacggggcgctttgggaaaaaaggccttgccttcaacatgattgaagtagatgagctgccctcgctcatgaaaatccaggaccactttagaaagtcctaaattctgaagtccgcgacctttcctccagccccccatctaaacaaggcaggctctgatgatggcctgctggaactctggactggcagatttctctgatggaaactcaaaaggtcccatggttcaaattgtcctgtgccccaaagcccatggatgtggctggggagcaggggagaaggaacaccttccaggacagtggtacttaaccttgtagaaagcaataagcgctgtccccagggaagtgcacacaggcacacacatgccatttggaatataattttcacaggttggcagactgagtgtagcacatccaccgacctttcagggaagtaggttaagtgcccctgtgttaggctaactggggaggacagggtgaggaagatgtgttaaggccactg

SEQ ID NO: 103119 - DNA, 435 bp, Homo sapiens
  misc_feature (1)...(435): n = a,t,c or g
tcctatgacnacggctcatatgtgagtccttcgnagcgccgcatacatgcctttcttttccaattattcttttctggctcgcctcagccaatatctggcactcgcatactttcgggagccacacatacccagcggccacaaactcccaagctgctcaatctcaaaacttttcagcctgccctgcaagtgtcatcaagacaggatccccggagcacagggcagagagtccaacctctcactggcggggctgggaagcctctcctttgcggcggaggagaaaggaaacttgggtctgctttttaggttcgggaccggattgtttggggttgcctggtccgtatttaaaggcccagctgttgctgttgacacccgcaccgactggaggggacacttctcctgcctctggttctgggcgcgcactggatacttgctgct

SEQ ID NO: 103120 - DNA, 412 bp, Homo sapiens
  misc_feature (1)...(412): n = a,t,c or g
ggctgcgtgatgctacagagccgccgcanacacgtgagggggattggggcagaagctttggatgtttaaaggggacagngggaggcgaacctgggcgccagttggcctaagctaccaacaggccactggggtaaagaagagggagtggaggatgggtgcttcgggggatctccagtaaacccgggtagtattccttaccagggcattggaagagaggaaaagagaccagaggattgggggagtgggaacaggacatcagacattgctgatgcgcacactaagggcactgccctccttctcagcttgctgccttaatgactcctccaacttgagcttttcagggtctccgtagcgtacagtgctggtacggaggccactaggagaggccactttcacaacttggtcaaaaagg

SEQ ID NO: 103121 - DNA, 430 bp, Homo sapiens
  misc_feature (1)...(430): n = a,t,c or g
naatgctacgagcccccgcaatacattgggtgtgataccctngntacctgtgatttggatgagcaaaatcagtaactcttggggagagacggggtgtggggccccaagggggaccccatgaactggctgctccacagtaactatcacaggctcttaaaaaaaaaaccaaaaaaaaaagggagggaaaaaaaaagtctcaaaaggtcctcaggggtccaatccccagcccccagggaacggaacaccccaggagctctaccccaggttggggatgttgccacggccaccggggggcgccacaataccctggggggggcggggggaaatgttgtcataaatctgaccaccaaacaaactgatcccaaacgggggcaggtcccgaacaggtggggcctgttgcttgacagaaaacatctggcccgaggaggcc

SEQ ID NO: 103122 - DNA, 406 bp, Homo sapiens
aatacatggtgtgtgtgtgcacatgtgcgtgtgtgcatgtgtttgtgtgtatgcatgtgtgtgcgtagggggctatgatgggagaatattcctagccctttcctctacagtcccatctatggtaaatataatgtagatctaaagattatggcaaatgaaactcttaagtgatttagatactaaaaaggcaaattaaagccattcttttcagggctgaaggcctaaagtaaaatttatagctatagcacaaataaatcagtttggccccaaaaaatcatattttccttaaatttggctgaaaccccacttctttgcaatgaaaaatggcatacaattaaaactttccaccagtaagtaagaaagaagtggtttaagagctactgggtcacagcttttctggcttggg

SEQ ID NO: 103123 - DNA, 418 bp, Homo sapiens
cgatgtttgacctccgaccggccgcaatacactgcccttttatgtgctttaagtggacattctgactttgcagtctatactttgtaagagagcaggtaactctagcacagaagaaaccatgtaatgcggaactggggaggacttcagtggcactattccatttttattgatccagactgttgctttcaatcctgcattgaggcctccttggatgtcggtttctaatgtgtcaccgaccatcacacagtccccaggttgtactccgagaagattgcagcagtaataaaatatggacggtgctggtttctcctctctctgctctccacctacaacaacagcgtcaaaataggactgacaggcacaagcctcaatcttctccctctgggtctgtctgtccccattcgttaatagaagtagg

SEQ ID NO: 103124 - DNA, 439 bp, Homo sapiens
  misc_feature (1)...(439): n = a,t,c or g
gacagattgacgcgtangatgngnggatcctccagagcggccgcaatacaatgtgggaacaaaacaataaacacctttattacatgggtgaagacaaaacacggatttatttgcctttgcgggccttgattttcctaagagaaaactccaactctttgccctctatcacataggcatctgctggggcacactgtcccggccttgaagcgatgcacgcaagaaccttgccctgctggaactgctcctccacgagactgctgattttggcattctttttcctttcatcatatttcttctgaatttttttagatcgatttttgtataaaatctcttcttcctcaggagtcaccttggctcccttcttgcggcccaggggcaacgcatagtgggactcgtaccactgtcggtacggggtgctgtcgatgatcacgatgcaatt

SEQ ID NO: 103125 - DNA, 407 bp, Homo sapiens
aataccacttcctctcatcatttcacaataccatgtcttgtattatactcatgtaccagcacacatactcatatacatacacatacacacacacacacacacacacacgtacgtgtgttttcctatattccttcccaggatgtcaaagagggatgcattccagcaccttctgtcttctcttggtaaaaaacaaaattacaaaatctgaaaagttccaaacagacacctatggaggcgtagtgatacagcagagtggaaaccaaaaaggtcttacagacccaaaactccattcccataattggaaaagagggacaatattaactttgcctatacttctagggggattaaatgagacaattaataggaaatggctttgtaaagaaccataggtaaaatagtgctattat

SEQ ID NO: 103126 - DNA, 410 bp, Homo sapiens
aatacatggggggaggggaatctaagttattgtctagagaaaactgtgtatcttggagtgggcaaacacgttatcacctgtctaggattatggttatctttgaagtctagaacaagattcaaatgctatagctaggtccaaaagctgagtaagcttcttcaagatgaaaccccaatagcattagattgacctcttgttgttgttgttgctgctgctgctgctggaaaagcccttacaatgtttacaaccgtctgttaagaacagggtttacctttccctgacctaatcagcctcatctgaggctttatcttgcacagggtatgccctcaatgtctgccacctattaatcatgtttgtgccgtgaggatacattctgttaagacagcagcctcaaaggctctccaactcag

SEQ ID NO: 103127 - DNA, 375 bp, Homo sapiens
aatacatgtgctgtcagtgttctagattttggccagtgagataagcgtgaagcggtatttcattggtgtcttagtttccatttccctgctggctgttgacataggacatgcctagctaatttttgtatttttacaaaatagaaaatagtaaaaatggggtttccccatgctggccaggctggtcttgaactcctgacctcaggtgatacgcctggctcgacctcccaaagtgctgggattacaggtgtgagccaccgctcccgggccaggagcatctttttatatccctatttgccatctgtataccttccttggagaagagtgtgatgagatctttgactcaatcattaattgggttgaaagcgatcttctagc

SEQ ID NO: 103128 - DNA, 374 bp, Homo sapiens
aatacattggggggatgggccaggcatggtggctcatgcctgggaagcctaggcagaatgattacttgagtccaggagttcaagaccaacccgggcaacacagcgagaccccgtctctccaaaaaggttttaaaaattagcctccctctcctctcctctcccgtctccacgtcctgataaatcgacgccattgattttccttcataacatgaactaggaatgtctgcttatcaatataggctacttagcctggtttttcatctttagcccaacagttcattaattggaactttaaaaatcaaagaatccaggccaggcatggtagctcatgcctgtaatcccagcactttgggaggctgaggcgggacgactgc

SEQ ID NO: 103129 - DNA, 381 bp, Homo sapiens
aatacaggtttggattcaaatatttatatatttacacaatacctatttcatcaaaatatattgtatgatatttaataaaattaaatacataaaataaagtttcaacactatttatacaaacccctagaaaagcttctttttctttataaggctgttggcaatcgaccataaccatggaaaggaaataataacctttgggtttactctttcaccagggatggatggtatgactaagacagttctggatgagttgtgtcactggaaacactgttttatacaattagacactttgatgatttttgaggatctcatctcagtcactttcagattcttcatcttcacctatcggatatgactggatattattctgagtggacattg

SEQ ID NO: 103130 - DNA, 370 bp, Homo sapiens
aatacagtgcttctctaaagtgaatttcaccaaacacaatacacggcacctaaaactggctaagctatctaggtaaaaaagggagtaggaaagactaagtccttcaccttctccattctattaatttgattgcccaaaccatcaacactgtcaccagctaccaactaaaaaaagaggaaaagctcttggtcgaatgctcagaattaccactccagggaagatctgtccgtttgtctttcgcggaaaaaataacccccacaaccttctctgcccaaacaacatggagtacgcctgcagacgcctaccttaatgaaaccgatatccttcgcgtactgacggaaacactggcggcacatattgaggccatatt

SEQ ID NO: 103131 - DNA, 629 bp, Homo sapiens
ggcacgaggtgatgatgaccaccgaagcagtgacaggaaagacggggttcttgaggaacaaatagaacgacttcaggaaaaagtggaatctgctcacagtgaacaaaagaatcttttcctcgttatatttcagcgggttatcatgatcttgaccgagcacctagtacgatgcgaaactgatgggaccagtgtattaacaccatggtataagaactgtatagagaggctgcagcagatcttcctacagcatcaccaaataatccagcagtacatggtgaccctggagaaccttctcttcactgctgaattagaccctcatatcttggccgtgttccagcagttctgtgccctgcaggcctaagggtcattttttcctcatgtcaaggttttttttgatatcttaaaataatttgtcttattttttgatggtttgaatgcttgctttcttgtagtatcctttcacttcttaaaggaaacaaaggggaagaggacagtgaatgaacatggcattacttttaattgccctgaaaagcaaatacttcctaacggcagtaatgtgactatgaccatgatatattatatatgtgacagatacaaattctctgtgatcagtttgttattttttttct

SEQ ID NO: 103132 - DNA, 377 bp, Homo sapiens
attacaggaggggaggagggcccgttgggaggcccagcgggcaggaggaacggctaccgaggctccagcttaacggtatttggaggtcagcacggtgctcacagaagccaggaactcgtccagggaggcgtgcaccgcaggggtgaactcggcggggaggtgggcggccagggtcaccagcaggcagtggcttatgagcttgaagttgaccgggtccacccgaagcttgtgcgcgtgcaggtcgctcagggcggacagcgtgttgggcatgtcgtccacgtgcgccacggcgttggtcagcgcgtcggccaccttcttgccgtggcccttaacctgggcagagccgtggctcatggcgaattgctgtaagtttgttc

SEQ ID NO: 103133 - DNA, 379 bp, Homo sapiens
aatacaggcgtgtgtctagaaagaatgatagaaaataaagagttcttgagttcaagagaacttcccagaaggaggtggtgggccaagaaatccacctgcctgcttggtggcggctcgtgaaggggcaaggccgagaatcttctgaatgttctgtcgaatcgacatagtacagagaatatacaggaaaatgaaggaacagtctgtggtgtcatctcccagcagatttcgatgagacagtccttggatgtaagaaagaggggtaaaaggaagctttgccaccactctaccatcaaatatggaattgaacattcccattagggcagtaaaacaaaagccaatagcaaacatggatttcattcgaaccattgatagatctctg

SEQ ID NO: 103134 - DNA, 381 bp, Homo sapiens
  misc_feature (1)...(381): n = a,t,c or g
aatacagtgtgtggttgtgtcgattcaaattatgtgttttttggaaagtcatgtcagtggtagtaatataattgttgggacgattagttttagcattggagtaggtttaggttatgtacgtagtctaggccatatgggttggagattgagactagtagggctaggcccaccgctgcttcgcaggcggtaaagactattatggctataggcacaatattggctaagagggagtgggtgttgagggttatcatagtatcttttcttgtacttctgagagtgttatttgttaccctacttttgctctatggccctgttagggccctggatgattcctctgttttttatcttcttcagcttctgtttcttctttgttatgtttcn

SEQ ID NO: 103135 - DNA, 392 bp, Homo sapiens
  misc_feature (1)...(392): n = a,t,c or g
aatacacctgtctcatcctgtgacttagaaagcctcaaccccctgggaatgcagtccagcaggttgcagcctcagtttacccagccccggttcaagatggagtcactctggtttgaaggcctctgattcacctggagacacattccggctgtaccaggcctccaccaggaaagctcccatgataaccacaattacggcagccagacccagtcgtacgaagttacccagggagtagttgctcgatgtggtacctgggggaactgtcaccaatatctcaagctgatcactgggttctgaggcccagaagggagactttgtctggtagtacatgcagctgtagttcccagcatcgtcggctgtcacgtccaccagagagaagtctatctcctttn

SEQ ID NO: 103136 - DNA, 371 bp, Homo sapiens
ggtaatgctgttggtctgaatctccaccggatcaacttcgacaaataccacccaggctactttgagaaagatggtatgaagcattaccacttacacaggaaccagagcttctgcccaactgtcaaccttgacaaattgaggactttgttcagtgaacagacacggttgaatgctgctaaaaacaagactgggactgcacccatcattgatgcggcgcgatcggtctactataaagttctgggaaagggaaagctccctaagcagcctgtcatcgtgaaggccaaattcttcggcagcctgatcttctgctttcggatctggatcctcatcgactagaccaccttccggtcctttgagggcttggccttcgc

SEQ ID NO: 103137 - DNA, 373 bp, Homo sapiens
aatacaggtgtgttcgtgtcttagtttttaacagaaaagttttaaaagttaaaaaataataattaaaaaatttcaaaacaaaaaagcttacagaaaaaggatataaagaaaaaaacatttgtacaactgtacaatgtgtgttctcagcaaggtgttataaaaatgtcaaaaaattttttatttttattttttaaagtagagacaaggtctcgttatgttacccaggctggtctcaaattcctgagctccagcaatcctcccacctaggcctcccaaaatgctgggattactggcatgagctactgtgcccatcctcaaaaagttttaaaagttttaaaatttataaagtagaaaagttacagtaagctaaggg

SEQ ID NO: 103138 - DNA, 380 bp, Homo sapiens
aatacagtgtgctgtgggtagggagcaagggcagctatactgtcctttcagaagctctcctgggctgtggaaagtgcccacgagcctggcagatcacggaggaaggaggcagaagttccaggcccagaacctgggtcccaggctgcattcagagaggattccttgaggccctggcagccaggaaccctgttttatgtgccccgaaggctgtaatgaaaacattgatgaccacagtgaagaagaccaagatggtggctgcgttgttgagctggttgagtcgccactgcttttctacctcattcaggttcagccgtgcaatgaccacgagcaggacaccgatgaccacctgcaggagcagagagaggctgatgagggtgacc

SEQ ID NO: 103139 - DNA, 373 bp, Homo sapiens
aatacaagctttacattttttttaagtttcttttatttataaaagaaaaaaagcaactcttcaccattctgcatctccaatggctttggaaaatatataatctcttccattaagattcataatgccatccttgagatgaaatttccatttgtttttacttctgtgtatctaaacaaaaacaacattttaaaaattgagagatacaatcagaaaacagagaaaacaagtaacaaaaaacccatacacacacacacgtacacacacacccccccacaaaacagtatttacagtattgtatttgcaaattggtttgtttttgtagaacaagggtctcctatgttgtgcaggctgggctcgagctcctggcctcacg

SEQ ID NO: 103140 - DNA, 544 bp, Homo sapiens
  misc_feature (1)...(544): n = a,t,c or g
tacgctcgcatcctctagagcggccgcactacatggccttanatgtatattacaaagaaagaagaatggaaaatgagctaagaacccatctcaagaagttgaagaacagcagcaaaataaactcaaagagagctgaagggagggcgtgataaagagctgacattacaataatcacaagatagggtcaacgcaatcaaagctggtgctttgaaaagacaatctctggtaactcctattcaagcagtaacaaaagagagtaggtataaatagccaacattagccatcagaacatcactcagatcctgcagacattttgcataaaccatctacggaaaatagatactggtttcctgtagggctacgcgtggctggtgagtggtaaggggacacttttcactgtgtttcctttcaggttctttctttctttcttttcttttgaggaggagtcttgctctgttgcccaggctggagtgcaatggcatgatctcggcttactgcaacctccgccttctgggttcaagcgattctcctgcctcagccttct

SEQ ID NO: 103141 - DNA, 369 bp, Homo sapiens
aatacaggccatgtacttaacatttaattctaactaaattataaataattgatactggattctttcctgttacacagaagtcagggcagagtataaccactgaaccactgaaatgggagtggtatttccaaaaagaaggcaaatggtctccaaataaaaatgtttataaaataaaacttagtagctttttttctgctggtgggacatgtgagaaaaaaggtgcagattcagagtttgaatcataacatctgctgtacttacagtcaggaacttgtatccaagctcagagaccattcctgtaatgctcccaataatcatagaaccaaatgtgtgaatttgcatatccccactagttgcccccagcacccc

SEQ ID NO: 103142 - DNA, 774 bp, Homo sapiens
tcactagtccatgtggtggaattcggccaggccattgctcggcgtctgaaaccattcggtgtccagagatttctgtacacagggcgccagcccaggcctgaggaagcagcggaattccaggcagagtttgtgtctacccctgagctggctgcccaatctgatttcatcgtcgtggcctgctccttaacacctgcaaccgagggactctgcaacaaggacttcttccagaagatgaaggaaacagctgtgttcatcaacatcagcaggggcgacgtcgtaaaccaggacgacctgtaccaggccttggccagtggtaagattgcagctgctggactggatgtgacgagcccagaaccactgcctacaaaccaccctctcctgaccctgaagaactgtgtgattctgccccacattggcagtgccacccacagaacccgcaacaccatgtccttgttggcagctaacaacttgctggctggcctgagaggggagccgatgcctagtgaactcaagctgtagccaaacagtagagatggagggccgggaagcaaaccgtgccctggtattgtcagacacacccaggcttgatttggatccacaggcagagccaagggaaggtgtgattctctgaggaaagagtgattctgatatatgtacttgtcacattggtgttggacacatttgcgccaaaagtatggtaattctattattaaataattctctgagaaaaaaaagaattcatgcactccaattagggtctcgatcgggcctctc

SEQ ID NO: 103143 - DNA, 385 bp, Homo sapiens
  misc_feature (1)...(385): n = a,t,c or g
aatacagggtgtgaaggggttggagtgcacaggtagaggtggctggggtcttcactgtgttggggagggtctcatcgccttgagactctgcagcgtctcctcagaggccttgtcgggaagcagcacctccacagtgtagctgagcttcttggcatgcatccggctgtaggtgttgtcgaagcgcangacatagacgccagcctggaggcaggtgaggctcccatcctcaggcaccatgtgggcattgtagcgctggctgggcagcacctccgtcatctccctagcactctgctgctcccccatcttggtcttcaggaaaaccccaaagccgatgtccccaccatctgaagcaaactgccacctgagcacacaggccgggaacagg

SEQ ID NO: 103144 - DNA, 373 bp, Homo sapiens
gataccgatcgtgagcttcagggaaccatgagtgtattttgtacatagtacgcactcaatagttgtctactgaatgaaacgtgaactcacacgaggaagaccagcttatcgagctaacacttaaacttcctggatttgtctaaacctcaggcaagaaaagagaaacctcttccagtaccttcttcatgggtctgatgcagtatgacctccggctgtgtgtgtatagagtttccagggtggaagaatggtgaaaaaagaatccgaggtttgctctgcttcagaatatgctggaggaggtcatagagcacatcacctggaaagaataaggataggggaatcgagacatggaaagatgtttttccaacaacgatct

SEQ ID NO: 103145 - DNA, 361 bp, Homo sapiens
tttgtttacctactcaagcctcagcaatggtggacacccctcccccagccttgctgccgccttgcagtttgatctcagattgctgtgctagcaatgagcaaggctctgtgggcataggaccctccgagccaggtgcaggatataatttcttggtgtgccgtttgctaagaccattggaaaagcacagtattagggtgggagtgacccagttttccaggtgctgcctgtcacccccttctttgactaggaaagggaattccctgaccccttgcacatcccgggtgaggcgatgccttgccctgcttcagctcacgctcagtgagctgccccactgtcctgtacccagtgtctgacactcctg

SEQ ID NO: 103146 - DNA, 463 bp, Homo sapiens
tatacactgttggtatgttcaaaagttcacaagggactcaggttataacataacgagtaagtcctccccctcggacctctgatagcctccggcagtgtcgtaaaatattcagtaacacatgaaacttcttgtcagctttcaaagttgtgaactcctttatgtcagcttccactataaaataacgacctttggtatccttcgtttcttcatcaataaatctgtgatagagatttctggtcacagaattcatagacttttttggctgatgtaggattttatatttactaattactgccttgttgatttctttaataacatcattaatttgattataggttaagcgggatttcatgtacgaaggaacaccattgaactcatcacaagttataaatggcatttccttaatacttctttgctctttgggaggcttctttacgggttcagggtcctcaactttgattgg

SEQ ID NO: 103147 - DNA, 475 bp, Homo sapiens
aatacatggggggggtggggagacaaggctgctcactgctgccttgacctcctgggctcaagtgatcctcctacctcagggcctctacagtagctaggactacagacaggtgaagtcatacctggctaatttttttttttttttttttttttttcttggccgcctctccccttcctttttcgcgccatggttttttttaccctctgggcttcgatttgacccccgggtttctttttttttgggccccctaaaggtttttttgttcgcccctctccccttttcctccgttcttatttccttctttttggtccttctttttttttttttcttaaaattttaatggggtgttttttctattatacacctccgacagcggtttaccatttgattgggggttagcctcctccctcccgggcaacctgccctttcttttttttttttggcggatcacgtaccaaatggtcttctttttttt

SEQ ID NO: 103148 - DNA, 479 bp, Homo sapiens
aatacatgtgtgtgtgtgtgtgtgtatacagggttttgccatgttgcccaggttgctcatgaactgagctcaagcaatctgcctagctcagcatcccaaagtgctgggattacaggcataagccaccatgcctggcctgggtttgggttttaagcagagagggtaagagtatgacctcacttcctgaaggcagcttctgctaccgctgtcatcagcttccagctgttcctcacttctcctttgtaatcattattagcaaatttgcaattctatgtttaatagtgtgtctcccagccaaaccatgagtgcctggaggcaaccccatttggtctagcaggtgtgagcctcccaacaaatattaactgaatggacgcatgcgtgtatagtctcggcaaagacaacaaaaaagacatacgaatgtgccacagccgttagatactaagcgtcacggggacgttaagataatttgatcgaagcac

SEQ ID NO: 103149 - DNA, 517 bp, Homo sapiens
aatacagctggggcctggatcctacccccacagatgcaggttgaagttggccaagagcctcccgggtgactcatagggtcgaggccctcggtttggctttgacacctctgggcctctcttcttcctgggaaaccgagcctgctccccaccttcctaagctctccaggtgtgcctgaccctacaccctcccaccaaagcgtccagaaggttcatccactcacctttggctgcaccctcacaccctgccagtcccggccctgtgggaagtggggttgcgacggggggtcccattgcccctgcctcctcggaatccgccccgagaactgcggccacgaagaaacctccctgacaccccaaaggtctctgtgttgagcttcctctcttcggcccacgtcgtccgcctggagctacaccacagaggaaatgctgattgtaacaggcactgacttccaggcttcttggcaggcctcgtcctcacagcggaccagggatgagggacagactcaccagggccact

SEQ ID NO: 103150 - DNA, 709 bp, Homo sapiens
attcccgggtcgacgtttcgtctggaaagccctggttggagtgggacccacagcctcccagctttgggcagtacccctcattgtgctgtgaccacttctcccttccagggtctctgcccaccactccagctagcgtggccactgcttccaatacctcctttttttccctaggggcccagctctgaactatccttcccagcactgtcccatccaccctttggcacctccttggttcctgttttccctgcgcttctgcccacacacgccctccagggcttcagtgtgttgccgtgcctcctctggctgttgagtgtggctcctggtgtagggaagtgaggccgggggcctgctccatgtctgttgaatgggagactggaaggcgtcctgtggcacaggcggccggcccgagttcaccggcttcctgtgcaccaggaaggaaacgcacacacctgtgccaggtccgggagcaaagcctctgtctcgttcctgggagggctggctccaggccgcccctgtgatgctgactcagctcacagggctggtgagcagcaggtgatgggtgaggagcagggacagtgctgcggagacacagtgaggggagctgccacgcagggcacgcagaggaaggtgcgggcacccttgcccagcactgcatgggccggataccgcggggccttccgcagggagcagttaaagcaggagatgtatt

SEQ ID NO: 103151 - DNA, 503 bp, Homo sapiens
  misc_feature (1)...(503): n = a,t,c or g
aatacagggggttttgccatgttggccaggctggtctcgaactcctgacctcaggtgatcgaatcacctcggcctcccaaagtgctgagattacaggcgtgagccaccgcgctcagcctcaaatgtcttaaggttggcaactgctgagatgtactttcgaagcatttttcttcataacctgtaacctcatgtatattttaataagaaatctgagattcatgtttccaattcatttacacttaactcattaaaatttagtttagtaataactatcccaggccttttaaaatcatttgtgtcttttatctttgaagcaggaaattcacattttattgctaatagatgaaactttgcccagaaaataggaatttgattctcaactttgtactccagaagttcaactttatttgaacatcaggaaatctaactcttaaattcttctgattctaaacaaaacatctctcaacacttcttttctgtgggaaaatgtacaggcnaatgaa

SEQ ID NO: 103152 - DNA, 469 bp, Homo sapiens
aatacacttccgcctatgatttaaacaaagttttgtgcatattaataaggattcagaatatttgaaaatctccctgaagcctcatcaatttggaaaatgtaataatttggataaggtttagctaaaattctaattttcttcaaactctatttttaatttaaagtaaactaaaaagaaaaaattgggctatgtgcagtggctcatgccggtaatcccaggactgtgggaggccaaaatgggagaactgttgagcgcaggagtttgaggccagcctgggcaacatagtgagacctccatcttttaaaaaccttctttttttttttttataataagctaagcaggggggcatggaccaatagcccccactacttgaaaggctgaggcagggggatcgtttgaccccaggatttcagggttgcagcgagctatgatcatgctacctacactccagttcgggggagggagcaag

SEQ ID NO: 103153 - DNA, 487 bp, Homo sapiens
ggaatttgtctaggatcaaatatcggctctggatggatgggtacctcttccctctgtaacccatattctaataccttaaatcagaacctgctaagcacaacaaaaccttttcctgtgccgtctgttggtacaaactgtggaattgaaccatgggattcaggagtgacatcaggattgggtaagatgctttttctctattattattacttgctattattttctcaaatgacaccacaaagctagtttgtttcaaggagttactggttagcattaattccttgtaagttttgtgcttcttcctaaactgagaacaccgtgtatttctgtgcaagcgtccctaaagttggcttagaaaaacgctacacttatgcaggtgacaggctgcctatggctctgtcttccttatctctcttttgctctgccattccagttttgtgattatttcccctaggaaatgtccagtttagaattgaatcccagaatgagt

SEQ ID NO: 103154 - DNA, 385 bp, Homo sapiens
aatacattggatgaatggatggatggatggatggatggatggatggatgggttcatgtgttcgtgctgtcactgggcccggaacatcctccccacacacctccacctgtggacatgctgtgtgtgtgtgtgtgtgtgtgtgtgtttacacatgtgcacacgttttcctggccctctttggtgttgagaaaaataattattttttgtggaaggcttagttgcacaaataatatatgcgaacttcgtattgcccattttccttcttgttgaccaaaaacattcgtctgtctgtcctttataccctccctcaagggcgctggtaatcgtgttgcactgtggttacgctccttcaataactcatagtctattatttcacgcgggtggcg

SEQ ID NO: 103155 - DNA, 395 bp, Homo sapiens
aatacatggtggtgtgtatgtatagtgttgtatttcaaccaggtatatgtacatttttttaggcacttagaccttatctccataaacattatcgtcaatgacatccagattttagaagaaaaagtctggtgaagtttccatacttgaatcaggattgagtatgcctttcttgtttttcctggccttgatgaccttgaaggagaaagagataaagacagaccagttgagatgctgatgatcctacatttctcccttcaatcacactgtatctcctccccctgcaccatatctcttcccctattcctttctaaatgattcttttctcgctctcatctatctcccttaataacatcttgacctttgaggcatgcctctctggttaatttgaaccgggg

SEQ ID NO: 103156 - DNA, 413 bp, Homo sapiens
gcaaacactctcccttttcctctgtaaaattgtgctttatgagaaggagggattatttttaatgtagaagaaactagaaaacctttttcttaaaaaaaaaaaaaaaaaaaaaaggcaaacccccacagtctgaaggggtggaagaaaacccgggggggcggaaggggggctttgccacaaacccggggaaaccggcgggccggggcaaggggcggggcccttttcccccgggggaaggaaaccccctttggccgggggaaaaaaaaaagtttaaaagcggcggggctaaccctttcctccaaaaaaaaggaggcggggacaattcccccaaacaaaaggcaggggggggtggaaccctaacgggtggcaaccaagtgggggggacaagggttcccgggggaacccccccgaag

SEQ ID NO: 103157 - DNA, 416 bp, Homo sapiens
atacagttgagggaatatttgcttttctgttttgactgcagatcagatgggagctcttttacacaggtacttgaggctcagctcatcaagagttcagtatgatgtgtacagaacacaggcttatagttgagtgggaggggtagtattgagctggcacttccatggaggacgtacgccttttaagaaaacaggtcaagcacgggcattcagagtagggtatgaataaatggtgatcacttcactgccaccaccccggacaagtaggactcgctctagtgcctcggtaagcacctctatgaactccatgtagttattatcaccctcagggtgttcgagtgtgcctggcatattccaaaacaccagttctgccttatgggacttagaaacaattacctcggtgagactcactggtggag

SEQ ID NO: 103158 - DNA, 549 bp, Homo sapiens
cgccgctcgatcctcagagcgagcgaatacattgcctgtctcgagccagtctgggctcccaacaaccctatctaagggaatgttgttatctcatttaataggtaaggcaattgaggctctatggatgtgagaagacatgtggtcagagcctgtccatatccttgagtctttccagtgagtgacagttgactcccagctgccaatgtctgcctccctgagcctgtatgtcccgaggctttttgtcctggaactgcagaaagcaggtacatgcaacaggacagaagtgctggggagttgacaaacccccggcccagaagccctcaatcaatcactgtggagtataaatatcccagttcccatgccacctggatagtcgggaggctttgtttcagtatttaaaaaaaaatactcctacttttgctcattctttggtttattgttatttatttttttgagacagtctccctctgttgcccaggctgcaatgcagcagcatgatctcggctcactgcaacctctgcctcccgggttcaagcgattctcctgcct

SEQ ID NO: 103159 - DNA, 547 bp, Homo sapiens
  misc_feature (1)...(547): n = a,t,c or g
tcgccagattctttacgacgcacacttccgcatataaagaaatttaaatttggaaaaaaacactgtcacactatatgtgcagatatgaacataaagatacaggaagcataaaaaagcaaggcaaattgatacattcaaaggaatacaataattatccagcaacagaacccaatttaagaaattcacaaaatcccacaaaaagaattcaaaatattgatctaaaggagctcaatgagatataagagaattccaaaaacaatataaagaaatcagaataacaattcagaatatgaatgagaaatttaccaaagagattgatatcataaaaagatacaaacaaactctggaactgaagaattcattgaaagaaatacaaaacatatctgtatttttggggaagtgcgcgggtaggctgggtcgcgctctgtcgcttaaactggagtgcagaggtgcgatcacggctcactgcggnctcaacctcccgggcccaggcgatccccccacctcagccacccaagccgctggcaccacaggcacgtgccacaan

SEQ ID NO: 103160 - DNA, 414 bp, Homo sapiens
aatacaaatggactttaataatttctttgatttatggtatgacatgttccagccccactgtttacattttctggcccacatgcctaatttgtcacttcttcaagtagccctggttcctttggaaagaaaccgtatttacatgtggtaatgtgggctcattcctcctggtttaaatcttttcagtagacagagctagaaaatattaaaaattttcaaatgctaaaaaatgtaatgaattcatgcatatatatatacatatatacacatatatatacatatatacatatatatacacatatacatacatatatacatatatatacacacacatatatacatatatatacacatatatatacatacacacacacacacatatatatatatatatatattttttttctgagacgggac

SEQ ID NO: 103161 - DNA, 372 bp, Homo sapiens
  misc_feature (1)...(372): n = a,t,c or g
aatacagagtctgtacagcatttatgtggtttgggaaaacagcaagcgcacacagtgggacaggccacaggacaggctgggagtgaataaagagttcacactgcttccctgctttccccagtgactgaaggctctaggccacctcctcctcagcctcctcctcgaactcgccctcctcctcggctgtggcatcctggtactgctggtactcggacaccaggccattcatgttgctctcggcctcggcgaactccatctcgtccatgccctcgcccgtgtaccagtgcaggaaggccttgcgccggaacatgggcgtgaactgctcggagatgcgcttgaacagctcctggatggccgcgctggctgccaacn

SEQ ID NO: 103162 - DNA, 369 bp, Homo sapiens
aatacacgaggggagtccaacttttcagttcttgcataatcagaaaacctagcagtgactcgttaagctaggcaagcgagcgtaacattggacaaacataaggcttgaggcttattgattctttagatcacaaccgttcggattcgctttccttcttaaatatcggtgtaccgttttggcttcaaaacaatctcttcttgcttctgcccctctctttgaggaaggcttgcttaactcagagatgtgatattataacggccgcctgggggcgccaccatgcgcttgctgcctgagcgaaccccctcatccacttgggtgcctgacaggctaactcccgactgatgaacactcctcacaggtgggctcccc

SEQ ID NO: 103163 - DNA, 475 bp, Homo sapiens
aatacagctctcctggccccatcgcactggccctgagggacccttgtgctcatggggggccctctcccaacagctctctgtcacctgcccaagggcatcctgctagggcccagcagggtccccagccccaacaagggcctccctcccacctgggctccgacctgaggccgcatgtggcgcatacacgtggggctctgcatggaccagcacccgctcctgccagccctgcaccagggggttcaggttctggtgtggctgccagcatgtgctctgctcccaggccggggcgggcagggggaacgcttggttctgttctcaccgcacaccacccagcatctgcgggatgtgcacacagagacgcatatgtctgcaaggcccctggccgggcagtcttttagatccagatgctccttccctcactgccttggtcctggacagatggcgctgaccttttcagcctggacaggtgctggcc

SEQ ID NO: 103164 - DNA, 480 bp, Homo sapiens
aatacagggctgctggaggcctggacgtcccaacccctctgcctcagttgctcacctggccaggagctgcagagtcacacacaaaagtatcgtagggctcagccagctggggagcattgtcattctcatccagggtctggatggccacttgcacgcgcgaggcctgtgcagaactgtcgagctctgtagccagcacagtgaggttgtgccaggcgcgagcctcgcgatccaggggtgctgctgtatggatggtgccttcctcgggctggatagagaagcaacgctccggatctgagtgggggaggatggactatcctcttgtctggagaaggcgcccaccttggccgccctataattgacgactcacggttctttgttgggtagaacccaaactatagttgggtggcacggccctacacccccaatgacccgcgtcgataagcaaggctaaatttctcgtgcgtcacgctacctccactg

SEQ ID NO: 103165 - DNA, 503 bp, Homo sapiens
cgatcatgcttgatcctgtagagcggccgcatacagggtgttcgtttctcatcgaagtatttgccccccagtcccacctgcaagaaggtggaagtagggcctctgcctgggagggtaactctcaaatgtaaggcaagacctgtctctccaccaatatctccaggactgaaggactgtgaaagtctgcatattgatcaagcttctccctcccttatccgaagggacttacttccttcaagacacttttcctcttcccaactagctccatgcccccatccagtcatcttccaactcatctctccccacctgcatgccacacaagaggaacgtgaccacagcacctggaagttccttaaaattgaatggcgtgtcaggccgtgtgcagtggctcatgtcagtaaccccagcactttgggaggctgaggcaggcatgtcacctgaggtcaggagtctcagaccagcctggccaaaatggtgaaactccatctctactacaaatatac

SEQ ID NO: 103166 - DNA, 516 bp, Homo sapiens
  misc_feature (1)...(516): n = a,t,c or g
gaccgtaccgaagctggttctgtagagcggncgcatacactcacctatttttatcacagcataaatacaaccaacattcgggtttgatgcttatttcaaaagcactcttttaaacaaaaaaaggttcaggtctatactactaaatttcacttttatctttatgctacctaatttgaacatgtatagattatttttggaaggaatacttttggaggaaaatatgtgactagaatcgttgaccaaatctgaattaccactctctattctctaacaatttctaacaaaagaaaactgcatacttgaaacagattttataatagtttatatttgcacacaaattctgccacattgttcagtaccaccacagtaaaactcttgaatctttcattgaaaatgaaaaacccatctggcacctgttcccacgacaaaacttgatgttctatgaaatcggctggtttagtcagataggaactgaagtttgaaagacagcctttccaagtggcaggtcataaatag

SEQ ID NO: 103167 - DNA, 758 bp, Homo sapiens
aatacagggtccttgtccttttgggggccgagacgacagcggtgatctttgaggtatttgtggcgggaaaagcccttggcgcagccagcacagcggaacttgtagttgcccgtgtgggcgcgctgatgctcggcgaggtgggcacggcggctgaaggacttgctgcacagggcgcatttgtggagcttcatgccagagtgggagaggatgtgggccttcagcttgtccggccggttgaactccttactgcagcctgtgtgcgtcgagaaagggcatttgtatttcttgaagggctcgtggatcaacatgtgtctcttcagtttgtccttgcggttgaacgcagactcgcacactgagcatttgtagggcttctcacctgcggcagacacagacagggagagccagcactcaccaggagtcggcatccagggcacaagggtccccgctgggcccctcaggggagcagctcctctagggaggcggccaggggagaaaatagcctctctcattcttcagtggctttgttttgccagagacaagacagggctattttgacaggatggtcaggagaggcctctctgatgaggccatgcatgaggagagacctcaggtcatcagggagatggtctgggcagcagggaaagcaggtacaaaggccctgaggcacgagtgcgcttggcggtgctgatgaacaccaggcaggccgaggggatgtgaccacgcagttggaaacaatgctcccgccggaagaacttctc

SEQ ID NO: 103168 - DNA, 1028 bp, Homo sapiens
  misc_feature (1)...(1028): n = a,t,c or g
actgggacctcatctatgtgggccggaagcggatgcaggtggagcaccccgagaaggctgtgcctcgcgtgaggaacctggtggaggccgactattcctactggaccctggcctacgtgatctccctgcaaggcgcccgcaaactgctggctgctgagccgctctccaagatgctgcctgtggacgagttcctgcccgtcatgttcgacaaacacccagtgtccgagtacaaggcccacttctccctccgcaacctgcatgccttctctgtggagccgctgctcatctaccccacacactacacaggagacgatggctatgtgagtgacaccgagacctcagtcgtatggaacaatgagcacgtcaagaccgactgggaccgcgccaagtcccagaagatgcgggagcagcaggcactgagccgtgaggccaagaactcggacgtgctccagtccccactggacagtgctgcccgggatgaactctgaggggtagcagccagaaagccaaagcagccatcggtggcccaggctccacgtgcttactgaggacatcagggccacctctggaccccttggcaggccacagagggctctcgtgtggggtggtgtccagccagctcttgctaagcaatcacgtgcacacaggcagcattaatggagtgcctactgcatgccagcaacagggcttggccctggggaattgggaggaaccaagccctcttcatctgttcatgtgcccagcatttattaagcacctgctgtatgcaaggttcccatgttacggcagtgaatgaggcataattgttccctccatcagcgattgattcagtcatcaagcagttactgatcagattaagaatcaggcactagtgatacacattcatttttaaaattcattcaaggatttattgagtgcctactgtgtgctgggtgccattccaggctctgggannnnnnnnnnnnnnnnnnnaaaaagcaaagactgattctgcaacccagcctggatatgaacgggtttgacagtcg

SEQ ID NO: 103169 - DNA, 999 bp, Homo sapiens
agtaagtacctctatgatgaaggggaggaggaggaggtcttcaacgacgaatggggagctgctgggggtgtggccgtgcccactctcaatgccttggagaggggcttcctgagtgccatggattggcatctctacactgaccctcgggagatctttgaggtgctgagctggttggagagctgtgtggctgagcagcagggacggtggcgaggctggtacacctacacagacctgtgtgtgctgctggagcagccgacctggcagttggccctgggctccctctgccagcggctggtaaagctgtcttgcctgttagctgtggcatatgtgagcagtgtggccctggctgtggcatcggtggccgtaatacatcagtctttggggctgtcctgcacccctacacctgggccgcctgaccttggactgacctcccgttgcctcctggagccctgcataccttctgtgccacaatgcctgccgtctctcgctaatgtctccagctgcctggaaggcagcatggggctgcggtcactctggggcagtcttctggcctcactgactcctccaccattgcctcccccagacccccctgcccctcccactcttcttcataactgccacctttgccagaagctccagagagactccccaacctgccatgcctgcctccaccccaaccgtacagtccccactgcgctgtccagcccctggtaccatacctatggcctggctcccccctggccttggagcccggtgcccctttcacttcctcagcctcagcaatgttcccttttcagtgtcatggagctggctcgcctcaagtctttcgttttcccaggctaggtagggctgtgaggaatgcattaagagggtttgggagtttctgagaacctggaggagcaaagcttgattcagatcctgtctgcctcgctgggtccttggcaggtcccctgtcctcctgggtgggaagctatggggtggggggcagaaggactgaag

SEQ ID NO: 103170 - DNA, 370 bp, Homo sapiens
aatacatgcaggatttatttctgttagtgtactagataatataatatacatatgcatgtgtgtgtgtgtgtgtgtgtgtgtgtgtgcacatatgtgcgcctgtatttcagaacatataacccacgctcccaggctcccagaagtcttctacaccccatagatagtgcattttagcgccacccctcatcacgaacactgagggggggagagaaaatttctatccagtttatttcaccacaggtacacgaggggggataatgtctcctcacacgataaaattagtgggggaaagaagtcggggagtgggttttttctctggaaactgactatttctttttttctagccccacccccccagagaagagagaac

SEQ ID NO: 103171 - DNA, 376 bp, Homo sapiens
gatacactgcaggagttatttctgttagtgtactagataatataatatacatatgcatgtgtgtgtgtgtgtgtgtgtgtgtgtgtgcacatatgagcgcctgtttttcagaacatataacccacgctcccatgctcccataagtcttctagaccccatagattatgctttttagtgccccccctcctcacgaacactcagtgatggagtgaaaatctctatccagtttatttgaccacaggtagactatggaggatagagtattctcacacgatagaattagtgggggaaagaagtccggcagtgggtaatttctctggagactgacaatcttattttttatagacccactcccccagcgaagtgagaagccagg

SEQ ID NO: 103172 - DNA, 501 bp, Homo sapiens
cgggaggcccctggcctgtataagccatcaggatgcgtaatctacatttttggaggtgaatattatttcggtgcctccaccacccccagcagaaaaaataagatactgaaataagttgagtcatttcgcaaacatttactgagcacctcctgtgtgccaggctcctagaaagacagggagttggtgccctgcacagatgacaaactgccccagacagcagacagaaagacagacaaactgccccagacagcagacagacaaacaaactgccccggacagcagacagacaaacagacacattgccctggacagcagagagacaaacagacacactgccccggacagcagacagacagacacgttgccccggacagcagacagaaaaactgccccggacagcagacagacagacaaactgccccagacagcagacagacaaactgccccggaaagcagacagcaaactgccccagacagcagacagacagacacacttccccg

SEQ ID NO: 103173 - DNA, 1687 bp, Homo sapiens
ggctggcctggacagtctacacaagttccaggtgaagattgagaaggagaaggtgtacgtccgggccagcaagcaggccctacagctgcagcgaaggaccaaggtgatggccaagtgtatctctccaagtgctgggtacagcagtagcaccaatgtgctcattgtgggtgcagagacactgcggcaggagggcttctccgaccggatcgtcctgtgcacgctagaccggcacctttcctacgaccgtcccaagctcagcaagtccctggacacacagcctgagcagctggccctgaggcccaaggagtttttccgagcctatggcatcgaggtgctcaccgaggctcaggtggtcacagtggacgtgagaactaagaaggtcgtgttcaaggatggcttcaagctggagtacagcaagctgctgctggcaccagggagcagccccaagactctgagctgcaaaggcaaagaagtggagaacgtgttcactatccggacgccagaggatgccaatcgcgtggtgaggctggctcgaggccgcaacgtggtcgtcgtgggagccggcttcctggggatggaggtggccgcttacctgacggagaaggcccactctgtgtctgtggtggagctggaggagacgcccttcaggaggttcctgggggagcgcgtgggtcgtgccctcatgaagatgtttgagaacaaccgggtgaagttctacatgcagacggaggtgtctgagctgcggggccaggagggaaagctgaaggaggttgtgctgaagagcagcaaggtcgtgcgggctgacgtctgcgtggtgggcattggtgcagtgcccgccacaggcttcctgaggcaaagcggcatcggtttggattcccgaggcttcatccctgtcaacaagatgatgcagaccaatgtcccaggcgtgtttgcagctggcgatgctgtcaccttcccccttgcctggaggaacaaccgcaaagtgaacattccacattggcagatggctcatgctcaggggcgcgtggcagcccagaacatgttggcgcaggaggcggagatgagcactgtgccctacctctggaccgccatgtttggcaagagcctgcgctacgcgggctacggagaaggcttcgacgacgtcatcatccagggggatctggaggagctgaagtttgtggctttttacactaaaggcgacgaggtgatcgccgtggccagcatgaactacgatcccattgtgtccaaggtcgctgaggtgctggcctcaggccgtgccatccggaagcgggaggtggagctgtttgtgctgcacagcaagactggcgacatgtcctggcttacggggaaaggatcctgagctcacatgcagtagacttgggcaggcaaagggggcaccaagggcacaggccaagccttgggggcaggtgccaatctccagtcccaggatcccccagggcagaacctgagccctcccagtgcttgccttcagccacctggctcccctcctgggaggcctctgctggatccagaagatgctcaaccctcaaggcctctgctgccactgacagctggcactggaggcaggacaagccctgcctcttctccctctattgggactgggcccctgaagaaccctgcaacatgttagacattaccgtaaaattaaaacgcacaaatttgcaga

SEQ ID NO: 103174 - DNA, 359 bp, Homo sapiens
atcctggcttaagtacgttttatttttttcacagaaaaaaatatatttcaggcgaatagaaacaaattccagattagcatagctcagcgttacatttatcttacctttatcaaggccaacaaagtacagatgctgtacattaaaaacatagaaatatatcgctcacaccacatcaactcctacggacaaaggggctttttctaagccctgctcctttctgaagcacacaccacagctaaacgtacgaagagccatgtactggccctacatagccaactccaatgagcaggacgtctatcagcgaccatattcccaggccaccgaagctgacgagcttgccgaggcctttccggcactgg

SEQ ID NO: 103175 - DNA, 1294 bp, Homo sapiens
tctcgtcaaaccagcgctttgctgggggtaactgaatgtcgtcttctactagcatgtaagctctgtgaaggcagggatgcctgtctgcttacacttcttgttctctcaagtatctaaaacacagccagacactgtttgtaaatggttttaagtgaatgaatgccaaggctcacctttgctccgaaggggtggcctcaccccccgacctcactccaccctgggcaggtcactgaccagaccacatggtggcttttccaggagctccccacaccaagtgagaatagcatgccaccaggcctctcaactcccacagcctcgcaggagggggccggtcctgttccagatcccagccagcccacccgtcggcagatccgcctctccagcccggagcgccagcggttgtcctcccttaaccttacccctgacccggaaatggagcctccacccaagcctccccgcagctgctccgccttggcccgccacgccctggagagcagctttgtgggctggggcctgccagtccagagccctcaagctcttgtggccatggagaaggaggaaaaagagagtcccttctccagtgaagaggaagaagaagatgtgcctttggactcagatgtggaacaggccctgcagacctttgccaagacctcaggcaccatgaataactacccaacatggcgtcggactctgctgcgccgtgcgaaggaggaggagatgaagaggttctgcaaggcccagaccatccaacggcgactaaatgagattgaggctgccttgagggagctagaggccgagggcgtgaagctggagctggccttgaggcgccagagcagttccccagaacagcaaaagaaactatgggtaggacagctgctacagctcgttgacaagaaaaacagcctggtggctgaggaggccgagctcatgatcacggtgcaggaattgaatctggaggagaaacagtggcagctggaccaggagctacgaggctacatgaaccgggaagaaaacctaaagacagctgctgatcggcaggctgaggaccaggtcctgaggaagctggtggatttggtcaaccagagagatgccctcatccgcttccaggaggagcgcaggctcagcgagctggccttggggacaggggcccagggctagacgagggtgggccgtctgctttcgttcccacaaagaaagcacctcaccccagcacagtgccacccctgttcatctgggctgcctggcagagagccttgctgtttacaattaaaatgtttctgccacaaaaaaaaaa

SEQ ID NO: 103176 - DNA, 419 bp, Homo sapiens
  misc_feature (1)...(419): n = a,t,c or g
aatacagtgtgtgtgtgtgtgtgtgtgtgtgtgtggggtggttgctgagaggaaacaggatgtgttacctggcttcagcctccaaggagatagatggaggcctggggctccctgccttgagtgccccactaggcgtaaggcagaaggtagtgggtgagcatgtagaggaggctggcaatggcagcgagccctgtgaggaccccacacctcagcgggaggtactccagggagcgctccagctcagtgtgcaagaggatgacctggcgtttggtgacactccactcccccgagttgtctaagacatggcgggccatgcggcccttgtctgtcaggggcagctgggcattgatgcgngcctctgcgttcttgcggttcaggcgtgtcctccccattatgcggggcaggtgtgggtcccgtcg

SEQ ID NO: 103177 - DNA, 399 bp, Homo sapiens
tttcagctgtgagttcaacatggaggcaaatcagtgccccctggttgtggaaccatcttacccagacctggtcatcaatgtaggagaagtgactcttggagaagaaaacagaaaaaagctgcagaaaattcagagagaccaagagaaggagagagttatgcgggctgcatgtgctttattaaactcaggaggaggagtgattcgaatggccaagaaggttgagcatcccgtggagatgggactggatttagaacagtctttgagagagcttattcagtcttcagatctgcaggctttctttgagaccaagcaacaaggaaggtgtttttacatttttgttaaatcttggagcagtggccctttccctgaagatcgctctgtcaagccccgccatgtatt

SEQ ID NO: 103178 - DNA, 430 bp, Homo sapiens
tttgagacaagagtctgactttattgcctagtggagtggcatgatctctgctcactgcaacctctgtctcccgggttcaggcaattctcatgcctcaacctcctgagtagctgggattacagacacatgccaccacgcccgactataaaattgagttcttatagttcaataaagttaatttattatctctttatgctagtattatagaattttggagcaggtagtatcttagattccctacattagcagtgttatataaaagagaaataattcaagtcacatatgtaatttaaaatattttagtagccatattaaaaaagcaaaaagaaacaggtgaaattacttttgattgtacatttttttaacccagtatatcagaaatactgtgtcaacatgtaatcaatgtaaaattattagagatagtttgcac

SEQ ID NO: 103179 - DNA, 499 bp, Homo sapiens
  misc_feature (1)...(499): n = a,t,c or g
atacagtcctccaataatcttcaataatgaacttgacattgaattactttcatgaaacacagatcccctccatattggttaaataccaatatggagatctcaatagggagatctccaaagattagtacagaaactatgaactatcatcagagtgtaataaattacatactagtgttatctcataacaatataattcagcactctatgaccctaagaaaaacaggaaagaaacaaactcctcaaattataagcaaaactttcacattttttaaacctttgcattcttaaacaaaccacattgtcttcaatatgctttaatctcatatagaaattttcagtcttttgaacattatctttcagatttttttcttatatgaatttcacagagtttcaccccaaaagttaaataatgtttgtattacctagtttctctttgcacataaaagattctgggaacagctgcgatcttttcacacttctaacctcattggtgagtttn

SEQ ID NO: 103180 - DNA, 726 bp, Homo sapiens
  misc_feature (1)...(726): n = a,t,c or g
cacggaacagctccacgtgcagcccacagctgagtnccaagagcagaatctgaaaggtgggggctggggtacagacatatacatatatatatatatataactctggtcctttgtacaaagtagggaaggagaaaagggaagggggaaccctgcttggtaaccacaaatgacgatgtggcttgagccccctgtcccaatggccccagctctgccacctggtaggcgtggctggttcacatctcattggagtacgtgtaattgggggtggcggaatactgagtctgaggctgattcatggcaccctgggctgcccccatggctgcgttctgggctgcctgctgcacatgtggattcttccaggcccctgtggtccactcctcctgagctttgctgaaactccccccacttccccggtaaaatttatgaaccatgctgagggcgatgaaggaaaagacggccatcactgtgaacatgacagtgggaattagcatcaccaccgccgagccaatgttcgttccgaagaaggagatggtagcaatccagccgcagacgccccagcctgggatgcccacggcctggatgatgctgatgaccaactgagccatgaaggtaaagaagaatgccatgaaactgaaggagctgtcagtcctgcggcagaggaggtggctcccgtcacctgggcagagggccagggcttccctgccttcaaggccacgagatcgtcga

SEQ ID NO: 103181 - DNA, 380 bp, Homo sapiens
aatacactgctgcttgtatgtgtgcaagtctgtgtatcatcaatgggtatatgtgtacctgcgctgacaacaaaaaatgagatgcatatcagctactacacaaagctgttataaggatgaaatgcagttagccagtgctcagtaaagggcagttgctttactactactaggtggggtggtgtatgtgagaatctgtatactgccattagtaggctttagtatgtagtgtgcatatggaattcatgcattagtgtgtagtatgtgtgggacccactcacctgagcagcttctctccccacttacagtggcatctgttgaggattccaaagaggctgagcccctccttcagtccactggccactttgtacactgaggggtgg

SEQ ID NO: 103182 - DNA, 431 bp, Homo sapiens
aatactcggctgtgacaatggcatttacaaatgactgttgtcagttaccgtacaaaatgctttcccacgtcctgtcataggtgcctcacagcaaccatgcgaggtaggcatgagtattacaatgaaacctacacggaacattacatgatactaaacatgtgcaccatccatgtattttcttctggattgttctataattcgaatgcacggctgaataagtaaaaagagtattcctatcatgtaaagcaaaccacatatgtagaaggaaaaatcatatttttgcgcgatgtcatagatccaccctggcaaaggtggtcccaacaatgcagagaagccattatcacagatgatgatggcgtaagcattggcaaggtgttcatggcaacccaagctcaagcacctctggctttagggagaaataaccactgggg

SEQ ID NO: 103183 - DNA, 439 bp, Homo sapiens
aatacatccttccgtcttccggctctgccatcttttatagccttgttatattctggacccacttggtggaatgagaagagcacagagaaggcacacttgttctaaaagcaccaacagttttgcaggctgtacaggaagcatggctggggagccctcaagaagctgacaatcacggcagaaggcgaaggggaagcaggcacgtttctggccatggtggagcaggagagacagagagagtgaagcaggaggtgctgcatgcttctaaacaaccagatcccatgagcgctcactcactatcacgagaccagcaagggggacgtcagccgccatgagccaatcatctcccaccaggtccctccctcaacactgggaattgcaatttgacatgagatttggttggggatacagagctgaaccatatcaagggtagttcaaccag

SEQ ID NO: 103184 - DNA, 430 bp, Homo sapiens
aatacatggggcctagaggtgttgtagtctatccctgtgaagactgaaattgagccacagacagacagtggcatcactgctgtctttccttgcctgggcaaggggtagcaccattgtgaaggtaactatcactcctgctcgagaagaggagaggatacttcggaacagtattgctgctaagaccgctgtagtgtgcaccaaatgtgttctcggtttcttcgggacagcagatgaacagtgccacaggctgactgaagaacgcctggatgggagaggtgtgcggactgggaggcagagccgagtcactaggtataatctttcctgggctgttcgtcagttgtacacttatcagtcatttcctggcagaagtccacggtcactgtttggctcctgggttcaagaggaggtcctctctctgagaaggttcccg

SEQ ID NO: 103185 - DNA, 456 bp, Homo sapiens
  misc_feature (1)...(456): n = a,t,c or g
atttgcgtccccatcgacgnacccaancttggatactctagagcggacgcttcgccattcgtgcatttttctagaaagtctcctaaatctcgtgtgtatttgacatttgcaacacatctcgattcagagcagccgccttccgaggactcgggggctggtggcagctgtgtgggacacagcagctgtggggatggggcagagcagcagcccacagagggcgagggcaggggccggagaccagtcataccacagaaccctggaggggcttgaggaagggatggcaggagagctgaggagcttctctgccctgtggggcaggctgctgggtgggtcaaagccccagaagggctgcacctccaagaagggaggtagaggagaggtgggagagaggagggtaaggaagcaccgatctctccctcgctcgcttgggctgtgatccagccggggagtagagtg

SEQ ID NO: 103186 - DNA, 986 bp, Homo sapiens
  misc_feature (1)...(986): n = a,t,c or g
agtgttctttttttgttgttttctcatctttttaatttagggaaatttatttatttatgaattattttcatgtaccacaattggctagggtcttaaggcataatatgtgcttaaggtgatgcttaccattaaggatagtaaacaaattcattttcaaattatattcttggtcatcctgggctttatggctggcttcatatcatatccgattatgtgaaaacaaagtgtgacctcgtaggatggtgacattgcgaaggatttctccatgctgtgtgtccactgccttcatctcctccacgatcatggagaggttccggacgttgaggtccagccgggcactgagcaggctgaagcgctcccggagcaggtctgtggtgccccagcatgatggagacagacttgttcaggtagtagagctcctcggcatgggtgtggaagcccagcgtgcaggagacccgcacgtcatccaggtacttgagcatgctgtgcacgtggttgtcggtggcattgatgttggtgaagatggtgccaatttcaatctcgtgagaagccatgcgtccttccagagactcaaacctctccacagtgcggttctgggcgtagtgggtatggtactgaagatcatgcatgttctcttcgtggtcatccaggaaggacgagatgttatccagctgcagctgcaagcccatgacctggagtaccaggtcgtgcatgctctctgagttctggctgatgcgctgtgaggaggcccccagggtggcctggatgttcttgaccgcctctccagtcttggtggaggtggtgcgcaggccgctgaagagccgtgtgtagttctgccagtcggtgacaatcttctggagggtcagggtctcctcgtctgtcttccgctggatcccgtggatccactcggaagtctgccccacggtgaagttgatctggtgcactgcagccttgacgaattccnccacatggacagtgatctcgat

SEQ ID NO: 103187 - DNA, 421 bp, Homo sapiens
aatacattgccactggtgagtttattacacgactaaagttcaaataaaaaaataaaaaccaaaatcttggcagggaagctagagccagaatcaggagaatctgcttccttgtccccagactccctggccaagcccagctccactaactcatcttgactcgatcaagttcctcatcaagacttgcatctgtaccctggacatctctgctgctcccactggagagtgagtctggagtccctggcactggggctttggtgagggctccatatacacccatggcctgagccaccatgctggtgacatcgccagggttggagggcagtaggatagtgttggggtccttggccagtttggagaacgcgctgacatactgctcggccacagtcagtgaagctgctgcatctccattatgttgtgtcag

SEQ ID NO: 103188 - DNA, 1013 bp, Homo sapiens
tctagacctaactgccagtttataatacaggagagagagcaaagctataaattagaggagacttaaaagcgataccaataatcatactcttccccctcctccctagactatctctaacgtgactggcttgacccgatgttctcagggggctcctccagctctaaggctctatgacagtgttctagtcacctgagcgcataagcatttcttctactatctgtgtggcggacttctggggctgctgagaaataggcccaacattgttcaggaaccagaaatcaggtgctgcccagggaagccccagatgatgggtgtggatgatcctgtccacatcaaaggctctggctattaggtccttcgcctcctcttcattcatcagccaaatctcccgaaacttctcatcatcaataagagcaaaatgcctcatggctttctgtagctccttgaattgcatcacaagacgtttgtagtccgaggttagagactggttctcctcctgaaactgctttatttgcttggcatattttgatctcagattgttaagtatatcatgcaggcgattgatcttcctcttctgctgggatttaattactgtgctttcttcatctctcttcttcagcacctgcaaggttgtactctaatttctcttggtttagctgataaattgctttcctctgctgaagctgctgctcaagaatctgcacatcctgctccagcttgatcttgatcatgttgtattcttcgcaatcccagatcctctgcctgttcagctgcttctcatagtcctctactttcttcatgcggttgttaagatactccagctctttggcattatgagcctgaagggcttgctcccatttcttcttattactggccagtagctcttggcgttccacctcaaatgctttctcaatgttatagagctcctcacgaaaggttttcatcacattcttcacctgttcttccatccgctccagaagcaggcagatgtccggacgcgtgggtcgacccgg

SEQ ID NO: 103189 - DNA, 408 bp, Homo sapiens
  misc_feature (1)...(408): n = a,t,c or g
ggttgtcattttggcgaggatcctccagagcggncgcaatacattgctggctgtcatgcagaagatttttatcacaggctacatgttctcgccttctgaggaataaggtgcaaactcatgggggaggctctaactgcagctttgtcctcaaggaagtctggggcttatcaggtgcaatgatcacctctctaaggatgtgcaatactgatgggacgatcgggaaaattctcgttgctagggggagtcctgacagaggcaaatcccctgtgtgagctgaagaaaactatggagagaccatatactgtccgggcgcagtggctcacgcctgtaatcccagcaccctgggaggccaacgagggcagatcacttgaggtcatgagctcgagaccagcctgcccaacatggtgg

SEQ ID NO: 103190 - DNA, 367 bp, Homo sapiens
aatacagtgggtcaagttcaaggtcaagggcctcagggaggaaccagcaatgagtggtgtgacttgtaactggcagctttgtagattcttttttttttttttttgaaaaaaaacctttggtcccccggcgggggggcccggggggctttttttggccgggggaaccctggccccccgggttaaaggaaattccccgccccacccccccgaaaaagggggaataaggggccccccccccaggccggggtaaatttgggtttttaaaaaaaaacgggggtttgccttttgggaaggggggggccaaaaccccgggccccggggggacccccccccttacccccccaagggggggggaataccggggggg

SEQ ID NO: 103191 - DNA, 1722 bp, Homo sapiens
cgtcgacatctggccgagtatctttttccttttattttctttctttttggtcaactggctagactaaacaaagtataagtttgaaatgaaatggtctagagggaaatgattcaaattttttcacaattacgagatacagaactaggcttaatcacactataataagaaaactcacttttgaattgtgatgtttctgttaacggaaggacaatacgttactataatacttatagtgtaataacttttgtttgaattatgaaaaaatttgaatcatttccctctagaccatttcatttcaaacttatactttgtttagtctagccagttgaccaaaaagaaagaaaataaaaggaaaaagatactcggccagatgagataggagagagaatgctaaccacaaggttccaatgtatggcagtttcttcgggttgctctgttcccatatgccccacacagtgtcatgacggtattggggggtacccctaaacaggaacggccagatccagtcccattcttactaggctgaagaaaattctctatcagagcatcaatgagtttcttcagttcttcctccagtaaagcagtgtcactctggtcaggtgacgcacacatctctgcataatactttatctttggttctgttccacttgtccgaagggtagcaacacagccattttgaaaagtaaatgtaatcatttggctgtttttactcacaggcagcactgatttcttattaggctggctactgtcatatccagtggtaacgtcccgtacatgcaatatagcaaatgttccacaaaattttggatattcttttggagaatcaaaattacgaagcctttcaaatatacttttgatggtaggtggttcataacacaagaaataggaagtttttgaaatatgataaccatatttttcataaaccttaaccagttgctgtttcaatgttatattcatggtttccaggtaagatgccatctcagcaaccacaacagctgcactcaccccatctttatccaaaactgaagttccacagagaaaaccaatagactcttcaaatgcaaaaaggacttctttcccattttccaggaggtctattatcctacttccaatccatttaaaacctggtaatgtttcttcaaaatgaaatccttctttaagtgcaattgccttcagaattttagaagagactgtggtggctaacatataaacgttcttcacatcagcatttcttgatttatttttcttccagcaatcaaacatccaccatccaaacaaagctgccaactcattccctgtgaaaactttccaacaaccattctcctgaagttctgctgctgccagtctgtctgcatcaggatctgtggctagcactacccgggcattttctttctctgccagtctcaaggaaagttccagcacagattctccttcttcaggatttggacatttaacggtagaaaagtctggatcaggatctttttgttctggtactggaattggaggcttaaaaccaaacactttaaaagccaactgcacatagtcatgtccgaccccatgaaaagatgtgtgcacaaatttcaaggtggtcttcgagtttaactccctgtaaaaacagatctttttcagatcttccatgtatctcctgcaaatgtcctgcagagggtctctcttcagcgggctggtatccactaaattatcattccaggaaccattccagcc

SEQ ID NO: 103192 - DNA, 430 bp, Homo sapiens
  misc_feature (1)...(430): n = a,t,c or g
gtacggtcgctnggattttgtagagcggacgcaatacacacacacacaaacacacacacacacacactcacacgcggtgcggctctcgccacgccccgtccaaagccggcctgaagcttctcagaccggcccaacccggacaaagccagcgctggggccggctcatccatcaccgcgcggggcgccgtgtcctgacgaccctgggagtctgagaatgctgggttatgggtcccgtgcctcccataactcacgacggggtcggtggggccacggacgctgcaaagatcaaagagcgatggggccgcactcccatatgtgggaagcagcgctcccacctggcgccctgagctcgccaggnggcttacatttcgactgttttctttctccagcgtgtggcaaattatgactttgaggttatagaacacagttc

SEQ ID NO: 103193 - DNA, 475 bp, Homo sapiens
  misc_feature (1)...(475): n = a,t,c or g
ccgaagcccctcacgaagtttggatcctctagagcgngccgcaatacacctccgtctcataaataaataaaataaaataaaatctgacccatgctacaacatggatgaacttgaggacattatgccaagtgcaatgcttcagctatggaaggaggtatgactctacctgtacgaggtgtctagaatgggcaaattcatggagacgaagtagaaaggtggttgtcaggggctgggcaaagagaggaacagggaattattggttaatggggagagagtttcagtttgggatgatgaaaaacttctagaaatagatagtgatagttacacaacactgtgaatgtacttaatgccgcccaggtgcggtggctcacacctgtaatcccagcactttgggaggccgaggtgggcggatcacctgaggtcaggagttcgagaccagcctggccaacacagagaaatcccgtctctactaaag

SEQ ID NO: 103194 - DNA, 651 bp, Homo sapiens
gaagggatcaacttctctgacaacctacgccggtgtgtggtgatggtgggcatgcccttccccaacatcaggtctgcagagctgcaggagaagatggcctacttggatcaaaccctccccagagcccccggccaggcacccccagggaaggctctggtggagaacctgtgcatgaaggccgtcaaccagtccataggcagggccatcaggcaccagaaggattttgccagcatagtgctcctggaccagcgatacgcccggccccctgtcctggccaagctgccggcctggatccgagcccgtgtggaggtcaaagctacctttggccccgccattgctgctgtgcagaagtttcaccgggagaagtcggcctcttcctgatgggcaaccacaccactgcctggcgccgtgcccttcctttgtcctgcccgctggagacagtgtttgtcgtgggcgtggtctgcggggatcctgttacaaaggtgaaacccaggaggagagtgtggagtccagagcgctgccaggacccaggcacaggcgttagctcccgtaggagaaaatgggggaatcctgaatgaacagtgggtcctggctgtccttggggcattccagggcagctcccctcctggaatagaatctttctttccatcg

SEQ ID NO: 103195 - DNA, 416 bp, Homo sapiens
  misc_feature (1)...(416): n = a,t,c or g
aatacattgtgtgggtatgtgtgtgtacacctgtgtgggcacaaacttggctcctaaaccccagctcagcacttagatttctagggcaaagaccagccagaccctaaatagcaaggttgcacttggttaaagattgatccttgtaatggagattgtgccattcattattcattgctgatagccctccagtcctaagtccctaagtgatctgggccaaatccagctcagccccagccctgccctttgcctctcactccagcttgttctgaatgtcctgtcctgcttgctccagcagtgcccctcggatgaagttccggggcacagtgacacgctccgccacattgctcagcatcttgttgtgtccctcggccacccgcatggccacagggcataactcctgtgtcaggctgaccatn

SEQ ID NO: 103196 - DNA, 403 bp, Homo sapiens
aatacactttctgtgtgataagtgagctatgtgattttatgcttcaatttctccatttataaaataagggcattatctattcaacatctatttcacaggcctgccatgacatagatcatttaaaagaaaatgtttcggaaagtatgggatcccatataatcatacagcattattagtgttaaactgctaataacaaatctttgggctttgaaaactccactggtaacatgttcagaaagcacaggacaggtctcttgctatagtgactcagcacagaccaataatacatgcagcttttaactgtgcacctactgctccagtcagcatgtcatacattaatgctcccaaactccaccaatccacaacacgaatggggccactttctaataagaatttagggggc

SEQ ID NO: 103197 - DNA, 409 bp, Homo sapiens
aatacatgtccctttaataaaacgttatcaacatatatcgcacacaaactacaatgtatcataattacttttttttcctctcttaattcagaaccagactacaaggtaagaaaaaacacagaaacagctacaatgttcccaataatccgcacaaagtcttttttcaggcagatgatatctcacataatatgatatacatggatcagaaagggagggagtaaaacaaagaccagctacaggggagggaggaaggagaataattgtcgttctgaaaggagtggaggaagttccctcctagctcgccgtcatctcgaggggtgcctggaggattgctaatgccacttatgttgttaagagaattttttggaagtccgtctatgtcgcctgaccctaatgatccattcatgtg

SEQ ID NO: 103198 - DNA, 448 bp, Homo sapiens
gagcccgcgacgtaaggttagatcctctacagcggccgcaatacattgggtgtgctcctttctcagattgctactggatgacaaattctactaaaacagaggatgaattaaaggaaaaccaaaatatggcatccaggaaataagtgagtcccagggtgaaggtgcagggaagggccagaactaaaactttgcagcaggtcgaggacaaccaatccacattggagcaagctcaggaggccatcacgtgaggttaacaggttacctactgtatttgaccaatgagaggaggtttctatttctcatggtaaaagaataaaaacaaaaacaatgggccgggcgtggtggctcaagcctgtaatcccagcactttgggaggtggtggctcaagcctgtaatcccagcactttgggaggccgaggcgggcggatcacaagggcagatccagaca

SEQ ID NO: 103199 - DNA, 379 bp, Homo sapiens
aatacatggcacctgttaaaatgatgcccacgtcaagcctcaaacaaagaccaggacgtggtgagtacgtgtcactgtcgtttccgcacaggctgcttgcgcttcaaccttgtctggggatagtagatactgcttgagtcacaggtgagcttgtgggtggttttcttatggcagacaatgtgcactaggtttaggttctctgaggtaaaaagcaggccataaaaatactcccagtccacttctcttccatcttgttccttaattgcttccaccactgaacgaatgatggtgcgtttcttttctattctgtagccccagcgactcatgaggctgaggcaggaggatcgcttgaggccaggagttcacggcttcagcgagg

SEQ ID NO: 103200 - DNA, 1674 bp, Homo sapiens
cccggctactgcgggtcctgggtcttcacctgcggagccttacggcagctgagcggtgggagggacctgagccgcggcgctaggatgggaaacagtgcgctccgcgctcatgtggaaacggcgcagaaaactggtgtctttcagcttaaggaccgagggctgaccgagttccccgcagacttgcagaagctgacgagcaatctcaggaccatcgacttgtccaacaacaagatcgaaagcctaccgcctttgctgataggaaagttcactctgctgaagagcctctccctgaacaacaacaaactgactgttctgcctgatgagatatgcaatctgaaaaaactagagacgctaagcctaaacaacaatcaccttagagagctgccgtctacctttgggcaactctctgccctcaagaccctgagcctctctgggaaccaactgggagcattacctccccaactttgtagcctacggcacctggatgtgatggatctctctaagaaccagattcgaagtatacctgactcagtgggagagctgcaagtcatcgaactcaacctcaaccagaatcagatatctcagatctcagtgaagatatcttgctgtccacgccttaaaattcttcgcctggaagagaattgtcttgagctcagcatgcttccccagagcatcctcagtgattcccagatctgtctgcttgctgtggaaggcaatctttttgaaataaagaaacttcgagaactggaaggctatgataagtacatggagaggttcacagccaccaagaagaagtttgcgtgaagttctccaggactatggaaaccttacaggatactgacttagaacctctgttggaatgtggctgagtcaaagcctcctgttgttgttaggggtatctacagtaaggagatgatacttcaggagattatatttcactcaatgatcttttctcatttcagggctcttctcaaataagctaaaagaaaaaggatcaggagacaggaaaagtcttccgttttgagtcatgagtagggcaatagacaaggttctcttcaaaaccatcattagtttggctttaagaaaccagtagctagctgctatttatatggtgagggggtgctgcctggtaacagaatagctccacaccacagcttgagattttgtttagtttcactgtgtgagctttcataaagtctgttgccattccatctctgtgttaacacttcatatttttatgaaattcagataatttgtgagaggctggcatggatctaaggatttattatttttattctagtccatcagttcagtcgcagtttttatactaggactttaggatgtacataaatgtgtgactgtttgtcttgattaaaagtgcactttggcctgggcatggtggctcatgcctataatcccagcactttgggaggccaaggcgggtggctcacttgaggctaggagttcaagactagcgtggccaacgtgaggaaaccctgtctctactaaaaatacaaaaattagctgggtgtgttggtgcatgcttataatcccagctacttgggaggctgaggcaggagaatcgcttgaacccaggaggtggaggttgcagtgagccgagattatgccactgtactccagcgtgggtgacagagtgagactctgtctcaaatt

SEQ ID NO: 103201 - DNA, 394 bp, Homo sapiens
aatacagttcggagtatgagttctgaaattatattttcagaaattagatttactttctccaaaaaaaaaaaaaaaaaggtggggggccccaacccacaattaaaatttttttactgggaaaaaccccaaaccgctgggaaaccttttttggggaaaaaaaatttttttttttttttgaaaggggttagccttttgccccccccccgggagggggggggggccaccccccccattgtggccccccccccccagttataaaaaaatttttggccttaaaacccccaaaagcggggctttaagcccccccccccccccccccggaaatttttaatttttttaaaaaaaggggggtttaaccgggggggcccgggggcctggaactccaagcccaagg

SEQ ID NO: 103202 - DNA, 410 bp, Homo sapiens
aatacatgtgggcaaaggtcaattaataaaaggattaaaaataactttagaaaaaaaatcaacatgcaattgcatagaaggaaaaagactagaatttgagtcagttttaaagagaattctattgccaaacctaacaagcctggtgcaaatcccctcacttttcgtagccaagggtgcagggagaagccacctgcaaagacccttgcagcccgtaacaaaggcttcctccccaacacccagtagttaggtggctttaaaagaaaacaggcacagaaataacctccaaggaagcagagtcatgttccatgaagcacactggagagggacaaaaaattagccgggcgtggtggcgggcacctgtagtcccagctactcctgaggctgaggcaggagaatggcgtgaacctggg

SEQ ID NO: 103203 - DNA, 397 bp, Homo sapiens
aatccagggtctcattgtgttgcccaggctggtctccaactcctgagctcaggcaatccatctgcctcggcttcccaaagtgctagaattacaggcgtgagccactgcgcctggcctaatacgactatttgaatacggccttttaggtagtcactggggttaaatgaagtcatagggtggggccctaatctagtaaaattgttgttcttgtaagaaaaaggaagacacaccagggattcctgctcacagagaaaaggtcataggaggacacagtgagaaggcagctgtttgcaagccagggagagaggcctcaccagaaaccagccctgccggcacccagaccttagatttgcagcctctaaaactgtgagaaaataaattcctgttgtctaagctg

SEQ ID NO: 103204 - DNA, 395 bp, Homo sapiens
aatacatggaggctccatatggtccccaggctggtctcaaacttctgggctccaggaatcctcctgtcttggcctcccaaaatcctgggattacagaagagagccacaaccatgcctggccctgaaatatacacttcaataaactgaagatggtaaatgttatgttacgtggtgttaaaacaatggttaaaaaaaaaaactgaacataaccccgaattattaatctttttgaaaattaccttcaaaacacagaactgtttctctcacaaaaggaagtatatattcttcattaaacccatgtcgaaaataagactatcttcatgactactcacttaaaccggataaaagtaccatcagatatcggcttataatatatgataagccttaactaaaag

SEQ ID NO: 103205 - DNA, 551 bp, Homo sapiens
  misc_feature (1)...(551): n = a,t,c or g
gcttgatactctgagcgcacgactacaggtcacctgtaacagaggagcagtgctgctgaggttctctttgtataagctgttgtctaacatgttgatcaacttcagttgcttcacattcagccccagtttgctgagcgggagcaaggggtaaagctgtattctggggctgagggaatacattccccatagacttgcactgagaatccctgcgttctttcaaacagccagcaggcttcttctctcttgtcttctttattggcgtcacccggtctctaatggatttagcaacagctttgcaatcactttcatggaagaacccagacttgaccatttcatatgctacttcctcaggtgtatctgtttctaagttgaaactaaattcaatagcttcattgtctttgcgtttgcctttcaattttttagggtcttcaacccagagtcttatagcaagggatgaatttgagcaatcatcttcttctgctaactccaccctcaagcctgtatcctcagcaaaaaatgcatgggttaataggttcctgatagacaacctn

SEQ ID NO: 103206 - DNA, 418 bp, Homo sapiens
aatacagggggtcagtccacttggcctcggcatctgcctgggcatcaccacttggggggctggccagcacggaggcctgagtggctgtggcgggccatgccctgctcagaggccccctcgccctctgggatctgccccagcttccggatgtggcgcaggaacgaggtggcattgaaggctcgcttccagtgtgtccgagcaaagttcttccggatctgctcactgacagagcctaagatgtccctgtcgaaggctgtgtccccagagatccaaaggtgccgcaaggcctgttggcaggtgaacctcttctgggggtctcgctccagaaggtgccggatgaagtctttggctgattctgagatgtcatcccagaaaggagagtcaaactcatagctggccctcaggatctggctgaaga

SEQ ID NO: 103207 - DNA, 426 bp, Homo sapiens
  misc_feature (1)...(426): n = a,t,c or g
ccctcgtagcttggatcctctacagcggacgcttcgccattcgtgccatgaagaaatcaagtatctataataatggaaccaacattcacacaggacttaccacctgcctggccgttctcaggactaatgcacttaatcctcacaaatacaaggtaggcattattgttagctccacttaaaaaaaaatagagacagggtctcactatgctgccctggctggtctccaattcttggcctcaagtagtcctcctgccttggcctctcaaagtgctgggattacaggtgtgagcagcagcacaggcttttgagatgaggaaacaggcaacttgcccaaggtcacacagctagcattggtattggctccaaagctggtacctttcactcttgtgctttcccaagacaggatattgggaacatcgcacccan

SEQ ID NO: 103208 - DNA, 391 bp, Homo sapiens
  misc_feature (1)...(391): n = a,t,c or g
aatacagtccctgttatttaactttccgaaaatacaaagttctaaatatccctcaagcataaagcaaaaggctttatgtcttgctgaactgaaggagtgtgctccctgtattagtacaaagaattccagtttccttcctatcaaaaaacattttgtttcagtcacattgaaacaaatgacgtgacttcaatacagtgtaagtatagctgaagctgtgtccagtaatttttcttcagaactctgaagacacctatagaaactcctgaggggaaagaatggtttctcacaaggccaagaggaatattatccaaagcgaaacttgagtctgtatttcactgagttggtatttttccgaggtgcagaaaggggaatctttggcttgatagggctn

SEQ ID NO: 103209 - DNA, 396 bp, Homo sapiens
aatacatggcctggactattttaaaaagtcaatgtcataaacgacaaaaaaggaaggaaaggagggaggaagcaaggaaggaaaggagtgaggaagcaagggaggaaaggagaaatgaaggaaggaagggaggaagggagggaggaaggaatagggttacagaactattctagattacagaagactaaagagatgtgacaactaaatgatccataattggagcctccattgaaaaaaattaaaagctattagggaaaaagagtgtgtggggccaggtgcagtggctcatgtctgtaataccagcactttggaaggccaagagagtgaggaaatggctggatggtagagtagtcagaacacacacaatacttattaagttcgttgtcttatacgggc

SEQ ID NO: 103210 - DNA, 415 bp, Homo sapiens
aggggtgtgtgtgagtgtgtgtgtgtgtgtgtgggttggaggttgtaggaccggcgaggaatacgaatcatggcggctgcgctgttcgtgccgttgggattctcgctgctgggcacccacggaccctccggcgctgccggcacagtcttcactaccgcataataccttggctccaagatactcctcacctgctccttgaatgacagcgccacacaggtcacagggcaccgctggctgaaagggcgcgtggtgcttaaagaagattcttctccccggccgaaaaccggagttcaatgtgggacctcatccacccaatggggacaagtcctccttcgtctttcctcccccatccccttgtcctcggctcaccttctagcttccatggcccttcccacacttaaatgtctgccaaccc

SEQ ID NO: 103211 - DNA, 472 bp, Homo sapiens
cccgccttacctgacttccttttcggaggaagatacttgggcagccgacgatggggcaaaggattaggagaaatccagggctaaagtcacgtttttcctcctttaagacttaccttaacacttcactccatggcagttcccgagacccgccctaaccacactatttatatcaacaacctcaatgataagatcaagaaggatgagctaaaaaagtccctgtacgccatcttctcccagtttggccacaacctggatatcctggtatcacggatcctgaatatgatgggccaggcctttgtcatcttcaaggaggtcagcagcgccaccaactccctgcgctccatgcagggattccctttctatgacaagcctatgcgtatccagtatgccaagacctactcatatatcattgccaagaataaaggcacctttctgagctgtaccgcaagctgataaaatgaactccacaacg

SEQ ID NO: 103212 - DNA, 435 bp, Homo sapiens
ggctcggcatggtggtgaaagccctgtagtcccagctacggaagtggctgaggcagtattgcttgagcccaggagtttaagactacagtaaactataactgcgccactgtactccggcctaggcaacagaacaagaccctctctcaaaacaaaaaaaaaaaaaaatttaaaaaaagaggtaagttagtcaaatgaaaaaggctattatttaccagacttaaggtggcaaggaatctagcatttttcaaaggcaataccatctatatctctattttaaaaacattttacaactctgttctttaacatatgacagacttaagttctagggggctcggtataagtttcaagttttaggcatagcagaaaagaaaattctggatgaaaaaaataagtcttgtattattaataacctttttaggagagcaaactataaaa

SEQ ID NO: 103213 - DNA, 469 bp, Homo sapiens
gcggaggctctgctcggatcgaggtctgcagcgcagcttggggagcatgagtgctgcagtgactgcagggaagctggcacgggcaccggccgaccctgggaaagccggggtccccggagttgcagctcccggagctccggcggcggctccaccggcgaaagagatcccggaggtcctagaggacccacgcagccggcggcgctatgtgcggggccgctttttgggcaagggcggctttgccaagtgcttcgagatcttggacgcggacaccaaggaggagttcgcgggcaagattgtgcctaagtctctgctgctcaagccttaccataggtagaagatgttcatggaaatattcattcaccgtagcctcggccaccagcacgtcttatgattccacgggtatttctaggagcacgactttatgtccgaggagttggagcttttgccgcccgaggtctttcctttttcc

SEQ ID NO: 103214 - DNA, 1427 bp, Homo sapiens
  misc_feature (1)...(1427): n = a,t,c or g
cggcacgagcccatttggtaaagcccttcgaagtgggccgcagcagggctgtgctgaatctttagcgcaacccctctgaggaatggtgtcgtttcctactcctcaaaagtacccccgatggcaccagccttcccctcatttcccgtaatactccaacttcgaaaggctggggagtgtgaagctaggctaaaccactgaagtttaaccgggtttgaagagaccccctcccccgacccgcttccccaaactgggctgctacccccaaagcctggtcaggaaagaccctacctccataggcaaaggggttggagggcctcaattctggatttccacgtgcagcagccctgaccaacgctccaataggccgggatccagccatacttcaatggatcccaggggtatcttgaaggcatttcccaagcggcagaaaattcatgctgatgcatcatcaaaagtacttgcaaagattcctaggagggaagagggagaagaagcagaagagtggctgagctcccttcgggcccatgttgtgcgcactggcattggacgagcccgggcagaactctttgagaagcagattgttcagcatggcggccagctatgccctgcccagggcccaggggtcactcacattgtggtggatgaaggcatggactatgagcgagccctccgccttctcagactaccccagctgcccccgggtgctcagctggtgaagtcagcctggctgagcttgtgccttcaggagaggaggctggtggatgtagctggattcagcatcttcatccccagtaggtacttggaccatccacagcccagcaaggcagagcaggatgcttctattcctcctggcacccatgaggccctgcttcagacagccctttctcctcctcctcctcccaccaggcctgtgtctcctccccaaaaggcaaaagaggcaccaaacacccaagcccagcccatctctgatgatgaagccagtgatggggaagaaacccaggttagtgcagctgatctggaagccctcatcagtggccactaccccacctcccttgagggagattgtgagcctagcccagcccctgctgtcctggataagtgggtctgtgcacagccctcaagccagaaggcgaccaatcacaacctccatatcacagagaagctggaagttctggccaaagcctacagtgttcagggagacaagtggagggccctgggctatgccaaggccatcaatgccctcaagagcttccataagcctgtcacctcgtaccaggtccagaaagcagcccaggcctttaactctgggctgctgtgtgtggcatgtggttcataccgacggggaaagggcgacctgtggtgatgttcgacgtgctcatcactcacccagatnggccggtttccancggggttaatttttcaggccg

SEQ ID NO: 103215 - DNA, 286 bp, Homo sapiens
ccgaccatggcaaaactgattgcgctaaccctcatggggatggaactggcactcttctggaaccaccaggcttcttaccaaacacgacttaacgctctccgagaggtacaacccgcataacttcctaactgcaatttagttaaaggattctaaactggctctgaagactttgtagatactgcctaacggactgactttcattagctctggattagagaatccgtggatataaagacttgatccggaacagtcctggaaaaatgctactgatggacctgaatgaaat

SEQ ID NO: 103216 - DNA, 492 bp, Homo sapiens
ggaccgtaaccgcctccgtgcgtggcatatggtccctgcatgctgggggctctgtatagtacttagtattcgctgaggctaagaggcctcaggtgcctgggcttctgcccttggactcctggatatccagcctagtgctaattgaatgctaagcagtggtaattcaaaatgagagggtcccctgcctctagagtcatcatctaattggggacaggcagacctagataagaaaagcagagaactactttggaaaacagtttatctgctgtaattgaacattcagctaccctataacccagttaatccaatactggggataaatcctagagaaactcatacatgtacaccaggagatgtgtacaagaatattcatagcaaccctattcacaaaagcaaaagcctagaaataacccagatgcccatgagcaagagagtggacaagtaaactggaatattcacataatagaacattatacattgtcaaatgaactg

SEQ ID NO: 103217 - DNA, 367 bp, Homo sapiens
cagggttaaacgctgactaatctggccattgaaggcccaagcgccgggatatgcagccttgccccttggtcagggctgggctgggggtccgtgggcacaggtgggtgggcagggagtaggtggaggccgcccctcccgctgccccgcaggccctggttctggccaggctcaggaagtgagctccctggggacccaggccccatgtccagaagccacgctggacatagtgcccagattccatgcccagcagcctcctctgccaccctcagagacggagaacgtgagagcaagtaagaacccgccttccgggaggagccccgtctggattggatggcatcgcccaaaactcacgtccacccagaacctc

SEQ ID NO: 103218 - DNA, 897 bp, Homo sapiens
atagaagaacatttggaaactcactgccttgttttgtttctctctgaccaccagtgcatgcagccccttgtcatgtaccgcctgtttgctcaaatcaatcatgaccctttcatgtgaaatctttagtgttgtgagcccttaaaagggacagaaattgtgcattcaaggagcttggattttaaggcagcagcttgctgatgccacgcagctgaaaaaagcccttccttctccaactcggtgtctgagaagttttgtctgcagctcatcctgctacagaatgaactccttgtaattctacaagatatgccatgggccttttcacaggggacacaggcttcttaaaacaacccggcttcctcaccctatgtcctttatttacaaagctgtgctcctattcatgagcatgggaatgtttttccatttgtttgtgacatctcttatttctttaggggtatcttgtaattctcattatatatatcttttgcttccttggttagctgtatttttagggattttaggtcttcttgtgggcaattgtgaatgggattgcattcctgatttggctcttggcttaatgttattaacgccacattttttaaatagacaaaaatatgagattaaaaatgttgaattttactaacaataaaagttgttcaaaggaaaactataaggttcttgtttcaactctgtcataggaagaacaggacagtgagctggcacagagttagggaaattgactgtgtctcatattggctagtgagagtgatctgttggaattgtatatcaaaattttaatgtacatacattttgtctagcaattctactattgggtatttatatagtacatataaatataaatgtatatgtttagtaaatatatacttatagttagtaaat

SEQ ID NO: 103219 - DNA, 438 bp, Homo sapiens
  misc_feature (1)...(438): n = a,t,c or g
agcctgggcaacataatgagaccccacctctacaaaaaggttaaaaattagctgggcatggtggcacacacctgttgtcccagctacttggaaggctgaggcacagaattactataattgtgccactacactcccacctgggcaacaaagtaagaccctatctcaaaaaaaaaaaaaggaaaaaaaaaaaaaaaaaaagttgagtagccaaggttatcacatttttaaaagcagggcattttgccctggggttgagtccccagcccttaatcaggtaaactggggttggagcctgggttaagctactggttaccgggataaccttatgcaggctactctttaaacttcggtttccttaatataaggtaaaaataattttaaatgggggcaaaagttttggagntttccctattgaaagcatttttaaaaatggcaacg

SEQ ID NO: 103220 - DNA, 429 bp, Homo sapiens
ggaagatgatgagttcagtttgggtcatgttggctgcatagtgcctgtggaatttccagatgtggaaggaggcccagatgctggagggaggtcgaggcagggcagtcatcagggagatcatctacgcagagctgtctgcagggagtacaggggtggtctgaggtgcctggagtggaaggtggtggggattggggttgtggaggaggccttcatccacggggcaaggggcatcctgagacttagcagccactgaaaaggggagagggctgtgactgtgcatgtgacatggtgacaacagctgggcctgcttccatagccctaccctgggactgcaggtctacacagtgcagcacaggcctttcccaggattggccggccacacatgggctggagcatgggctctgcatccgtgagagcactggggggctt

SEQ ID NO: 103221 - DNA, 1243 bp, Homo sapiens
  misc_feature (1)...(1243): n = a,t,c or g
ccatccgcaattcccggcaccagcatgacagtattatacgctggcaacacagaggcagcccgcacacctgcgcctgggtgttgagagccatcctgcaagtctttttcaacagaacttcacagactgttagagctgctgagaagaatttgctttccgaattcagcctggaaggcgcccagggacagctgtactgagtctagatgactctgacccccgccccaggtcaaggccagcagagcagtcagtgcctctggagaaggcccttgctctcccacctggcccagactccgaggagcctgggtctggagctgccggtctggttcttccctttagagcccggatctgccacctgcggcccctcccaagccgtgaaccagctcatgagagatgaacactgtgggatccactcaggaaggctcggggctggcacaaaggaccacccagcattgccctgtgccacccagcactcagtggacattctggggacctgccttcagccttttcctgccctgtgcctgacatcagcaccctggctggtcagaatgccgccctcccagaggagcagccgagagatcccctgaaggctggaggcattctgctcaggacccctatcccagctcacagtgcccaaccatctcaccaggagaaagagccacatccccacgttaggaccacggagactgaccaccaccctgaccccccaaacccacgcaccagacgcttgcaggacaggcgccgcgcagcgggcaggggcttgcccggccgacccttccctacccaccttccccactgcgcgttactcccaggatatgccgagtgcacgtataaggtcatcttcgtcgtccccgtggacctcccccttcctctgcacgtcgtccaacgtgggactggcgtgtcgggcttccctgggaggatctggaggttgttctctgcagaggaccagcctggctcctggcgcgcacctctgctcccttctcctcactacccacccacgcatgtaccgggaaaaaaactactatgcccttctagaccatgttctgagaaaagatcgaaaatatttaacaagagataataataaatctgatgccggtcnnnnnnnnnnnnntnnnnnnnnnnnctccctgggggggggcccgggccccaattcccccttaaggggggggttttaaaattcccgggcccgcgtttaaaaaaggcggggcggggggaaaagngnnnnnnnngnttgaccngccntggccct

SEQ ID NO: 103222 - DNA, 423 bp, Homo sapiens
gagaaggacctggtctagttggggaaataagttttccagacagaaggtgcctcattatatcatttgaaaatgatataatgtcattgcatggaaatgatataatatcattgcatcactataatagttctcaagtgtatttttttttttttttttttaaaaccttgtctaattttgtcccccaggctggaggccaggggcataatcttgggccactgaaacctttgcctaaccctcccagttactcaggaggctgattcggaaaagccccttgaccctggaaggcggggtttgcagtgacccaaggtcgccccattgttctccagcctggcccacaaagggaaactttttctcaaaagggaaaaaaaaaattttggattaggttaaaaaattaggtttttgagaacttgaaatatgtttttaata

SEQ ID NO: 103223 - DNA, 405 bp, Homo sapiens
ggtagggacatctgagagtaatgatgaatgccaaccgctctgatggtggcacatgccgagtcacccgagtaagctattgttaagggccgtgacccgagcctccatcagccgtccgctctcatgaaaggctgtcggtggtagtccacgtgcttaagtgcctgcattccgcagtgtcaccaatatttccattagtgtttctttttttttttttgaaaccgaacctggttttgtaacccaggctgaaatgcaggggctagacattggtaatgggcaacctccgtgtcccaagttaagcagttttgcctaagcctcccaagtaatgggaactactgggccgcgccaccttgctaggctttaatatttttagtaaaaacggggtttccccatgttgccaaaacgtggttt

SEQ ID NO: 103224 - DNA, 423 bp, Homo sapiens
tagggcgccatgaggggtgacagatgccgtggtcgtggtgggcgctttggttccagagggggccctagaggacggttcaggccctttgtaccacatatcccattagacttctatttgtgtgaaatggcctttccccgggtcaagccagcacctgatgaaacttccttcagcgaggccttgctgaacaggaatcaggacctggatcccaattctggtgaacaggcatctatcctttctctggtgacaaaaatgacctatgagattgacaatctgactgtggctcctgggacattagacgtgctaattgaagaacgccaacaggggggaccctatataaaggggacaatgactacctgacgacattcgtggcagacctgacggtgatcctccagattctgactacgtgggaatctgtggcttcac

SEQ ID NO: 103225 - DNA, 414 bp, Homo sapiens
ttttttttttttgaggacaaggtctcactctgtcacccaaggtgggagtgcagtgacgacatcacagctcactggcagcctcaacctggggttcaagtgatcctctcaccttcagcctccccaagtagttgtgcctcctaggcacacaacactatgccccggcaaattttttgtattttgtattttttgtagaaacaggatttcgccatgttggccaggctggtctcgaacacctgggctcaactgatccgcctgcctcggcctcccaaagtgctgggattacaggtgtgagccaccctgctcaaccaggttttattatttaagttagttaaactttggatagattgtataatatatagtttaatgtaatcatgctcatattttttaaataaataaaacactatactactgaaa

SEQ ID NO: 103226 - DNA, 492 bp, Homo sapiens
cggtagtcgtgcgataggatttggcctagctcatgaattggagcggcatctcataaagatctggctggcaagtatcgtccgatcctggaaaaagccattcagttatctggatcagaacaactacaagcttttaaagcttttgaggaatcaatggtaaatgagaatgtcagtctcgtgatctcgcggcagatgctgactgatttttgcacacatcttcctaacttgcctgatagcacagtcaaagaaatctatcacttcaccttggaaaagatccagcctatagtcatttcatttgaggagcaggttgcttccataagacagcattttgcatctatatatgagaaagaagaagattggagaaatgcagcccaagtgttggtgggaattcctttgtaaacaggacaaaaacagtacaatgtagattataaactggagacttacttgaagattgctaggctatatctggaggatgatgatccagtccccgcatat

SEQ ID NO: 103227 - DNA, 417 bp, Homo sapiens
gtggtgcagggtctcgggctagtcatggggtccccgtctcggagactgcagactaaaccagtcattacttgtttcaagagcgttctgctaatctacacttttattttctggatcactggcgttatccttcttgcagatggcatttggggcaaggtgagcctggagaattacttttctcttttaaaagataaggccaccatagttcccttcattgctcattgcatctggttccgccattattctttttggaatccttctttgtatattttcagtctgacattatcctgtatagttgcttctagttacgtttcttatctgacttctagtctttttaaacaaatggtggatatctcctcattttttgatactaacatttaattatcttctctttgatattattatagataactcctcccc

SEQ ID NO: 103228 - DNA, 451 bp, Homo sapiens
gtggagacaaacagtgatttcaagggctgagagaaggggaattgattgcaaactggtgcaagacagcttttgtgggtgttggagggctctaagctggattgtggtgacagttgcacaactataaatttacagaaaaccattaaagtccatacgaagagtgggaggattacaccttaataaaattttttttttttttttaaagcaaatctggggctgggcaagggggcttatgccttgctagcactttgggaggctgaaaaaaggggattgcttgaccctaggaattggagattacggggagctatgaccatgaccctgcactccagcctaggcaacagagcaagaccctgtctttaaaaataaataaaattggctgggctcagtggctcatgcctggaatcccagcaccttgggagggttaggcaggccgatcctttggggccggaatcaa

SEQ ID NO: 103229 - DNA, 927 bp, Homo sapiens
  misc_feature (1)...(927): n = a,t,c or g
ctttttaggaaggcctttttttttcggcgcccttttataagccccaaaaaccattccaacaatttttcccgggtaaaacatgggccttaaggcccccggttttttgaaaggggggggccggcccccnnnnnnnnnnncccgggtaaaggcccctttttaaaacccccccttgggaaaaaaaatcaaggggccaaagtttcccaaaagtttttgggtttttgggttccccaaaaaggggaaaactttttaaaacccatgggcaatttaacccccccttgggccaaatttgggccaggaaaaaannnnnnnnnnnnnnnggnnnnnnnnnnnnnnnnnnnnnnnngctttctaaagtggctttaatatcacacaagcggctctttggtctacagtgagagaaaacagagggagccaggaaaggctccccgctggcctctggagtccaggagccttaggaaggctgaaagccagccctgaccagcaggcttagttgtcctgagaagagccagtgaggccacctggtccagttcaccaggtttcccagggaagcacaggcatctctgggtccccgagcacagtgccagggaagacacccccaatccccatctgaacaggccgagggcagcatgggaaaggctcagactgcaggttcatcccgcaggatggtaaggacacgtgctcctccctcgcagagcaggctgtgcacagcccggcacagggccagccagggcggcccctgcggctgtgcagcgcttaccagggggaggagttcagccatcaggacctgggggcagggcagggcagggccaaggtctcaggggcacctaggcggggggcaatcctgggacaggcttcgaggcccccatgcttcagccctcctccctccttctgaggctccaggctccctcctgccgtcccagccccgtc

SEQ ID NO: 103230 - DNA, 461 bp, Homo sapiens
  misc_feature (1)...(461): n = a,t,c or g
catggattgagccagatctgttccttaccccctttttccaaagaggacggtgcacccacaattttaccataacatattgggatctcaggcctgaagatgacccattctttgtaaataagttggattttcctcataatatgtgtgggtttttttggtgggggaggaggagcgagggttccgctctgtcatctgtcacccaggctggagtgcagtagtgcaatcagggctcgctgcggctttgacttcccaggctcaagcgatccttgagcctcagcctcctgagtagctgggactacagttgtgccaccacgtccagctaattttttctattgtttgtaaagacccaaggcgttgggattacaggcatgagccacctcaacggacctttttttttgacacttaaatgttattgatatgactttggaaatgactggtctcttggcacccaggctggattactn

SEQ ID NO: 103231 - DNA, 431 bp, Homo sapiens
gcaatgcgcgccgaggtgctggtgtactgctgcaggggcgctctggcttctggatgcgtgcaggcttttcgggcccgctactgtggtgttgatcatcgttgatgtgccggataatgaacaggccaacgctagcatcattgttaaattgaccgactcgttcactgagcaggctgaccagttgactgctgaggttggaaagctcttgggtgaatagaaggtggatgcaattctttgcgttgctggaggatgggcctggggcaatgccaaattcaagtctctctttaagaactgtgacctgatgcggaagcagagcatatggacatggaccatcttcagccatctggctaccatgcatctcaaggaaggaggccttctgaccttggctgtcgcaatggctgtcctggatgggactcctgggatgattggggacg

SEQ ID NO: 103232 - DNA, 422 bp, Homo sapiens
aggcttgtgaacggcgtttctgcgtctgccgtggacagcgaagctgctgcggttcctgagccggaggtttgcgccggagtgcctgtgaagaaaacggggtattgccctgaggcttatattctgcttcagttgtcttttcttgaaatattataaatcataatgaatgcacagtcagtggaagaagattcaatacttatcatcccaactccagatgaagaggaaaaaattctgagagtgaagttgtaggaggattctgatggcaaatatggatcaaaaatcccctggaaccatctcccagaaccggagaattttcgactgttatttaagcatgttggataccttgattaatctggcttatatgatgatactaactaaattttagatactatgtgttttatgttattattaaattaattttatcg

SEQ ID NO: 103233 - DNA, 404 bp, Homo sapiens
cttaaggaattttgtctcacttttaaaaagggggggagaagtcagctactctagttctgctgttttgtgtatataattttttaaaaaaaatttgtgtgcttctgctcattactacactggtgtgtccctctgccttttttttttttttaaaacggggtctctttctatcgcccaggctgaagtcctggggtgcatttccaccctactgcatccttgtcctcccagcttaaggttatctttgcacttaaccttccccagaaccgggaaccccggtcttgcaccattacccaggcctactttttaaaatatttgaaacgggtgccccctgtgttccccaggttggctaaaaactccgggccttatgggatcctccaattttggccccccaaaaaattgggaatacg

SEQ ID NO: 103234 - DNA, 513 bp, Homo sapiens
  misc_feature (1)...(513): n = a,t,c or g
gatcgataccgtcgtgacattcgancccattnaataccacccactatggggaatctagccctcgggggcaagaattcctcacgagggtttgtagattccctgatctgcaattcttcccgtgccttcatggattggagggctctcctttcttccttgaatgactttgcatccctctcgtttgctgagagttgggacaatgttggattactggtggaaccaagcccaccacatactgtaaatacactcttcctgaccaatgacctgactgacgaagtgatggatgaggtgctgctaaaaaaggcacacctcattctctcctaccatccgtctatcttccgacccatgaagcgcataacctggaacacatggaaggagctcctggtgatccgggctctggagaacagagtcggtatctactctccttatacaacctaagaagcttgccccccagggcgtcaacaactgggtggcctaaagggcttggaactttgacccttcagccccaatcattct

SEQ ID NO: 103235 - DNA, 399 bp, Homo sapiens
cggcacgagccatggtgctgtctcctgccgacaagaccaacggcaaggccgcctggggtaaggtcggcgcgcacgctggcgagtatggtgcggaggccctggagaggatgttcctgtgctttctcaccaccaagacctacttcccgcacttcgacctgagccacggctctgcccaggttaagggccacggcaagaagggggccgactcgctgaccaacgccgtggctcacgtggacgacatgcccagcgcactagtcgccctgagcgacctgcacgctcacaagcttgaggtgggcccggtcaactgtaagctcctaagacactgactgctggtgacactgggcggtcaacttcccggcctggttaacccctggggggattgccttcctggaaaagttc

SEQ ID NO: 103236 - DNA, 407 bp, Homo sapiens
aacgtctgaggttatcaataagctcctagtgcatggggcatgtgtcatttcacagaggaggacaaggctactatcacaagcctgtggggcaaggtagaatgtggaagatgctggaggagaaaccctgggaaggctcctggttgtctacccatggacccagaggttctctgacagctttggcaacctgtcctgtgcctctgccatcatgggcatccccaaagtcaaagcacatggcaagaaggcgctgacttccttgggagatgccatatagcacctggatgatctctagggcacctttgcccaactgagtgaactgcactgtgacaagctgcatgtggatcctgagaacttcaagctcctgggaaatgtgctggtgaccgttttggcaatccatttcggcaaagaat

SEQ ID NO: 103237 - DNA, 636 bp, Homo sapiens
tttcgtgagggttcacaaagggtagggtggtgtggagcaaggcagggtcctcgcaggcagtgccaagattgagctgggggtgggcagagtgggcggggtgcggacccatggccctacgcatcctgggccaggtctcttgtggtgcttcacgctctcgacctgtgagtggtgcctgctagagctgcccagatcccttttccctaccccttctgaccctggacccagagtggtggttgcgatctgctaccgtgacgtcagccctcattcgttcgttccacaaactccacagctctggtccattagaggaaggaggtcccagaatagctgggaaattacgagaacagcctcactgcacgagttggtgaatgctgtgatggcgattgtatgatggacggtgatgttgaaaccagactggggaatgaccgccccatccggagaggttagggtaaactttcgggatgctctgagtccagagatgggtttgaaagatgcaaagttaaccaagcagccaaggtgggagccaggctgttgcctgaatggagacaagcagcgagagtcaaaacccagagtctggccatacttagtatatgctatactaagaaatgtggatttttctccgttggccattggactgct

SEQ ID NO: 103238 - DNA, 348 bp, Homo sapiens
aatttgaatcatcacaaccacccacagcctaattatgtagcatcatccctctactattttttaaccaaatcaacaacaacctatttagctgttccccaaccttttcctccgaccccctaacaacccccctcctaatactaactacctgactcctacccctcacaatcatggcaagccaacgccacttatccagtgaaccactatcacgaaaaaaactctacctctctatactaatctccctacaaatctccttaattataacattcacagccacagaactaatcatattttatatcttcttcgaaaccacacttatccccaccttggctatcatcacccgatgaggcg

SEQ ID NO: 103239 - DNA, 354 bp, Homo sapiens
cacttgtaacaactgagagtaataaccagactcaccgtggtaaacaactaaacctcggcttaatccaggggagtgagctatccataggcccacatcaagcgatgcactacacctgtaaagagaactaacagaacagaggttcatagtctcggtgaactgtgccattgctcactgtcgacaccagagtgcatctgaagatcatgtgaaactacggaatgaagtaactgaatttgcacaaacatgggatgctgatgagtcagctgaaaattgtgacaaatcacttcataccctttttggagacaaaatatgcacagttgcaactcttcgtgaaacctatggagaaatggctgactg

SEQ ID NO: 103240 - DNA, 405 bp, Homo sapiens
cgcctttggcacaacgaagtgggtaacctatatttccgttctttttctgtgtagctcggcttattccaggggtgtgttacgtctagatgctcacaaaagtgaggctgctcatcggtttaaagatttgggagaagaaaatttcaaagccttggcgttgattgcctttgctcagtatcttcagcagtgtccatttggaagatcatgttgatttagtgaatgaagtaactgaatttgcaaaaacatgtgttgctgatgagtcagctgaaaattgggacaaaattacttcataccctttttggatactaattatgcgcagttgcatgtttccgtgaaaccctatggtgaaacggcggcttgctgagcaaaacacgagcctgtcgaagatgaatggcttcttgcgacccc

SEQ ID NO: 103241 - DNA, 397 bp, Homo sapiens
gactctccaggggtcctaggcctcaactcctcccatagatactgtgttcttcggataagtgtccagcattgctggactctgaaatatcccgggggtggggggtgggggagttcccatacctctggtctggaagtacaacatctcgcacacacagcgctgacgtgaaccatacatccagtccctgcgcagtgggaactggtcagaacggatgagccacatggtggctcgatgacgccagaggcaccacccttactacatccgtgctacaggctcagctgagcatggctgtctgaccctgcaaacgtgatgatggatagcgttatcaccgcgggcgtgctggtggccaccgtcgggcccgccgaatttccaagcttgggcacagaatttactatcttcg

SEQ ID NO: 103242 - DNA, 955 bp, Homo sapiens
  misc_feature (1)...(955): n = a,t,c or g
ttttttttttttggaacactgaatgaagtttcattgcaagagaaacacgtcactgaaacccgttgaagagaagggaatcacaacacagagagaaactgcaaacggccaccacaggacacaggtcccacacaggtcccgggccccctcctcctgaggttccctggcaagacgcctcatctgctcctactcctgctgcagcccccgttggcaaactccttccttcctgagggcccccggggtctgcctcttgccagggaaggtagactctgggcagtgtccactggctttaggggagccccctcccaagcccatctgctgggggcagggccctgccctatggccccgcacagggacagtcacagggacactgggaaaacacaggcaggggaacacccttaccagggtcaagggaaacttgaggtcatgagttaacaacaggggtggaacaccaaaggnacaaagctcctcgggagcctcaggcagggcagccccggctctgtccctgggtccagtctcttcctcccacagtcacggtcaccatcgtggtcacagggtgagcgtccgccttgccctggtgcttccttcctgtcatctcctgggactgtgctgggggactccggggaggagctgctcagagaagaacacacacagctccacaagaacaagcagccactggcctagatctacacagggaaagcagaggtggtgctcatgacgcgggacagcagtgagcagagcctgggctcacaggaagctcacagcatgtgccttgggcccagaggcggccacctgggtgggtgcatagcacactactttgcacaggaacaacggctagcggtgggtgggcgtctgctggacgcgtgggtcactacaggggcctacacaggtgaggatgagcttcctggaacagggggcagcctgtcccgggaacggtgagttgggggacccctcttgg

SEQ ID NO: 103243 - DNA, 252 bp, Homo sapiens
cgtcccccccagctcctagcctccgactccctccccccctcacgccctccctcctttcctccctccctccttctctctcttcggccccccctttcacgttcactctgtctctcccactatctctgcccccctctatccttgatacaacagctgacctcatttcccgataccttttcccccccgaaaagtacaacatctggcccgccccagcccgaagacagcccgtcctccctggacaatcagacgaattct

SEQ ID NO: 103244 - DNA, 394 bp, Homo sapiens
agcttgagaatttattgctttgttatagaagtaatttgctttttatacttattgttattatgtactcaatttcatgagggatttgacttttgatgaattttactatactttgtataggttactgattacttcaatacttcttttttgttgtagttaaatcattttattttaattttatacgcattccgtttatcttgtttttgtatcttatttgtttattggtgttttagttaatcttttttgatcttagttattttattgtttacgattaattatttttaatcttttttactgattatttctcctatatagtatctgtttgtggaatatggttttgctcttaattagtaagctattttaattttgattttgcggtcgatttgctctaatccag

SEQ ID NO: 103245 - DNA, 371 bp, Homo sapiens
  misc_feature (1)...(371): n = a,t,c or g
ggataataaagataaaggggtatacagacttggattctgtgtctatatatgtgaagcgttagagagaggtggtaaattgtttctctcccgtgggttgtgcacatctctgatattatggtaatccccatatcttctccttttgcagggtggggtgtcttggatagtatggttactgaatgtagaatctactaactcctcttttttatttcctgagactgggtctcactgtgctgtccagggtggagtgcagtggtgtggtcgtggctcactgcagtcttgaactcctgggctcaatcctgagtagctgggattacaggtatgtgccatcatgccagctaattagaaaagtttttctttgttgagatggggtn

SEQ ID NO: 103246 - DNA, 633 bp, Homo sapiens
tcgtgttggcatttatctcatttcttaggtctagtagtaattgcttttataaatttgagagctccagtattaggtgcacacagatttaggactgtgacattttcctgttggactagtccttttattattatataatgtccctctttgtctttttaactgttgttgctttaaagtctttttgtctgatataagaatagctactcctgtgtccatttgcatggaatatctattcccacccctttaccttaagtttatgtgagtccttatgtgttgggtgagtctcttgaagacagcagatacttggttggtgaatttttattcattctgctattctgtatcttttaagtggcacatttaggccatttacattcaatgtgggtattgagatgtgaggtactatgctattcatcatgctggttttctagaatgctggttatgctagcagtgaagttgccacgtggacagactcaggacctctggttagccagggtgttgcaagtggtagaatcatctgttgttttctccttctttggtgcaggattgttctgttatgactttgtgtaatggcttgagttcattggcctccaaccaggaggtggaactttcaagacagcaccagctgctgtagcgccc

SEQ ID NO: 103247 - DNA, 374 bp, Homo sapiens
gcaaaagttatatgcaaaattttaacgagagagaatagagagagagaagagagagggtgagagagagggggatttattttaagaaattcactcccacaattatgaaggctggcaagtccaaactgcagtgtagactgacaggctgcagacccaagtgaagagctaattctgcagttgagtccattcttggttgctctggggtagtcagtcttttgttctattcaggcctttgactgattagatgagactcactcactaatgaagggcaatctgcttgagtcaaagtctactagtttaagtgtaaacctcattcaaaaacatcctcaccgaaacattcagaatgttgacaaaatatctgggtatcatggaacagc

SEQ ID NO: 103248 - DNA, 374 bp, Homo sapiens
tctttctcctctgagctttttcacattctctggtggcaactgtagcagtaagagtcacaggatgaacagtcaggtggaggatgaccacattgagttgcctagctgaaacatgtgctccgtctatgtctgcaaagtgaaagaaagctacactatctcttcaacatagatcagtgggggaaattttatacttgggatgatttatatgaatgcatctcatcaaagttcacaacacatttttttttcagttttttattttcagtttttagagtcagggccttgctctgtcgcccaggctggactgcagtgatgctatcatagctcactgcatccttgaattcctgggctcaagtcatgcccccacctcagcctcctga

SEQ ID NO: 103249 - DNA, 424 bp, Homo sapiens
atgacacgctatactgagactcgtttactactattacctattacgaatttggaccactcggtctagaaatctgcacgagcaggccaatggaacaattagccaagagaggcggcatgcaccagtactcccagctacttgcgaggctgaggtgacaggattgcttgaatccagcaatcctcctttgtttcctgttagaaaagaaaaattaagtctaaacagacataaatgtaacaactaagactataaaacccttagatgaaaacataggaataactctttatgaccttggattaggcagtggtttcttagatatgacataaacacacaagtggcaaatgaaaaaataggttaatgggatttcatcagaaatttaaaacttacgtgcattgggcactatcacgaagtgaaaaaaaccaacccttgg

SEQ ID NO: 103250 - DNA, 333 bp, Homo sapiens
cccagcaatgggattgctgggacaaatgataggtctattgggagttatttgataacttcaagctgcttttcctaggggctgaactaatttgcattcccaccagtagtgatatacttattcccttttctctacaacctcaccagcatctgttacttttttttatttttttatagccattctgactggcgagagatggaatctcattgccagattgattagcatctctttgatgattaatggttctatcatgttagttggcagcttgcctattcttggttagctttccaattggataactgctaagcctttgacaaagacttccctgggctttgg

SEQ ID NO: 103251 - DNA, 356 bp, Homo sapiens
cggcacgagcggcacgagcggcacgagcggcacgagcggcacgagaggatattaaaatttacagcaaatattgaacttaattttaatgttttggaattatttctggtaaagtcaagaaaaagacaagaattcttgctctcactctggataaatggtcacatacatgtgtacacagagagtacctgtaagaatgttcattgcaacattgtttaatagtgaaaaactgtagtttacctaaatatgtattaaaagaagaaagggtcaggcacagtggctcatacatgtaatcccagcagtttaggaggccaaggtgggaggattgcttgagtccaggagttccagcctgggcaacaata

SEQ ID NO: 103252 - DNA, 340 bp, Homo sapiens
cggcacgagctgatgaccccacacgcctttggcgcaatgaagagggtgacctttatttccctactttttctctttaacttggcttattccaggggtgtgattagtcgagatgcgcacagaagtgaggatgctcatccgattaaagatttggtataagaaactttcaaagccttggtgatgattgcctttgctcagcatctacagcagcgtccatttgaagatcatgtataattactgaatgagcgtaactgaatttgcaaaaacatgtgttgctgaagaatcagctgaaaattgtgacaaatcgcttcataccctttttggagacaaataatgcacagta

SEQ ID NO: 103253 - DNA, 1123 bp, Homo sapiens
  misc_feature (1)...(1123): n = a,t,c or g
tggctggggcccagctgcctaacagaagcaagcctgaatactctatggaagaaggtatcttatgctttaaattgctgctgcagttttaaattagtgtctggcacagaataaccaagtgtgaaaggaacaggaaacatgagtgaaaatcagacccgttattagagtgnnnnnnnnnnnnnnnnnnnnnnnnnnnnnnnnnnnnnnnnnnnnnnnnnnnnnnnnnnnnnnnnnnnnnnnnnnnnnnnnnnnnnnnnnnnnnnnnnnnnnnnnnnnnnnnnnnnnnnnnnnnnnnnnnnnnnnnnnnnnnnnnnnnnnnnnnnnnnnnnnnnnnnnnnnctgttgatagacccacaggagccccagacgctggagttggcaccggcaggtggtgcctcaggtctgcagggagcagatgggaagggccctgtggcagcagagtgcccaccggcagcagagtacagcagtctggcccagcacagacgcttggagaggcatgactcttcacacggtgctgctggcttgaggacacagcggctttgctgaccttccctcaggttgagctgtggtgtgagcagctgccttggcctcgcctctccccggggcaggcctgtgcctcagctcccactggccacctccctacttcctcatggaggctcctttgcacatctaatcccatcttggacgacccagtgcagactttaaagtaattgtcttctgtattcagaagagtattgcttcaatagagaccttgaaactagaaaagaatccccttcgggagaccgagacgggtggatcacttgaggtcaggagttcgagaccagcctgggttacatgatgaaactccgtctcctaaaaatacaaaaattagctgggcagggtggcatttgcctgtagtcccagctactcaggaggctgaggtaggagaatcacttgaacccaggaagtagaggttgcagtgagccaagatcgtgccactgcactccagcctgggcgacagagtgagactccatctcaaaaaaaaaaaatacaaaaattagttaggcatggtggtgtgcacctatagtcccagctactcaggaaactgagacagaaaatcatttgaacctgggagacagagggtgca

SEQ ID NO: 103254 - DNA, 355 bp, Homo sapiens
attacagatctttactccatgtttcattttggataggttgacttggctactatcactagcttgtggggcaaggggaatgagcaaaaagctggacgataaaccctggaaaggctcctggatgtctacccatggacccataggttctttgacagctttggcaacctgacctctgcctctgccatcatgggcaaccccattgtcaaggcacatggcaagaaggtgctgacttccttgggagatgccataatgcacctggatgatctaagggcacctttgcccagctgagcgaactgcactgtgacacgctgcatgtggatcctgagaacttccatgagaatccatgtgatggttcacg

SEQ ID NO: 103255 - DNA, 367 bp, Homo sapiens
  misc_feature (1)...(367): n = a,t,c or g
atgttgcccaggctggtctcaaactcctgggctcaagcgatccacccaccttagcctcccaaagtactgggattacagatgtgagccactgcacccacccgaggtctgtattttctaaagataactgcattgtaatttatagaatgcatagaagggagataaggaaatcaggaggccatgaaatcccagtgagccaagcctccgtcacccaccatgtaaagcacggagcagcttgaaaagacattgagagaagtaaacccacaggttcagtggccagtggcaaaggacaagagccacagaggcactgggacctgaaagctaagagagcagggatgcgggtcacagagggagggatgtttggggctan

SEQ ID NO: 103256 - DNA, 357 bp, Homo sapiens
cctatatcaaacgccatgcgtcatttggggcaagaggagacagctactatcacaagcctgtggggcaaggtgaatgtggaagatgctggatgagaaaccctgggaaggctcctggttatctacccatggacccataggctctttgacagctttggcaacctgtcctctgcctctgccatcatgggcaacccctgagtcaatagcacatgtgaagaaggcgctgacttccttgggagatgccataaagcacctggatgatctcaagggcacctttgcccagctgattgaactgcactgtgacaagctgtttgtggatcctgagaacttcaagctcctgggaaatgtgctggcgaccgg

SEQ ID NO: 103257 - DNA, 369 bp, Homo sapiens
ggaacgtctgaggttatcaataagctcctaggccagacgccatgggtcatttcacagaggaggacaaggctactatcacaagcctgtggggcaaggggaatgtggaagatgctggaggagaaaccctggcaaggctcctgggtgtctacccatggacccagaggttatttgacagctttggcaacctgtcctctgcctctgccatcatgggcaaccccaaagtcaaggcacatggcaagaaggtgctgacttccttgggagatgccatatagcacctggatgatctcaagggcacctttgcccagcatgagtgaactgcactgagacaagctgcatgtggatcctgagaacttcaagctgctgggaaag

SEQ ID NO: 103258 - DNA, 365 bp, Homo sapiens
tggatgagtagttacttcttatggatggggaaagaaaatagtttcttgagacagactctgctccttgtgaggatgctatgaacacagttgaaatgacaacaaaaaatttagaataatccataaacctagttgataaagcagtggcaaggggtttgagaggattggcttcaatttcgaaaaaagttctactctgggtaagatgccatcaaacagcattgcatgctgtagagaaatctttcatgaaaggaagagttgatgtggcaaacttcatttttgtcttattttaagaaattgcgacaggcactccagcagccaccaccctgaacgatcatcagccatcagcactgaggcaagacccttcaccg

SEQ ID NO: 103259 - DNA, 401 bp, Homo sapiens
ctggagaattgcttcaatctgggaggcagaggttgcagtgagctgagatcgtgccattgcactccagcctgggcgacagagtaagactctgtctcagaaaaaaaaaaaaaaaaaagggaaaaaaaaagatgatttagccaaaaaaatacctttaaatttctaaaaatttaaaaggaaggatttcaaattgaaaagtttataagggggccaaaaaaaaagggaaagatcccccctaaatcctttaaaaggaaaggtcaaagtaccttccttaaggaaaaaattctgaaatcttttaaaaagaaaaaacatgttatttatgagggaccagggatcatatggatattaaatttctcaacagcacatgtgctgcaaaaaaacaagggagtaattttaagtttggg

SEQ ID NO: 103260 - DNA, 390 bp, Homo sapiens
gaatatttttacctaacatgcttaaacaaaacaaatttcattcttaacatcaggctctgaaagttccttttagttagcatttgctatattgacagctggtttgacaagtacatattttagcataagaaaaaaacagcaggccgggtgcagtggcccttgcttgtaatcccagcactttgggaggccaaggaggcagattgcttgagctcaggagttcaaggccagcctgggcagcatagcaagaccccgtctctaccaaaaaaaaaggaaaaaaaattacaaaaactagccaaatgtggtggcgtgcacctgtagtcccagctcttggaaggctaaggtggaaggatgacttgagcctaggaggcagaggttgcagtgtggttgagattc

SEQ ID NO: 103261 - DNA, 436 bp, Homo sapiens
cttcaataccctggttggctggaactaatacagcacagtcttaccataaaaatttactgaagggagatggttaagagacattcttctggtagataaaactcacttacattgtataatacatatatcctatactgaatgttaataaattaatagtaatggctcaaatgaaactccagtgcagtcagaatgctgtaaaacagtgagatctaaaaacactatcttaacttaggtacactactaaggaaataatgaagaaaaaacctaacagattaagaaaataaagttctagctgggcgtgtaagcggacacctgtaatcccagctactggggaggctgaagcaggaaaatcgcttgaacccaggagacggaggtttcagtgagccaagcatgtgccattgcactccagcccgggcaacaagagtgaaactccatctca

SEQ ID NO: 103262 - DNA, 338 bp, Homo sapiens
gttcattgtcggaaagaacagcagcctaaatgggtaccagtaagtattaggtcagaaaattaacagtggaatgcaacacagcctttaataagatattgaaaatcaaggcccagtgcagtggctaatttaacaccggtaatcccagcactttgggaggccgaagcaggtggatcccctgagctcaagcaattctccctcagcctcctgagtagtcgggaccacaggtttgcaacaccatgtctggctgattttttatattttttgtagagatggagtttcactgtgttgcccagtgtggttttgaactcctggactcaagcagtcctcccacctcggcc

SEQ ID NO: 103263 - DNA, 353 bp, Homo sapiens
  misc_feature (1)...(353): n = a,t,c or g
gttctcccagcacggagtttgagatctgagaatggacagactgcctcctcaagtgggtccctgaccccgagtagcctaactgggagacatctcacagtaggggccaactgacacctcatacagctgggtgcccctctgagacaaagcttccagaggaaggatcaggcagcaacatctgctgttctgcaatatttgctgttctgcagcctccgctggtgatacccaggcaaacagggtctggagtggacctccagcaaactccaacagacttgcagctgagggtcctgactgttagaaggaacactaacaaacaggacatctacaccaaaaccctatctgcacgtcaccatcan

SEQ ID NO: 103264 - DNA, 356 bp, Homo sapiens
  misc_feature (1)...(356): n = a,t,c or g
ggtaaaagtggacattcttgtcatcttccagattttagaggaaaggattttagtttttccccacttagtatgatactagctgttggtctgtcatatatgacttttattatgttgaggtatgttcattccatacccagttttcaaagggttttttattattaaagaatattaaattttatcaaatttttttagtataattgaaatgattatatggattttgtccttgtttttttttttttttttttttttttgaaaaaaaattctccttttgtcccccagttgggaggccaaggggggaacctaagttatttgaacctttgtttccgggggttaaaggaatttccctctttaacccn

SEQ ID NO: 103265 - DNA, 346 bp, Homo sapiens
gagagctagcaccattaccctgctgatgggctatgtctataagagtttagttttctaaaaacttttgtatataaaacttttttttaaagctgtctccaactaatatttgatccaaagaaggatccaaagaaggatctctggaaatttggggttttttggttttggccttccccttccccttccccttccccttctccttcttcttctttttagagacaggctggaagacccaggctagaatgcagaagcatgatcacggctcactgtaacctggaactcctaggctcaagtgatcctcctgcctcagcctcctcaagtagctgggactacaggtcccacctcaccg

SEQ ID NO: 103266 - DNA, 349 bp, Homo sapiens
cggcacgagctggaagaataattaaagatctttggttgggttttttttttttttttttttttttttacccaaaaaaaacccctttatttaccagggacaaaggggggggaaaactccaaaccgcgaaaaaaaataatccacacccggttaaaagggaaaagaaaaaacccccccccggggggaccaggggggggaaaaaccccccgggaaacccattttggggttttgggccccaaaggtttttttttgggggaaaaacttttggggggggggcacacccacctgacccaaccctggggcgagcccccaaagttaaaaaagaccctttgggaagaggggcccccccccc

SEQ ID NO: 103267 - DNA, 368 bp, Homo sapiens
ccctgagacacaacaatattgaaattaggccatttaacaggcttccttgctaaaggaaagtgaaagtgaaaggaagagtcctacgtctctcactttaagtcaaaagttaggaatgattaggctttgtgaggaaggcatgtcaaaagccaaggcagactgaaggttaggtctcttgcaccagttagccaacttgtgaacacaaaggaaaagttatttaaggaaattaaaagtgctatttcagtgaacacattaatgataagaaaacaaacagccttactgctgatatggacaaagttgtagtggcctggatagaagatctaagcagccagaacaatcccttaagccaaagcctaatccacagcaaggcc

SEQ ID NO: 103268 - DNA, 345 bp, Homo sapiens
  misc_feature (1)...(345): n = a,t,c or g
gagagtagtagcattagaaatactggggacgaggatactatatattatggtgatgtcccattgaatattacagtgaatgtcccctctctggggcccgtgtgaattgatgccttactaaatatgctcagctggtactcagggtacgttttgctcaggttcaggcagaaccaccctgttagtaggtaaccttttattcttttttttgagacagagtcttactctgttgcctaggctgaaatgcagtggtgcgatcttggctcactgcaaactccacctcctgggttcaagcaatcctcctgtctcagcactttgggaggccagggcaggcggatcacgaagtcaggn

SEQ ID NO: 103269 - DNA, 468 bp, Homo sapiens
cggcacgagcggcacgagctggccttttcctatgggtataaatgggtcattttgcaaatgtgatgtaaatggaatgcgtgggaccctttcagatgagctcttcactcaggaacatgcccttgagaccatctaagctgcttcctgtgtcaacagttagttcctttttactgataagtagcctcccctggtaggaaaggacctctttgtttaccattcacctactgaagcttttgactattacaaatagcgctgccatgagcaatcacgtataggtgtttgtgtgaacataaatctttctttctctgggacaaatgcccaagagtgtgactgctgggtcaaatggtcagagtctgtttcgcttttttaagatactgtcaaactcttttccatggtgggtgcgccatgttacattccacacgcaattgaatgccataccgttatttcgaaatctctggcagcatttgagct

SEQ ID NO: 103270 - DNA, 368 bp, Homo sapiens
caagaattgctaaatttctctcacttagatgtaatctttttattgcgtacccaccccatcccagttaagctgagtcacacgaacataattgtcggtcataaattgaggagcaacgacatagtcacccatattagggcaattttctaacaagacataatccactacagtgaaactttctttggcaaaatcatccatggtgcacgagcaggggcttgcagcccatgagcctcagatgcaggctaccactgctgccacctccagttcttcatgtcagccagatggcaggagggagcaagtgggcctattacagttttaagagatgaggtctcactgtgttgcccaagctggccttgaaatcctggactcaa

SEQ ID NO: 103271 - DNA, 373 bp, Homo sapiens
tttttttcttttttttctgagatggagtctcgctctgtggcccagactggagtgcagtggcacgatctcggctcactgcaacctccacctcctaggttcaagcaattctcctgagtatctgggattacaggcgtaagccaacgtgcccggtcaacttatatattttcaagattcacctcctctcaccaaatatttaactacctgctgaatacgcctctgtactaggcacataatggaactaataaacgctcatgtccagtttttgagtcgagtgaacaatgctgcataccctaataagattgggtacagatcggcatgcgcctgtagccccagctactcatgagaattgcttgaacctacgaggtgcaggttg

SEQ ID NO: 103272 - DNA, 1989 bp, Homo sapiens
gtatttttagtagagacagggtttcaccatattagccaggatggtctcgatctcctgaccttgttatctgcccgcctcgacctcccaaagtgctgggattacaggcgtgagtcaccatgcccagcctcaagtaggtttttaatgaatttcttatacttttaaaatacaacattatggcaataaaagactattccacttcttttctaatctggagattgtattgatttttctagtataattttctggctcatacctccagtacaatggtgaatagtggtataagtagaaattctcgtcctgttttcaaacttgcagataaagcccctagtcattcaccattaagtatattagcttttggtgtggagtttttcatcttggctcactgcagcctcaacctcttaagctcaagtgagcctcccaccttaactgcctgagtagttgggacaataggcatgcaccaccatgcccagataattttttttttaatattttgtaaagatggggattccctatattgtccagaatggtcttgaactcctggctttatgcagtctttccacctcagcctcccaaagttctgggttacaggtgtgagccactgcgccgggccaattttggtttttcatggaggacttttagcaggtctcaaaagttttcttctaatagttttcttggggttctatcattcataggtgttgaatttaccaaactttttctatttcaattattacatttttactttgttcaagtaatattgtatcatattaaatgaacattgcattgtgaaaataccctgcttagtcatggtatgtaatcatccttatacctttttgtattctttttttaaatatttctgagaatttctgtgtctaaatttaaatagtatgttgtttcgtaatcatcttgtgattcttttgtctcctttgggtattattggctaatagatgaattaagaaatgttacctcttctactgcttgaagtttttgtgagaaattgatgtttttcattaagtgttgatgaaatgtacaacttaagcagtttataacagctattctatctaaaaagatataatttttttgttctatggatataagtatattctattatatatataatgaaacaattcataggatgttttttcagtttacttttgtaatccatctctatcggtattttttatttcatagtatgtcatgaacaattattctaggcacttgacatggaataatttgaaaaaatagagaatgagtcccgtactacaatcaataaataactcaaaattttttccatttttaggatgaagaatatgaatatagttctgttacgtaatatttgtgtttactgtgtgagacaaatgagttactgaatgtaaaaataattagtaaaactgccctttgattttggaatgtatgaagcaggcaaatgcccctaccttctatttttatcaatatttagataaggcagacaaataaattttaataagatatacagaataatcttgtatttgaagaatgctatgaaaaaagatagtttggaggagtagttagtatttggctcatataatgtgttaggtaactattctaagccattaaacatttgtatgcttaatacctaagagtttaaagtgaagaaatcaaagattcattgaaaaagaaaaattaaattttaaaaaaattgtatttttaattgaaaaataatagttgtatatatctgtctacagtgtaatattttgatatatgtttatgttgtaaaatgattaaatcaagttaatgtttataacctcatataatttttgtggtgaaaacattgaaaatagtctttatagcagttttgaaatacacattattgtagtcaccattctgtgcaattgatcactaaatcttatttctcctaagtgaaacttggtacactttgaagaacatttcccctctttattcaccccatctcctagcctctgtcacattttcattcatactaggtaacattaa

SEQ ID NO: 103273 - DNA, 359 bp, Homo sapiens
ggggtttcaccgtgttggccaggatgtctcgaacacctgacctcaggtgatccacccacctccacctcccagagtgctgggattacaggaatgagccaccatgcccagccagtgggatgttattacttgtttttcatgacacctttctgtattttcagaagacacacatgtcttttgtgcatgtgtccattttctctcaggcaacagcatttgctgaatactctgcaggctaagcctgagtacaaaattaggtttctgggtgtgtggaaagaatactttaacaattagaatctatctagttattcactcttgtgaaaggacttaaacattcatacaggatgaaagaactgacaacatag

SEQ ID NO: 103274 - DNA, 344 bp, Homo sapiens
tttacgagctggaagtgcagcctgaagatgtgactgaattggtataatctcatgataaaacttgaattggggagaagttgcttcttacggataagcacagaaactgggttcttgagacagaataggctcctggtaaagactctgtaaacattgatgaaatgacaacagagactagaatattacataaacagctgacaaagcagtgacaggatttgagagaactgactttaactttaaaagttctatcagaggtcaaagtctataatacagcattatattgcgaaaggcagtcaacagaagcagcaaatttcattggtgccttattttaagaaactgccacagct

SEQ ID NO: 103275 - DNA, 357 bp, Homo sapiens
ttggatggtcttgaactcctgacctcaagtgatccgcccacctcggcttcccaaagtgctgggattataggcgtgaggcaccgtgccttgccgataaatggattttaagctgagtctttgagggaagagtaggacctgcactgaaacaaaaagacaatttgtggggttggggagaggaaccagatgtaaacaatggaaaggttttggtgtcactttgagaaggattttttggaagggttttgcaatgtccattctgtatcttgggttaacactagtaagtcaaatggagaataatttgagtgtcactcattcctacagatagaaaaattttaaagtagcttgggccgggattttcct

SEQ ID NO: 103276 - DNA, 361 bp, Homo sapiens
tagggctcggcgtggaattaacaagacttaaggtttcaaagaaactagcaaatgtatgccctatggagctcttgaagtgttagctggttttagcatctttcttcatgtgctatagggccattatgataaacaagtagcatctttaccacaggaagttagataccaagtcatcagacactagaagtatagagacactaaactcatgtaaccctcacaactactttatgagataggtactattataaatcccattttaagccaggcgcggaggctcatgcctgtaatcccagcaatttgggaggctgaggcgggtgaatcatttgaggtcaggagttcaagactagcttggccaacatggcgg

SEQ ID NO: 103277 - DNA, 406 bp, Homo sapiens
  misc_feature (1)...(406): n = a,t,c or g
ggcacgaggggaagttatctttgttttttagttatctaggaaactaaaaaatcagaaaagttagtttgattttatcagatacatctgctacatctaatgagatgatcatatagtttttttcctcccataaactgtgaatataatgaatcacattaattgatttttttaaatgttaaaccaatctccatttctgggataaattcaacttagtcatgttgtattagccttttgtatatcttatatctataatactgaatgagattatcatactctttacatgtatttgaagccatgtcattaagtgcatacaatttttattaaatttttaattggacaaataattgtatttatttnggggggtacggtgtaggtgttttggatatatggttacnttgtgggggtggac

SEQ ID NO: 103278 - DNA, 396 bp, Homo sapiens
ctggagaattgcttgaaccagggagtcagacgttgcagtgagccaggatcacgccactgcactccagcctggcgacagagtgagacttcatgtcaaaaataaaaaaaaaaagaaatataggaaaaacaggtaaagaatggtgaaaaaaatcattgtgtttgaattgccttaggattccaggtaaagctctatgagtctgttaggaaaggaaaggagcttatgtggagacaacacagaagtccctgctggagctgtggttttggatggaaaattataagagaagcgggccaaaaaaactgagaagcatcagatttaatagaaaataaattgctaaggaaatgtgggggaaagcagttatgttggagaatacagagaagccaagggaacggcaaactg

SEQ ID NO: 103279 - DNA, 359 bp, Homo sapiens
cttgaactcctgacctcaggtgatccgcccacctcggcctctcaaagtgttgggattataggcatgagccaccgcgcccggcccataatgttttaagaaagtttacgaatgtgtgttgggcctcatgcaaagccatcctgggctgcatgcagcccgcgggctgtgggttggacaagcttgctttgtgccattaaattgttatttgtaattagtgctggaaagtcagggtttgagaggcagacactgctgtctctgaatggaaaggtccacgtgtgggaatgaggaagccttgctcatgagcaccctgacagagcacccatgcctccagcagtgggagggcaggcgtgacgctgccgatt

SEQ ID NO: 103280 - DNA, 386 bp, Homo sapiens
aaaattccctctatctgggacagagcacctgggagaaggggcagctgtgggcgcagcttcagcagacttaaactatcctgcctgctggctctgaagagggcagtggatctcctagcaccattctcaagctctgctaagggacagactgcctccttaagtgggtccctgactcccgtgcctcctgactgggagacacctcacagcagggttcaacagacacctcatgcaggagagttctggctggcatctggcgggtgcccctctggaatgaagcttccagaggaaggaacaggccacaatctctgctgttctgcagccactgctggtgatacctaggcaaacagggtctggagtggacctccagcaaactccagcagacctgcagc

SEQ ID NO: 103281 - DNA, 394 bp, Homo sapiens
ggctcggcgtggtgctgcaagattatagtccctgttagtcgagaggctgaggtgggagaactgcttgagcccaggagggaaagcagcagtgaactgagatcacgccactgcactccagcctgggcgacagtgagaccctgtctcaaaaaaaaaaaaaaaatggcaagtttggaaaatataaccggggagtcataatggccagttttacctgggggagtaaaaaccattaaaccagggttagggaaaaacctcaatagtagggccccccattttttagggaaaagggatatagtaaaaggaaggataagggctggctgaaaaatttgggggctaaccctaaaaaggggggggtaaaacgctcaggtttattaatagggtcttagaaaaccttttt

SEQ ID NO: 103282 - DNA, 491 bp, Homo sapiens
  misc_feature (1)...(491): n = a,t,c or g
gccttgactgtgccacggaatttgccatgggtagaatcatgatggaacatatagaccgtgtagttgagggcaatgagggggtccttgatgagacaatatccacttcgccagagttaaaagcagccttggtgaccaggtgtctaataaggccaaatcagtttacctggctttcactttcattgtgatgtctcagggatgtgatgggtgttacatgagaagatgtggctgttgaatgggaggaacagaaagtgtaaannnnnnnnnnaagaaaaaaatgaattattgactgtagtaattgcgtgatttcattctaataggtcatgctgcaatgatatattgctnnnnnnnnnnnnnnnnnnnnnnnnnnnnnnnnnnnnttcattttattatgctctggttctgcagtcaggaattggatggggcacaccagagtcaggttgtctttggcccatgttgtctgggcatcaggtggaaaaacatgacgtctgagg

SEQ ID NO: 103283 - DNA, 355 bp, Homo sapiens
gcattttatagttttcagtgtacaggtcttttacctccatggttaaatatgtttctaagtattttttttttgtagctattgtaaatgggattgttctcttggttaatttttcaaatagttgttagtttacagaaatgctgctgatttttgtgtgttgattttgtatcctgcaactttactgtatttgtttattagtcctaacgggtttttgctggagtctttagggttttctatatataggatcatgtcaggccaggcttggtggcttatgcctgtaatgccagcactttgggaggccgaggcaggcggatcacgaggtcaggagatcgagaccatcctggctaacatggtgaaa

SEQ ID NO: 103284 - DNA, 339 bp, Homo sapiens
gcgtggcttacacctgtaatcccagaagtctgggaggcttgggacggttggatcacctgagctcaggaattcaaggccagcctggcaacatggcgaaaccctgcctttaccaaaaatacctaaaataatcaactctactaagcaggctgagggcaccccttgagcccggaaggcagagggtgcagtgagctgatatgacaccactgcactctaatctgggtgacagtgcgaggctctcagagaacaaaagtatccttacctacagctcaaagataggtttacaaaaaaagtatctctaggttattctttgtcaaaacctgcctgaggttcggatccctt

SEQ ID NO: 103285 - DNA, 359 bp, Homo sapiens
  misc_feature (1)...(359): n = a,t,c or g
gtctgagagaggttttgatgtgtgaagtgtccctcgtgcttgaaaagattgggaagcacacatctagtccaacccttccacttactttacaagatagaccaaagcccatgagggttccctttactgccttagggttgggaagattgtcagtaataaagtagggaccagatcctgattctttaggacccaaaagtgagtgctttgtttttttcttaagtatatcatattaatggttcccattaatccagaacatccctatgaattagaaaaatccacaaaatatggtcaggcgtggtggctcacacctgtaatcccagcactttgggaggccgagtggggtggatcacctgaggtcagan

SEQ ID NO: 103286 - DNA, 559 bp, Homo sapiens
ggcacgagtttaagagaaaaatagcaaaagccttggatcccttttccactttgggttgttcagggagaaactgccctgtgtgattttggagtaacagctgggcctaaagctctagcccctgctattacacatactacttcatttcaacggtcacaggcaacatgaacacaagacacttctcaaccatggaaaaacatctggatttcatttggtagtttaaaggtttttgaaaatgttgatatacacaagctgtacttggagctggataacagacataggagctggatgacagacatacttttattcttttatttttgagatgggagtttcactgtcacccaggctggagtgcaatggagcgatcttggctcactgcaacctccacctcccaggctcaagcaattctcctgcctcagcctcctgagtagctgaggtgggaggaactctagagcccaggaggttgaggctacagtgagccacagttatgccactgcaatcctgcttgggtgacagagcgagactccgtcccaaaaaaaatttttttaaattaaaaaaaaaa

SEQ ID NO: 103287 - DNA, 469 bp, Homo sapiens
catcgaaaccctagtcgtagacatctgtagactcgatactaatgggactacgcactataaggactttaatcctggacgcacaaacttggggacgagctcccagaattgctgaggcttcggtagctaatgccgttcagagacgtcaaactatgagtagcccatcgcagctcatggacgcctgcctgactgtgaaaactccacctgtaggggcagggcatagccgaacaaaaggcagcagaaacttctgcagacataaatgtccgtatctgacagctttgaagagagtagtggttctcccagcatggagtttgagatctgagaacggacagactgcctcctcaagtgggtccctgacccctgagtagcctaactgggaggcacctcctagtaggggccaaccgacacctcacatagccgggtgcccctctgagatgaagcttccagaggaacaatcaggcagctacatttg

SEQ ID NO: 103288 - DNA, 375 bp, Homo sapiens
taggtattttgttcttctgtgacaattgtgagtgagattgcattcctgatgtggctctcggctcagctattgttggtatataggaatgctagtgatttttgtatgtcgagtttgtatcctgagacttcactgacaaaagtcactcagggccaagccttaactgaaatggctgattaacctagtgagagcagtactgggtcaaaactgatcaaaaggcagtcatattcaacaaagtactggaagttctggccagagcagtcaggcaagagaaataaagggcccgggtgcagtggctcacacttgtaatcccagcactttgggaggccgaggcaggtggatcacttgaggtcaagagtttgagaccagcctggccaa

SEQ ID NO: 103289 - DNA, 368 bp, Homo sapiens
acaattcatttttataatatactttacttaatccaatatatccaaaatattggcatttcaacgtgatcactattaaaaattttaacgtaatagtttttaccttccctttttcatcctgtcttcaaagtctggtatgtactgtacttttgcagttcttcccagttcagactagccacattccaagtgcttaattgccgtgtgtggcaggtggctgccctattggatagcacaggtctagagaaatgataccttttttttttttgaaacagagtctaactctgttgccaaggctgcagtgcacgggggtgaccttggctcattaaaacctttgcctcccgggttcaagtaattctcctgcctaaggcttg

SEQ ID NO: 103290 - DNA, 1010 bp, Homo sapiens
  misc_feature (1)...(1010): n = a,t,c or g
tggtggtgggcatctgtagtcccagcttcttgggaggctgagatgggagaatcacttgaactcagaagatggaagttgcagtgagccaagattgctctattgcactccagcgtaggcaacagaatgagactctgtctcaaaaaaaattgctttccaataaaaaatttactttttatatttaataatttatcagcattagtatggggtactaatatactgctactaattataataacttagttcagaagaaatttttaacatttagagctttatggtcatgggaagtaaacactttatttttatattttgtcatagagaagtatgataaggtgataataaaaacttttttattagtttgttctcacattgctatgaagaaatacctgagactgggaaatttataaagaaaagaggtttaaaagactcaccagttccacttggctggggaggcctcaggaaacttggaatcatggcagaaggcatgtcttcacagggcagcaggagagagaatgagtgccagcaggagaaacgccagacgcttataaaactatcnnnnnnnnnnnnnnnnnnnnnnnnnnnnnnnnnnnnnnnnnnnnnnnnnnnnnnnnnnnnnnnnnnnnnnnnnnnnnnnnnnnnnnnnnnnnnnnnnnnnnnnnnnnnnnnnnnnnnnnnnnnnnnnnnnnnnnnnnnnnnnnnnnnnnnnnnnnnnnnnnnnngccggatactgaatttcccaaccattattgtattggagtgtatctatcccttgaggcctagtaatattagctttacttatttatgggtgctatggtgttgggtgtataaatattttgaattgtcatatcctcctgcagaattgatcccttcactattatctatttacgnnnnnnnnnnnnnnnnnnnnncataacgtctgttttatctggcataagaatagctattcttactgcttttgctttctgtttgtgtagcatgtttttctctaccccttcactttcagtcgatctgtg

SEQ ID NO: 103291 - DNA, 349 bp, Homo sapiens
aatacctaagagtagaatgggtggatataggtaggtatatgcttaactttttaggaaacggctaaactattttccaaagttgtactattttacattcccacaaacggtatgggagatccagtccttccatttccttgtcaacatgggggtcagtgttttagccactttaacgggactgtggtggtatctccttggtgactaatgttgctgaacatcttttcacgtgcttatttgctatccatatatcttctttcacgaagtgttcatgagtttttgtatatggtaagagagacacatcaaagttctttgcatgttaatataccaattgatctatcacatttaaaaagac

SEQ ID NO: 103292 - DNA, 340 bp, Homo sapiens
caaaatggagattaggcgcgattaaatacctttgcaatggctgctaaatgttgaagtgaaaggaagagcctaacaccttactttaaatcataagctacaaatgattaagcttatagaggaaggcatgttgaaagctgtgaatggccagaagctacgcctcttgtaccaaacagtcaatttgcgaatgccaaggatgagctcttgatggacattataagtgctactccagcgaccgtatgaatgataggatagcaaaacagccttattgccgatttggagaaagttcgagtggtctgactagatgatcaaacagtcataacattcacttaagccacatccg

SEQ ID NO: 103293 - DNA, 382 bp, Homo sapiens
gtggcgggtgcctgtagtgccagctactcgagaggctgaggcaggagaatggcatcaacccgggaggtggagcttgcagtgagctgagattgcttgagacaccttctcaaaaaaaaaaaaaaaaagggggggaattgggaaatccaaaggggatttggttgttctaaaggggagttccgtttaaccttacaaaatgggctttgccccaaataatccagagggaagtcttaagggaaaaaagggggttttgagagtccccccctggaaattccctattggcctttaaaggttttggttaaggctttttaaaaaccctttcctaataaagtttgccggagacgcgaccggaaattctgaactttggaatgtaaaatcctaaaag

SEQ ID NO: 103294 - DNA, 351 bp, Homo sapiens
ctgtaatcccagcactttgggaggctgaggcaggcagactgcctgaactcagaagtttgagaccagcttgggcaacatggcgaaaccccatctctaccaaaaaaagaaaaaagaaaaaataaaaacaaaaaaatcccagcaacaataataataataataattagccaggtgtgttggtgtgtgccctgtagtcccagctactcatgaagtggaggtgggaggatcaactgagtccggaaggttgagattgcagtgagccgtgatcacacactgcactccaccctgggtgaaacagcccatctcaaaaaacagttcatcataagctgaaaaaaatcagatctgctattacac

SEQ ID NO: 103295 - DNA, 352 bp, Homo sapiens
aaagaacatactttgtatgatttttgtatgacttgaatcctttaacatttggctatctgttctccccccacccccccccttggagataggatcttgctgtcttcctccaggctgggctgcagtggtgtgtgatcacggctggctgcaccctcaacctcccaggctcaagcagtccacccacgtcagcctcagcctcttgagtacctgggaccacaggctcgcacgaccacgtctggctaatttttgtaatttttttgtagagaccgagtcttgccatgtaacttaggccagtcttgaatcctcccaccttggcctcccaaaggtcgacgcggccgcgaattccagatctatg

SEQ ID NO: 103296 - DNA, 359 bp, Homo sapiens
acattgtacattaaacgtaatttgtatataactatgtaagattggaactgaatagcaggtgactggttgacctaatgtttcctttttgtatgtttagattttgtaattttccttgcatatttttgtaattaatacctttttccttttctcatatctcatactttttttttttttttaaaaaagggccttatttttgcccccggggttaatttaagggaccaaaataaattttattttaccctttttgatgtgttttttaatatttattattgttaaatcttttttatttttttcttgtattattattttttatatttttttttttcttttattgttttgtaatgagatttattgttttg

SEQ ID NO: 103297 - DNA, 341 bp, Homo sapiens
cttcaatgttgacgactgctgaatgatcagcatggcagatactaaaggatggggtgactatggtataatttcttaaaataggtaacaatgaagtttgccacactgattgcaacctcttacaaaagattcatctagcatgtggcactggttgacggtttttaactcaagagtagaatttcaatttgatccaatcctctcaaaccctgctgctgctttatcaactacacttatggaatattctaaatcctttgttgtcaggtcaacaatgttcgtagcattttcaccaggagatttcaagaaaccacttactttgctcatccataagaagcaactcctcaccc

SEQ ID NO: 103298 - DNA, 350 bp, Homo sapiens
tacggggattcaaaactaacatgcgggcctgaccttaagggatgaatatgagtagagatgggaaatactccaataaatagaaagtatgagtataactaagagctataacagatgcttgaaatgtaacacagaaaagggagtactgaatgacttggggatagctgaattcaatacatgcagcaaaagcttattattactaattgtttctaaaggcaggatattgctctgttgcccaggctggaatgaagcggaacaatcacaactcactggatcctcaactctcgggctcaagtgaacctcccacctcagcctctttggtagctgggaccacaggtgcatgccattatgtc

SEQ ID NO: 103299 - DNA, 356 bp, Homo sapiens
ctcgaactcttgacctcaagtgatgcgcccgccttggcctcccaaagtgctgggattatagacgtcagccacagtgcccagccaaactttcttaatatgtgcagtatgcatagtggttacaaaggtatgttcactttgtgatacatacacgacccagaaactcatgattaatgtgcctttttctatgtgtttttttcctcctatggctgacctcctaattaacatgtgttctctggaaaaacatttcactcaaacaaacttcacctcatgtccctcggtttatatttcccttcacaaacacaggatagataaggaacagtcagagagctcaatctatacaaatacagttatgcatg

SEQ ID NO: 103300 - DNA, 324 bp, Homo sapiens
atcggccagcagttccccatctctctccctctccttgtgtctccctattccctgagacacagtattgaaattaggttaattaataacccttacaatggcctctatgtgttcaaatgaaaggaagagtcacacatctctcacttcaaatcaaaagctagaaatgagtaagcctactgaggaaggcatgttgaaagccaagacaagttgaaagctaggcctctttcaccaaacaaccaacttgttaaaacaaagaaaaagtttttggaggaaattaaaagtactactccactgaacgcaccattgatgagaaagtgaaacagcctt

SEQ ID NO: 103301 - DNA, 372 bp, Homo sapiens
  misc_feature (1)...(372): n = a,t,c or g
gggcaacatagtgagaccctgtctctacaacaaaatttttaaaaattagctgggctaggaggcatgcccctgtggtcccagctacctgggaggctgaagtgggaggatcgcctgggcccagggaggttgaggttgcagtgagctgagattttgctgagtagagcagctgagactacactctagcctgagctagtgagaccccatctcaaagaataaaaaaaaaagcaaaccatgctttgctaattgttagctgtgtgaccttggaccattgtttgatctctgagtatgtttcctcatctgtaaaaatgagagtaatggcccttgcctcttgaaatgtaactggaattcagtgggatagagcgcccaatacan

SEQ ID NO: 103302 - DNA, 359 bp, Homo sapiens
cgcggccgcgtcgaccaccatcaaagaacaagatatgttaaagttctattttttattttatttttttgagacggagtctcaccctgtcacccaggttggagtgcagtggtgcaatctctgctcactgcaacctccgcctcccaggtccaagtgattctcctgcctgggtgacagagcaagactctgtatcaaaagaataaaaaagaaaaaaattaattaaaataaatgtttatttacaagtcacaacccacccctaacacagtcctcagcacatcgttagggttctctcagtacttaactaactgaatgagaaaataaacagacgcgtgactaaatcctccagcaaagagaaggatagg

SEQ ID NO: 103303 - DNA, 349 bp, Homo sapiens
  misc_feature (1)...(349): n = a,t,c or g
tgcaacctccacctcccgagtccaagcgattgtactatctcagcctctctagcagctgggactacaagtacgcaccacacctagctgctagagaggctgagatgggagggtggcttgagcccaggatatcaaggctgtggtgagccatgattgtgccactgcattccagcagtgacaaagcaaggccccatctcaaaaataaataaataaaaagaaaaacaaccctccacacctggtctgaaattttctgtgattattcagccctcgaaacaactttcaggtacagtgactgccataatgtaaactggctcccaagaaggtcatactctccaatgtacattcagagtan

SEQ ID NO: 103304 - DNA, 403 bp, Homo sapiens
tatagcattgcattctcaaagacaaggtccaaaaatatgcagttaaatttgcaattttatttaattatctatctatttagagacgggatctcgttctatcgcccaagctggagtgcaatagcaacctcaaacttctgggcacgagcgatcatctcgcctcagccttccaaacacctgagaccacaggcacatgccaccatgcccggctaatattttcgtttttttttagtgacagggtctagcccaggctggtctcgaactctagtctcaagcgatctgtccacctaggcctcccaaaagcactgagattcccagatgtgagccactgtacccaacctagatttgtaatttaatgacagaaaaccttttaagtgctacctatctcttacagagtaaaatacaa

SEQ ID NO: 103305 - DNA, 415 bp, Homo sapiens
  misc_feature (1)...(415): n = a,t,c or g
tacggggatcgtggccaacgcccgttactccagcttctcaggaggctgatgctggagaatggcctgaacccggataggcggagcttgcatctagccgagatcgtgcctctgcacttccgcctgggagacttagctatactccgtctcataataatacaatctacctacatagatttgagactctaagctatatatgcattttttcatgagacagtgcactttggtacctttgtactattctgtgatggttattgatggtgactgcatggaattaaattaacctatgtatattacagccttttctacttttcctcacagcatatataagataatttgagatttgatttttttttaagtttgctacttttctaagttgaaactttgtgatgcggcaaaccataccttactaatttan

SEQ ID NO: 103306 - DNA, 554 bp, Homo sapiens
acatcgatacgacttttttttttgttaagtattttttttttttccagagccagaaacaggattttatttaaaatttattgtaatggggtccgcgcaaaaggaaggggtggagggtggggtacatgcaggggacacaggaacacgatgacatggccagggccacaacttcttctgtcgtggggaagagggatgaaaagacaagaccagggctggagctggggtggaagaggggagggggacactggctgcattcccccgcccccaggaagcacctctaggccctggacccctcgctcaccctggcccctaagactccatctcttctctgcctctggccctcctggctcttcctcctgctccccttgactttttcccctgacagattctcaagtaggacgatgttcagggcctgaccccaaccccccataccaccttatgaaggtacaacctttgccggccctgcttctgcccctcctcaaacctcaccgctttccctctttgggacagctctgatccccctccttcctctcctccctccccctggaaaaaaaaaa

SEQ ID NO: 103307 - DNA, 364 bp, Homo sapiens
acgctaacgtaaccccctaatagaattaactaaccactcactcatctacctccccaccccatccagggatctccgcatgatgaaacttcggctcactccttggagcctgcctgatcctccaaatcaccacaggactattcctagccatgcactactcacctatacgccttcaactcgccttttcatcaatcgcccacatcactcgagacgtaaattatggctgaatcatccgctaccttcacgccaatggcgcctcaatattctttatctgcctattcctacacatcgggcgaggactatattacggatcatttctctactcacaaacctgaaacatcggcattatcctcctgcttgcaactat

SEQ ID NO: 103308 - DNA, 351 bp, Homo sapiens
aactctcccagttgcccttggtggggtttccacctggcttttggctacagagagggaaggtaaagcctgaggccggcataaggggaggccttggaacctgagctgccaatgccagccctgtcccatctgcggccacgctactcgctcctctcccaacaactcccttcgtggggacaaaagtgacaattgtaggccaggcacagtggctcaagccctgtaatcccagcactttgagaggccaaggcgggtggattacctccatctgtttagtagaaatgggcaaaaccccatctctactaaaaatacaagaattagctgggcgtggtggcgtgtgcctgtaatcccagctaa

SEQ ID NO: 103309 - DNA, 369 bp, Homo sapiens
actgtgttgcctaagttggcctcgggcttctgagcttaagcgatcctcccacctcagccttcaaaaatgctgggattacacgtgtgagctaccttttctagactcctttttgtttcctattttattgatttctgctattctgtttttatttcttttattctatgtattttgagtttagttttctctttttctagcttctctgaaagctcagatcattgattctaagcctttcttttctaacacacttgaaaatatataaaaatatgaagttataaatttcttcctgtatattacttaagttgcatttcatgaacttgactagtttgtgtttttattgccattcagtttgtactattcttctttgatcca

SEQ ID NO: 103310 - DNA, 320 bp, Homo sapiens
tcctataccacctggaaatgagtcctcacccccgacagcacaagaggatatgcaagcggcaaataagcacacagaagatactcaacatccttagccatcagagaaacacactgaaaccacaaccagagagccctacgcacctatcacgatggctacaacagaaactagtgccaacaccacctgctggagagaatatggagaaagtggatcttactgttgggtgggatgtaaaacattacggccactctgcaaaacggtttggcagtttcttaaaaaaccaagcatgtgactagcatatgacccagcaattacactcttcg

SEQ ID NO: 103311 - DNA, 344 bp, Homo sapiens
cccctccccacacaaaactggccccagggccagagcttcttgcactaccctgtactgctccctgcagtctctgtcctctggtcatctttttttttttttttttggaaacaaatcttgcttttgcccccaaggttggagggcatggccagaattcgggttaatggaaatttccgcttccgggcccaagccttttttcttgcccaagcttccaaaccagtgggaattacgggcccccgcaacaagcccgggccattttttggaagtttaagataaaaacagggtttcatggggtaaccagggagggcctgaatttcctgacctcgggatcggcccccttaggttcg

SEQ ID NO: 103312 - DNA, 329 bp, Homo sapiens
atgcagggcacctgtagtcccagccacttgggaggctgaggcaggagaattgcttgaacccgggaggcggagattttagcgagccgagatcatgccactatacagagtgagactccgtctcaaaataaaataaaataaaatatgcttctgtcactcaaatcaacatgaaaatcaaacatcagtgaggaggtggggaatgggaatcatagaattgggagcagtgaaaatactaagtcctcttttttttttttttttggaaacgtgttttttaattgctccatagcttgatgtttggtggaaactttggttttaatttttcttggtgtttc

SEQ ID NO: 103313 - DNA, 338 bp, Homo sapiens
atttgattatccatctatgactcatccatccatctgtccattcatttatctcatctctatatctatcttatctaatatctatctatctatctatctatctatcttgctatctatgtatctatcatctatctacctatctatcatccatctatctctatctatgtatcatctatttattctatcaatcatctacctctgtattatttttctacccatctatcatccacccattcgtccatttatctcctttctatatctatcttatccattaactatctacttctatctatctctctatctatctatttgtctatatctttatatttatcatccaaccg

SEQ ID NO: 103314 - DNA, 436 bp, Homo sapiens
ggcttcagggccgaggtcatacaggagggctaggcgtggagcctcagcccttcatgtcctgggacgtcaaaggaacaaagcaataggtagaaaggccctcacccggtgctacagtagcaggcagcattcacccagcagctccttccttccctcctctgtccttccaaaaccacatactgatcccaactgtgtgccagatgctgcgttcacactgaggtaagtacatggggactttcaggaaggcttaagaattagcagggtaaattcaagaccatcctggcaacatcacaagaccctgtctctacaacaaattaaaaacttagccaggcgtggtggcaggcacctatagtccgagctgttcaggctaaggcaagaagatcacttgaccccaggagttcgaggctgcagtgagctatgatcacaccactccactccg

SEQ ID NO: 103315 - DNA, 369 bp, Homo sapiens
gcgtgtctgtggtcccagctactcgagaggctgaggtgggagagtcgctggaacctgggaggcgggggttgcggtgagctgagattatgccactgggtaacagagggagactccgtctcaaaaaaaataaggtttgaaaatcactagtttaggctaagtgcagcttatgtttaggtgttaaccaggaagaagtaaggatccttgtgtagctctcagtgcaatattagatatgcttttcttagtggaaatgaaagttttgcattcactagtgtaactgatacattagtcatcactttgggttatgttcgggttttggttcccgaacattataaagtagcaaagtttacacctgcagttgaaggaaagtag

SEQ ID NO: 103316 - DNA, 312 bp, Homo sapiens
cttgtttgctattggcttccatttgcgtggaatatctttttccatccctttattttcagtctatatatgtcttaccagtgaagtgagtttttttaggcagcatataattgggtcatttttttttttctgtccattcagccagtctgcatcttttcaggggaaaatttaatccacttacatttaagattatcattgatctgaggggacttattcttgccatttcgttcaatcgttttctggctatttggtatatcctttggttctttctctattagtgttcatcattgcagtttggtaattttctgtaggggc

SEQ ID NO: 103317 - DNA, 411 bp, Homo sapiens
ttagaggtgctgattatcttggtccgtagatgacaatcacccgacgatcccatacccgagcatacctcgaggatgcgaattccgaggcgcctaaaccttgttcgctattggcttccatttgtgtggaatatctttttccatccctttattttcagcctatatatgtcttaccagtgaagtgagtttttttaggcagcatataattgggtcatttttttttttctgtccattcagcccgtctgtatcttttcagtggaaaatttaatccacttacatttaagattattattgatatgaggggacttattcttgccattttgttcaatcgctttatggctatttcggaaatcctttgaccctttctctattattgttacacattgcagattgggaaatcgctgtacggggacc

SEQ ID NO: 103318 - DNA, 375 bp, Homo sapiens
  misc_feature (1)...(375): n = a,t,c or g
gtttggttctttcttttcttatttatttgcctaactagtgttccatctagtttattaattttttttttttttttcataaaaccagctccgggatgggttgagtttttttttttttggaaaaagttttaagggtctttttccctttaagttttacttgaatttgggctttttttggttttgggaaacttttagggttggtttcccttgggttttttggtcttttaaaccaaaattttggggggtaactttaaaatttttcaaattttttttttttttgggggaaaggttccctttttaccccaaattgggaaaccgggggtatattcggggctaaggggaccctccttttcggggtttaaggctcttttgggggcn

SEQ ID NO: 103319 - DNA, 287 bp, Homo sapiens
ctgtgatcacagggacttgggaggctgaggcgggagaattacttgaacccaggaggtggagattgcagcgagctgagattgcgccactgaactccagtcctggcgacagagtgagactccgtctcaaattacaagtaaacagctgtttttatgaacctatgtatatagatagctcaagacgggccggctggacaagaaatggggactatttttctgcgatcgaattcataaactgggaatgcccggatttaaaagagatcttttccactgaaaatacgggacccagg

SEQ ID NO: 103320 - DNA, 322 bp, Homo sapiens
cggagtctcaaaaaaaagaaaagaagagaaaaaaaaggaaaaaaccagcctggccaacatgggaaaaccctgtttttaccaaaaaccccaaaaatttaaaaaataaaaaaaatttacccaggtgtgggggcacacacttgaattcccagttactaaggaacctgaggaaggaaaatcatttgaactcgggaggcaaaggttgcaatgacccgaaattgggccattgcattccagcccaaatgacaaaaactccttttaaaaaaaaagggggggcaaaacaaaacgggaaaaaacttttgcaattaatatatgggataaaaaa

SEQ ID NO: 103321 - DNA, 318 bp, Homo sapiens
gaggcaggacagtcacccgaaccccggaggtggaggccgcattgagccaagatcatgccattgcactccagcctaggcgacagagcgagacaccatctcaaaaaaaaaaaaaaaatccttaaaacaaatccaaacggacaaacaactgagggactttctataaaacccctatcagcacttttaaaactggccaagataccgaaaaaaagggaaagactgaaaaacggtcagtcaacgcggccggaatttccaaatttatgaatcgaaaatccggaaaaaccccgaaggttcacttaaacggggcatggggcacctttt

SEQ ID NO: 103322 - DNA, 317 bp, Homo sapiens
ctctgggctcaagtgattctcctgcctcaacctcctgagtagctcaaattacagccaagagacacacactgcatctggctatccaccaccagtccttttatttattttttttttgagaccgagtcttgctctgttgcccaagcttgaatgcagtggcacgatctcggctcactgcaacctccatctcccgggttcgggcgattctcctgcctcagcctcctgtacaggcatgcaccaccacacctggctaatgaagtgtattaactcatttgatgtccctgacatgcctctgggtttgggactaaatagtcacatct

SEQ ID NO: 103323 - DNA, 296 bp, Homo sapiens
tttctaaaacgttgtaagtgcttgctctttaaatggtctggtgaaggggagactttcctgtctcactttgaatcaaatcctttaaatgattacgcttaccacggaacgctttttgaaagctgagagaggccaaaagctaggtctcttgcaccaaacagcaaagttgtgaatgcaaggaaattttcttgaatgaagttagtagtgctactccagtgtatgaaggcataatacgaaagctgaacagccttattgctactatggagaaagcttgtgtggtctggatagaagatcaaact

SEQ ID NO: 103324 - DNA, 300 bp, Homo sapiens
aaactaggccaagtaatagccctgcagcgctctctaagtgttcaagtagaaggaagactcacatgtctcactttgaatcaaaagctagaaatgattaagcttagcaaggaaggcattttgaaagctgagagaggccaaaagctaggcctcttgcaccaaacagcaaagttgtgaatgcaaggaaaagttcttgaaggaagttagaagtgctactccagtgtatgaaggcataataagaaagcaaaacagccttattgctaatatggagaaagcttgagtggtctggatagaagatcaaac

SEQ ID NO: 103325 - DNA, 351 bp, Homo sapiens
gccgagcttgcagtgagccgagattgcgccactgcactccagtctgggcgacagggcgagactctgtctcaaaaaaaaaaaaaaaaaaaaaaaaagacctttaaaaaaaccccaaataagggcaataaaaagtattttgcccaaggaatttaacaattaattggaaacttaaaataaaaagggttttccaaaaaaggaccatttaaaagggaaaaaagaaaggcaaaaaaattttggagtttaaaaaaagccccctggaaaccaaaattttccaaaaaagattccaaaaaaaaatggattaaaggtgggcctttaaaaaaggttgggaaatttaaaaggtaaaaaaaaggg

SEQ ID NO: 103326 - DNA, 433 bp, Homo sapiens
ggcacgaggaatcgtttcagccccgcaggcggaggttgcagtgagcccagctattgcaccactgcactccagcctgggcgacagagagagactgtctcaaaaaaaaaaaaaaaaaaaaaaaaaaaattttttaaaaaagcggcaaaaagttaacccctttaggggggggaaaaaaaaaattgaccaggggcccggtttaaaacccttgcaaatggaaaaaaaacgggaatcagcggttgccatgcaaagggcatcgacactgggttgaaagactataaacagaagggcacttgcctgatcgtaaagcccatggcccttaaattgagcaaatcgaggtaaaacaaatggcttatataaactagaaaagcgttatcacggaaacccttgtgaggatcttagaaatgactggacctgattaatcgcctataatacg

SEQ ID NO: 103327 - DNA, 373 bp, Homo sapiens
ggcacgaggcctgtaaacctggctactcggcaggctgaggcacaataattgcttgatcctgggaggctgaggtctgcgcgaacctatgttgcgccactgctctcaaacctgggtgacagagcaagactctgtctcaaaaaaaaaacaaaagacacttctagatattcacactaggcttcaaaataccccagaagaggaaaatgtgatttaaactgtgtggtacaagaggagatggctgtccccaaatgctttgctccttgcctagtgcggagaaccttagggtaccagtcccctcctgctgataacatactgttccctcagggctgaccccagggtgctgcccctagaggtgttaagtttttcctctctgaag

SEQ ID NO: 103328 - DNA, 421 bp, Homo sapiens
  misc_feature (1)...(421): n = a,t,c or g
ggcacgaggggaggccgaggcacgagaatagcttgaacttaggaggcagaggttgtagtgagccaagattgcaccactaaactccggcctgggcgacagagcaagactccatctcaaaaataaataaataaataaataaataaatgtcaagtatctgagtagacatttcttcaaaggaaatatacaaagccccaataaacacagaaaagccatcagggaaatccaaatctctctagacagataataacaagtgttgttgaggatgtggagaagtacaatacttcatacattgctgcatgtgtgaaatggtacattcactttggaaaatagtctggtagctcctaacagggttaatatagagttgtcagatgacccagcaattctactaggaggtatacccccagaagaaatgaaaacatgn

SEQ ID NO: 103329 - DNA, 373 bp, Homo sapiens
ggcacgagctggatttggcaacaacttcatgaatatgatgtcaagtactagcaataacaaaaaatatatatattatacttcaccaaaattaaaaactctgcaatggatattaccaagaaagcaaaagagaacctacagaacggaattaaatatttgcaaatcacaaaactaagggatgcatatccaaaacatataaagaactacaactcaacaacaaaaattcaaacctactcaaaaatgggccaaggacttagacatttctccacagacaatgaaacaaacagccaagaaccaagtgaaaagatgttcaacatcactagtaatcagagaaatgcaaatctataccaaatcaatcccacttcacattcactag

SEQ ID NO: 103330 - DNA, 289 bp, Homo sapiens
ggcacgagggatcacctgaggtcaggagttcgagaccaggcctggccaacatggtgaaacccggtctctactaaaaatacaaaattaaggctgcgggcacggtggctcatgcctgtcatctcagcatgacttggagactgaggcaagtgaattgcctgagctaggagttccacaccagcctgagcaacatggtgaaacccagtctctactagtatacaaataattagctggtcgtggctaaatctgcctgcaagctcaactacttgctacgttcccgctaatacaagct

SEQ ID NO: 103331 - DNA, 563 bp, Homo sapiens
gctcgacgatcagcctgggcaacatagcaagacccccacctataggaaaataaatccgagcgttccaagtgttcagctattcacccactttaggtttccaccttccttagaaagtagagtagtataaattatttctgaaatttgtgaaacgatgtaccacataaccctctcaaaccaggttgctactacttccaatgacttcattgataaggggcaaagtaactcgaatgatgggtgagctcatgacatcgtttagctccgtatcaaactctggatttgggaaaattgctactgatttattaaacacttgaattcttatatgctaggtcagaatttggcaactaaactctcagaaatttgtaaacttcctttttacatagaaaagtgaatccaggctgggtatggtggcacgtgcctgtaatcccagctgctcaggaggctgaggcatgataattgcttgaacctgggaggtggaggttgcagtgagcccaagattacactgctgtactccagcctgggcaacagacggaggctctgtctcaaaaaaaaaaaaaagtcgacgc

SEQ ID NO: 103332 - DNA, 400 bp, Homo sapiens
ggcacgagggaacccacagaaggaagtataggatgctctagtccctcactggtcctcatactcacctatatgtctagatcttaatgtcctgggaatctatttatttagcgacagagtgtcactcttggtacccaggttggagtgcagtgacgcgatcatggctcagcatagtcttgacctccccaggctcaggtgatcctcccatctcagtctcccgagaaactggctaatgtttgtgattttagtggagacggggttttgccatgttgcctaagatggtcgaaaactcctgggctcaagcaatcctcccgccttggcctcctaaagtgctgcgaaacatgcgtaagtcgcagctctgaccattgctactaggactcttgagcgcggatcactctgatct

SEQ ID NO: 103333 - DNA, 356 bp, Homo sapiens
ggcacgagcggcacgaggtgtttggctctttctgctcttgcttttaattctcacagtaacactctgaagtggattccatcatcattcccattttgcaagggaggaaacagattagcgaagtgaggcctcagcgtatgtgtgagagggaaggaggtctgtttatttcagaaacgttgctctttctctgcccagctccttcctgctctctttcctcacaccagcccagtaatcctacttttaaaaaaacgtatcttggctgggcgcagtgggtgacacctgtaatcccagcactttgggaggccgaggcgggtggatcacgagggcaggagatcaagaccatcctggccaacatggtg

SEQ ID NO: 103334 - DNA, 447 bp, Homo sapiens
ggcacgagattgcttgagcttggggtgtggaggctgcagtgagccatgattacatgactgcactctagcctgggtgacagagggagaccctgtcttaaaaattaaaaataaataaagctgctataaaaattcttacataagtctttttgtgcacaggtggttttatttctcttaggaaatacctaggagtagatttattgggtcataaggtaagtgaatgtgttatgagaaactgctgagcctttttccaaagtggttgtaccattttatacttcatcagcagtgtatgggagttccagttgctccacatcctaccaacttttggtgttgtcagtcttttacatttagctgttgggtgtgcagtgggatctcattatggttttaatttgctctgctctgatgactaatgatgcagagcatctttttacatgcttattgaccattggg

SEQ ID NO: 103335 - DNA, 340 bp, Homo sapiens
ggcacgaggcatagggctcggcgtggaggtgcattcctgtagtcccggctactcatgacgctgaggcaggaggactgcttgagccggggcttgaggctacagtgagctacgatcgagccactgaactccagctggaatagggagcgagaccccatctctttagaacaccatcagaaaacagcagacaagatccccttgactgctaggagacaagataggaagaaggaaggaaggaaaagatagtctaagccagactcagccttacgagatattactgtagcctatgccagggcttgtcaatctaccactggcgaaccacttgcctttgcaattagagttg

SEQ ID NO: 103336 - DNA, 366 bp, Homo sapiens
ggcacgagtcgaactcctgacctcaggtgatccactcgcctcggcctcccaaagtgctgggattataggcatgcgccaccatgcccggccggcttatgatttaaaacatgaattgtttatttgtggaattgttcacataattttatttagataatgatttattatctcaatgaattttgtttttttatattttgtatttgacttgtctattaatgaaatcttacttgggttaaaagaatggtcaatttatttatcttctgtcattctttatcttctctttgctctttctatttactattactaatgttttttttatgtatgttgttactcttattactatgttcttctattataattagttaaccg

SEQ ID NO: 103337 - DNA, 1009 bp, Homo sapiens
  misc_feature (1)...(1009): n = a,t,c or g
gacactgccaagagactgacatccagtatcttctttccacttgctcttgtggttgctgatttgtcattccaggctatggacagaccccctaagccgaaagtctcccagaggaggatgccaaagctccgtgcgtcactctcagaatgatatctcccataattaagagcttctggtgctgtccatttaatgggaatctgctttaagtcagaagatgagtacacaccaccatcctcttgacgagacattccaaagtcactgattttcagaacattattttcacctccaggcagtttcttacagcaaggtccctgtgtatacattttttactcgagatacaccatccagaatcagcatctaatgaaaatttcactgagttttagttcattcttctttctctgaaaggagaggaaatcgcctccaggaaccagttccttaatgacgtagataggccgtctttgtgtgtgaactcctatacttttgacattactgggatgattatattgcttgaggattttggcttctagtaaaaattttaatttcagttcctggggaagacgttcttgacgtgttttaacagcaacagcaattttatcctttaatgtgaccttaaatgtgtcaccaaaatttcccttgcctcttgtaacgtggcacctttatgattgagaacccatttcttattctcctaatggccatactgtgataccatgatgctcttaattggaacattggacttttttttttttttggcaattttaaacaattgggggtaaantccttataccatcaaattaccctttcannnnnnnnnnnnnnnnnggaaaacaaattttctttgtggtcccccgggtgggggggagggggcccaatttgggttcatgggaccccccccttctgggttaaaaaaatttttctttcttcaccccccggagaggggggaataaaggggggnnnnnnnnnnnnggggttattttttggtttttaagaaaaaaaggggtttcaccgggttaag

SEQ ID NO: 103338 - DNA, 986 bp, Homo sapiens
  misc_feature (1)...(986): n = a,t,c or g
ggcacgagctgttccataaagtggagatttctctgttgagaactgccctgcagaaatcaagctggcatcaaagcctggtctttttaattctgtttctttctgagttttgctgcagctcataagttataatcagaggaaggaaacgcctgagagatctgaaggttttaattgttgttgagtgcagatggtttggattaccgcacaggaatggagctcaaggaagagggaagtttggacacagacacacacagacaagagaataccatgtgacaaaggcagagattggaatgatacagctgcaagccagggatgccaaggattgcaggtgaagagtcaaggaaggattctacccagagttgcacggccttattgacaccttgatttgggcttctagactccagaatcatgacagaataaatttatctgtgtggatgtgtgtgtgtgtgtgtgtgtgtgtgtgtataatcctgttttacagtcgatactggggtattctcttcgtgggatgtggcttggggaaaaaccgctctttttttggaacccgaatcctggggggtgccttccaaaccttggccgctccatccacatattatacgcctctcatgatctttcagcagttcctcttcccctgagtttatctcctatggctgcgatctacttcctatgagagatccccacgtttttataacccacccggcgtttaacctacccctttttcttgctctggggatgtttttcagtcttttttctccctcccccctttttatatattttttgccaccacccccccgccccccctgttaacattctcccccctccccccccgccattaactaattntctatttgtttttcttcccccccccccgggggttccctcttccccacctaacacgagcccaccccacctcccggtcccccgcccgcctccctcaccccccacctccacccacctctccagcccgccacccccctcccccacccacc

SEQ ID NO: 103339 - DNA, 340 bp, Homo sapiens
ggcacgagggagtacagatgcctgccagcacgcacagctaacttttgtgtttttagtacagacagggttttaccatgttggccaggctggtctagaactcctgacttcaagagctccaccgcgcctggcctactttgtcatatttaataaagaatgttttacttcaaaaaatttatacatgttggaacttttgtggtttgcattaaaagacaaagcagaggctgggcacagtggctcacacctgtaatcccagcacttcgggaggttgaggcaggaggactgcatgaacccaggagttcaagatcaacctgagcaagacagaccctatctctactaaaga

SEQ ID NO: 103340 - DNA, 453 bp, Homo sapiens
  misc_feature (1)...(453): n = a,t,c or g
ggcacgaggacatgaatactacctccatgtcagcatagggtttacattttaaatggctgcatagaattctcttacatgttaacgaaaaggaaaactgagagatggcttggctatatttttattttaaattgcatttttttctttctcagacctcttagggatgaattgccatattctctatcctttttcctctcagataaagttgtaagtaaaatcttgctgtaaatgtagacgagataaatctgttcttctttccactcttcctcattgtcactctagcctccaaattctgcagtcacttctggttggtaggtaattcatacaatcctgccattattttttattttttatttttgacacggagtctcgctctgtcacccagggctgaaatgagtgncacagtcttggcccactacaacctctgccttccaggttcacctgattcttctgccn

SEQ ID NO: 103341 - DNA, 368 bp, Homo sapiens
ggcacgagcactcgagaccaggatgtcgaggctgcaatgacctatgatcatgccactgcactctagactgggcgacaaagacccctatctcaaataaaaaaaaaagaaaaaaaaaaagaaagttccctccaggctgggtgcgggggctaaagcctgtaatcccagcactttggaaggccgaggaaggcggatcacgaggacagaagatcagaaccatcctggctaacaagggaaaaaccccagctgatgctaagaaatacacagagaaaatagcacgggggtgaaagaaaacgaatggaagatatgctaattaagaatatataagatgggtcgaatagcggaaatggaagacgaggcgaagaaagcgg

SEQ ID NO: 103342 - DNA, 335 bp, Homo sapiens
ggcacgagctggtttctctggaggagactggaatgtgggtatgcaatcaacagcttctggactgtcactgtttcactgttttatttcttaaggtgaattattcattattctttatattcttttaaaatgttatataactttatagatcaattaactaatgtttggctccttttattttagagatctccagcattttaggttgcctcatcaatagttggcaaaaagaggccaggcacggtggctcacgcctataatcccaacactttgagaggccgaggcgggtggattactcaaggtcaggagttcgagaccaccctggccaacatggtgaaatg

SEQ ID NO: 103343 - DNA, 843 bp, Homo sapiens
  misc_feature (1)...(843): n = a,t,c or g
tacagtgagctatgattgcaccattgcactccagcctgggcaacagagtaagactctcatccccctcctcccaaaaaaagagcacctgtgtggtgtctgtctaaaataggaaaacttaaaggaggtttctagaagtattagaaataagaaaacactgatggggggagtggaataaaacacctgattttgttttgttttggtttttgagacagtctcgctctctcacccaggctggagtgcaatggcgtgatcttggctcactgcagacttcacctcctgagttcaagccattctcctacctcggcctcccaagtagcctgggacctatgggtgccacacccacccacgcccggctaatttttgtatttttagtggagatggggtttcacaatgttggcccaggctggtctcaaactcctgacttcaggtgatctgtctgcctcggcctcccaaagagctgagattacaggcttgagccaccatgcctggccaaaacacctgatttttaaatggtagcaattgtgctaaataaaatgtgtaaaaattttaaagagttgttaacattttttgatgaattctgctgaaaattatctgaacatacctgtttttcgaaacttcaagaaacttcaataagggatgcattgagcagtctgacagtgagaataaagaatgctgagtcaagatttatattaaggctggaagctgtggctcacacctgtnaatcccagcattttggggaggctgaagtgaggaggttaatttgagggtaggggtattgagaccatcttgggccattattagccaagaccctgtgttcttaaaccaancaaaaattttttaatt

SEQ ID NO: 103344 - DNA, 368 bp, Homo sapiens
ggcacgagagatcagaaatatgttgtgttccttttaaattgcttcatttgtcaatttcttgggaagataatttagcacctactcttagagcaattttgaagcagatctttgctatatttcttttttttttgtttgagacggagtctacctatggacccacaggccgtactgcggattgggcagcctgaactttggctctgtgatcattgtccttccctgagtcaaggcatatggctggatggtgctgactagcttgggagatgccatacagcccctggctgatcccgagtgctctttttggtcagctgagggaactgcgctgtgacatgcttcatgtggatcctgaggacttcaggctcctgggaaag

SEQ ID NO: 103345 - DNA, 339 bp, Homo sapiens
ggcacgaggtctgacagctcctgaaaaggttaactaccgagttaccatatggaccagcagttgcattcctaggcgtatatgcccgagaaatgaaggcttacgtccacatgaaaacttacagtctccaaaaaatgtgtacatgaatattcatagcagctctatttggaatagtcaaaaagtggaaataagccaaatgactatcacctgatgaatggatcagtaagatggtgcattcgcacagtagaatattatttgacaataagagaatgaggaaccgcgcctggctgtatctggaacacatagcgagagaagtcagacacagccgcatatatgatgccc

SEQ ID NO: 103346 - DNA, 318 bp, Homo sapiens
ggcacgaggggataatgtaaattatttttcaaaagctacaactattctatgctaacaattttggggtttttcttttttcttcttctttttttgttttattgacacagagacctgctctgtttcccaggctggagtgcagtggcacaatcaatcatggctgactgcaaccttgaagtgatcctcctgcctcaggcctcctgagtcgctgaaactatagggatgtgccaccacgaccaactaattttttttttttttaaacaggctctctgtccccgaggctggagtgcaatggcacagtctcagctcacttcaagctcg

SEQ ID NO: 103347 - DNA, 321 bp, Homo sapiens
ggcacgagggtgaaacctcatctctactaaaatgcaaaaaatgagccaggtattgtggtgcacacctataatcctagctactcaggaggctgaggtgggagaatcgcttgaacccgggaggtggaggtttaagtgtgtcttgtgtgttaccgcgggaaaccctgtcggtgtctttttagatggtggtttacctatgttgtccttgcttggctgatatggttaaggtggtgtcttccttggcatgtgagtttatgggcgggcgttgccgtatcgttgatcgtttgatctctgggcgtctgtgcccgacgtgtgaatgttttc

SEQ ID NO: 103348 - DNA, 328 bp, Homo sapiens
ggcacgagccagcctgggcaataaactagaccccatgtctctaaaaaatgtaaaaaacatcaagaggctgagtcaggaggatcatttgagcttaggagttcaaggctgcagtaagttatgattgtgccactgcattccagcctgggtgacaagagtgagaccctgacccaaaaaagtatcttctgataaagtggcatttgaaaattgcagaaattttaatattttttcttttaatattaagaactttattgatctctctaggacaccttggtgaggaaattaatggcacttttcttgacatccaacctgggactctggtgattctgtg

SEQ ID NO: 103349 - DNA, 371 bp, Homo sapiens
ggcacgagggtcggagaagtaggaacctcctgccgggctcgtggcggcttctgtccgctccgcggcgggaagcgccttccccacaggacatcaatgcaagcttgaataagaaaaacaaattcttcctcctaagccatggcatatcagttatacagaaatactactttgggaaacagtcttcaggagagcctagatgagctcatacagcctcaggaacagagtcaatttcaggggctctctaaatacgtacagattctgcgataatgtgaggactttcgtactgaacgatgttgaattcagagaggtgacagaacttatttaagtggataaagtgaaaattgtatccctgggatggcaaacaaactggcttc

SEQ ID NO: 103350 - DNA, 811 bp, Homo sapiens
ggcacgagcacatctggaaagctgtgttccccgaccccccactcccccaacagcaggaggggtgtaaccccagggaagccacccctctgacatatgtgctggggggaggggcagagccttgcccctaggaatcctgtggcggtgggttgttgactgatgtgggattgctgtgtctcttgtgctgtcggagagctggcaggtagtggaggggccttgggagctcctaggctgaacttggggctgtcctccaaggatccaggatggagggatggagctgggtcactcaaacctaaggcctttctgggtctagcatttattgcttcctggcttctggcttggcttcttttcgtccattctcatctgccagtgtctggactccctgggccttcaggcaggcattttcaggagcacaggccatgtggttggtctggagccctgtgtcaaggagagtgtgcgtgcttggtggagcagggttgctggagtagtgtgaaaaaaagcagatgagctggcctctggagacaaagctgtgtggcaagactgctggtttagtgggctctgaacaccaagaacagggccgggagtctgatacttgggggctgaactgagtcctgtggcgcaggattgttgcctggaagtgaacgttccgtcttgtgccattgagactgtgaagatctctgggtcccacaggacgagcagtagacttggaaggctgggaagaggctccccagctgcctgcctgctctggggacaggtaggcacgatcccatcctcgatccttggtcttggccagcagcccagccttctccacaag

SEQ ID NO: 103351 - DNA, 378 bp, Homo sapiens
ggcacgagctccctcccaaggctcaaccgtcccccaacaacccccagccttgtactgatgtcggatgcgagagcctgtgcttaagtgactaataaaggtaccacaccaatatggctgcacaaataccagaatctgatcagataaaacagacggggtttcaccatgttggccaagctggtctcgaactcctgacctcagtttaaggaatttctggggacctacaataaacttacagagacctgatttttggactgtgctaaagacttcacaacaagagaacgaaaatctgaagagaccaccctgtcagaacattgcttaccaaaatattcaacaatgacaccacagaatctccctcacatctcacggataatcacatcc

SEQ ID NO: 103352 - DNA, 400 bp, Homo sapiens
  misc_feature (1)...(400): n = a,t,c or g
ggcacgagaagaagtggattccaaccctcatggataactttgggggttcaggacttcaggggagaaagtcactggagatgtgggggaaacagcaggagaactagaattagaagtggagcctgaagaaggggctgaattgctgcaatcttaggatccaacttgaacagatgaggagctgcttcttagggatgagcaaagaagtggtttcttaagatagaatctactgctggggcagatgctgtgaacattgttgaaatgactacaggggatttagaatagtgcataaacctggttgataaagtggcagcaaggttggagaggactgagaccaattttgaaaatgttctactgtgagacagtgctatcaaagagcattgcatgctgcacagagtccntttgt

SEQ ID NO: 103353 - DNA, 344 bp, Homo sapiens
  misc_feature (1)...(344): n = a,t,c or g
ggcacgagatacttttttattacttattcaatatcattatatattttatacatttttgctctggttaagacttctggttcttactggttcaatcttagaaagttgtgtatagttaaaactttatcagttttctctaaattttttagtttgcatacatagagatgttcataatagtctttgaaaacttttcaatttatgtagaattcattgtgattttacatttttaacattaaatagatgcagaataaaagcttgacaaaattcaacatttcctcatgataaatctctgaaaaatttaggtataggaaaaaggcacctcaagccaataaatgtcacatataacn

SEQ ID NO: 103354 - DNA, 334 bp, Homo sapiens
ggcacgaggggtctccctgtgttgtccaggctggtgttgaactcccgggctcaagcagtcctccggccttggcttcccaaagtgctgggattacagcagtgggccacactgcctagcctatgattaattttttaaggatctgccagactgttttccaaagtggtcacactgttttacactcctattagcagtgtatgagggctttactttctccacgtccttgacaacatttgttaatgtttgactttttcattataaccattctattgggtgaaaaatgatattaaatctggtgttttaatttgcatttccctgatgactaattaagttgaac

SEQ ID NO: 103355 - DNA, 794 bp, Homo sapiens
ggcacgagagaacttgtagtttgcatagtatccgacagatgtcaccgtatttaccttgaaaatttaaaatattttgcagcatccttgtgaatttgatgtgataccccaaggcacctgagcacacagtttgggaaccattgccttggaatattaatcatagttacctccagagagtgaaattttggataattaaaaaaatttcttttttcttgagatggagttttggtcttgttgcccaggctagagtgcaatggcgtgatctcggctcaccgcagactccgcctcccgctttcaagctattctcccgcctcatcctcccaagtagctggggattacagggcatgcaccaccacggccggctaaattttgtatttttagtagagacaggggtttcaccatgttggtcaggctggtctcgaactcccgacctcaggtgatccgcccgcctcggcctcccaaagtgctgggattacaggcgtgagccactgcccccagctgaagaagtcaatcttacacgaaactccgaaaggacttactggggtcacttcctaaatctgaacaacttaggttatgggcacgccacgtgtggtcctttcccagctgtcagtgttctcccggctgaaatagactttagcatttttggatgcaacacaacttcctagcctggaaaagccatattctcaacaattattgtgtaaatttaagaggtacagttgtaataataacccttgtccctatgcctcctacctttgcacagccatttctttggcatagaatgtccttctctgccttga

SEQ ID NO: 103356 - DNA, 360 bp, Homo sapiens
  misc_feature (1)...(360): n = a,t,c or g
ggcacgagcaaaaggcggcggacagcttctgcagacttaaacatccctgtgggacagctctgaagagagcagtggttctctcagcgtggtgttccaactccgagaacggacacactgcctcctcaagtgggtccctgacccccatgtagcctgactaggagacacctcccagcaggagccgacagacacctcaaacaggcaggtgcccctctaggacaaagcttccagaggaaggatcaggcagcaatatttgctgttctgcagccttcgctgttgatacccaggcaaacagggtctggagtggacctccagcaaactccaacagacctgcagctgaggggcctgactgttagaaggaan

SEQ ID NO: 103357 - DNA, 343 bp, Homo sapiens
ggcacgagcccggaaggctgaggttgcagtgagccaagatcgcgccatgggactccagcctaggcgagagagtgagactccatctcaaaaaaaaaaaaaaaaggggggaacaaaaaaatttttttgaaaaaaaactccgggtgatttttaaaaaaccttggcccctgaggaaggggaagcgatttttggatctcttcaaggggggtcccaaaagggaactcctttcaatgggggacttttaaacaaaaaaagggaacaggggttttgggtggtttaaaacaggaattggggcacaaaaccccgtgaatctcacacaatcaccccttgaatggtgggctccccg

SEQ ID NO: 103358 - DNA, 354 bp, Homo sapiens
tctattaattttatctttccagagaactaactttaggtttcatttatcctttgtatggattcgggaggctgagtttcattcagttatgctctgattttagttatttgttttcttcctatagctttggagttagttttttttttttttttttgccctcttggtgggaggtttaatggttaattcgaaatcattttaaggggaacaataatgaaaaaaaattagtaactataaaaaaaacaaaacaattatataaactgactcctaaaatactcttgatctagatgtatttcttattataaactcggtccttggattattttagtcttccttcctactcttctttctcaactaacc

SEQ ID NO: 103359 - DNA, 379 bp, Homo sapiens
gctggtcttgcactcctgggctcaagtgatccacccaccttggcttcccaaggtgctagcattacaggcatgagccaccacgcccagcctgttctattaaaaacatcttgaccttttttttttttaaagttaaggatataaaaacagttggggggtttcccttaaggtggaaaatctaaatttggggaaccaaaggaacctcctttcccatttaaatataaccgggaaaaaccccaaattttccaaaaacaaatgggttaaacattttaccatgacaggggccaatttacaattatgggaaacctaatataatccagtaaaagggcccttacccacatggaacggaatttaaatttaaaacctaagggctcttagtcac

SEQ ID NO: 103360 - DNA, 1260 bp, Homo sapiens
  misc_feature (1)...(1260): n = a,t,c or g
ctggggcaggggagagtttcaaaggaggccagcttaagaaagggaagaaactgtttcccagcctgtcgctaaagttctcattgcctcattgattaggttattttatctactgggtgtagctctggccctcttccagggtggcagagtgtgcttcatcacagtctcacccgttgtcctttttctttctttctttcttcccccacccccgagatggagtttcactcttattgaccaggctggagtgcaatggcgagatctcggctcactgcaacctcctcctcctgggttcaagcaactctcctgcctcagcctccggagtagctgggaatacgggcatctgggattacacgcctgctaggccagctaatttttgtattttcattcagtagagacagggtttcaccacgttgggtcagggctgggtctcgaactcctgacctcagatgatctgccccgcctcagcctcccaaggtgctgggattacaggcgtgacatnncgtgtctgaccattaaatagcttttcaagacatggtttgagttgcttttttaaagagacaagggtcttgtcatgttgcccaagttggacttgaactcctgggctcaagtgatcctcctgtctcaactcttgagaatctagggatataggcacacaccagcgcacccagctcaagacatggtttttattttcataacttatttcctttttttgtttttccacttctagatacatacccaggtttttgtttttgagatggagtttcactctcattgtccaggctggagtgcaatggcgcaatctcggctcactgcaacctccgcctgggcaacaaacagagtgagactccatctcaaatataaataaataaatattaattgcttaattaattaattaccttctttttctcaataaaataaacaaactggaacttaccactgacacagagcaaggacattaactatttcatacatttttctcagtgattctgaaaatatttctcaggaggcagcatcagcatgatttgggaaactattggaacctacagaaattaagttattagaaatttagattctcaagacccccacaccaaacctactgaaatcagaaatcctgagaatgtaggtgaccttctgtattttacaagccctccaggtcactccaatgctcgcatttgagaacaactactctatattaccctaccctagacaggtgacacccttgatgtacaggtttcttaatgcattgcagtgtttcagaattac

SEQ ID NO: 103361 - DNA, 363 bp, Homo sapiens
  misc_feature (1)...(363): n = a,t,c or g
ggcacgagctgagatccagtgcgaacgaacatgtgttcgcttcattcattggccccacaatcctaggcctacccggcgtactactgatcattctatatccccctctattgatccgcacctccatatatctcatcagcaactcgactaggtcaccacccagcaatgactaatcaaactaacctcgaaactaatgattaccatacacaacagtataggacgatcctgatctcttatactaggatccttaatcattattattgccacaactaacctactaggactgctgccttactcatttacaccgaccacccaactatctataaacctagccatggccatccccttatgagcgggcgcagtggn

SEQ ID NO: 103362 - DNA, 386 bp, Homo sapiens
  misc_feature (1)...(386): n = a,t,c or g
ctcattttctttataatattattgtgtaaaatgagtaaaagtctataagaaaaactttgaaaagtattaagtaatacacatgtgtatgtgtgcgtgtgtatacatatatatatataatatatatacacatatgcaatggagtaatgaaaatactatataataaatataaaatggattaaaactatataaaatagatgcatgaaatggctacatagatatggatgtttgcatataggcacatttagctggattaagttagatttaaatggtccaatagagaactgtgcatacaattacataggcaaccacaaatcaaccctttctctgggctatctaaaataatcaggtactagaccaaaaaatgacatgctgtctgccttaccttn

SEQ ID NO: 103363 - DNA, 1351 bp, Homo sapiens
  misc_feature (1)...(1351): n = a,t,c or g
ggcacacgctgtcatccacgtgttacctaagagagctttccagcctgtgctaagaaaactgccccacatcatctgcagtaggacgggggagttggagccctggtcaggccactctgctactgaccacagttttctcatctctaaaaaggcgcagtaacaatataattaccgtatgcagtcccccaggatacagggtcaaaggagagcacaaccatcgcagttggaagcccatggggcaaaannnnnnnnnnnnnnnnnnnnnnnnnnnnnnnnnnnnnnnnnnnnnnnnnnnnnnnnnnnnnnnnnnnnnnnnnnnnnnnnnnnnnnnnnnnnnnnnnnnnnnnnnnnnnnnnnnnnnnnnnnnnnnnnnnnnnnnnnnnnnnnnnnnnnnnnnnctgagtcattttgattctgtaactggcttcctctcggcgggcaggctcacaccctccacccccagctggagatggaaggaggatgctcaccgcccattcctcatgcaggccatcgatggaaatgtcagacagtgcgagtccacgcctgaacacttctggggtccgctctgggactgacactggcagatccatcggtgagctcccgcctgccacctctgggcctgcattgcggtgatagggccaagggcctgggccttcaattctccagacttgccaaaatgctcagcgcaggcctcgtcggcaactgcagacaagcagaggcagcacctgggctctgcctgtgcctggcacagtgaagcgagggtgggggcaggaatgagggtcctctccatgcaaggggggaagatagaagaacaaaatttcaccctaatgtagtgtctttagaccgtgcaatgttgtgctcctgttagtctgatatcaggggcttgcagcctggcaaaggaaaaaaaacaggctgaggcacatgatagaagacaggcagggatgccacaatcataaccatggcaaagaccaggatcagaaaggcccaccatctctgaccccaaatccctgggcagatggttccagaactcagaattttcccagttgtagaaagatggggccaggtgcagtggctcacgcctgtaatcccagcactttgggaggccaagggggggcggatcacctgaggtcgggagttcgagaccagcctggccaacatggtgaaaccctgtctccactaaaaaaagtgcaaaggttggccgagtgtggtggtgcacacctatagtcccagctacttgggaggcagaggcaggataatcacttgaacccaggaggccgaggttgcggtgagctgagatcgagccattgcactctagcctgagcaacaagagtgaaactctgtctcaaaaaaaaaa

SEQ ID NO: 103364 - DNA, 383 bp, Homo sapiens
  misc_feature (1)...(383): n = a,t,c or g
ggcacgaggatttttactgtatgttcattagggactttttttggctgttgtttccttagtatcagagtaatgctggtctcagaggtcaagtttgaaagaattcgtgcctcttcatgtttttggaataatttgagaattaatgttagttgttctttataagttgaatgtagcagcaatgccatctggtcctagatttttcactgttgggagactttttattatggattcaacctcattacttattattagtctgttcaggttttgtattccnnnnnnnnnnncaagattgaaaaattgctatttatttaaaaaaacttctgaattaaataggcaaatggcaataactggtatatacattaattcaaagtattttcactgagcac

SEQ ID NO: 103365 - DNA, 295 bp, Homo sapiens
agccaagatcacgccactgcactctagcctggtgacagagcgagacttcgtctcaaaaaaaaaaaaaaaaaaaaaaagggatcctcaaaaaccggttttaccctaaacacaggggggctttaaaagggttagaccccgcctgcaacacccggtgggtacaagaaaactggggggggctggtaaacgttttaaaaattttaaaattcccaaaacctttttaaccgggggggccatatctttaggattcccaagccccttgtgaaaaaaaaactgtcggggcccctattaaagtaac

SEQ ID NO: 103366 - DNA, 350 bp, Homo sapiens
gccatatgaaaacacacaagaaaggccaaatgtttgcagaaaatgacattcaatgtgaacattctgaggctattgatggcttaggaaatttggttctagaaattcaggaaaattaactttatatttaaacgtatactatttgcagacatctttttttttttttttttttaaaataggggtttaattgtcccccaccttggaatgcaggggcccaatttgggttaattaaaacctttgcttcccaggctaaagggattttcccactttaacctcctaagtacttaggcccccgggtaattttggaatttggttttttggaaaaaacggggttttcccatgtgccccagctg

SEQ ID NO: 103367 - DNA, 326 bp, Homo sapiens
cttgaacccgagaggcagaggttgcagtgagccgagatcgcaccacactgcactccagcctgggcgacagagcaagactacgtctcaaaacaaacaaaaaaagggctggatgaagggactacgccttgtaaccccagcatttcggaaacccgaggggtacaatccccgaggtagggaaatcgtacccatctgggttaataccggggagcctaatctttactcagcctgcccaaaatcggacaaccgctggagtgggactccataattccccggttccccagagtatgtggcagcaaatcgcgaggatcctggtactgttagactcc

SEQ ID NO: 103368 - DNA, 362 bp, Homo sapiens
gggtgagacacagccaaaccatatcactgtctatggaggtatatccagtgtgggtagaagacatcccacatgcatgagaccatcacacacagatctgttgtcaactaaggacctgagctgaagagcctggaatggtagtgatgacgactggcatttggaagctgttccacgtgcttccctctcacctagactgttttgtattatttaatttaatttaacattttttttgtttttgagatggagtctctctctgtttcccaggctggaatgtagtggcgcaatctccgctcactgcaacctatgtactccagcctggacaacagagcgagtcgacgcggccgcgaattccagatctatgaacg

SEQ ID NO: 103369 - DNA, 351 bp, Homo sapiens
  misc_feature (1)...(351): n = a,t,c or g
cacaaagccatctggttctgggcttttctttgttaggggaattttaatcactaattaaagcaccttatttgttactggtctgttcagcattcctatttcttcttgatgcagatttgctaggtatagcgtgtttcttagaatttgttcatatcttctggattatctagtttttgccatattattgttcattataatccctttgatgctttatatttctgaatatctttttccttttcttttcttggttttgcttttggnnnnnnnnnnnnaaaaacaaagtttccttttgtcacccaggcgaagggnnnngnnnnanccttncnaaaggnaaaatncccttcccgggtgaag

SEQ ID NO: 103370 - DNA, 370 bp, Homo sapiens
gccgggcgtggtggctcacgcctgtaatctcagcattttaagaggccaaagtgctttaagcacctgtggtcccagctacttggggggctgaggtggtggaggttgcagtgagctgtgatcatgccactgtacttcagcctgggtgacagagccagaccctgtctccaaaaaaaaaaagaatctgcatgcaactaaaacgactgagctcccagtttttgaatctgaactctaagttctgggggcttttcttgactatgaaggaccaaattaggaatcaatattttgaatattgtaaaaatggagggccagaattatactgattttttttttttttggaataaagttggttcttttatccgttaaacgggcc

SEQ ID NO: 103371 - DNA, 323 bp, Homo sapiens
ataaaattggtgaaaacagatatgcttggtttctccagtcttgggacaaaatgttcagtctttaaccattaagtatgatgttagctgtaggttttttttaagaggcctttatcaggttaaggaagattctttctgttcaagtttgctaagaggtttatatgatgaacagatgttgaattttgtcaaatactttttgtgcatctgttgagatgatcatatggtctgcatttcttagtctgaagaaattaatttctaaatttctaaatattttaggattgcctttaggattgccaaagtgctgggattacaggcatgagccactg

SEQ ID NO: 103372 - DNA, 380 bp, Homo sapiens
tggaatcagtagttttcaacaattttaatagtgcaaatttatttgtagtatttgatggggagatatggtgttttgtgactatatttacaactggatgtatctgggaatatctcaaagtttctcccaaaaggaaaacatttctattacaaatatgtgacttgtgaaaataatttgtaattcttttcaatatatctcattttttttttttttttttttggaaacaaagttttgttttttcccccaggttgaagtccaggggggcaattttggttaattgaaccttccgcttccggggttaaaccatttttctggcttccgcttcccgagaacctgaaattccgggccccccccaccaccccggttaaattttggttttttag

SEQ ID NO: 103373 - DNA, 1040 bp, Homo sapiens
ttttttttttttctgagacggagtttcactcttgttatacaggctggagtacaatggggtgatctcccctcactgcaacccgggttcaagcgattctcctgcctcagcctcccgagtagctgggattacaggcatgcgccaccatgcccagctaatttttgtatttttagtagagacagggtttcaccatgttggtcaggctggtcttgaactcctgacctcaggtgatccacctgcctcggcctcccaaagtgctgggattacaggcatgagccaccatgcctggccggatgtgaattatcttaaaaattttcaggtaattctaatgggccaaggttgagaacccctgctctgggcccatccgagcaccaggctgtcacaaacgcatgcatgcactcacgcccgtgggcttggggggcttcggaaatgtgcttctgcttttttgagatggggtctttctgttgcccatcccggagcacagtggcacgatcacagctcactgcagcctcgacctcctgggctcaggtgatcctcccgcctcagcctcctgagtgtctgcttctggttttcatgatgacctggggcccaggcatactacacttgtgctgttcaggggccagtcctgcaccaggagcccatcagccacagctccgccgagaagcactgatatgcagagctaagcagctttgtttccacgtggatcctgcgtaggttttcttggtccatccgtagacaccgcactcctgcagaggatcttctcgggatgccccactgtctctgttttccctcttcactgaacactcagtcggggctcgccatgatgcctctgtgtctgctggcttctcccccattggaacagccttcttggcacgccacactgctagctgctgggcactgtgctttctgcctttaccgttctgccgtgatgttgccaaaatagcagcaacaacaacaacaacaaaggctgggcacctggctcatgcctgtattcccagcagttcgagatcagcctgggcaacatggtgagaccctatctctac

SEQ ID NO: 103374 - DNA, 313 bp, Homo sapiens
tagcaattggtctaaccttttttcaaggttcttcgtttctttgcattgggttagacatgctcctttagcttggaggagtttgttattacccaccttctgaagcctacttctgtcaattcatccaactcattctcagtccagttttgtttccttgctggtgaggagttgtgatcctttggaggagaagaggcattctggtttttggaatttttagccattttgctctggtttcttcctatctttgtggatttatctacctttcatcttcaatgttagtgacctatggatggggtctctgagtggatgtgctctt

SEQ ID NO: 103375 - DNA, 614 bp, Homo sapiens
tctgaggagtgacctggggctggctgggctaggcagcatcacggggttctgcagcccaactgcacatcaggctggtgacagtcacgcagcctattacttcatgtgtcatcagaggatcgctagaacacagcacttcaagtgtgcagatttagtgagccatagtctaaagacaaatagagccactgaatcctaaatttcaatcaatcatctccgttactcgtcttattggtattaatcctttgaaattatgtggggtgggagttaaagcaaataactaattatgttaatgctaaaactaagatttttctggcaagggaaaatcctcccaagtcccagcactttgggaggccgaggtgggcagatgacctgaggtcagggagtttgagaccagcctggccaacatggtgaaacgcccatctctacttaaaattgaaaaattagctgggcatggtggcaggtgcctgttatccccagctattgggggaggcttgaagcagggagaatcgcttgaaacaggaggcagagattgcagtgagccgagattgtgccactgcactgccagcctggggcaacaggaacaaaactctatctcaaaaaataaaactagatttttc

SEQ ID NO: 103376 - DNA, 793 bp, Homo sapiens
cgtcacctactgtcacaagctggcttctctggaaacagttactgagactgactttggggttcaagatatttgttacagatcaagtcttgtgaagggaagggggagaaaacagtgttaggcagaggaagaagttgcatacgttataggcccaactaaacctcagtcaggccgtgtgtggtggcttatgcctgtaatgccagcactttgggaggccagggtgggaggattgcttgagcacaggagtttgaggctgaagtgagctatgatcgcaccactgcaatcaatcaatcaataaacttcagtcaaccctgccaggagctatggaacaattattgtttgttggagtgttctgtgttgggctaaatgtgaagcctctttatacttctaccttactcagtcaccatatgggggctgccccagagaggtcatgacctcaagtgaggaagtactcagcagctgagccaggccctactgatagctggaggatgctgctgcccatgctgcccactgtgaggcagcaagcccttgcttgaagggggatctggatagtatgtttctgtgtctaccacccctagaaatggtgcctagagtgagtcatcacaaaaagaatcaggatagcttggtgtagtggcaggtgcctatagtcccagctactcaggagactgtggcgggagaatgacttaaaccagggagttggaggttgcagtgaggtgaggtcacacaactgcactccagactgggtgacagagtgagactccatctcaaaaaaaaaaaacaaaaaagaaaagaaaag

SEQ ID NO: 103377 - DNA, 382 bp, Homo sapiens
ggcacgaggcattgtgacgcacacctgtattcccatctactcaggaagctgagatggaggaattggttgagcccacgagttcaaggctgcagtgagtcgtgattgtgccactgcactccagccggggtgacagatgagaccttgtctcgaaaaggaatctgaaaacaatgtaaccatgccttcataattctagaaagttattttcaactgataaatctatattcacccaaataatcaagggtgaacgtaaaataatacatttttagacaagcaaagactcaggggttacctccatgtgccctttttagggaagctgttggagaaaatactccagcataatgaaggagtacacataccatagaatgacatgaatccagcaaat

SEQ ID NO: 103378 - DNA, 270 bp, Homo sapiens
  misc_feature (1)...(270): n = a,t,c or g
gattaatactgtattctataaacaaaaattaactcaaaagggaacaaagaactaaatgtaagagcaaaaactataaaactcttagaagaaaatatagatagaaatctatgtgaccttggattaggcaactgtttcttagatatgacacctaatgcacaaacaactaaaggaaggaatcgataaattggacttcatcaaaatttaaaacttttggctggacacaannnnnnnnnnnnnnnnnnnnnnnnnnnnnnnnnnnnnnnncagaag

SEQ ID NO: 103379 - DNA, 377 bp, Homo sapiens
ggcacgagtgcattttggttatctgttcataaggtgatggccacttgaataggttctacttttgcctattacgaataatggtgctgtgaacattatattttatgtggattatctttctaattctcttccgtgtatacctacaagtggaattgctgagccatatggtaactcttacgttcgtcattttgaggaactgccacctcatttttcaaagcagttgaatcgctttacgttcccaccagcaatgtatggcactttcagtctctgcctattcttgccatacttgttattctctgggttatttcggcctggacgatgttgctttagcaggcgcggagccccttgtttgtgaaactgtccggttgttagcgatgagg

SEQ ID NO: 103380 - DNA, 362 bp, Homo sapiens
  misc_feature (1)...(362): n = a,t,c or g
ggcacgagctgaataacattccacgtggtaatacaccgcattttctttattcactcttcaaatgatggacatttagatcgattccacatcctggctattgtgaataacgcagcagtgaacatgggagtgcaggtgtctccttgagacactgattttgccttagaggggattctggggctgggctccgtggtgaagggcactctctttccctcacctggaggttatgtcagcggngtgctgggggttgtataagagatgtataactatcctttctgtctatcgtgttgcgtcatgacttagcgtaaccgcattcatgtcacagggaccttaattttgatctcttttcggagatttggtcagcg

SEQ ID NO: 103381 - DNA, 346 bp, Homo sapiens
actaggtctagatcgcgagcggccgcccttttattttataatagcttatcaccttttatgatcacgcggttttaatcatttttcttatctgttttctatttctgttgccctttttctaacactcacaacggagctaactaagacgacagggggggacgcgcaggaaatagaaaccgtctgaactatcctgcccggcatcatcctaggcctcatcgccctaccatccctacgcaggctttacataacagacgacgcccccgatgcctcccttaccatcaaatcaataggccaccaatggtactgaacctacgagtacaccgactacggcggactaatcttgaactcc

SEQ ID NO: 103382 - DNA, 326 bp, Homo sapiens
ctcacgcgaccgcccacgcgtccgcgaccgttgactattctctacaaaccacaaagacattggaacacggtacctattattcttcgcatgagctggagtcctaggcacagctctaagccttcttattcgagccgagctgggccagccaggcaaccttctaggtaacgaccacatctactacgttatcgtcacagcccttgcatttgtaattatcttcttcatagacttacccatcttaatctgctagcttcggcctctgtctatgttctacttattctcggtgtcccctgtactgcagtctttcttcattcttcataatctttgtc

SEQ ID NO: 103383 - DNA, 1183 bp, Homo sapiens
  misc_feature (1)...(1183): n = a,t,c or g
cagtttgatggtttcacaagttctattgtgtgctattcagaataggaacaaggttctaatagaaaaagatggcaaggtgaagtagctataaaattagactaatctacattgcttttctcctgcagagtctaataccttttatgctttgataattagcagtttgtctacttggtcactaggaatgaaactacatggtaataggcttaacaggtgtaatagcccacttactcctgaatctttaagcatttgtgcatttgaaaaatgcttttcgcgatcttcnnnnnnnnnnnnnnnnnnnnnnnnnnnnnnnnnnnnctcccatatgtaaaagtgtctaaaggtttttttttggttataaaaggaaaatttttgcttaagtttgaaggataggtaaaattaaaggacatgctttctgtttgtgtgatggtttttaaaatttttttttaagatggagttcttgttgcccaggctagaatgcaatggcaaaatctcactgcaatctcctcctcatgggttcaagcaattctcctacttcagcctcccaagtagctgggattacaggcatgtgctaatttggtgtttttaatagagatgaggtttttccatgttggtcaggctggtctcaaactcctgaccttaggtgatcgcctcggcctcctaaagtgctgggaattacaggcatgagccaccatgcctggccaggacatgtgttcttaaggacatgctaagcaggagttaaagcagcccaagagataaggcctcttaaagtgactggcaatgtgtattgctcaagattcaaaggtacttgaattggccatagacaagtctgtaatgaagtgttatcgttttccctcatctgagtctgaattagataaaatgccttcccatcagccagtgctctgaggtatcaagtctaaattgaactagagatttttggccttagtttctttgctatctaatgtttacacaagtaaatagtctaagatttgctggatgacagaaaaaacaggtaaggcctttaatagatggccaatagatgccctgataatgaaagttgacacctgtaagatttaccagtagagaattcttgacatgcaaggaagcaagatttaactgaaaaattgttcccactggaagcaggaatgagtcagtttacttgcatatactgagattgagattaact

SEQ ID NO: 103384 - DNA, 346 bp, Homo sapiens
cccacgcgtccgcccacgcgtccgctgttttccacagcagttgaaccattccacattcccaccagcaatgtatgagaattccaatttctgtccacttcctcaccaacacttattattttccttttcctttttttaaaaaaaaataagttatggccatcttagtgggtgcgaagtggtatctcattgtgcactttatttgcaatccctatgcaatgagctagaaactaaagtacaaactagatgggacatccagtccctttgagagataatgctaactatcctttgatatgaatgacgtttgactgcattcataccgcaaagtaccaggtagctgatagctttaaag

SEQ ID NO: 103385 - DNA, 348 bp, Homo sapiens
ctttaggaggcagtctgcccgttctcagatctccagctgcgtactgggagaaccactgctctcttcaaagctgtcagacagggacatttaagtctgcagaggttactgctgtctttttgtttgtctgtaccctgcccccagaggtggagcctacagaggcaggcaggcctccttgagctgtggtgggctccacccagttcgagcttcccggctgctttgtttacctaagcaagcctgggcaatggtgggcgcccctaccccagcctcgctgccgccttgcagttcgatctcacactgctgtgctagcaatcagcgagactccgtggggtacgacccttcaagcccagt

SEQ ID NO: 103386 - DNA, 381 bp, Homo sapiens
ctgctagtggtttggagtaagtattgtaaataagaactatatgaagaaaatgagctgctgtagaagataagtcttgttcaaaatgctgtaatagtaggaatataaagtactgaaatgaagtagattgtaaagattgcttcagtaaagttttgttcttattaacagtttccctgtaaaaatgaaacaacttaaatccttttgatatgaatacatattctattaagtatgatttcttctccttttttttttgaaacagggtctcattccagttgtccaggctggagtgtagtggcacagcctcagctcactgcagtcttgacctcccaggctcaggtggttctcccacctcagccttctgagtagctgggactacaggtgcag

SEQ ID NO: 103387 - DNA, 359 bp, Homo sapiens
attttccttcctagtagaagtgttactgcctgtaactagctcaaaataccaatgcagtttctgcattctgggttttggttttccttttttgttttttttggtttttgaaaatttggttttggcccccaaggtggaagacaagggggaaaacaaaacaaaaggggaaaaattgccccccgggaaaaaaaaaatccccggcccaaacccccaggaaaaccgggaaaaaaagggcccccccaaaaccctaaaaaaatttgggaatttaaaaaaaaaagggggtaaaacaagggggccaaggggggaaaaaaactccgacccaaagggaacccccgggcaaaaccctggaaataaaaaaaaaa

SEQ ID NO: 103388 - DNA, 363 bp, Homo sapiens
ggcacgagggtgcacacctatagtcccagctactcaggaggctgagagaagggaggatcacttaaccctgggaggttgaggctgcagtgagccacaaatgcaccactatactccagtctgaaaagaaaggaatgactaggaaatcttggtagtttggcacatatatgtgctttgctgacagttatcagttgagctacctctttgtagtgggaaccttttcatggttagaagaggaaggagtttaaaggaatgaggccaaagataaattctttcaagactgttgacttctttctagaatcctaattaagccaatgcttataaagactggaattcacatcttaccctgaaaatgcatgggaatgg

SEQ ID NO: 103389 - DNA, 396 bp, Homo sapiens
ggcacgagcggcacgagcggcacgagaactggaagaattaataaagatcttttttttttttttttttttttgggggcaaattttggctttaatgcccaagggggggggccaggggggcattttaacttacccaaaccctccccttccggggtaaaacaattttccgggcctaacccccccgagaaccgggattaacgggctgggcccccccggccgggtaaattttgggatttttaagaaaaaagggggttttcccccgggggcaaggggggtttaaaaccccggccctcgggggacccccccccctgggtttccaaaggggcggggataaagccccccaccccgggcccctttaaacctttgaaaaggttccccgacctcccaattttccccagg

SEQ ID NO: 103390 - DNA, 348 bp, Homo sapiens
ggcacgagtcggcgtggtggctcatgcctgtaatcccagctacgcaggagaaacgcttgaaaccaggaggtaggggctgcggggagccctgatcacaccattgcactccaacctaggcaacaagagcaaaactctgtatccaaaaaaaaaatgaaattatatacctttaaaaatttaggcctggggctgaggttaacaattgcaattcctcactttgggctggtttactaaattattaaaacctcttggtagtaactttatatcttattattaaactcgctaaaaccacattttatcttaatttctctactaactacttttctaagatgtttacgtattaatagttac

SEQ ID NO: 103391 - DNA, 402 bp, Homo sapiens
ggcacgaggaacagcaccatgagcttcaatacctgctagccccttcccctccggccagcctcaggccagccaggagccccctcctgtggcctccgagcaccctcctgacacctgaggagaccctgcccaaccccccccttcgccctcaggacttctggggaccagccactgtccccagaagccaggccggacagtggccttctccactcccctctgacttctccaagggggctcaatggccagtgccccccacgaggctccaccctcaacttcaacccaatctagatggacagatgatatacaatatccaatcatggcgatcaattggcgggggcatgccattatagatacactctcaagactagtgttaagttgaaatctcttcactagcatgttcatctg

SEQ ID NO: 103392 - DNA, 369 bp, Homo sapiens
ctggtgcccacacgcacacacacaaaaccatcaactcttctggattccttggttttaaagcttgcctcatacaaagtacagagacatctttttcaggaaacattgccaccacatgcttgaaggaccgcttatggctacacttagacatctccaaccaaggtctcttcacctccttctacaacaatgcactttgtctgcactgggacaaaaaaatgacagccttttttcttttcttggttttttttttttttttggggggggagcattcccaaactttcccgtcttaaaaaaggcaccttatttaatcaccggtttgcctttttgagggcccattcccctcggggaaggagaaaagaggaaaacctggtg

SEQ ID NO: 103393 - DNA, 186 bp, Homo sapiens
ccctgtctctacaaaaaatacaaatattatccaggagtgttttcgtctacttgtaatcccagctacttgggaggctgaggctcgagaattgcctgaacccaggaggcagagattgttcgagaccctgcactccagcatgggtgacagactgagactatgtctcagaaaagaaaaagaataaaaaag

SEQ ID NO: 103394 - DNA, 384 bp, Homo sapiens
cggacgcgtgggctcaccactgcactctagcctgggtgacagaatgagaccccgtctcaaaaaaaagaaaaatttattcggccttgggggtgcacacctgtaatcccagtttgtcaggaggctaaaggggaaggatcacctgaccccagggaggtcagggatgcagtgacccttggtctaaccattgcattttaccctgggtgacaaattgaaaccccgtttaaaaaaaaaagaaaaagtaaataatctgaatacccttatatttataaaaacttaatagggctggaaaatataggtattataatcctaattttacaaatgtgaaatttgaggctcaaaaaagtaaagtctatggctaagggccatgtggttaaaatatggcaa

SEQ ID NO: 103395 - DNA, 598 bp, Homo sapiens
aaaatatcagtcggggagtaggactgaatgaaatgaaattattttaaagttttacagtgtaaaattcagtctaacaatagctgagagattgatttcagaaatactaaaacttactacaaagctgctgcaattaaaaaacaaaaaaagtgataattagcacagtaatgaaacagtggaaccagaatagagagtctagcaaaagatctcagtatatttcagacttagtaaatttgttaaaagttagtacagatattttcatctgaaacctttagggccagaagcctcagaattaatttttcagcttcagaaaaccaatatgcaaggctgggggcagtggctcacacctgccaatcccagcactttgggaggcttaggtgggattgcttgagcccagggagttcctggaccatagtgagatctcgtctctacaaaaaataaaaaattagccaagcatggtggtgagtgcctatagtcccagctactcaaggggctagcctggggaagttcacttgagcccaggagtttgaggctgcagtgagccgtgatcacacaatggcagtgcagcctgggcaacagagtgagactcctatctctaaaa

SEQ ID NO: 103396 - DNA, 399 bp, Homo sapiens
  misc_feature (1)...(399): n = a,t,c or g
caggcacggtgatgtgtgcctgtagcttcttgggaggctgaggtgggaggatcagttgagtccaggaggtcacagctgaactgagccgtgatcacaccactgcacttcagccttggtgacagagtaagaccctgtctctagaaaaaaaaagaacacatcctgctgcggtgnntnannnnngnnnnnnnnnnantnnnnnannnnnannnnnnnnnnnnnnnnnnnnnnnnntnnnnnnnnnnnnnnnnnnnnnnnnnnnnnnnnnntnnnnnnnnntnnnnnnnnnnnnnnnnnnttttttattttttttttttttttttttttttttttttttttttttttttttttttttttttttttttttttttttttttttttttttttttttttttntttttt

SEQ ID NO: 103397 - DNA, 436 bp, Homo sapiens
catgaacccgggaggcagagcttgcagtgagccgagatcacgccactgcactccagcctgggcgacagagcgggactctgtctcaaaaaaaaagagaaaaagaaattcaaatttataagggtaccataaaaaaccctggaaatttttaaaaagtcactggggtttcaaccccttgaaattaagggttgtgggaaataggggggtaaataccccagtggaccttattgaaaaaatcccctcctttaaaaggaccatttttggtttgaaaactttacgaccaaaatttttttttaaaattaataattttttcttggtggttggtttcaaccttttttgaaaatcccaaatacttttttttaaaatccgggaggtattggaatatttctggttaaatcccaaaagggtggttttaaaagttggccccgcctgaaaatta

SEQ ID NO: 103398 - DNA, 575 bp, Homo sapiens
ataatatgtggtttcttgcgactggattttttctgtttatataatgctttcagtgtccaattatgctataggatggatcagaggggtctttctgggtatggctgaataatattccattgtatagatacgccacattgtatttatctacctggtgatgggcgtttgagttgttttcactacttggctacttcaaataatgctgctgtgaacattcaggttcaaccaaaacacacaactttttgggtaaacatgttttcattttcttacgtttataactagaggtggaattcctgggtcatgtgggaactctatatctgatctattgaggaactgtcagactgttttccaaactagctgaaccattttgcattcccacaagcagtgtataaggagttcagttttctcacacccttgccaatacttgttatttgatttcttggtttttaatattatcatgtccatcatatagggtatgacgtagttgctcatttggggttggaattgccttcgtccagaattaatgccggttagctggcgtcatgaacctaaaaaatatccccctttggaaaccaact

SEQ ID NO: 103399 - DNA, 412 bp, Homo sapiens
tgtggtggctcacacctgtagtcccagctactcagaaggctgaggtgggaagatcacttaagccaggaggtggaggttatagtgagccaaagattgcaccactgtactccagcctgggtgacagagccaaaaagcaaacaaacaaataaacctactagagctaattttaattcagcaaaattgcagggtacaaaatcaacacacaaaaattagttatggaaatatacatgttaagatggccaactagatgcagccaggtgcaacagctgccaccgagggactgatttgactggtgcactactaatggatcttcagagggaaggcactgagagtagatggagggaagacacagaagctaggctaaaggggtagtaagctgggaggcctgcatggggctactgcaccctggaac

SEQ ID NO: 103400 - DNA, 388 bp, Homo sapiens
  misc_feature (1)...(388): n = a,t,c or g
ctttcctcccttgtcactcctgctctgaggaccctctgcgtncccaacactgacctgctcgccctcttcccaggcaagggacgaaagaccaaaccaacaaccaaccaaaaaaaaaaaaaaaaggggaagaaaccttcccacaaaaaaaaaaacccaaaattattcccaccaaaaccccgttgcccaaaggaacccaggggggaaaaccaaccaaaaaaaacccaaaaccaacccaaaaaaaaaaaaagggggggccctttaaaaaaaaacccaaagggggccaaaacaaacggggggaagaaaataaaaaatttctcccaataaggggggtaaataaaacccatgcgggaaacttttggaaaaaaacccattttcggggggggaaaaa

SEQ ID NO: 103401 - DNA, 429 bp, Homo sapiens
gcgtttgcacggagtgcaatcactgcgtccttacgggggttgcaaggcgtccgaagtatgagtccactaacaggagtccagaaactcgccagttaatagtattgtgtctcttcaaaatatcggagaataatttctttctcgctgatcgcctaacttctactgacgaagcttggaagttgcagaagatggagctcgctcttgttgcccacgctggaatgcaatggcatgaccttggctcactggaacctctgcctccccagttcaagtggctctactgcctcagtctcccgagtagctgagagtacctgctctggctactgattcacccagctctggatgctggaaaactattcgtacctgacgctgctgtaacactgagaatttgctggagcgacagggacatattggaaattccgcacccttgcttcg

SEQ ID NO: 103402 - DNA, 356 bp, Homo sapiens
ggatgatgtctgtactacatacaccaaatggtccctgtgcaacatgcaccatctagcataatgaagcatactccttatctggatctttaacatgacctaatacgcctttcaggatgcatcctgtgcttctctttcctaacctaaatagtgccactttccctgcttccacactaccctttggaatgagaaccgggtgaggatgtgacgggacctataggtaccaaattctttcctgccccaggacgtacggacggacacacacacacacacacacacacacacacacacacacacactcactctgacccccaccacctttgtgtgtggaacactctcatacacttcgtatgaggaaa

SEQ ID NO: 103403 - DNA, 448 bp, Homo sapiens
gcgcaaaattcaacatctattcataatttttttaaaaaaatgagaaatagaaggaacttccttaacctgaaaacaaaaagactgtctacagaaaacctatagctaccatcatatttaattgtgaaagactgaatgctttgcccctaaaattggaaacaagaccataatacctgctttactgactattcaatatcatgctggaggttctagccagtgtagtaaggcaagaaaaagaaataaatctttccatattcacataagacatagttataaagagaaaatcccgaagaacttggaaaataagctactaaaactgttaagtccatttagcaagatcacaggatacaagattagtatacaaaaattaacttcttcattcttatactatggttttactgtatagttcatgattacttaatgtaatttttagaaacagataagctggatg

SEQ ID NO: 103404 - DNA, 403 bp, Homo sapiens
ctgcattccaccctgggtgacagagcgagactctgcctcataaaaaaaaaaaaaaaaaaaaaaaacgcgcgggggggggggctcaccccctttttaccccccattttttaaaggggtgaaggggggggacaaagggggtggggataaaaaacccccttgcccaaaagggaaaacccccttttttttaaaaataaaaaaaattttttgggccggggggggggggccaaaaacccactttttttaggggttatgaggaaaaaaattttttaaccctatgggaaaaagtgttacaggggcaaaaaacccccctttgtacctccccggggggaaaagaggaaaacttttcttaaaaaaaaaaaaaaaactcgagaccccggggaaattttttttttttggagggaaa

SEQ ID NO: 103405 - DNA, 391 bp, Homo sapiens
agatagtacacacctgtagtcctaactgctcaggaggctgaggtgggaggatcacttaagcccaggtgttcgaggcggcagtgagctgtgatcacatgaccgcattccatcctgggtgacagagcgagaccctgtctcaaaaaaaaaaaaaaaaggataaaaggataaaaaccacctttgacccccagggactggaaaaaggtttttggcataaagggggcccttgaaaaggggacctggtttggggaaaatgctgctaagtttgaatgggaatatgtggtattggaagttagggaaaaaaccaagttgagtttttaagggcttgtcaaacccccacccagggcccaggatgaggaaaaaaaaaaaaagggggcgcctctttaaaggatcg

SEQ ID NO: 103406 - DNA, 411 bp, Homo sapiens
tgtttttatagttttatctgccagtgtttcagatctcgttactaataaataaactatttattgttccaactatgtttataattttgttagccaacatttcagatctctgtactcataaaaaaactgtggtctgtgtttataatttcatttgtttgtattacagtcatagaattttatgcagtttcatatgtgattttgtctaaaaatctaagtagatcctattataacttttgaggtataatttacatacatttaattcttttaaacatacagttctgtaagttttacagatgcatacaattttgtaaaaccacatcgagatacagagggccaggtgcggtggctcacatctgtaatcctagcactctgggaggccaaggcgggtggatcacctgaggtcaggagttcaag

SEQ ID NO: 103407 - DNA, 417 bp, Homo sapiens
cccacgcgtacgggcgtatcagagaaagcctcactgacgtgacatctgcacaaaggcctgaaggaggagaggggaagggaggaacacactgggtattaggatgagcattccgagaagcaggatgagccactgcaaaggcccagaagtaagctgttaccttttcctgggacccctccctcctccttgctgctcctaaaccacataggtcaggagtctggactgacccacgtacgtctggcatcttgcttgaggaacagggggttttgttttgatatgaaagaacgtctctgtctgttgcccatgctggagtgtaggggcatgatctcggatcactgcagccttatcctcctggctgagacaagccccctgcctctgcctaccaagtaggtgaaactacagggacctaccaccgcgctg

SEQ ID NO: 103408 - DNA, 425 bp, Homo sapiens
  misc_feature (1)...(425): n = a,t,c or g
gacagggtttcaccatgttggccagcctggtcttgaactcctgacctcacgtgatccacacccaccttggcctcccaaagtgctgggattacaggcatgagccaccgcgcctggttgcattcccatataaatttaaaaacaatctactgaaagatgtatacgacctccaccaagaaaattgtaagacatttggagaagtttaaaaagacatgaataaacggaaatggtttttttaaataaacaaatgatttttaaagttgatcattaggttaataaatagtcatataatgacaatccgatgagattatgttgcccagggtggtctctaactcctagcctcaagcagttttactctctcattacaggtgtaggccaccgtgcctggcctgacacttggaaatcttaatcacaattattctttgttn

SEQ ID NO: 103409 - DNA, 426 bp, Homo sapiens
aaaaaagtttaatgatcccaatgacccatgcaaaatcttggttgctacagatgcaattggcatgggacttaatttgtaagtaatttgtttttaataagatgaatatttggtgagttaaatggtggtttttttgtttttcagttttctacttggcattaatgaccaaacgctatgatttgggagaataaatattataggctagatttgaggtttgtcttgcctacacctattgagggaaataaaaagaaaatattaaatagtgccaggacttttcttagggacagggtcttgctcttttacccacgctggagtgcagtgatcaaattgtagctcagtgcagtcttgaactcctgggcccaagtgatcctcctgcctcagcctccagagtagctgggaccacaggcgcacaccacaaagcctggttat

SEQ ID NO: 103410 - DNA, 416 bp, Homo sapiens
ctaagttaggggtatgttccttctagggaatccaaattgaccccaggcccagcaaaataattctatgtttgattttgatgttattttgggagcaattgtggggttagggttgttaggacacctatatttaaagttgatggcaaattatagttacacaaattgtgtttgatggtgatggaatctgggactgcaaagactccctctctttctcccatattcaactcagtaggcctgattcttttacttttggaatattctattgacagcctgtgttagtctgttctgtgttgttataaagaaatccccgaggctggataatttataaagaaaagaggtttaggctgggtgtggtggctcacgcctgtcatctcagcactttgggaggccgagggggatggatcacaaggtcaggaaat

SEQ ID NO: 103411 - DNA, 513 bp, Homo sapiens
  misc_feature (1)...(513): n = a,t,c or g
tgatggccnnagcgcccnccctgacgccgatagaccggcntcggaancccgcggcgacccacgcgtccgcccacgcgtccgaataattaaactcagtgaggaaggcatgtggaaagctgagataggccgaaagctagacctcttgcaccataccattagccaagttgtgaattcaaaggaaaagttcttgaaagaaatgaaaagtgctacttcagtgaatacacgaatgataagagagtgaaacagccttattgctgatatggagaaagttttagtggtctaagatcaaaccagccataacattttcttagtccaaaatataatcaagagcaaaggcataggtctcttcaagttaatgagggctaagagagatgaggaatctcagaaggcaagttagatgctagcaagggtaggttcgtgagacttaaaaaaaaaggagccatctccataacatgaaagtgcaagatgaagcaagtgttgatatagaaactacagctagctatctaaaggtct

SEQ ID NO: 103412 - DNA, 406 bp, Homo sapiens
tattttggggcactaagaatcatgcccatagaagatggcaaagttaattgataattgtagtgtatactctgactactcgttggattggccattccgccgtctcttaccctctcctcaggcctccctattccttgagacacaatattgaaattaggccaattaataaccctacaatggcctctaagtgttcaagtgaaaggaagagtctcacatctctcactttccatctaaagatcaaaatgattaagcttagtgaggaaggcgtgtcaaaagccaagacaggctgaaagctaggcctcttgcaaaacagttagccaagttgtgaatgcaatgaaaaagtatttgaaggaaattaaaagtgctactccagtgaacacatgaatgataagaaagcaaaacaatctta

SEQ ID NO: 103413 - DNA, 445 bp, Homo sapiens
  misc_feature (1)...(445): n = a,t,c or g
cggacgcgtgggttctaacatatgtaataattgccaggagtacagtgctcttgttgatcttgtattcagtcaggttaaaacaacggacaataaaagaatgaacacataataaaaaaaaaaaaaaaaaaaaaaaaaaagatgatggaacaaaaaaaataataaaaacgaattagcggacatgatactgtgggggtgtggagataagaccatcttcatgaggaaactgaccagggatgagaccaagtatggaattccacaacttgctttgcgggggcactcccactttgttagagatggggttataatacttagatggccaggttgacctatcagagctaatgggatggaaccctgcacctctgggatctcacttcggggtccaccacgaggcgatttgtgaacaaaacaaagatgtgctgagcgcggacctntcttttgaattcgg

SEQ ID NO: 103414 - DNA, 717 bp, Homo sapiens
  misc_feature (1)...(717): n = a,t,c or g
agcggtaccattttacattctcaccaacaatgcacaaggatttcagtttctccacatcctcaccaacatttgctcttttcttgtttttatttttaataggagctctcctaatgggtgtgaggtgatatctcattatggttttggctcacatttctctagcgatgttgggcatcttttcatgtactcactggtcaaatgtttatcttgtttggagaattgtctattcaagtcctttgtgatcatggttttctttttgatgcttgctataattttggtctctttagttggactccggtgctattttcctcagtatatttgatggtctaccacaggggtccccaacccctgaggccacagaccagtgtggagtccgtgggcctgttaggaactggcctgcacagcaggtggagcagcagttgagtgagcgaaactccatctatgtttacagctgctccccgttgctcacattaccacctgagctctgcctcctgtcggattaggcagccttgttagattcttcatatggggaggcatggaacccaatttgtggaattggcgcgtgtgtgggggttcttagggttggcacaccccttgttaaggaatcttaatggcctggatggatcttgagggtgggaacagttttcatccnggaaaacccataaccccccntccccantttgcgggaaaaattgttttttcccntggaaaccaaccggt

SEQ ID NO: 103415 - DNA, 408 bp, Homo sapiens
tactcaggaagtgggaggattacttgagcccaggagttcaaggctgaagtgagctgcaatcactgccttccagcctgggtgatagaacgagaacttgtctctttaaaaaaaaaaaaaaaaaaaaaaaaaaaggggcggcccccaaaaaaaaaccctggggggcccaaattttaggggggcaagggagggaaaaacttttcccttaaggggggggaaaaaaaaaccaacttgggaatttttggaaaaaaacctatttttgggggggggacaaatggggccaacccccccccaaaaattaaaggttctaaggaaaaaaaaaatttttaaagggaaaagggggaaaaaaaacctaaaaatgcttggggttaaaaagtttggcttccgggtgttaattaaaaaaaaaattac

SEQ ID NO: 103416 - DNA, 638 bp, Homo sapiens
ggaaactcattctttttcgcatcctcacttctagaagactattcttatcccatttttgtttaaatgtttagtttttttctttttgatttgattttaaatcatttatttttctgttttgtaatacgtcagcagttttcattcttattcttttttccttctttttttcattttttcattgcaatgttaacacaccagagttatgtgatttttctgtctgtatacacagtgataattcatttagatttctacatctctttatttttaacatatgacattatgtatttctgaactaagataaacacttaagcaaagttgttactcatatacgaaaatatgttaatagttttatagtgttcagctttcctttctaactatactgtactaatagtgcaaatcatagcaagccttatccatagctctacaaaatgaatttctcagtgtgccaatatcataaaaatatgaattatattacactaactatagagttcagtagaaataaattcttatctgtaacttttctgttatttagtatattcagccataattttggaattagtgcttcaatctcaattttcatattacatgtatatattaagaataatccaattggattttttaaatgaggaaatgcacatatc

SEQ ID NO: 103417 - DNA, 422 bp, Homo sapiens
cccacgcgttcgcccacgcgtacgaaagtttgctgcactgattgacctcacctttcatgaaagttttctctatagcatgcagtactgtttgatagcattttatcacagtagaacatctttcaaaattggagtcaatcatctcaaaatctgatgctgctttatcaactaagtttatgtattattatattctaaatcctttgctgtcatttcaacagtgttcacagcatcttcaccaggagtagatgccatctcaggaaaccactttctttcatcatctgttaagcaattcctcatctattcaagttttatcatgagatggcagcaattcagttcaatcttcatgctcacttctgattctagttctgctgctgtttccaccacatctgcagtgacttcctccactgaagtcttgaacccctccg

SEQ ID NO: 103418 - DNA, 394 bp, Homo sapiens
gtccttttaagacatgatttgcaaatattttctcccagtctgtggcttatcttttcctaatggtgtcttttgaaatgcacttgtttttaattttaatgaagcctaatgtattagtttccttatacgagttatgcttttagtactgtatctctctctgcttaactaaaggtcacaaagattttctcctatgttttgttctggaagttttatagttttagctcttaaatttgggcctgtgagctgttttaaattaatttttatatatggtatgaggtaaagatctaaattcctatggatattcagtggtcttagcaccatgtgttaaaaggactgcttttccccactgtgtccctgtcaaaaatcaactgaacatatatgtaagagttatttaaat

SEQ ID NO: 103419 - DNA, 402 bp, Homo sapiens
ggattgcttgagcccagaaggtcaaggctgcagtgagctgtgattgtgccactgcacttcagcctgtgggacagagtgagaccctatctcaaaaaaaaccaaaaaaaaaaaaaaaaaagaaaaaacccccgggatttatttcccaccaaagggacaaaaaaaaagactttaaaaaaaaatctgaaaaccttaaaaaaggaaatttcaaaattaggcctttaattcccccaaaattgggtttttggaaaagggggggaggaaggaatcaattttattttttttttcccaaaagggaaacacaccggcccaataatggttggaaataaaatttttggccccaattggaaaggcaacctttgcaaaaggcccaaatagaacaaaggaaaaccggtggtggaatct

SEQ ID NO: 103420 - DNA, 3216 bp, Homo sapiens
  misc_feature (1)...(3216): n = a,t,c or g
taagagagtacagatgtcatgacatttattaaaaggcatgctacaatgctatatttgttaggaaaagagattagagatatcaagtaatagtcagcaaatatacaaactgaacgaaaatggaatatactgtagtgtacagaagcttgaattaaccatgcactacgcatttagaaaatatgttttttaatattttatcttctctttgcatttataacataattcacttcaacaatcacagactccttttttcccaatgccacagactgttacaaatgaaagctggtactgctgcttatccaaaatatacaagacaattgatgttttatataaaaccactttataagttcatttgttcccaaaaacctttttttcttttttggccttgttaaaaaaaatgttgttacaaatatttacagcattttcttctgttagacgaacattcttaaaaactgaaaaggggaattttgatgaacagaccacgtaaaacaccagacaatgtcagaggctcctagctgtgctatttttttttttcttagatacagtactgaaaatgcccatcaaactcgtcatcctaatccattctgttcacactgaaactcacattttctctaagtagtctattcagcagtagaaattgaaagtaaaggccgctctgcactgggtcttctttcagaaaggagcttggggaaaatgcaaaatgctttacagagaggagttaaaaccacaacagtcagtctttggtcagagcaatgaggtgacactttgatgcaaaactttgcttggtcagcaatctttataactggtactttctggatatgggatgaatttttaaaagatctgggaaacaacagtaagggggaaaaaaggccagagtatgatttttttaatggcatcaaaaaaatagctatttaaatatttgttattacaactactacatagatccaagaagtgaaaataatacaacaacaaatcagttgacaatgctgatttaagcatgccataggcatctttcaattatgactatgatcaccaaggtcactggaccagacaaatatccctgttctctggaacatatgcctcaggttacaaaaactaaggaaactaccacaaagattttgagcagctctattcttggacctgcacaatgctctacaatgaatattatgtgataaaggcaaaagtgtaactgagactttatttatagttacaattctttgcttggatgaatagttggtgggacaacattcttttaaaactatatagtacatatttcctgaaaaccagaatactgatactactttagtctcaaataggaagaaaaggtcaattaagactactgaagaaggcacataaactttggtcctgttttttctcccactataaaacccctcaaactaagattttaataattttctatattttaaaccactcacaactagctgttaaaatttgctctgaaaaaagactgctaatagtcttgtagataacaacacaactcttttaaaagacagctgagttatattttcaaattttgtgcaatctaaattgtatttctttcagcacaatagtagagtattttgagtctggcagttttgttctcattaacagatcaagacaaaggaaaggctaagaaaaatgctttacgcatcgtcacgctgtctctttttggttttaaaaatagcagtacacattaggttttctaagggataggtggggaaaaacacatgtacttttgtcaattttttgcccaaaaatatctcgtgggaacagaagagaaactgcatgacaatatgctaaacatgtaagcactgctgactgatggcacggagacattgaaaagaacagagagccagnccgtggtggctcatgcctgtaatcccagcactgtggggaggtggaagcaggagaatcacttgagcccaggagttggcgagacccctaaaaataaaataaagtaaaataaaaagaaattgagcagaggcattcataggagccacttctcatcaactaaaacagaacccatgattatcatactaggtggagccaaagaaggcctcactgtcataagggaacaggcaggcagaaatgatatctccaaaaactgagctcagcaacttttaacagtaaatcagaaacattacttcaaataattgatttcaatatttagtcttaaagaatttatggcattctgtaagagctgctgggtaattctgatactctccagtaagtatcaattaagatactgggtcatttttctatttgtatgttacacaaaacacattttactgctatgcaaattattcaaatctcaaagtaaatcattttggtgtaattcgctactgttaaatgtgtactgctattttttaaagtcctgaatatatatactttgtgtagaagtcaagacaccttgaaaagtgatgacaatactccttaaaaataaaataaacttaaaaataggatactacggtagatcaacagagaaaaaccattgatagaagatactgaataaatgcatgccaaaacagagatacacagatctagtttttccaccatcctgatattttttaatcttttttttacaaaaactatgccaacacaaatactgtagacctctataattcaaacagcaaatagcttaatatggacaacatccatgtgctacagctaattttagacacaaactgatggtttcaaacatgctattttaaaacaagaacatcccacatctccaaatcttaatttggttaattttgtcaataaattaaaatgtatgtaatgtgcatatgtatatacaactttagaagagtgtatttatgtatatacacttatctacacacacacacattcacacacacacacaaacacacccctacacaaatccctgaaaaggattcaaatgttctctctcagacttaaaaggccattccctacttcaaagttacattcaacaccactatgatccccttccgttattagcaactttgctacacttatgctgaatgttatgagaatcatgaattaataaattacacagtaattcctaacttaaagtaaatgaaataatccaatttaacatggcactgaaaattataatagtgcctgtgtggaagggaaaaaaaagcaagttttgggagattttgcaaagaaatttttttcctccttcatataccccttgtgtctaggtcaaaacttatttcataagtaaaaaaacaaaaa

SEQ ID NO: 103421 - DNA, 387 bp, Homo sapiens
caaaattgagattaggccaattaaatacctctgcaatggctgctaagtgttgaagtgaaaggaagagtctcacacctcactttaaatcagaagctagaaatgattaagcttagtgaggaaggcatgttgaaagctgtgattggccaaaagctaggcctcttgtaccaaacagccaagttgtgaatgcaaaggaagagctcttgaaggacattaaaagtgctactccagtgaccgcatgaatgataggaaagcaaaacagccttattgttgatttggagaaagtttgagtggtctgaatagaagatcaaacagccataacatttccttaagccaaagcctaatccagaacatgtctaaaaatgcccttcctgaacctctgtacttaat

SEQ ID NO: 103422 - DNA, 370 bp, Homo sapiens
  misc_feature (1)...(370): n = a,t,c or g
cgcaggtgcaggtggccgccggatcccagccgcactgtgggaagacagatagggaagctggtcacccacaggcctaccgttttccaggaacgagggtgcccatttcccctaacacgccaagctggatctcaccacggcggcggcgcctttgcacaagttatttcccctaccaagagcatttctccgtgcgggcgcggtggctcacgcctgtaatcccagcactttgggaggccgatgcaggtggatcacttgaggcnggagttcaagaccagcctggccgatatgtggccaatatggtgaaacgcccgcttctactaaaactaccaaaaattagctgggcatggtggctggcgcctgtgatcccagctac

SEQ ID NO: 103423 - DNA, 409 bp, Homo sapiens
tttaaagtggttattcaaattttcatttttttcttcttgcgagttgaatttacttaataaagattattggaatttacttgaaatttatatttaatttaaaaacatttccttgcacagagggtaaggacaagaaaatagagaaacttggaaaatagttcatctagtttgagttttgtacacttgacacatcaagcgtcttaactgtttctcccattttatttagtgttatcagccaaccgcaagtcaggcacatgtgcatcatgatagtaatgacagtagtactcatgtttaattgaaactcacgctggccgggcacggtggctcacgcctgtaatcccagcattttggaaggctaaggtgggtggatcacctgaggtcaggagttcgagactagcctggccaacatggc

SEQ ID NO: 103424 - DNA, 439 bp, Homo sapiens
gagaattgcttgagcctgggaggcagaggttgcagtgagctgagatatcgcaccactgcactctagcctgggtgacagagcgagactccatctcaaaaaaaaaaaaaaaaaaggggtggccttcttttttttttaaaaagggccccattttttcccaatgggggggccccatttaactcccctccattgggggctaaaaagtccccattttttggggttttggttagggaccaaacttttctttttttaaatggtcggcaacccggggggggaaaacggggcaacctaggggaatttttttccttttcaaccttttttgggaaaaaaaaacccggcctttcccggaggggaaaagtttggtaaacccctttgggcctggcaacttttttccacaagtccccacgtgggcttctttttttataaaatccccctccttatg

SEQ ID NO: 103425 - DNA, 516 bp, Homo sapiens
  misc_feature (1)...(516): n = a,t,c or g
agcggggnagccccattgagncctccgattgagcgtctcgcagncgcccccgcgtncggncgaatttcgtttatgcacttcactaagtaaggtggtcatgtattgatttccctacaaacactcagcttggttcatgtagattcttgaaattgcactaaactctcaatgtaaatgattgttgtctttttattgatcaacacatcagctctgtcacataaaattatttaaatcctgagatggccaagaagaacacaattccatcattccagccagtaaactagcatgtaggagagaattttaatgtctgttcatggattcaaagttttttcattaataagatatggaaaagtgtaactttctttcatttatttatgnatttattctttttttgagacaggttctcactctattgcccaggctagagtatagtggtgcaattgtagctcactgcagtcttgaccttctgaggctgaagcgatccccctgcctcagcctncagagtaggtattggagacg

SEQ ID NO: 103426 - DNA, 421 bp, Homo sapiens
  misc_feature (1)...(421): n = a,t,c or g
gtttcaccatgttggccaggcttgtctcgaactcctgacctcaagtgatccactcgccttggcctcccaaagtgctggattataggcatgagccaccgtgcccggcccttcttcacgtttgtatctaactgtcactaagattctgtttctggcatctatcttagacctgttgatttctctccttccatgactcctggcccactctggccccatgtaatccattcttcatgagaggtattttaaaaacacaaatctgatcatgccactctccagcctaaaactcttcagaggtttcctattgcttttcggataaagaccaaaatcttcaacatggcctttgcccacttgtccagcctattctcctgtcactcaaatgtgccagcctccctctgcctgctgctccctctgcttgcatgtcacn

SEQ ID NO: 103427 - DNA, 594 bp, Homo sapiens
  misc_feature (1)...(594): n = a,t,c or g
catttgatnnnncccctnnnacgcnactggagccggccccgtattaccgggncgacccacgcgtccgcttgcatttagttcatatgttcctttaatttagtctaatttattacagccttcctgttttcgtaaaaatgccatttactggtcctttgtcctgtagaattttctgcattctggacttggttggttgtactctcatagtatcatttaacagcttcctctatccccatgttgcctgcagttggaatacttcaggggtggctctgaaggagcaactccatttttttttcctttttttcttttttctttttttttttttttttgaaaagggagccccccccctttttttccccccccggaaaggaggggggggaactttgtttatttgaacccttacccccggggtgaaaagaattttccctccctaaccccctggagaggggggaagggagggttttcccccccaccccgggtaatttttggaaaaaaaatttaaaaaaaaacagggttttccccttgtggcccgggtgggttttaacccccgcccctcaggggaccgcccgtgataatttcccaaaggggcgggaatan

SEQ ID NO: 103428 - DNA, 434 bp, Homo sapiens
  misc_feature (1)...(434): n = a,t,c or g
tgactttacctcttaaggaggtcagtgaactgtaactgccctttcctcagtgtgttacagagttcataatagtacttatctcatggtgttatataagagaagatgcatgtaaaaacctcaaacatgtggctattactataattaatgtatgtatatatatatgtgtgtgtgtgtgtccatccacactgtatgtatatatgtacatgctgccgatttgagtgacacattattgactctaaattaggttacactggtggaaatgctgtcatcctttcagtgcttaatgttctggtatcatggccatatctaaaagtaacatgagctggatgtggtggctcatgcctgtaatcccagcactatgggaggccaaggcgggtggatcanctgatgtcaggagtacaagaccagcctggccaacatggtgaaaccccgtt

SEQ ID NO: 103429 - DNA, 425 bp, Homo sapiens
tgggaggctgaggcaggggaatgttgtgaacccgagacgcagagcttgcagtgagctgagatagtgccactgtactccagcctgggagacagagcgagactctttctcaaaaaaaaaaaaaaagaaaataaggggggagggttttttttaaatgggaaaaaaaatttaaggaggttggggggccctaacccccaaaaaattggaaaaaaccacccccggggcccaaaataaaatggttaaaaaacaaaaaaaggggggaaacctttaaaaacccccgggacccggccttgaaaaacaaaaaaaaaaccgccaaatttttggtgggaaacagggcattcaaaaaaacgggggcccaatttttttaaggaacggaaagacacccccgggaccctaaaattttttatccggcaaaaaatttgtgaaaa

SEQ ID NO: 103430 - DNA, 479 bp, Homo sapiens
  misc_feature (1)...(479): n = a,t,c or g
gtgggagcccccccccatagacgctgatagaccgccctcggaaanccccggncgacccacgcgtccgcggacgcgtggggttttagatattaacctcttgaggtatatggattgaaaatactttctcccatttcttaagctgccttttcattttgttgactgtttcctttgctgtgcagaagttttctagtttcatgtaattctacttgtctatatttgctttcgttgcctgaatcatttcagatggttttattgtggtttggttgatacacaaaaagctgtacatagttaatgtatacaacttgatgagtttggaattctaagtaaatacctgagaggtattaccataatcaaggccataaactttgtcatcaaaacagtttttgtattggcataaaacagacatattgaccaacagaacaaaagaaagagtccagaaataaactcatgcatatatagttatcttcaacaagggtgcg

SEQ ID NO: 103431 - DNA, 422 bp, Homo sapiens
agtgttcacctgttgttatctgtgtcgtcccactgagtgcattcaccaccttttaaattttggtcactgtatgtatcagttctaaaattcccattttgttctctatattttaaatttcttgccttatattctattttcctgcaaatgtgtcagcatttgcttgtttgagctttttttttttaaaaacggggtctcaactctgttacccaggctggagtgcaggggggcgatctcacctaactgcaacctttgcctctgggttcaagcgataattgggcctcacttcctcggaaggctgaagcaggaaattcgtttacctccggtagtcccaggttgctggcaaccctattccatccatttccacccggctcaaccagaggaaaactccgtttgaaagttgaaggtgattaaaataatttgaa

SEQ ID NO: 103432 - DNA, 407 bp, Homo sapiens
atcttatacatcttgtgatggtttcttatcggtaccggtaaaattgtctcagttttttaattactttttttttttttttcctttttgaaaacaaagtttccttttgcccccaaggttaaggggcgggggcccattttggccccatggaacccttcccccccggggttaaggaaataatccgccctaacttcctgggaggggggaataacggggggcccccccccccccgggttatttttggctttttgggaaaaaacggggtttcccattgtggccagggtgggtctaaacctccggccctaaaagaaccccccccccttggccctccaaaggggggggaattataaacggaaccccccgcccccacccggaaattttttttaattgcccccttaccaggtggtggt

SEQ ID NO: 103433 - DNA, 380 bp, Homo sapiens
  misc_feature (1)...(380): n = a,t,c or g
atttgaatccttgctttcagttcttttggagtttctgcggaagtggagtttctgcgtcaaagggtaatcctgtatttaattttttgaggaattgccaaaccgttttctatagtggctacgctgttttacattctcaccaacagtgcacagaggttctcatttctccgcatccttatctgactgttgggtaattttagtgttttttggactgttggagttgatagccaaggaacctgcctctcagggatgtggcaacaactggtccaagttaggtgggtaataaacctgagggcggtttgaatccagcctcagccagcctaggtgtggccctatagtcaccactggactgccgggggctaccaccttcagtatattntagt

SEQ ID NO: 103434 - DNA, 528 bp, Homo sapiens
  misc_feature (1)...(528): n = a,t,c or g
gagaaatctgatgcgtcggaccgcnnctgaatccgtgggagaccccgcgtncggcaccaaagctaaggagcttcatacgttatctctttaatctcctcaaaactttgtgaatggatcattggtagctcattttacaaacgggaaaatgaaagatttgaaagatgctccttttgtctggaagcttcagctatatgccatctcaagttccatcttcctggaaaacccttgtaaatccaccactgttaggcttagccatcctctccttgatgaagcctatccctgacctctgcccaagactatggaaataatgttagacaaaaagcaaattcaaacgattttcttattcaaattcaaaatgggtcataaaatagcagagacaactcgcaacatcaaaaatgcatttggcccaggaactgctaatgaagaaatgtacagcgcagtgttggttcaagaagttttgcaaagcataagagaagccttgaagataaggaagcttatgggccacccatcagaggttgacaccaacca

SEQ ID NO: 103435 - DNA, 1295 bp, Homo sapiens
gggctgccccctcttccttagcagacgaaccagtaatgggggcaaggctggggcatcccagcccacacaccctggatgcccagcaaggccacagaaagagcctgatgtccatgatccaggtggctctgagaagcttggcctggacacctgagcctgcggccggtactcctgccttctccccatctatccccaaggcctctgcctctcagcctcttccatggtcggtttaggctgctgagttttctgtgcttccccaagaaccagtgggatcaatgccggcggcctctgtgatggttgctgactaatccgggatttcatgagtcagaggcaccacccctcaccccagctgcctgctgcttctgacggatcttggtgctcaggctgcctggctctccgagtgaggacgcagcctccatatttggtgcactcaggcatggctgggacaagccagctgccccagggttcttcccctggtgattctcgcctgctttctcatctcaggggaggcagtggcacctccctctccctgctgacatgaagagagctatgatatgccactgctgccaactcatcctctgcccccacctcgaaacccacagtccccagtggagggccactactcatccccattggtttcccaggggaggggtgttgtctggaagggcaggttcagatgcagccttccagatttagaggcactgggaggacagtggctgagtggaggcgcccagacctgggcaggcagcaggctcaggcccacaccttgtgatttttgaaaccaaagcccagaagatgatgtttacttctctctccctggctctgcccttcttactgcaaaccatgctgtgccttagggcccttctcatagctgttcctcatggccatgactggaacagggatgcaacctctttctacacaagcacagttagttgggtgaagtctttttttttgtttgttttagacggagtttcactcttgttgcccaggctggagtgaagtggcgtgaccttggctcactgccaaactccccagcagcctcagcctccctagtagctgggactacaggccccccctaccacgcctggctaattttttgtatttttagtagagatggggtttgaccgtgttagccaggatggtctcgatctcctgacctcgtgatccacccacctcggcctcccaaagtgctgggattataggtgtgagccaccgcgccgggccggttgctggcatcttaatgttctgtaggtggaatatttccaataaacccaagggtgccgtatttaaaaaaaaaa

SEQ ID NO: 103436 - DNA, 387 bp, Homo sapiens
tgaaactgactttcatgtgcacttatataatttaatagaattaatacaaagcaactattggtcagtttattctgcctcttcctgtaggcttataggatgaagattatagacaggatttcattgtctttgtacactgctgctctttgggttacactttttctttttctttttcttttttttttttttaaaacggagttttgttttgccccccaggctggggggcaggggggcaatttaagttaatggaccccaaccctccccctccggggtaaaaggaattttcttgtttcacatccccgagacctgggaattaagggcgcccccccccagtgtgggcaaaattttgtattttataaagaaaaagggggatggcttttgacagccacg

SEQ ID NO: 103437 - DNA, 438 bp, Homo sapiens
cccacgcgtccgggctagttctagatcgcgagcggccgcccttttttttttttttaaatggaaaaattaaaaaaccttttattttaggttcgggggccctggcccggttttgttaaaaaggaaagcccccggccaaaaaaattgggttaacaaatattttggccccccgggaaaaaaccaaacccccccatggggggtttttggaccctccccctcctttaatcctttcccggcccgaccccccttaaaaaaaaaaaaaaaaaaaaaaaaaaaaaaaaaagggggggggccccttaaaaaatcccccggggggccccaaatttccccggggggggaaaaattttttccccccctttaggggggcctataaaaacaccccggggggctcttgagaaaaaaacccttttttgggggggggaaaaaaaagaaaacaacccc

SEQ ID NO: 103438 - DNA, 498 bp, Homo sapiens
  misc_feature (1)...(498): n = a,t,c or g
acccagtctgtggtattttgtaacagcaacacagactaatgcatgtttgctgtaactctaggtcccagaggcttcagtttcctctagtgacctctagtttttcctctagtattttttgtcttgtgctttcttaagaaccttcttaaatagagtctgagtcttgctgcactttcacatataatccactgttattttactggagtcctattgttgtggtgctaaagtgaagataccatttcatactcactaggctataataaaaaagatggagagtaaaaagttttggtgaagacatggagaaattggcaccctcatacattgctactgggaatttaaaatggtgtagccattttggaaaactgtttagcagtttttaaaaattaaacatggggctaccatttgattcagcatttcaacttccagatatatgcctaggagaattgaaaacatatgtccacaccgaaaattgtacacagatgttcatggcagcattatttn

SEQ ID NO: 103439 - DNA, 665 bp, Homo sapiens
gagtactttattcattttagctagaagtactttattcattttagcttatcagctacatgatttgcaaaaattttctctcattctgtggattgtcttctcactttgttgatggtatcctttgaaccacaaaagttttaaattttgatgatgtccagttagtctatgttttattttgttgtttgtgcttttggtgtcatatctaagaaatcgttgcctcatccaaggtcatgaagatttacctctatattttcttctaaagattttatggttttagctcttacatttaggtctttggtccattttgatttaaatttttatataaggtgtgaggtaagggtccagcttcattcttttgcacgtggatattgagttgtgccggcactatttgttcaagggctgttttcctctgtttaatcatcttaaccctttttggaaattaattgaccataaatgtgagtgcttatttctggactctcatttctataccattgaactataatatatatctgcccttacgccagtaccacactaattactatagcttcatagtatttgaaatcaggaaatacaagttctccaacttttgttctttttcaatattgttttggttattgcaagtctcttgaatttccatataaattttacgatcagcttgtctgtttctg

SEQ ID NO: 103440 - DNA, 378 bp, Homo sapiens
ccggctcgaaggcttatttctgtgcgctctattctgttccattgctatatgcatgttcttttttttttttttttttttttgaaaaaaaagggggccttttggttttcaggggggggacccaggggggaattttaggcaattggaccctttgcccccggggataaaacaattttggggccccacccccccggaaagcggggaaaaccggggggggccccccccccggggcaaatttgggattttggggaaaaaaaagggttccccatgggggccaaaaggggtttaaacccccaaccccaggggatccccccgccccggccccccaaaggggggggtggcctttgtttttaggccaaaaccacccgggttggaacaaga

SEQ ID NO: 103441 - DNA, 369 bp, Homo sapiens
gggaggctgaggcagcagaatcgctttaacctgggagaaggaacttgtagtgagctaagatcgcagcactgcacttcagcctcagcaagaagagcgaaactccatctcaaaaaaaaaaaaaggaaaaaaaaaaaaaccccaaccccaatttttggttggaaaacagggggattttccaatgggcaaggggcccccttttttttaaaaaaaattttgtaaggaccaaattaaaaatagagggcctaaaccctaattttttttttttttttatcacctggaatttcccaagggggggtattttcatggttcccggggaaaaaaaaagggaaaaaaaaatttggtggtccccaatggagatatgaaaagaat

SEQ ID NO: 103442 - DNA, 420 bp, Homo sapiens
ccctttgtggaaagtcacaggtcacacgaggggccccgtgtcctgcctgtctgaagccaatgctgtctggttgcgccatttttgtgcttttatgtttaattttatgagggccacgggtctgtgttcgactcagcctcagggacgactctgacctcttggccacagaggactcacttgcccacaccgagggcgaccccgtcacagcctcaagtcactcccaagccccctccttgtctgtgcatccgggggcagctctggagggggtttgctggggaactggcgccatcgccgggactccagaaccgcagaagcctccccagctcacccctggaggacggccggctctctatagcaccagggctcacgtgggaacccccctcccacccaccgccacaataaagatcgcccccacctccaccc

SEQ ID NO: 103443 - DNA, 348 bp, Homo sapiens
  misc_feature (1)...(348): n = a,t,c or g
atttttcatctttcccttgcggtactatatctattgcgccaggtttcaatttctatcgcctatactttatttgggtaaatggtttggctaaggttgtctggtagtaaggtggaggagattttcatcatgcatcttttctgtaaactagtcaaaattttcaccatggtttgtttcataatggcatcttcagttgtattcttttgacacagacaaagtttggttacatattaaacacataggactatacttccacaaagaaatatgcttgctcccacttctcttgaaacacgcggcgctatcaatccatctttcattttcccacttttgatagagacatatgaacaacan

SEQ ID NO: 103444 - DNA, 410 bp, Homo sapiens
ggcacgagggtacatgtgcatacattctgctgggtatgtacctaggagtgggattgctggatcatggggcgtatctgtcttgaactttagcagaatcaagccaaaccattctccaaagtagatgtaataatttgcattcacacaagtagtgtgtgaagatttctgttgttccatagcccgagcaacacttaatcatatcagactttgatgtttttagccattggggtatataacggtgtatcattatgattttcttttgcatcacccttacttactactgagactagatgccttttcctatgtttattggccatttggataatttaggtttttttgtcatcggtagatgacatgatttatctagcctcttgccccttttactgttggggtatccttttctcttttagaac

SEQ ID NO: 103445 - DNA, 386 bp, Homo sapiens
  misc_feature (1)...(386): n = a,t,c or g
ggcacgagactgcatagggctcggcgtgggggctgtagggccagatggtacctggaggaacgtccaggtaccagctggcccaagaaagaaaataaaaaacaacacttttgcatgaaaaaaaaaaaaaaaaaaaaaaaaaaaaaaaaaaaaaaaaaaaaaaaaaaaagtttttttttttttgggggggggaattttttttttttttggggggggatttttttttgggggggggggggggtttttaaaacggggggaggggaaaaaaannnccanntatttgggatgctgccttgatatcaagcagtctaggctgcagtgaacttactgccccactgtgttccagcctgggtgaccccatctcaaagaagaaaagctaccaaatgtcg

SEQ ID NO: 103446 - DNA, 686 bp, Homo sapiens
  misc_feature (1)...(686): n = a,t,c or g
tacttctttttcactttcttaatggagtctttctttaaaaatttttttataatatcttaaattcattccgttaacatggagtcttctgatgaacaaaagtgcttaattttaacataggatcaaatttaccaatctttttctttatggtgaagactgaattctgcctaagaatttttgcctgtccccaaggtcgtgaagatacaagttatcttctagaagcttgattattcagtctttcacatctaattgtataattcacctagaattggtttcgtatgtggtatgaggtaagagtcaagatttttttccttatttgaagtatccagttgacccagcaccatttattgaaaagatcatcctttcctactattctgtagtgccatctttgtcatatatcaagtgtctgtatatattttccaatctgtttgccgctcagaaacttaaaccctgcttaaatagttcttgggtcnnnnnnnnnncaatacttatttttaaccaatgcaataaaaagggaaggtagatgaatttaaaatctaattcaggacaatagtgaaataagaaagtaaacctgagaaaaatataaaggaagaattctttcaacaaatgtttcaaagactggacactgccttcatggagctcatacttagttaagccccatattgtaagaataaggtatacttacctgt

SEQ ID NO: 103447 - DNA, 493 bp, Homo sapiens
  misc_feature (1)...(493): n = a,t,c or g
nctggagnacctcgaaannncctgattgccgtcggaacggaccgcaantcccgggtngacccacgcctccgggtcaaacactattctgagtgtttctgtgacagtgtttctggatgaaattaaaatttaaatcagtagactgagtaaagcttattttcctccttaatgggaatgggcctcatccaatcagctaaaagtctgaaaagaacaaggctgacccccgctgaggaagaggaggattctgcctgtgagactgccttccagctgggacatgggcttttttcctgtctttggagttgaactgaaacatcagctactcctgggtctgagcctgccagtcttcagactggaatgacactgtctgccttcctgggtttaggccttcggactcagactgaaactaaactgtcagctctcctgggtcttcagcttgccagctcacctgcatatcctgagacttgcctgcctccgtaattgtgtgagccaatccatc

SEQ ID NO: 103448 - DNA, 419 bp, Homo sapiens
tactactggcaaattacaagtttcacataaaaaaagcacatatagtcatttctccaaaaaacctacccacaccaccaataaggacatgaaaagatattcaccatctttactattagggaaatgcaaagcaaaaccacagggagtgagataccacttcacaccaaaatacggacaataacaaatgttggttaggatgtggagaaactgaaactcttatttatggctggtaagaatgtaaaatggtacagccactgtggaaagcagtttggcatttcctcaaataattaaacatagaatcactatatattaataaaactatagttaatatatatcatattcttggagaaaaacatgcattaccatatatgaccctgtaattctgctcctaggtatatacccaagagaagtgaaaacacatt

SEQ ID NO: 103449 - DNA, 428 bp, Homo sapiens
tgagtgaaattaacctgctattaaatagtaaacttttcctctggagtcacttttttcccccttcaaagtatgttactgaggaagtaaacttttttttttttttttgggttttggtttttgaaaacaaagcccctttttgttccccagctttttgaaggcccggggcccattttgggttaatggaacccccccccccgggattaaaaaaatttttccgccctaaccccccggggggcggggaataacgggcccagcccccccccccgggttattttttgttttttaagaaaaaacggggtttccccttggggtgggggggggtcaaaacccccgaccccgggaaaccccccccctgggcccccaaaaatccgggttatcaggggggggcccccccccccggggggaagaaaacatttttaaggcccctt

SEQ ID NO: 103450 - DNA, 401 bp, Homo sapiens
gccacaacggaaagagggagttaataaagccattggagcatccaaaaaaaaaaaggcggggtttttgggccccccacccggaagggggacggtttgaatattctttgcccgcgggttccttcccccgggtccttgaaaccgccggggaaaaaagggcctaaggagggcaagaacctattaaagtttgcccctttttttataacaggaaagttggaaatggctcccccccaaagaaattcaaaaaaggaaggagggctgccttttttggtctaagggcaaacaaaaggggcttatttgtaaaaaagggcaaaaaaatttgggtgggaaaggtgggggaacccataacggaccttttaaggaatttgggggaagggcttcctgaaaaagatgggcctttggtg

SEQ ID NO: 103451 - DNA, 422 bp, Homo sapiens
ctagatcgcgagcggccaccttctgtacgagatgggggggttttttttttttttttttttgggggggggaaaaaccttaaaagggggggaaaggaaggttttaaaaattggttttttaaaattgaaaaaaaaaagggttaatttttaaaaaaaaaaaaaaaaaaaaaaaaaaaaaaaaaaaaaaaaaaaaaaaaaaaaatgggggggggcggaatttaaaaaatcatggggggggcccaaatcttccggggggggggagggttttttttttttttagaggggtgggaaaaaaataactttggggtgtcttttaggagaaaatttttttttggggggggggtcttcctcccccccccccccaaggaaatatattgcctttgagaagaaaaataattttttttatgctaggggggcggccaact

SEQ ID NO: 103452 - DNA, 385 bp, Homo sapiens
  misc_feature (1)...(385): n = a,t,c or g
tgttggttactcactatcacgctcagcatctattaaaaagaaacgtggccaggcgcggtggctcacacctgtaatcccagcactttgagaggccgaggctggtggattcgtctgaggtcaggagttcgagaccagcccggccatgttttgttttgagacagagtcttgctctatcgcctaggctgtagtgcaatggcacgatctcagctcactacaacctctgcctcccgggttcaggtgattctcccgcctcagcctcccgagcagctggagagttgcttgaacccaggatacggaggttgcagtcagttgagatcacaccactgcattccagtctgggcaacagagtgagactccatctcanaaaaaaaccagaaaaatcctn

SEQ ID NO: 103453 - DNA, 618 bp, Homo sapiens
ggttacaaagactatgcagcaatatggaaagtgattatgtgtgggcatagtgttacaacaactacctacaagcattacagatgtttcagaatttgtctagcaggttttccagtttgtaccagaaaacccctatgcaagtttacaaaaaccaaaactatgtacacaaattacatgctaaaaaacccaaatactaaaaattatgaacatgactgagtgaaactatgagtctttttttcccctttaaatatatttcctaaatgcattgctatttgtggagattagtttagtccctcaaaaaattttcccataatgtccggcactgtggctcatgcctgtaatcccagcaccttgggaggctgaggagggtggatcacctgaggtcaggagttcgagaccagcctagccaacacggtgaaatcgcatctctaccaaaagtacaaaattagctagtcgtggtggcgcaggcgtgtaatcccagctacctgggattacagtaatcctcctgctgaggcgggagaatcgcttgagcccgggaggcggaggttgcggtgagctgagattgcgccattgcactccagcctgggcaacaagagcgaaaactccatctcaaaaaaaaaa

SEQ ID NO: 103454 - DNA, 432 bp, Homo sapiens
actagtgctagatcgccgaccgacgactattttttacaaaccacaaagacatcggaacactatacctattattcggcgcatgagctggagtcctaagcacagctctaagcctccttattcgagccgagctgggccagccaggcaaccttctaggtaacgaccacatctacaacggtatcggcacagcccatgcatttggaataatcttggtcatagtaatacccatcataatcggaggctttggcaactgactagttaccctaataatcggggcccccgatatggcgtttccccgcataaacaacataagctttggactcttacctacctctctcctactcctgctaacatctgctatactggaggccagagcaggaacatgttgaacagtctacccttgcttagcaaggaggctactcccaccttggagcc

SEQ ID NO: 103455 - DNA, 388 bp, Homo sapiens
cccactcgtccgcccaagcggccggttgactattttctacaaaccgcagaggcattggaccgctatacctattattcggcgcatgatctggagtcctaggcccagctctaaccctccttatttgagccgagctgggccagcctggctaccttctaggtgacgaccacacctacaacgatatcgacacagcccatgcatttgtaataatcttgttcatagtaatacccatcataatcggaggctttggcgactgactagttcccctaataatcggagcccccgatatggcgttcccccgcataaacacataagcttctgactcttacctgcctctctcctactcctgctcgcatctggtataagggagggccggagcaagtaacaagat

SEQ ID NO: 103456 - DNA, 395 bp, Homo sapiens
cggacgcgtggggtactgaacacctgacccaccccctgggtactgccatgggactctagacccactgatgccactatagatgatttcctgattgtgtctgtgtttttgtctcacatcctcatgattaagagttccagacatctagccacatgttaaaaccttagggttcaaggtgaggtgaggaagaatgaatacctccttcagctgttgtagtgggaggcaaagccttgtccctgatcaagagccacacaataggaggtactcagaaaatcagaaaagagttttgagactgtgtgtataataaacaataaatgcggccgggcatggtggctcacgcctgtaatcctatgactttgggaggccgaggtgggcggatcacttgaggccaggagttc

SEQ ID NO: 103457 - DNA, 456 bp, Homo sapiens
cggacgcgtgggcttgcagtgagccgagatcttgccactgcactccagcctgggtgacagagggagactctgtcacaaaaaaaaaaaaaaaagaaaatttttttgaaaaaaattggaaaatcccaaaaaaaccaaacgggtttggggaccttttaaaatggaattggggttaaaacaaattgaaatgggaactttttggaaaggatatgtaaaaaaaaaccatattttaagtaaaaaaaaaattttaaaatttttaccctttttccaaaaaaaaaaaaaaaaatcggggaaaaaaaaaaaaaaaaaaaaaaaaaaaaaaaaaaagggggggccctttaaaaaaatccttgggggggccaaaattaaccggggggggaaaaatataattttttccttttaggggggcggaataaaaaccccgggggggtttttgggaaaaaaacctttttttggggg

SEQ ID NO: 103458 - DNA, 429 bp, Homo sapiens
tctcgaactcctgaccccaggtgatctgcccacctcggcctcccaaagtgctgggattgcaggcgcgagccactgcgccgggccagaatctctcagctttaattgtggactgaacctctatggagagaatgtgtgtataatgaattcctctgtgctccaggatatattcctttggtccttgttttataaatttccctcatgctgatgtaaaaaaaaagatattatcatgtctatcagctgagcacacacagggggattgagaggaatggagaaagacaggaggaggaggagataagggagaactaacatggccagtatgtatctcctttgttctaggggtttgacatatttgagatcatctttacagttgtcctatgaattatatataacattccctatttacaaagaaaaaagggcctcagagtcacc

SEQ ID NO: 103459 - DNA, 401 bp, Homo sapiens
ttaaaatttagtatagtttaaaatttggtatagaaatgacagtgtccatgcacacatgcgttccccagtgtatgcagcgtagcgcaagtagagagaaaacgggaaaggcttctaggatgaggtaatgcataaactgagacttgaggttgaaattaaatttaagtaaaaacatcataaggttgcagggtactgtcgaaagttcagtgctcacgattaaagaaatgcaaatcaaagccaaagtgagatataatcttatcccagttaaaataaaaagatagggaatgacagatggtggtgaggatgtggagaaaggggaaccctcatacgttgctagtaggaatgtaaattagtacagccactgtggaaaacagtatggagtttccttaaaaaaaaaaaaaaag

SEQ ID NO: 103460 - DNA, 441 bp, Homo sapiens
aaaagtctatttttaacctccacaatggtgttcttgggatatttatccaagccctcaattcttttttttttttttttgaaaaaggagtcccctttggtgccccaggcggaagggtgggggccaaatcggggttaattacaagcttggcccccggggttaccccctttttctggcctaaccctcgggaaaagggggaataaagggccccccccccccccccaagaaaatttttgggaatttttttttttttttaaaaaaaaagggggttccccctggtcccccgggggggcccaaaccccggcccttggaaacccccccccctaaccccccaaaggggggggaatacgggggggggcccttggcccccccccccaattccctaattttttaaggggccttttaaaaaaaaaggtcccccctggacaaaccgtgggaacccat

SEQ ID NO: 103461 - DNA, 435 bp, Homo sapiens
gggaaataaaacccagttgaataaaaaataaatacgaaaataattagtaaaaatagtttacccagatgagaaagaacctgaaaaataattctggcaatatgaaaaaatagggttctataacacccctaaaagatcacagtaactttccagcagtggatccaaatcaaaatgagatgttcgaaataccaggcaaagaattcaaaaagttgattattaagttactcaaggagatacaagagagagatgcaaaccaacataagttttaaaaactattctggatatggatgaaaaatgttctaaagagatggatattttaatgaaaaatcaatcagaacttctggaaaagaaagacacatttagggaactacaaaatgctatggaaagttttaacaatagactagatcaagtagaggaaagaattacagagcttgaagc

SEQ ID NO: 103462 - DNA, 443 bp, Homo sapiens
caagaacagaacaaacctaaaagatacttgggaaaatatctaatcagtcaacattctaaggactgttaaatgtgaaatagcatagttattttttgtcttttgttactagtgtgaacaaagaacggcgcctaacatataatgggcatttagtaactctgttagatgaaagactctccaatttcagattttcttttagcatcttattagtcactacttaattctgatgatttagctctaaatttattttgatctcagtttttttatttttgtttttggagacgggatcttgctctgttgcccaggctggagtacagttgtaggattacagttcactccagcctcaatctcctgggctcgggcaatcctcccatctcagcttcccaaatagctacgactgcaggtgcatgcctccatgccctgctaatttttgtattttttgtaaa

SEQ ID NO: 103463 - DNA, 433 bp, Homo sapiens
  misc_feature (1)...(433): n = a,t,c or g
actaattctagatcgcgccactgcactccagcctggataacagagccagacccggtcnaaaaaaaaaaaaaaaaaaaaaaaaaaaaggggggggccctttaaaaaaaacctttggggggcccaaatttaacgggggttggaaaaaaaaaatttttttttttaaggggggcaaaaaaaaaaccaattgggaatttttggaaaaaaactttttttttggggggggaaaatttgggaaaaaccccctaaaaaaattaaaacctttaaggaaaaaaaaaaatttttaaggggaaaagggggaaaaaaaaccgaaattttttgggggtaaaaaatttttttttttgggttttttttaaaaaaattttttccccgggggtttgaggtnnnnnncnccgggannccctttttcaaggttaaatggggaaattaaataggt

SEQ ID NO: 103464 - DNA, 403 bp, Homo sapiens
gcttctttccttaaacgtcatgaatcaaccactgatagcatcaaacttttcctatgcggcttcctcacctctctcagtcttcatagaattgaagagttagggcattactctggattagactttggcttaaggggatgttgtagttggttgggtccttatccagacactaaaatgttctccatatcagcaataaggctgttttgcattcttatcatttgtgtgttcagtggaatagcacttctaatttccttcaataaattttcctttgcattcacaacttgctgtttggccaagaggcttagtttctgacctatgttggctttcaacatgccttcctcactaagtttaatcatttctagcttttttttttttcgcacattctccatcctagaagctttttttt

SEQ ID NO: 103465 - DNA, 401 bp, Homo sapiens
ccatgacccctacaggggccctctcagccctcctaaagacctccggcctagccatgtgagggcacttccactccataacgctcctgatactaggcctactaaccaacacactaaccatataccaatgatggcgcgatgtaacacgataaagcgcataccaaggccaccacacaccacctgtccagaaaggccttcgatacgggataatcctatttattacctcagaagtttttttcttcgcaggattgttctgagccttttaccactccagcctagcccctaccccccaactaggagggcactggcccccaacaggcatcaccccgctaaatcccctagaagacccactcctaaacacatccgtattactcgcatcaggagtatcaatcacctaaaaaaaa

SEQ ID NO: 103466 - DNA, 385 bp, Homo sapiens
cccacgcgtccgcttgaaaatatccctctttttccccagccaatagactatatatatacatatatgcgtgcgtatatatgcgtgtgagtgcgtgtgtgtgtgtgcgtatatacacatatgtggcgtccccgcccacctcactgaacaaaacctgcaagcccgctaggacacaaagccccccggccccacaaaaaaaccctgagctgcctgtggacttggtatccatcagcctggacagagaggcacaggatgttgaactgaatcactatcgcctagggaacacatgccgcactgatgtactcccgaaagtgaatactctctgcctccgccttatttcttcccctgccttcctattctggaggagctacaagagcttccctaactg

SEQ ID NO: 103467 - DNA, 390 bp, Homo sapiens
gagaattgcttgaaccggataggcggaggttacagtgagccaaaattgcaccattgcactccaggctgggtgacagagcgagacttcgtctcaaaaaaaaaaaaaaaaggcaaaaatccccccccttttgggaggggccccctcatctttgggaaaaacaaaagggggggaacattggaaaattttaaaacaaacttgggcccaaatggacccttcggtttaaaggccaaaatagggggagggaacccccctccccacccttttggggcccggttggaccaacccccccccaaaacttccccaaggggtttctttttgtttggggtggaaggaactaaggaccctccccaaaaaaaataaaaaaattctggtggaaattggcccctgccg

SEQ ID NO: 103468 - DNA, 390 bp, Homo sapiens
ccgtgattgcaccactgcactccagcctgggcaacagagtgtgaccctgtctcaaaaaaaaaaaaattaaaaaaaaaataggggtttttttatttttgaattttccggggtaagaaaagttgaaaatcggatttccttgattaacctagaagggaattggaatggaggaatggagggatgaaaaatttagaagggaaaaaaataacctttggggtttggtcaaccctcagaagtttataactgacaaggggaaaaaatttcatttacccttgccctatggctttttggaaaaaaagcaaagggccatttttgaggggggaaggggttaaaatttttggagggccctaagaatcaaggtatggactaattttccatataaccaaggccaag

SEQ ID NO: 103469 - DNA, 388 bp, Homo sapiens
cccacgcgtccgcccacgcgtccgctcaatagcaaggaaacaactcaatttaaaaatatgcaaagaagaaacatccctgtctgacagctctaaagagagcagtggttttcccagcatggcgttgtagctctgagaatggacagactgcctcctcaagtgggtccctgacccccgtgtagcctaactgggagacacctcccagtaggggccaacagacacctcatacaggtaggcgccccactaggacgaagcttccagaggaaggattaggcagcaagatttgctcttctgcaatatttgctgttctgcagcctccactggtgataccggcaaacagggtctggagtggacctccagcaaagcccaacagacctgcagctaagggacc

SEQ ID NO: 103470 - DNA, 659 bp, Homo sapiens
ctggtgctatttgtcacgacttttgccaaaacatgtacactgttgctcacatctttcgtaagaatggttgacactaaggggccatggaaaagcacttttaaaaaattatgtggtggaatcaaactcacagaggcagaaatgttagtgccgtgctctaaccaagtaagcttagtgttccccacagtgatctgtatctggcctgagtctcctcaagcagcaacccccactgtccagcatgtggaaggtagatccttatgacaacaccagacccatagttaccaggaaagaaaaaggaagctgagtgttgtgaaggggaagaaatcctttttataagaagtaatcatttttaggccgggtgcagtggctccatgcctgtaaatcccagcactttgggaggctgagacaggtggatcacttgaggtcaggagtttgagacctgcctggccaacatgatgaaaccctgtctctactaaaaatgccaaaaaaaaattagccaggcatggtggcatgtgcctgtagtcccaactactcaggaggctgaggcaggagaatcacttgaacctgggaggcagaggttgcaatgagctgagatcgcaacactgcactccagcctgggcgacagagcaagactccatctcaaaaacaaaaacaaaaaaaaa

SEQ ID NO: 103471 - DNA, 398 bp, Homo sapiens
taccactgtatactccagcctgggcaacagaaagagatcccatctcttaaaaaaaaaaaaaaaaaaaaaaaaaaaaaccctttttttttttaccctaaaccccaaaaaccgggctttttttttccctgggggtttccaaaaccccaaaaaaaccttggggcccaaaaccgggtttaaaaatttgggaatcccttaaaacccaaaaaaattttggttaaaaaaccatttttttggcccggcccgggggcccccccccttgaaccccccctttttggaggcccaggggggacccctttttgaaaacccccctgaccaaaaaaaaaggcccccctttttaaaatttttaaaaaatggcccgggggggggggtcccctgattccccatttaatggggggggg

SEQ ID NO: 103472 - DNA, 407 bp, Homo sapiens
cggacgcgtgggtgcagtcgggagaagggagggagagaattttattaaatgtgacgaactgccccccccccccccagagggaaagcagcaaaatttatgcaaatttttgacggggttttccttgccctgccaggataaaaagccatgatttttttgtctaaaaaaaaaaaaaaaaaaaaaaaaaaaaaaaaaaaaaaaaaaaaaaaaaaaaaaaaaaaaaagaaaagggcggggggggagcctaaagggctctggggcccgcgaaagatggggctggggggaggaaaaatttttttttttttttgggggggggaaatataaactcctgtgttttttttttaaaaaacaccctttttggggggggggggcattgggcaccccccccaaaaaaaaaagattggtttgtg

SEQ ID NO: 103473 - DNA, 346 bp, Homo sapiens
  misc_feature (1)...(346): n = a,t,c or g
tcctgggctccaagcaatccacctgccttggcctcccaaagtgctgggattataggtgtgagccactgcacccagcccccatttcttttaaatccacagaaaatgctgataagaaagattttgtgaaaataattcttagtactacagattggatatgtaagaaccagaaggttaaatatagtaaagtaaaattgaagatagaataaaattagtattgcttttatcatataaatgaatattcagagaaaattatacaatactctgataaggaattttcaaatgtattaggaaagagagtttgtagaaaaatttaatgaaatgttatgtttgttcttttgttattttn

SEQ ID NO: 103474 - DNA, 358 bp, Homo sapiens
  misc_feature (1)...(358): n = a,t,c or g
aaatgactgagggacttgaaaacatttgtacaatatataaatggccaacaaccacatggaataatgctcattaccactggtgattagggaaatgtaaatcaaaacaccagtgacagttcacaactgttggaatggctgccatttaaaacaaaaagtagaatataaccagggttggtgagcatgcagggaaactgcagtccttgtgtattgctggggagaattttacacacagccactgtgaaaaacagtatggctatacatgaacatagaaaaccctgtgacccagcaattccactcctaggtatgtatctaaaagaatagaggccaggcacggtggctcacacttgtaatcccagan

SEQ ID NO: 103475 - DNA, 358 bp, Homo sapiens
  misc_feature (1)...(358): n = a,t,c or g
atcacttgaacccaggcggcagaggttgcagtgagccaagattgcaccactgcactccatcctgggcaacagagtgagactctgtctcaaaaaaaaaaaaaggtggaaaaggttggccggaatttttttttaagtttaaacctttttttttaaaaaacctcccggaaggggccccaaacaaagggttagccttttggaaggattataatggaaggggaaaaacctttggggcccccccccggggaaaaaaaaagcttttggcaaaaccccccagggggttttccaaggggcccttcaacccaaagccttttttttttccccttctttgcccaaaaaggaaaccctaattttaacaaan

SEQ ID NO: 103476 - DNA, 348 bp, Homo sapiens
ggaggagaattgcttgaacccgggaggcagaggttgcagtgagccatgtgctagtgcactccagcctgggtgacagagtgagactctgtctaaaaaaaaaaaaaccccttaattcaaccccaaaaaccctcccaggttttggggggtcctggaacccccaggaaaacaccccttattgtgaaaaaaagtgccatttaaccttttgaaaaaaaaggggagccccagaagttttggtcaaaatttttaaaatttggcaacctttaaaaaacttaactttatggttttcggggggggcaaatttccctgggcatcttgagaagagttaagggaatggaaatttttaaaaaa

SEQ ID NO: 103477 - DNA, 353 bp, Homo sapiens
atgccattgcactccagcctggacaacagagtgagactccatctcaaaaaacaaacaaagaactactgtatagcataaatcatctgtgatttgtacctgtgattttttggtgtcctaagatatttccagtgatcacaagctgctgcaaagtcctgaaagaaatttcaaattaccagctacttaagaggctgaggtgggaggatcgctcaagcccaggagatcgaggctgcagtgagcttgatcactccactgcactctagcttgagtaacagaacaagaccctgtctcaaaaaaaaaaaaaaaatttcaaagtaatcaagttttcgttttttaaaagggttatttcgaatgac

SEQ ID NO: 103478 - DNA, 392 bp, Homo sapiens
  misc_feature (1)...(392): n = a,t,c or g
ccatcctggctcatatggtgaaaccccatctctactaaaaaatgtnnaagaggaaaaaaaagaaaaaaaaaaatttggcccggggggggggggggcccctggggccccagatattttggaggctgaggcagaaaaggggggggaacccgggagggggagcttggggggagccggaattgggccattgccctccaacctgggggaaaaagggaaaatttgtttaaaaaaaaaaaaaaggggaatctctggcatggggattccaataagctggggcctaaaaaggaaagttattttatttttaaaaccctgttaaagcctgcctgagggcttatttgcattcccctgggggctgactaaaaaccggggggccttggattctcctgaatataaaa

SEQ ID NO: 103479 - DNA, 221 bp, Homo sapiens
cgggtgatcacctgaggtcaggagttcgaggccagcctgggcaacatggtgaaaccccatctctactaaaaatagaaaaaattacccaggcgtcatggcaggcgcctgtagtcccagatactgggctgaggcagcagtgagtcaagatcgtgccattgcactccagcctgggcaacaagagcgaaactccgtctcaatttaaaaaaaaaaaaaaaaaaagg

SEQ ID NO: 103480 - DNA, 379 bp, Homo sapiens
  misc_feature (1)...(379): n = a,t,c or g
aaaaaaaaaaatgtggggtcaggaccaggcatggcggctcaagcttataatcccagcacttcgggaggctgaaagcaggaggactgcttgaggctaggagtttgaaaccagcctgggcaacatagggagactccccctctcaaaaaaatgtggctgttgttgttttgtttttttagctaggtgtgggggtgcaggcctgaagtcccagctacttgtgctgctgaggcaggaggaccacttgagtctgggggattgaggctgctgtgcgatatgatagtgccactgcactctagccttggcagggacagagcgagactgtattttaaagcctttgcacttgctgttcctaatgccagcatgttccgctccccgtctcgan

SEQ ID NO: 103481 - DNA, 361 bp, Homo sapiens
  misc_feature (1)...(361): n = a,t,c or g
caggagaatcacttgaacctgagaggcagaggttgcattgagctgagattgtgccattgcactccagcctgggcaacaagagtgaaactccntaaaaaaaaaaaaaaaaggaaaaaaattttttattgggattggtaaacccttattttttggatcttggcaggggaaatttggaaaaatggtttttagttttaaggggagaaaaactttgggaaaaatggtttgggtcaaaaaaattttatgtttttatttttttaaaaaaaagcaataatatatatattttggttaaataacataacctttaattaacttcgggttttatttaaaacaggtttaactccttgggggcccttttaaaata

SEQ ID NO: 103482 - DNA, 348 bp, Homo sapiens
ctggtgttgcagatgacaggatttccctcttctttaagactgtatagtattccgttgcatgtgtatgtatgtgtgtgtatatatatatatcaatagactatgagaaattgtgtgtatatatacacacatatgtgtatatatacattatacatatatgtgatatatatgtacacacacatatggatatatatatatcaatagaccaatcaataggcataaattgatcttttcttcccaagcatcttataaaaacacaacacctcacagtgtctgtgaaggacaacaatacacacacacatgcacacacacacatatacacacactacattttcttggcgcgcgggcgcg

SEQ ID NO: 103483 - DNA, 382 bp, Homo sapiens
  misc_feature (1)...(382): n = a,t,c or g
gccgctttaccactcatggtactgtagacagctcacctagaggcaggggctacaggctaccggacgttcctgctgccagctattggcctgctgtgcctgccctgggtcttagatgatggtgccgggcaaaccgctcagtgatccatgctattagaccacgctatgctcctagcacatcgtgcgcacgagctgttcattgaacctaccangagtttgaagaaacctatatcccaaaggaccagaagtattcattcctgcatgactcccagacctccttctgcttctcagactctattgcgacaccctccaacatggaggaaacgcaacagaaatccaatctagagctgctccgcatctccctgctgctcatcgagtcgtggct

SEQ ID NO: 103484 - DNA, 387 bp, Homo sapiens
cgtgggcccagctacttgagatggtaaaaggctaaggtgggaggattgggaggatcacttgaccctgggaggtggaggctgcacttaactattaactgcactctggctgcttgatagagtgagactgtgtctcaaaaaccaaccaaacaaacaacagaagatgcaagaactcagaactttggcacaatttcaaaaggtgaaacatacatatacaggtaattggaagatcagaaggagaaataagaatggaacaagagaaatatttgaagtaataatgactgataattttccaaaattaatgacagacatctaacctaaattcagatccaggaagctcagagaacacaaagtagaataaattccacaaagtctatacttagatatatg

SEQ ID NO: 103485 - DNA, 397 bp, Homo sapiens
cccacgcgtccgcttgagaggctgaggtaggagaatcacttgaatcctgcaggttgaggctgcagtgggccatgattgtgtcactgcactccagcctcggtgacagagcgagaccttgtctcaaaaaaaaaaaaaaatggattttttttcctgggcccccaatctaaagtttaaggcagactttattccttgccctgttaaggggctttttaaaggagtctttgattttgggccggttggaattaagggggcatattttggggaacaaaaccaaaaacaccccaggggggaaatttggggctttttgttggaacaaagcttttccctcgttctcataaagcataaaaagccaggccttttaccaggaagaacgaggccttcttcggagttcaggttt

SEQ ID NO: 103486 - DNA, 392 bp, Homo sapiens
cactgtgcggcctgaccatcccggtgcctgtggcatcctccggaccctttctaggcctgcgcctggtcacgagaggccgccagccccgcgtggacttcgtgggcgaagtcacctctttccgtctgggaccttgtggtgcctacttccgctgccagaatggcaggtgcatcccctcaagcctcgtgtgtgacccctggggcatggacaactgtggcgatggcagtgaccagggctcctggtcaccagctgactgcagaggttggagtgcagtggcaccatctggctcattgcaacctctgcctcctgggctcaagcaatcctctcgcctcagcctcctgaatagctgggactacagggaccctcaccggggacgtggacagcacttgagccaa

SEQ ID NO: 103487 - DNA, 393 bp, Homo sapiens
  misc_feature (1)...(393): n = a,t,c or g
gagatattaaccttcactgggttatcatgaagattaaatgaaataatgtatataaagcacttagcataacttctggcataataataatacttaatgtcattgttcataatgagaagccattactgagggcatatgggcacacttacagggtctcctgctactttgagcattctggctttgtttttttggggggggagaatctctacccagttggatggcattaataagagctctctctctctttctttattttctgagacattgctctctgtcactcaggttggagtgaagtggcgcaatcataacttactgcaggctcgaacttctgggttcgggagatactcctgcttcggcctcccaagaaactggcactgcaggaacgtgccacactcn

SEQ ID NO: 103488 - DNA, 335 bp, Homo sapiens
caaaattgagattaggccaattaaatacctctgcaatggctgctaagtgttgaagtgaaaggaagagtctcacacctcactttaaatcagaagctagaaatgattaagcttagagaggaaggcatgttgaaagctgtgattggccaaaagctaggcctcttgtaccaaacagccaatttgtgaatgcaaaggaagagctcttgaaggacattaaaagtgctactccagtgaccgcatgaatgataggaaagcaaaacagccttaattgtgatttggaaaaaagttgcgtggtcttgattcaagatcaaacaggcctaacattttcttaagcccag

SEQ ID NO: 103489 - DNA, 750 bp, Homo sapiens
  misc_feature (1)...(750): n = a,t,c or g
ttttttttttttttgagatggggtctcgtctctgtcgcccagcgctggaggtgcgtgcagtggcacaatctcggctcacggcaaactctgcctcccagataccacacaaggacttctccgagccagctttctgagggttaactgagggctgaggggttcaagaaggaggacacgggcacagggactcacgggcagtgagaggcagtggggccaatggcgtgaggagcaccagagagcaggagggaacgggcccggggcgtgaatccggccccatgagtgctcttcggccgcccaaaaccggtcccatgggtaacagcgtggccttcggcaagtgactaaagggcttcctgcctcagcttccccacctgtaaacagaggataacaatggcatgtactggatctggcataaagtaaatgttcaatagatagctagaaaagaatgttttaaaacctcagagatacattaggcgaaaataaaagctgggctacagaatgacctcttccgtggggacgaggggcagaggacggcagcccacctccaggaggagcttaaagaggcggctcctggctgcagggacaggagatagaagtgggaaaggcttgggcgccatttttattgtttggtattttttgaatccacactgtgtgtgtattatcggttttacatcttaagaaaaataaccannnnnnnnnnnnnnnnnnnnnnnnnnnnngaattccaccacnctgactagaagtcatcaatgcgat

SEQ ID NO: 103490 - DNA, 343 bp, Homo sapiens
  misc_feature (1)...(343): n = a,t,c or g
tttctttccagtcaattcccgcaaccactgttctgatttctagcaacgtaaattagttttgtctattcataaagttttgtttgtcatataaatggtataaatggaatcacacagtagataccttatgcgaaggaaaagaagaaacaggaaaatgttttgagattcatccatgttaacttgtgcattagtaattggttttggtttgagacagggtctcactttgtcacccaagggtgagtgcattggtgcaacctcagctcactgcagcctcaaacctacagggctcaggtgatcctcccacctcagcctcccgagcagctggagctacaggtgtgcagcaccn

SEQ ID NO: 103491 - DNA, 339 bp, Homo sapiens
ttataatctaaatttaaccataaagaaatatcagttttatgcaaagttcaagatacagatgtctcccatgttctgtaattttttttttttttttttttggggggggaagttttttttgttgcccaggttaaagggcaagggggcaatttcggttaattgaaccctttgcctcccaggttataggaattttcctgcttaaccctcttgagaatctgggataacgggcttgtccccccccccttgaaaaattttttggggttttaagcaaaaagggttttaaccaggggcggaagggggtctttaaacccttgtcctcagggattaccccatttgtttttt

SEQ ID NO: 103492 - DNA, 316 bp, Homo sapiens
gaatcatataatatgtggcttttttatgtctagcctctttcagctaatgttttcaaggttcatccgtgttgtagtgtatgtcagtatttccttccttttatgggtgaataatattccattatgtggatatatcatattttgtttacctgcttatcagttgatagacatttggattatttccactttttggtaattatgcataatgctactatgagcattcatgtacatgtttttgtgcgaacctatgtttttagtgctcttcggcaatatgcctagtagtggaatcacaattccactgttagggtcatagcaattg

SEQ ID NO: 103493 - DNA, 383 bp, Homo sapiens
ggcacgagaatcgcttgaacatgagaggcataggttgcagtgagctgatattgcaccaccgcactccagcttgggtgacagagtaaaactctgtccacctaaaactttaaaaaaggggtaaaaaaaaatggaaaaaagccccttttttttaaaaaggggggttgggaaaaaacggaaactggctttgggtttaaaaaggtcccgggaggttttaactgtaatttaaaaggggcgaaacctgggctttttaccccccggggcccccccctcccatttaaagctcccctttaaaaaaatccggtttttaaaagaaaattttaaacttcctctttgtctgcccctcttgaaaaagcggtttcccttttttaaggtaaatttttttt

SEQ ID NO: 103494 - DNA, 406 bp, Homo sapiens
cccacgcgtccggactagttctagatcgcgagcgaccgccctttttttttttttttttttttttgtttttttttgggggaagggggaaatttgggccccccctttaaaaaattgcttcccccggaaaagttttgttattttggggggggggcccccggggcgggtctcccccccccccccggggttatttttttttccctttgccgggttgtaaaaaaaaaaaaaaaaaaaggggccccccccgggggggttttggggaaaaaaaaaaaaaccccatttactcccaagggggggacatttttgaccctgggggggttttaaaaaaaatccctctttggaaaaaaaacacttttgtgggtggggggcccccttcttttaaaaaactttttttgagagaaattccggg

SEQ ID NO: 103495 - DNA, 376 bp, Homo sapiens
atttgggttggggccactgaatgcatttttaaaaataacccaactatatggggccatcaagaaactcacttcacttgtaaagacacatacagactgaaagtgaaggatggaaaaagatattccacacatttcacacaaatggaaaccaaaagtgagcaggaatagctatagttatatctgataaaacagactttaagtcaaaaactataaaaagataaaaaggtcattatatatgacaaatggatcaattcagcaaggggatatattagattggtacaaaagtaattgtagtttttgacattaaaagcaagaactgcaattacttttgcaccaacctataacaatgcttgatatacatgtaccccacactcgagcg

SEQ ID NO: 103496 - DNA, 517 bp, Homo sapiens
tttttttttttttgcacatgaaaatatatacagtttttatttgtcaattaaaaatacattaattttgcaaaataaataaatgaatgaccaaataaatccagaaaccaatgcatgaaagaataaatgtagctgaataaatgtcagtgaatggcttggtcaatgtattgaagaatgagtgaatgaacagataagcaagggagtgaacaagtgaacaaatcattgcagaaaagtgtgaatgaatgaatgagttagtgagttggccagtgatttaaccaatgcatagatgaatgaataaatgcatgaggaaatgagtaaatcaatgcattgaagcatgagtatagatgaataaatcactgaatgagtgatttcatcaatgcatagaagaatgagtgaatgaacagatgaacaaagcagtgaatgaatcattgcagaaggacatgaatgaatgaaagagtgagatattccatgaactaaccaatgcatagaagaatgaatgaatgaacagatgaacaaggaa

SEQ ID NO: 103497 - DNA, 286 bp, Homo sapiens
  misc_feature (1)...(286): n = a,t,c or g
ncctccgacagcctcggaccgctctgattacctgggcgacccacgcgtccggnggatggaaagtgcccaaaggctaaccatcaaattgtctggtgtggaccggagattagtggggaggctgggcgcaacgcctcacacctggaatcccaacactttgggaggccgtggctagcagatcatgaggtcaggagagggagaccatcctggccaacatggtgaaaccgtctctaataaaacacaaaaaattagcctgaaaaaaaaaaaaaaaggggggggggggttttaa

SEQ ID NO: 103498 - DNA, 354 bp, Homo sapiens
agtgaaacagcagttttcatgtgccaggcattgtgttagggactttataaatattgactcatttaatccaatgtaattcatttaataccaattctatgcagtaggaaactgaagcacagagcttaagcaaattggccatagtcacacagctgctgaggcgggaggatcgcttgaacccaggaggcagaagttgcggtgagccgagattgcaccattgcactccagcttgggcaacgagagcaaaactccatctgaaaaaaaaaaattggactcattaatgcttcaaagcctatgcttctaactaataattgatcctagctatgaaatatacatacataaatacatttatatttg

SEQ ID NO: 103499 - DNA, 461 bp, Homo sapiens
  misc_feature (1)...(461): n = a,t,c or g
natgaaccctgcagaccgatgaggaccttccggatcgacccacgcgtccgggctgttgtacacctagaatctttgtgaataatgtgaggccagttcttccataaggaaggctggttatggatattcataaggttatttcaaagttaataaagacaaagtggcaactgtaaaaagtgttgcctccaatcttggtccgtatttccaaagcttgtaaacactgccatcttcaaatttaaatgtaatttaggaaatggaagcttttaattttaatttcttttttctgagacagagtctcactctgtcgcgccagctggagtgcagtgccatgatctcgggtcgctgtaacctccgtctcctgggttcgggtgattctccagctactcgggaggctggggcacaagaatcacttgaacccaggaggcaaagtgagccggggttgtgccactgcactgcagcctggg

SEQ ID NO: 103500 - DNA, 491 bp, Homo sapiens
  misc_feature (1)...(491): n = a,t,c or g
nttcgatgaacactcgttcagngtcgngcaattcccattaactgactcttccttccacgaaagatttcagtgtaccatgcgatactgtttgataagcattttacccatagtagaacttctttcaaaattggagtcagtcctctcacaccctgccactgttttactatgtttatcaatattctaaatcctttgttgtaggctaaacaatattcacagcattttcaccaggagtaaatttcatctcacaaaaccactttccaggctctttctggactgtagagttctttccaggctaccttgtggcagtttaagagtctggcatcattttccgctgggacctaaggatcgaggaggtgcttgtgactagactgccaatggacccatcacaaagtttaacccaaccttgatccccgagtcttcacaaatgctcactgaagaaaattcctggaacaattcagggtcctttcataacctctactctgaggtgtaat

SEQ ID NO: 103501 - DNA, 463 bp, Homo sapiens
  misc_feature (1)...(463): n = a,t,c or g
natcgagaactgaaggccactgcggcgggcggnggaattctaggtagctatcacaggattgaaggagaagaacaaagntggggaaggctgatatcaactatatgacattctgggaaagtaaaaagctatgtagacagtaataagatcactagttgcgagaaggctgggggaagaagtggcgaatagacagagcagagaggactttgaaggcagtggaactattctatgtgatactataatggtggatacagctcattacacatttgtccaaacccgtaaaatgtacaatacaaaactgaactctaatgtaaactatagactttgggnaataatgatgtcattgtaggctctttgattgtaacaaatgtactactttggtaggggtattgataatgggggacagttatgcatgtgtggagaaaaggagtatctgggaaatcttggtacattcctctcaattttg

SEQ ID NO: 103502 - DNA, 457 bp, Homo sapiens
  misc_feature (1)...(457): n = a,t,c or g
natcgaagactgatgatcactaggcagngcggtggaattcggaggctgaggcaggagaatagcgtgaacctgggaggcggagcttgtggtgagctgagatggcgccattgcactccattcagcctgggcaacagagcgagactctctcaaaaaaaaaaaaccaaccaaaaaaaaaccgggtccctttggttttaataaaaaaaaaaatgggcaaacctggaaagggcccggaaaaaaaatatgtaaaaaaaaaagggggccagtaactttccctgatttggaaacccaagtgggggttataaaaaaaatggccctataagcccgggaccacctaaaaaaactgggggccaggggtttaacagtaagcatttccctctaaccggagtaaaaaaaaaaaataaggggccctatactcccaccttttctggaccttggggataatttcataagaacaatt

SEQ ID NO: 103503 - DNA, 726 bp, Homo sapiens
tcatacccaggcagggccaggctagggagtggggggagggagggtcacacccaggctgggcccgctagggagtggccaagtctttggggcatctgccttgatcggtctttcgttagaggccaggcagtgctggatccatcttgacgcctggcagaaggggcagcgtcaccaaaccttgcagacaggctctctctggggcacaggtctcccgggtggcaggaggacaggcctggcctagcacatggtttgccacgctgtgtactgttgcccaaaaggagagtgcttgtcggtacagacgtgtgaggcccggattgtgtgtgctcgaggccaggaagaggaagggagctgctgcacctgcttgggtgacaaacagtgatgaatagcacctcacagcaattaggatgactgtcatcaaagacacagaaaatagcaagtgtgagcgaggatgcagaaaccctcatgcacagctgctgggagtatgaaagggtgcaaccactgtggaaaacacgttggtagttccccaacaagtggaacaccatcaccatgtgacccatcaattccgccctgcgcatgtatccgaaatagctgaacacagactcaagcggatgtgcgtattcccacgtctatagcagcgttgttcccagtgaccaaatgtggaaacaggctgtgtctgttgatgggtgatagacaaacaaagtgtccgtacatacaatggagtattactca

SEQ ID NO: 103504 - DNA, 459 bp, Homo sapiens
cgccattctcctgcctcggcctcccagctactcgggagcctgatgtgggaggatcccttgagcctgggaggtcgaggctgcagtgagccatgatcacgctactgcactccagtctgggcaacagagcaaaatcctatctcaaaaaaaatatatatattatccagccccaaatgtttatggggttgttattgataaaccctgcattaaacaatcccacagtcggtgctgcggtgagccgtgatggtaccactgcattccagcctgggtgacggaatgagaccctgtctcaaaaaaaaaaaaaaaaggtaaaattttttcccccctttttgggcaaacaagggaggaacccctgtggaagcgctaggggtttaaacaaaggaaaaccggggggaaagcgaaattttaaaggaccccctcctaccacaatgcggttcaaaaacaaaaaaaaaaaaataaggg

SEQ ID NO: 103505 - DNA, 167 bp, Homo sapiens
ttttttttttttgagacggagtttcgctctcgttgcccaggctggagtgcaatggcgcgatcttggctcactgcaacctccgcctcccgggttgaagtgattctcttgtctcagactcccgagtagctgggattacaggctcccaccaccacacccggctcatgttt

SEQ ID NO: 103506 - DNA, 477 bp, Homo sapiens
  misc_feature (1)...(477): n = a,t,c or g
agtccttccnnnnntnnnccatcgacctgactgcctgtgacgnggcantcggnatgtgctgccatgcctggctcatttttgtactttttgtaaagacgaggtctcactctcactctattgttcaagctggtctcaaatttctgggctcaagtgatcctcccacctaagcctcctaggtgataggattataggatgagcctctatgccaggcctggttttactttgttactatttaagattatgctgtgttgaaggtctttgtgcatgtagttcttttcttcttttgaattactccagaaaacaaattcgcaagattggactgagtcaaaggatataaatgttaatattgctctaggacatcacttcctttgctttaaaaaagggttctgcctgaccaggtgcggtggctcacgcctataatcccagcattttgggaggccgaggcaggtggatcacttgaggccaggagttcaagac

SEQ ID NO: 103507 - DNA, 465 bp, Homo sapiens
  misc_feature (1)...(465): n = a,t,c or g
aggttaaactgagcccatgacgtctgggaaannccnnnnacttcattttgtttatttcatcttccatcactgataccctttcttccagttgattgaatcagctactgaggtttgtgcgttcggggggtanttgtcatgccttgggggtcagctccatcaggtcccttaaggacttctctgcattattattctagttagccattcgtctaattttttttcaaggtttttaacttctttgccatgggttcgaacttcctcctttagttcggagtagtttgatcatctgaagccttcttgtctcaactcatcaaagtcattctctgtccagctttgttccattgctggtgaggagctgcgttcctttggagggcagaggcactctgatttttagagtttccagtttttctgctccgtttttcccccatctttgtggttttatctacctttggtctttgatgatngggn

SEQ ID NO: 103508 - DNA, 546 bp, Homo sapiens
  misc_feature (1)...(546): n = a,t,c or g
gcgtgtcatgatatcgtncgacgtggcggaattccgctgattcaggagaattgcttgaatctgggaggcagaggttgcagtgagctgagatcacatcactgcacttcagcctgggtaacagagcgagactctctccaaataataataataataataataataataaaataaacttcaaaactaaaacaactttaggctaactgggaaaactgaaataggaagacctcgccttgaccctagggaatgaagccaaaactcagagggctggaggtatccagctgcctagctgctgtccagccaggagcacagtttctttggaggtccccaaaccatgctggtggagcctcatctatctctttagctccccatcaaagggatcactttatcagctgcacagtctttaagcccaacgtccacagcaggactctcttttaaaacagtttggccttgagagaaggcagccgcttgttatctatgttttgttttgggttggcttcctggcgagttatcagggagactttggtttctttgtcttctgttatctcn

SEQ ID NO: 103509 - DNA, 366 bp, Homo sapiens
  misc_feature (1)...(366): n = a,t,c or g
aatcgcttgaacccaagaggcagaggttgcagtgagccgagatggtgccattgcactccagcccaggggacagtgcgagaatccatctcanaaaaaaaaaaaaaaaaaaaaaaaggtttaaaaataaagggttttaaaccctgaaaaaaaaaaaaaaaggggggggccttttaaaaaaattcttgggggggccaaattttaccgggggtgggaaaaaaaaatttttttttttttggggggggtataaaaaaccctctggggatttttgggaaaaaaacttttttttggggggggaaaaatgggggaaaacctccccaaaaaatttaaaggtttaggggaaaaaaaaaatttttaagggggaagggg

SEQ ID NO: 103510 - DNA, 801 bp, Homo sapiens
  misc_feature (1)...(801): n = a,t,c or g
caggagttttgtttgagcccagcctgtgcagcatagagagacccccaactctacaaaaattaactaacattaaccaggcgtagtggcatgcacctgtggtcccagctgctcgggaggctggggtgggaagatcacttgaaaccggagttcaaagctgcagtgggctgtgattgcgccgctgcattccagcttgggggacagggtgagaccctgtctcaaaaaaaaacaaccaaaaaaaactatataattttgtgtggaaaatataggtaaatatatttttgactttggggtagtgaaagactccttaagccacaaaaagaatttaaaaagaaatgatgaacatacttgaccatatgaaaattagaacctaaatccataaaccttaagaaagtgaaatctaaactacaaactgggagaagagataaatagtctcaagactacatgaagaactctgataaatcaatgagaaaacaacctaataggaaaatagaaannnnnnnnnnnnnnnnnnnnnnnnnnnnnnnnnnnnnnnnnnnnnnnnnnnnnnnnnnnnnnnnnnnnnnnnnnnnnnnnnnnnnnnnnnnnnnnnnnnnnnnnnnnnnnnnnnnnnnattcagctggtaaattttcagaagtctgaaaagcctataccggtgagaatgtggatcaacaagatttcttatgcattgctggcaagagtataaattgctagaagcactttgaaaacaatgtggcactctgcctgttgagcaatctgcccactgttgctcatttacgtcaactgtgttccagcaattgcac

SEQ ID NO: 103511 - DNA, 336 bp, Homo sapiens
agaatgaataagatctactgttcagtagtacagcagggcaactatagttaacaataatttgttgtatgatttaaagttgctggaggggaggaattgaaatgtttccaacataaagaaagggtgcaggtttggggtgatggagtcccaattgtcctggtttatcattagacattgtatgcatgcatcaaaataccactgatcccacaatatatataactattatgtatctataaaaaaaaaagttctgccggccaggcatggtggctcatgactgtaatcccaccactttgggaggctgaggcgggtggatcacctgaggtcaggagtttgagaccg

SEQ ID NO: 103512 - DNA, 347 bp, Homo sapiens
ggcttgagtaggtaaacatagaagccgggatggtcgaactgggtggtacccatcacagctcaaccaggcctgcctgcctctgtagacgccacctctgtgggcagggcgtagctgaacaaaaggcagaagaaacttctgcagacttatacgtccctgtctgacagctttgaagagagtggtggttctcccaacatggagtttgagatctgagaatggacagcctgcctcatcaagtgggtccctgacccccgagtagcctaactgggagacacctcccagtatgggcctacagacacctcatacagctgggtgcgcctctgagatgaagctttcagaggaaggatcac

SEQ ID NO: 103513 - DNA, 325 bp, Homo sapiens
  misc_feature (1)...(325): n = a,t,c or g
cggaggttgtagtgagccgagattgcgccattgcactccagcctgtgtgacagagcgagactttgactcnnaaaaaaaaaaaaaaaaaaaaaaaaaatttttttggtattttccaaaaaaaaaaaagggaaattttgaaatttggtataaaaaaaaaaaggtggccgggcaggggggccaaagcctttaaaggaagccttttggaaacccaaggggggggggcaaaaaaccgggaaaataaaaacctcctggttaaaaggggaaaaccctttttttaaaaaaaaaaaaaaaaaaaaaatgggggggggggcccccccctttaacc

SEQ ID NO: 103514 - DNA, 317 bp, Homo sapiens
  misc_feature (1)...(317): n = a,t,c or g
ggaatatcatacagttgaaatcatatatatgtagtcttttcagattgggttttttcactttgtaatatgtacttaagtttctccatgtcttcatggtttgatatttcttcttaccactgaataatattaattgtctggatgtaccacagttgtttatccattcacttaatgaagaacatcttggttgcttccaagtttcagcaattagaaataaagttgctgtaaacatctatatttaggttttcatgtggacattagttttcagctcatttgagtaaataccaagaagcatgattgttggagtatactagttactn

SEQ ID NO: 103515 - DNA, 324 bp, Homo sapiens
gtttcttgagaagctgaagcagaaaaatctgttgagcccggaaggcggaggttgcattgagctgatatcgtgccactgcactccagcctgagtgacaggagttaagccctgtctcagaaaaaaaaaaaaccaaaaacccaaaaagtacttaaagttttatttacttacctaggaaaaaaacttggttctcaaaaaaatacattttaaaattaattgggtaaaattaaagttccacctttattctttgttgagcagtgatttatatttagttattatatttaggaatagaaaataaaattaaatattttaacttgattaatcacg

SEQ ID NO: 103516 - DNA, 372 bp, Homo sapiens
ggcacgagaatcctctctttgacataatcatttcatttcctttgaataattaccccataatgggattactggatcatatggtagttctatttttaatttctcatgagccgccataccgttttccatagaggctatactaatttacgttcccaccaatagtgtatgaggggtttccctttctccacatcaagtttttgagtgttatgccattaatctcattttctccataaacactgtggtttttattgcacaattttgcataggacggttagttttaggaatgcgtatgtcacatagcagaactgacagtacattagcacactctacaaaaagctaatctaaaaggacacccatacatgttccaagatctct

SEQ ID NO: 103517 - DNA, 645 bp, Homo sapiens
tattgtacaagtggatcaaaaaataagactcaatatacattgtctacaagaaacccactttaagtgtaaatacacatatagattaaaagtaaataggtagagataggtgtaccatgttaacattaatcaagaaaaggcgttggtagctatagatggagcatacttcagagcaaggaaaattaccagggataaagagagacattacatatgataatgggatcaatgctccaaaaagacaaatgcaatggttaattttaggtgtcaactttactgggttaacagatacccagatagatggtaaaacattatttctgggcatgtttatgcaggtatttctggaagagattggcatttgaaatcagtagactgagtaaagaagatgtgccctcacccgtgtaagtgggcatcattaaatctgttgagggccccagtagaacagaaaggtagagaagagacaatttgctctctcttctggagcttggacttccattttcttctgccatcagacatcagaacactaggttcttgggcttttgggactctaggatttacaccagtggtccttcaggttctcagggcctttagcctcggactgagttacaccattggctcccctagttctcaggcctttggactcagactgag

SEQ ID NO: 103518 - DNA, 364 bp, Homo sapiens
ggcacgagcggcacgagaccaattaataatacaacagtgttctctaagtgttcaagtgagaggaagactaactcatctcactttaaatcaaaagctagaaatgattaagcttagtggagggggcatttcgaaaaccgatatgggctgaaatctaggcctcttgcaccaaacagttagccaagttgttaatacaaaggaaatgttcttgaaggaaattaaaagtgccactcctctgaacacataaatgataagacatcaaaacagcctgattgctgctatagggaaagttttagttgtctggatagaccaaatcagcacaacactctcttaagtcaaaggctgatctggaacaaggccttgacgt

SEQ ID NO: 103519 - DNA, 375 bp, Homo sapiens
ggcacgagcggcacgagcggcacgaggaataataaagatctttttttttttttttttttaaaaaaaaaaaaattattttatttctaaattctaaaggcctgcgggccttgcccagggaatccccatccttggggccccttataaggccagggggggctagggctgaacccatctaaaagccccccccacccccatcccaggggggaccccacctggggcgggacccccattggggactatgggccaaaacccccaaaacttccccatggggcggggcttcctaaaaaaccctgttcaagtggggggcaaaacaatcaaaaatctcaggcccttatttaaaacattttttcccaccccactacgggtctatttttg

SEQ ID NO: 103520 - DNA, 382 bp, Homo sapiens
ggcacgagggcctgggggaggagggatcatagcttctgatttttcttttttttttttttttaaaaaaaaaggggtctcactttgcccctcacccgggagggcgggggaacagccaaagctaactggggccgggatttttggggttaaaggggccctcccccctaaccctcctgaggggggggaaccacaggggctgccccctacccccacctaatttttttttaaggaaaacagggggcccccctttgttccccaggtgggtctaaaactccggggctaaagcaatcctttccccctggtttccaaaagggtgggggtaacaggcgggacccttggcccccaccccatattttccgataaaaaaaacggggggaacagagaa

SEQ ID NO: 103521 - DNA, 359 bp, Homo sapiens
ggcacgagcatgcaatggtatagacatatagatttttttctttcttttttttttttttgaaaaggggggcccccccctgtgccccaggcgggagggcagggacccaaaacccccccttggccccccatttgggccaaaaaaaccaaacctttgtctaaaaaaaaaaaaaaaaaaaaaaagggggcgggccctccccccccacccaaggggggcccccccccccttaaaaagggggaagggccccttttgaaaaggaaatttttaaaaaaaaatgggggggaaaattttaaaaaaaaaaaaatttgggccgggggggggggtaacccccgtgaaccccccccttttgggggggccagggg

SEQ ID NO: 103522 - DNA, 370 bp, Homo sapiens
ggcacgagcaggaggcataggtaggagaatcgcttgaacccgggaggcggaggttgcagtgagccaagatcacaccattgcactccacctttggcaacaagagcgaaactctaacaacaacaaaaaaatcctgtttaatggcttatatcttatctcgaaatctcagatcttgcatttaaggagtggtatatatatactttatagtatatgatgcattgtggattcattttttgcttgtttacaagttgtaaaaaatatatatgtggtgggaatttgtggggttccaagaacagggttcctcaaggagtgtccttataaaacttaaggatgtattaggtccatatcaaagaagctgctacttctatatgtg

SEQ ID NO: 103523 - DNA, 355 bp, Homo sapiens
ggcacgaggggttggaaacccagctggcagacagtagcagtgtaggagggtcccagacctgctcgtggctttcatggtatgactccaagccaggcatcttaactagcaggacaggcgtgttgctcatagtccacatcagccaacagatgtgtgaaccacgcccacaggctacgcaaatggcaggtgtgatacgatcacatgtatattggttttcatccgcaattcctggctcataactcccatagcccttattacaatgttttgttatcatgttgggtgagttaggcctcaggagcaggccccaggaaacagagtctctctctctgaccttctcctgtcctcctgtcacctgcct

SEQ ID NO: 103524 - DNA, 363 bp, Homo sapiens
ggcacgaggatgagaaatttgaaaataggcctggagccataacgcctttttgttgtttttttttaaaagggaactggcctttgttccccaacgtggagaaagggaaaacaattttgtttctttgaaacccccccccccagggtaaagccctttttccgccccaaatcccccaaaaggtgggaataaagggccccccccccccccccaattaatttttttttatttttaagggaaaaggggttttccccgtataacccagaggggcccaaacctccgaccctgggaaaacccggccttttttaaaacacaaaaaaaatatgcccccaaccacggggtctaaaaaaaggggggcaacacatttgg

SEQ ID NO: 103525 - DNA, 364 bp, Homo sapiens
ggcacgaggagtccagggaaagacttgcttgtaactttatgaattctggatttttttttttttgggtttttctaaacttacactaagggttacgggagccggaggggcccttcccaaggccccaaaattggacaagcggccctttttttttgctaaaggatttcggctttaacccaaaaaacggcctataatttccctaaaaagggcttttaattcaaatcctggggattaacaaaaatttttaaagcgcggccttccccctatggggtcccaatttaaaagggggaattacccctatgataaaaatctggaaaaactttgccccggggggggaaataaagggtcggggaccattatgggctcc

SEQ ID NO: 103526 - DNA, 362 bp, Homo sapiens
ggcacgagccagctgattgaattggctactgaggcttgggcattccccatgtagttcttgtgccttgggtttcagctccatcaggtcctttaaggacttctctcattggatattctacttagccattcatctaatttttttcaaggtttttaacttctttgccatgggttcgaacttcttcctttagctcggagtagtttcatcatctcgagccttcttctctcaactcatcaaagacattctccatccagctttgttccattgctagggaggagctgcgttcctttggaggaggacaggcgctctgatttttacagattccagttttgctgctctggtttttccgcatcttttggttctat

SEQ ID NO: 103527 - DNA, 370 bp, Homo sapiens
ggcacgagaactggaagaaccttggaactcggcagctgcggacaggctgtgggaagagaggacagtggtgtaaaggatgggctcccagcccaagtgacggctaggatggtggttcaggtgacagacatggaggagacaggaggaaagatgcctagggcaaaggaagatgataaagtatgtctagacacattgagtatctaattttttttttttttttgaaacggagttttgttcctttgcccaggttggagcgcaggggcaaaatttccgttaattgaaagctccgcctccaaagttgttgcctttttcccacctaagcttcccgagtagttgggactacaggcacttgccaccattcttggttaatttg

SEQ ID NO: 103528 - DNA, 424 bp, Homo sapiens
ggcacgagaattccatttggtatatacacacaactggagttgctagatcaaatggtaattttatgtttaatattttgaggaccaccatactgttatccatagtggctgcaccgtttcacattcccactagcaacgcaccaagggtttcaatttctccactctacaccaacatttgttctgtttttgtggcaatagccaatcctaatgtgtgtgaagtggtatcttactgtggtttggatttgtatttccctaatgattagtggtgttgggcatctttttatgtgcttcctgccttcctaataggtttttttttgttttgttttggtttgttttgttttttctttttgagacagtgtctcgctattgctcaggttggagtgcatggtgagatcatagcttactgcaaccttgaattcctgagagg

SEQ ID NO: 103529 - DNA, 418 bp, Homo sapiens
ggcacgagctgttttaatatttaacaccatctgacatatatatgagatatatatgtaaatatatatatatatttacgcatgggggctcatacctgtaatcccaacactttggggagactgaggcggatggatcacgaggtcaagagatcaagaccatcctggccaacatggtgaaaccctatctctactaaaagccgagatggtgtatatatacataatatatacattatatatatattatatataacacgttattatatatattatatatataacgtgggcgtgcgcatgtgtgtgtatgtatatatatatgaagtgtttattgtgtctcccctccactagagtctaagctttattaaagcagggtctgattttgtttgctgttgtactcccagtgcctaagactgcctggcacatt

SEQ ID NO: 103530 - DNA, 355 bp, Homo sapiens
  misc_feature (1)...(355): n = a,t,c or g
ggcacgagaggcctggtatccttcattaactaattcagtaaatatttattgagagatgaagcagggagggctcatggcatcccaggcacaatactactttattttcatgggttatttcattaaatccttgccacagcctttcagatatatgttattatcctcattttacaggagaggagatagaggctttagagagtttaagtaatttctccaagggcatacagctattaaaaatggcagaggaggcctggtgctgtggctcatacctgtaatcccagcactttgggaggctgaggtgggcgcatcatctgaggtcaggagttcaagaccagcctgaccaacatggtggaacccn

SEQ ID NO: 103531 - DNA, 405 bp, Homo sapiens
  misc_feature (1)...(405): n = a,t,c or g
ggcacgaggaattgaaccccaggtctgccacttccagtccagcgcttgttctgcatgtaactattgcccatgtaaccattgcctttgcagaaggctgcttccagcatgatttttgcttctctcagccagaaaatagacacattccactagtgttcacaactgcctccaaggtcaggaatattttttatttgctttgtagaggaagaggtattttaaggttttttcttgtttgcttaaaaatagatccagcaatcccactaatgggtatctacccaaaggaaatcattatatcacaaagatacctatattcatatgtttattgctgcagagttcacagtagcaaagatacggtatcagtctaagtgtccatcaacagatgattagataaagaaaatatgtgtgtgn

SEQ ID NO: 103532 - DNA, 342 bp, Homo sapiens
  misc_feature (1)...(342): n = a,t,c or g
gttagacctcaataggtttgaacaaaccatctattcgtttctttggagcttaccacagtgatgattgttccttgctagtgtataaaaatcctgttgaaatttctgtgtttattttgtatcctgccaccttgcttaaacttttttttgagacagtcttgctctgttgcccgggctggagtgcagtggctcattgcagccttgacctcccaggctcaagcatactcccacctcagcctcctgatcagctgagactagaggtacacaccaccatgcccatctaattttttcttataattttttgtagagataagtttcgcatgttgcctaggctggtcttgaacn

SEQ ID NO: 103533 - DNA, 414 bp, Homo sapiens
agatactaaactccgtgaggacggtgattatatctgttgcagccctgggcattgacacatgacagatgtaaagggactgttcaaacagcccatcagactgttgtataccaaggcacatgctaggtgctatctaggatacagagaagagagtaagaagacccaggaacctgtgatctattcgaggaggcggtactttatacctgaaaaaccaaagtgatactttccaagtaatggagccaataatgacttcagagtcagagtggttaaaaaagatctgcatggggagaaataaagcctttgatgaagattttaaaagatgagtaccttcctgggccgggcgcggtggctcatgcctgtaatcccagcactttgggaggccgaggtggacggatcacttgaggtcaggagttcgag

SEQ ID NO: 103534 - DNA, 480 bp, Homo sapiens
gggcaggtaagcagggagagttagattcagataagccctaggaacctgcgcacggaaccccgggtcgacccacgcgtccgcccacgcgtccggaagcaaaggccaaagacagtcttaaataacctggagattgtggagtaacaagaagccaagagttttgacttttcagattccacaactatggaagtgatgttagacaaaaagcaaattcgagtgattttcttatttgagttcaaaaatgggtcgtaaagcagcagagacaacttgcaacatcgagaatgcatttgccccaggagctgctaatgattgacagatgcggtggtggttggagaagttttgcaaaggagaagagagccttgaagatgaggagtgtagtggcaggccatcggaagttgatgacgaccaattgagagcaattatcgaagctgatcctcttacaactatacaagaagttgccaaagaactcagcatcgaccattc

SEQ ID NO: 103535 - DNA, 410 bp, Homo sapiens
  misc_feature (1)...(410): n = a,t,c or g
cactgcattccagcctgggtgacagagcgagactccgtctcaaaaaaaaaaaaaaaaaaaaaaaatttggggggggaaatttttgtggccaaaggaaaaccagggcaaaagggaaaaattttggggaaaccatttttttttttggggggttttttgaaaacggagtccccccccccccggggcaaaaaaaaanannaaaaaanaaaatataaaaaanaaaanattatatatttttatattataaataattttttattatttaataaaaaataaaaaatttaaaaattattttttttattgaaattatatttttttattaaaatataaatttttatttatatattatataaataatatatttatattaatttttatattataaatattataatatttattattttaatact

SEQ ID NO: 103536 - DNA, 461 bp, Homo sapiens
atgacgcctcggaccgccttgaattcgtgtcgacccacgcgtccgacctggagggttgagactgcactccagcctgagcaacagagcatgaccctatctcaaaaaaatttttgaaaaataaattaataaataaaaagtaaaaggatggggaaggaacatcatgcaaacattaatcaaaagaaagtagatgtaactatattcatatcagataacatgaacttcagaaaaaaaaataaaattactggagacagagaggggcgttacataataattaaacagccaatccaccaagaaaacattgcaatcctaaatgtatatgtaccaaacaatagagttgcaaaatatgtgaagtaaaaattgatagaactgaaaaaagaaatacacaaattcacaattttagttggagattttaacaccattctctcaactattgatagaacaactagatagaaagtcagcag

SEQ ID NO: 103537 - DNA, 406 bp, Homo sapiens
tgaatagtattccattgtgcatatgtaccacattttcatttatctgttgatggacattttggttgattccataacttggctgctgtgactagttctgtaatgaacatgagagcacagatatctcttcaacacactaatttcctttcctttctgtatatacccagtttcaggattgctcatggtttgtatggttaaaataaggaaatggccaaagtatgatttcaataatcgcacggtgtattaccatacaaagagattctcttccctgcttccctacaatgctcaaacggggagaaaatgagaaaaaatcttgtagggaatacactcgatagacacagtgagttccattttatttagagtccaattgatgaattctggtagctcaattaagatagaatcaggcctc

SEQ ID NO: 103538 - DNA, 413 bp, Homo sapiens
  misc_feature (1)...(413): n = a,t,c or g
atcaatttaaagtttaaccagaattcagaataaccaccattttaccagaaaaaaaaaacctgttataactaaccaactaagtcagtaaattctcaggatacaatattaacatatgaacatcagttgcattttttttacagtaacaacaaaatatctgaaacaggaataaagatagttccatttacaatattatcaaatagaatgaaatacttaggaatgagttaacaaagaatatgaaagatctgcatactgaaaactataaaatgttgaggaaagaaaatgaagaataccaaatgggaaatatgggttcatggattctaaaaattaatattgttaaaatatccatactacacaaagtgatctacagagttaaatttttatcaaattttaatgccattttattaaaaaagaan

SEQ ID NO: 103539 - DNA, 397 bp, Homo sapiens
ctcgctttcgatggccgagcggagaggttaaagacgggttttcaccgcgttacccaagatggcctggaactcctgacctcttgatctgtccggcttggccttctaaagtgctgggattactggcgtgagccactgtgcccgggctgtgggacagatattaacgttattatttacacatggaagaagatgatttcgattggataaaaaacattccagcgttattgggcagaattcattaaacattctcgccggatgggagatatgtgtgaagggagaccatcataggactgttctgacggctaccttgtcataatacactttcaaattaagaatgggtctgtgatgtcacatctaggagcacctacccatggacagacatgtcttcccatggaggagg

SEQ ID NO: 103540 - DNA, 409 bp, Homo sapiens
cccacgcgtccgggtgggtcccacccctcgcctcccccaccaggaggcggggcggctgtggaggggccaggtgcacgctgggctggatgtctgctgggggctgggggccagggcggcaggttggagttgggcggccaggccccccgtgtgggaagggagttccagggcccacgccaagtctcagggaggaaaccaggggctgcttgggggggggggtcttgggggccctgtgggggttcccaccctttgcctccccaaccccgtgaggttggttggagggggccaaaccatttttttgaaaactagggcatcagggttaggaggccggaggccctggggtcaccggccaaccacacaggcaccgttttaaaatggccacttttcattgggtacatcaaattttttaact

SEQ ID NO: 103541 - DNA, 403 bp, Homo sapiens
aatggacagatcttgaagttagcctaacacaatatcttgtgatttgtctcttaccaggggtaccacccataaataggctagaattttttgtgtctaatactgaattcgacaaccaggaagttttttgggtttttgtggggtgtttttttttttttttaaaaaaaatttttgttttttcccccaggttaaagcgcagggggcccttttgggttaattgaaccctcccccccttgagtaaaaggaattttcctgcctaaccctccgggggagtgggaattaagggccccccccaccccccccggttattttttgggtttttaaaaaaaagggggtttcaccttttgggccgggtgtggttaaaactacaaacctaagggaacccccctcttttggcctcccataa

SEQ ID NO: 103542 - DNA, 1071 bp, Homo sapiens
tttctctttatttcttaacttcattgaggaaaaactcatattctagacagatattcccattggtttcacttagttgctctagaatttctgaataacttggtaaatagcctggaattttattttttaattgttctttacacaaaacatttatttttcattacagtttagtgaacagtttactaaccataataataatacatttaacttaattatgtatattcaccaaaagtagtaattgagaagattaatcctcctttatttcaagattttactttatttgtatttatttatttgagacaaggtctcactctgtcaccaaggctagagtgcagtgctgtgattataactgactgcagcctcaacctcctggggctcaagagatcctcccactgcagcctccctagtcagctgggacttacaggtgtggcacccaacacaccccagcttattttttatttttttgtagaggtggaggttccacccatgttgcccccaggctggccttgaactcttgggctcaaaatatagccttggcctccccaaagtgctatattttacgttttaaagatgtcaataaaaaatctaaaataggccttttgaatgtaggttttgttgaaacagaagaaacgaaaattatttaataaaataaaataggcctggttgcccatttttttaaatatacttaaatgtaaaggatagataagaaagaacaaaagaatgaataatgagtgaaaaatcttttaacctctgcaggcctagatctgaaaaaaaaaaaaatttttttaataaaattaaaataaaattttacaaaatatttaaccactatagttttgagatcttgtggtttcccatccaacatgtaaagaggttggaagttgtactcttatcctcaccaaaaaaaagaacaaactgaaaatcaacagctcttcttagatccatcaaagaatgaagacacgggacagaccactgcccccaaaaccagaacagacaaatacagagaatcacagattactgagtagaagccgcagctagagccagcaactggtaggaacacttcaagggcgattgact

SEQ ID NO: 103543 - DNA, 396 bp, Homo sapiens
atggagcgagactccgtcttataaaaaaaattaaaaaaaggtgggccagttagtacgcctacaggggactttaagggttcaagggaaggaaaaggggactgcccctccctttaaatcaaaagctaaaaacacttaaccttagtgaaaagggcttgtcaaaagctaatacaggccaaaagctaggcctcttgggccagttagccaagttgtaaatccaaacggaaagttcttaagggaaatcaaaagtgcttttctattgaaaaatgagtaatttgaaagcaaaacagccttattcctgacatggaggaagttttaggggtctgaaaacaaaaaaatacagccacaacattcccttaggcctgagcctaactcagaagagggtcttaactcttttca

SEQ ID NO: 103544 - DNA, 459 bp, Homo sapiens
  misc_feature (1)...(459): n = a,t,c or g
tgggnnaacctagctcgctggtaccctgcgaaggaacncngggnngacccacgcgttcgggcacacgcctgtggtcccagctacttggaaggcttgggggggagaatcactccagcctgggatgttgaggctgcaacaagtggtgactgcaccactgcactccagcctgggagacagagtgagactctggttctaaaataaataataataataaggattaaacgtggataattgtagttttagatcgaagatattgtataagccatcattccataatctttaaaatggtctctcgctatctaaaagctttccatctatagtttctgattataaatcatatccaattgacaaaaaaggaaactctcccccaaataaatcaattactggttcatctaatgggttctgattctggatctattctgcccattgatacactccagttgagagattaaagaatct

SEQ ID NO: 103545 - DNA, 431 bp, Homo sapiens
  misc_feature (1)...(431): n = a,t,c or g
aataactcatcggtagactggggcagaggggaagtgcagtctgggtgagactagtttatgctttagttagctccaagactgatttacagtccaattaaatttcagtggtcatttatgtctgttcgtcaaatacaagttcaaagccttgccataggtaacttccataacccacgtttgcccattctaatttgccattgctatgcttttcatagaatacttcttttccagatggttaggaatttcattctttatagcatttcaatttcagcaaataagcaagaatctaaatgcattctaaaatacatattattatatatcaatttaagaaactggctgggtacagtggctcacgcctataatccagcactttgggagtctgaggtggaaggatttcttgagcctangagtttgagacaagccagggcaacaca

SEQ ID NO: 103546 - DNA, 422 bp, Homo sapiens
agaggctctgggccagacctcacccccagtgacttccgattgaggccaaagaccccaagctgcccgccagctctgactgccccttgcgctctgggcttcctgccgcccccagctttgcctggacactgacttcattcatggtcctcctacttcaggggcagcctcccagttcctctgcttccaaactatgcaacctccaacctgctccagttccagactgtataacctctgacctgcactggttctagaccacacaacctccaatgtggtctgctttagatcaccttcttcttcttccttcttcctcttcctcttcctcctgctcctcttcctcttcttcttcttttttttttttgacagagtcttgctctgtcacccaggctggagtgcagtggcgcgatttcagcttactgcagcctccg

SEQ ID NO: 103547 - DNA, 422 bp, Homo sapiens
tcttgcactccagcctggtgacagagcaagactccatctcaaaaaaaaaaaaaaaaaaaaaaatttttttaggggggaccaaaaaggggggtccctccctggggggatttttttttggacccccagggttccccaaaattgttaaaaaaaaaaggggggcccttattggttttcccttcttttgccccaaaaaaaaaccaaaaaagcccctgttctttcccaaacctttggggaagcccccccgaaaaaaagggttttaaattggggaaccttggaaaacagggggcctggtttccccaaaaaattaaattttgtttttttttccccttggggggggaacttcctttttcccccccaaaaaccgggggggaaggtgggaaaaatccttttacaaccaaaaaaaaaacccccgggtaagggtg

SEQ ID NO: 103548 - DNA, 370 bp, Homo sapiens
ggggaggcacaggttgcaatgagctgagattgcaccattgcatttcagcctgggcgatgagtgaaactgtctctaaaaaaaaaaaaaggaaggaaaaaaggggaatttgctaaaaaaaagtcaaagcagggactttaaaacctacttaaaagggcccacccaaatcaatacggtagtcaggggaaggcattacttctggggaaaaaaagtacaaaggaaaaaaagaggtccctttggaaattgggaagggaaaatgaaccaggggggtaacatttatgtacctgcaaaacatacaaaatcgaataccctgaaggacactacatttttccccatcaccctccctaaaattagccacccatgaactaaacgg

SEQ ID NO: 103549 - DNA, 358 bp, Homo sapiens
accttcttgagcagattttctagacataggttggggagataggcccctgtagtcccagctactcaggaggttaaagcgggtgggtggatcacttgaggccaggagttcaagaacagcctgggcaacatggtgaaaccctgtctctacagaaaatacaaaaacaattagctaggtgtggtgcatgcctgtggttccagggtctggcttgattgcccaggcagtgactgtgcagtggcgcagtctcttcctcccaggctcagcctcccaagtagctgcgactacagacgcatgccaccatgcccggctaattttttttattttttgaagagatgggtttgccatgttgcccaccctgctt

SEQ ID NO: 103550 - DNA, 364 bp, Homo sapiens
cattcatcaattgatggacatttcagctgtttccatcttctggctattatgaataatgcggctgtgaaccttcatgtacaagtttttgtgtggagagtatgttttcagttctcttggatatataactaggagtggaattactgggtcatatggtgactatatttaaccttttaaggaactgcgaactatttgcaaagatggctgggctattttacatgcccaccagcattgtatggggcttctcacttgaccacatgcttgcctgtgtcatatttgacttaaagcttattttgacgggaaaccaatttgtcctttttttggaaagggatggcaccacagatgtgacgcggacaatgcattttgg

SEQ ID NO: 103551 - DNA, 326 bp, Homo sapiens
ctgagaacaagcaggccggatgtcacaggggagccttgggttacctctgggactcaaaagtgaaagggggccattcctacttttattgctattgccattatgattattaatgatgagtattgattggtagtattggttatggatgattgctctgagagtctattgttaaacaggatagctcttcgaatgattatggatgccgttgcttgcgtgaggaaatacttgatggctgcttctgcggaacgaaggcttatttttttggtttgatctggaaccttaagccacatggttatttctatgcctactcaggaaaaaatcaatgcgac

SEQ ID NO: 103552 - DNA, 341 bp, Homo sapiens
cgtacactaggtgtatgtgtacctctgtaagaaactgccaagtcattttccaaagtaatcgtaccattttacactccaacaagcaatttatgaaagttccaggtgaccaggtatcttaacattgtatattgctggtttttctacttatagtcgttctcttggatatgaagtagtatctcattgtagttttcaatttgcattttctagatgaatcacatatacttattggccatttgtgtatcttcccttttgaagtgtctgttcaagtcgtttgagtctgtttttcttttgcctgttttaaaattggattgtcttattattttggttggtaggaatgttat

SEQ ID NO: 103553 - DNA, 368 bp, Homo sapiens
ctgaggcaggagaatcacttgaacctgggaggcggaggttgcagtgagctgagactacaccactgcactccagcctggcgacacagtgagactccgcttcaaaaaagaaaaaaacagctattgcaagtacactaaagggtgtaaagaaaaacatgaacataatggataatcgaatatataaataaaacacccaaatcaaacgtctataggtgaaatatacttaaaatacaaattcactggatggtattaatagctgactgaaaactacaaaagaaaacatcagtgaacctgaagatcagcaatagcaattatccaaaatgaaacacagagagaacaaaaacagggggagcgttggtggggggattaaa

SEQ ID NO: 103554 - DNA, 334 bp, Homo sapiens
cgcggacgctgagacatcacatttggcttattgatccatcctttgagtaacatttgagttgctttcaccttttggctattgtgaatagtgctgctataaatattccctgtctagttatgtttgaacccacttttaatactcatagatgtataggggtagaactgctgggtcatacgcaactttatgttgaacttactaaggaactgctcaactcttttacacaggaactgcaccttttgacctttttaccacgggagtgagtgccaatttctccacaatcttgccagaaattggactttttcatttttttaattatagccatttcagagggtat

SEQ ID NO: 103555 - DNA, 352 bp, Homo sapiens
  misc_feature (1)...(352): n = a,t,c or g
tttttttatttctgccttaatttcattatctacccaagtcattcaggataaaattgtttagtttccaagtatttgtgtggatttgagaattcctcttggtattgacttctatttttactccagtatggtctgagaagatgcttggcatgattttaatttattgagatttgctttatgaaaccaggaataaacagaaatcctgaacagaccaatgagtaatcaaattgaatcagtaataaaatacctaccaaccagaaaaagccacaggccacatagattcacagctgaactctaccagacatacaatcctattgaaactatttcaaaaagttgagggggaggggctcctcan

SEQ ID NO: 103556 - DNA, 351 bp, Homo sapiens
tactcatccatccattaattcatttatccatgtgtttattcatgcatcgatgaattcactcattcatttacccacgcattcattcagcatctatttattcactaaatcatttattcatctattcattcatttcttttcttttcttttctttttgagaccgagtttcactcctgttgccatctactcattcattcatccatttacttactcatccatccattaattcatttatccatgtgtttattcatgcatcgatgaattcactcattcatttacccacgcattcattcagcatctatttattcactaaatcatttattcatctattcattcatttcttttcttttcttt

SEQ ID NO: 103557 - DNA, 558 bp, Homo sapiens
ttttttttttgtgagcaacaaggctgtttatttcacctgggtgcaggcaggctgagtctgaaaaaggagtcagtgaagggagacaggggtggggctgttttataggatttgggtgggtagtggacaattacagtcaaagggggttgttctctggtgggcagggacgggggtcacaaggtgctcagcgggggagcttctgagccaggagaaggaatttcacaaggtaatgtcaccagttaaggcaggaactggccattttcacttcttttgtgattcttcagttattttcaggccatctggatgtatacatgcaggcttgggcccagaggcctgacaagtatgagtatgataataaataatttatagaaatcaagaaaataattcaatttaccctaatatcaaaaagaatgaaattgtaggaataaatttaaccaggtaagtgaaagatctgcacaatgaaaactataaaacattgatgaaagaaattgaagaagacacaagtgaatggaaagatatttcatgttcatggaatgggagaattaatagtgttaaaacatc

SEQ ID NO: 103558 - DNA, 332 bp, Homo sapiens
ctggagtgcagtgacatgagattgtctcactgcactccagcctgggtgagggagactccgtctcaaaaaaaaaaaaaaaaaaaaaaaaaatttaaccccttcccctttggagggaaaaaaccaaaagaggggaaaaattttttttttaagcccaaaaattataaaaaggggtctaaaaaaaaccttccggtcttattaataaaatggtcaaaaaaaaaaagaatttttatgtaaaaaaggccccccccccctaaaacccttttttgtttatccccacccccccaaaaaaaaccattttaaaactcgaataatttttttgtcccaaaattttt

SEQ ID NO: 103559 - DNA, 348 bp, Homo sapiens
cgtgtgtgtgtgtgtgtgtgtgtgtgtgtgtgtgtgtgtgtgtgtctgtctccttttatttagcatagtgtcatcagggattatctttggtggcgcatgtgcatgtattagagtttttttctcttttaggggtgaacagtatcccagtgtgtgtgcgtgtgtgtatatatatgtataccatatagcatatatgagatatgtatatgtgtgtatatatgaacacacacatatcacattgtgtttattcaaatatgtggggggggacacttgatttgttttcaaatgagaggctctgacccagtgagaaagatataaatttttagagagttccctagaagcgttgagacg

SEQ ID NO: 103560 - DNA, 381 bp, Homo sapiens
ctcatactacctgtcaagtggtatagtgttatttgacagctagatgtccattagattaatatgcatattgtagactgtaagacatttacttaaaaaaaaaagaggtataactgatatcctaagaaaggagagaaaatataatcacatgaaatgctcatttaaaaccacagaaggcagaagaagaatggacgaccaatggtaacaaatacaaaacagtaacaaaaatgataaacagtaatccacctataacaagaaataatctgaatgtcaatggtctaaaaacaccaattaaaagacaaaaattgtcagactcgatcaaaaaacaatatccaagtatatattgtctgtaaaaaaccttttaaaatataaagatgcaaataa

SEQ ID NO: 103561 - DNA, 347 bp, Homo sapiens
  misc_feature (1)...(347): n = a,t,c or g
cactgtgggatggcctattctggagacttcatatcaacggaatcctgcaatatgtggcctctctgcctccctgacagcctanctatgttttcaaggttcatccacgctgccccatgaaatcttttttacggctgaatatcctattgtaagaatatgccatatttcgttcatttattcatcatttgatggacagctgggttgtttatactttttggatattatgtataatgctgctgcgaacatttgtgttcacgttttacatgagtgcccaggaatagaattgaataattctatgtttaactttttgaggaacccacacttggcctaagtagctttcccacaattgc

SEQ ID NO: 103562 - DNA, 357 bp, Homo sapiens
  misc_feature (1)...(357): n = a,t,c or g
ctggagtagcacttttaatttccttcaagaactttccctttgcagtcacaacatggataaccttggcacaggaagcctagcttttagcctatcttggctttcgacatgccttcctcactaagcttaatcatttctagcttttgattntaagtaataatctgtgactctttctttcacttgaacacttagaggccatttaaagttattaattgggctaatttcatataattttgtctcaaggaataaggaggcctgaggaagagaaagaggggtgataccagtgagtgcggaatcaaacacggcagacgttattgataaagttggggatgttcatgggccccaaacattaaaatagac

SEQ ID NO: 103563 - DNA, 517 bp, Homo sapiens
ctaaaagttacggcaacaatggcacaaaggtagggaaaaggagatacaaggatacataaaatggtatattatttgaggatagactaataatttaaagtcatatattataaaacctagagcaacctctaattaaaagaactatagctaataagccaataaagaagataaacacaaccatcttaataatcacaataaatgtaaatggactaaatacactaactaaaagcagaggtggtcagattagatttttaaaaaccaagatccaactatgatttctaaaaaaaaaaccttgtaaatataaagacacaaatacattaaaaataaaaggatagaaaaacatatacgatgctaacatgctaacacaaattaagaagaaagctggggttgctatattaataacaaaatagattttagggcaatgatattactagagctaaagaaggtcacttcataatgataaaggggtcagttcaccaagagtacgtaacaatcctaaatgtttctgcccacgcgtccg

SEQ ID NO: 103564 - DNA, 341 bp, Homo sapiens
  misc_feature (1)...(341): n = a,t,c or g
gcgtgaacctgggaggcagaggttgcagtaagccgagatcgtgccactgcactccagcctgggcgacagagcaagactctgtctcanaaaaaaaaaaaaaaaaaaaaaaaactttttttgaaaacctcaaaaaaaaaaaccccccggttttaaaaaaaaaaaacccttaaaaaaaaaaattttcaaaaggggggccccggggtccaaaaaatttttttttgggggcccatttgggggggccccccccaaaggcccaaaaaaagggggcaaccaaaacggggggggggccctggggggggaaaaccggaaaaaaaaaaaaaattttttttgtggccaagaag

SEQ ID NO: 103565 - DNA, 326 bp, Homo sapiens
ctactacagtagattttggaccattctaataggccaagttccagcacactgaaaacaccaaatgctggcaaggacgtggaacaaaagcaatttttatgtgttgctggtgagaatgcaaaattgtcaactacttgggaaggtagttgggcagtttcttacaaaattaaacttactttgaccgtatgatcctgaaatcttactccttggtatctatcaaaaagagttaaaaacttgtatccacacagtagcctgcacataaatgtttatagaagctttattcgtaattgccaaaacttgaaaacaaccaagatattcttcagtaggtg

SEQ ID NO: 103566 - DNA, 397 bp, Homo sapiens
ggctgaagcacagagaaaggaattggtctggcccaaatcacagagttcaaactagaactccactgatttgtagctggcaccaagaactcagccccttccttgttcccctgcccccctcaggcagtgccacactcagagtctgctcccaccctttttgttaaggctcatcttttatttcttttgttttttaaagacacgggctcactctgttgcccaggctggagcgcagtgacgtgatcacggctcactgcagacttgaactcctactttagcctgtactcctgcctcagcctggctagaactacaggcacacaccaccatgcctggctaattgtttttttcttgaagagaaggtatctcactctctggtttgcgacaagacatagtgcaaactccg

SEQ ID NO: 103567 - DNA, 329 bp, Homo sapiens
  misc_feature (1)...(329): n = a,t,c or g
gacggctgggtggatggatagatggatgagtggatggatggatggatagataggtaggtggatggatgcgtgggtgagtgggtgaaggaggggnggatatatggatgagtggatagatgaatagatgggtgggtggatgagtggatggatagaaggattggtggatgtggaaattattgggtttttttttttataggagttgtgttgttttgttttaagttggggggtggtgtttttattataatttttggggtaaatatttgggtatatgaggagttgtggggttgttattttggtttgtttgttaagtggttttttaaatttttttg

SEQ ID NO: 103568 - DNA, 332 bp, Homo sapiens
caaagccagaactctgatgcaagtttgtatacctgagaaggtactcaagtgggagggatagaagcttccttttgatgctggggtgggttgttctgaggtaacaatgatttatttctgtatttctttttctttttggagacagggtctcactccgttgcccaggctagagtgcagtggtgtgatcattcctctttgtagcctcaaccgcctggctcaagtggtcctcccatctcaacatgtagctgggactacaggcatgcatgtgccaccatgcctggctaatttttaattttttctgtaaaggcaggctatccctgttcgggctgctcagg

SEQ ID NO: 103569 - DNA, 373 bp, Homo sapiens
ggatttcactgtgttagccaggctggtcttgaactcctggcctcaagtgatatgcctgccttggcctcccaaagtgtaaggattataggtgagagccacggtgcctggcctgattttgaagttttaaaaaaagttttccagtaatcccaacggagccaggtactttataaaatttttcttgataacgtccctcaggctttttattctgttattgatttatctgcactatcaattttttattaaacaagctttgcttttgtgccttttttttttttttgaaagggagtctccctccaccctggccaacaaaagggaaacaccttttcaaaaataaataaataattaggtgattttattaaaaaaaaagagtggt

SEQ ID NO: 103570 - DNA, 411 bp, Homo sapiens
atccttttttacttttataaggtcattattttataagatgtcctcccttccatttctaactttggtaatttagtccctctctttctttcgtagtctttctaaaggattgtcgttttgtcagtcttttcaaagaactaaccattggtcttgttgatttctctattggttttctattctctgtggccgttatttctgctctaatcttgattatttcctttcttctgctggtttttagtttgctcttctctatctcctttctctttttaattatttaattattttaattatttaaaaaatttttattaacatatagttgacaaaaattacatatatttactgtgtgatgtatgatacatgtataccttgttaaatggttatatcaagctaattaacatatccatcacatcacac

SEQ ID NO: 103571 - DNA, 493 bp, Homo sapiens
  misc_feature (1)...(493): n = a,t,c or g
ggcgggtttttctgacagcctcgatgagcacgtcanaccggccgacccacgcgtgcgattgaattgccatgtaaggctgtgcccttgtcttttatcgaaggttattctaagaaacagccacatgaagagaacttctctatctttagcgaaattgcagataaaagcagtgcctattatgctagttaatgtcccttttaagattttacacaatacactttttaacatctaatgccatatatatctatgtattgacctattgacggtatagtttaatgtcatatatatatttattttggtcacaaacacacacacacttacacacacacacacacacacactaacacacaccccacatgttaagtaagcaaaatccttttaaaaaaaaaaagaagaacttgtagtgtgtgcgcctaggcattgtattaggatttataatattttttatttagggtgtgtgcgattctatagattattcctcttggtctgcgggtgg

SEQ ID NO: 103572 - DNA, 415 bp, Homo sapiens
  misc_feature (1)...(415): n = a,t,c or g
atctctggtgaactcactcatcatcaccaaaggaatggcactaagccattcatgagggatccacccctgtgatccagacatctccccctgagctccgcctccaacactagggattatatttcatcatgagatttgaagggccaaatatccaaactagatcagtagctttgttttttaaaagaaatgtataaaattaaagtttcatgaacgataatacaaagtatttaatcttatgtcttttgccatatacgtttttgtcctctggattctttgaataaagaaatagtggcggtcaggtgcagtggtgtgtgtctgtagtctcaactacctaagtagctgaggcaggaggatcgcttgagcccaggagtttgagaccagattgggcatcacagcgagaccccatctctaaaaacgn

SEQ ID NO: 103573 - DNA, 351 bp, Homo sapiens
cagaggctatgactcaacttctagtgcatacaccgtgggtcattttacataggaggacaaggctactatcacacgcctgtctggcaaggagaatgtaaaacatgcgggaggagaaaccctgagaaggctcctggatgtctacccatgaacccagaggattattgacagcgttgggaacctgaactctgcgctctgccatgatggcgcccgcctcggcttccaaaagtgctggggttacaggcatggaccaccatgcctggtccctgaaaatatatacatatatttttttgagacggagtcttgctctgtggcccaagctggagtgcagtggcgcgatctcggttcactgca

SEQ ID NO: 103574 - DNA, 354 bp, Homo sapiens
gtttcaccatgttggccaggctggtctcgaactcctgacctcgggtgatccacccgaggcctgacaaagtgctggaattacaggagtgagccactgcatccagcctagcacactgaacttttaagagtacttgggaaacttagtatgtttaacacctcccaaaagaatgttaaaatgaccacagtttgcaaaattgaagagaaaacaatggcaacataaggcacaatattggtaatcaagaagaaactatagccatggatatggaagacattaaaataattataatgaatgctttgtgtaactacattgctttgacacatgggtgtaataatggatgaacttttgggaaaatat

SEQ ID NO: 103575 - DNA, 378 bp, Homo sapiens
  misc_feature (1)...(378): n = a,t,c or g
attctgctgcctcagcctcctggatagccgggcgtagtggtgggcgcctgtaatcccagctatccaggaggctgaggcagcagaatcgcttgaacctgggaggcagaggttgcagtgagctgagatcgtctcacaaaaaaaaaaaaaaaaaaggcttttggttcccaaaaccaaaacttaaacccttccaaaaaaatgaaattattgagtccccaaaaaaaaggcaccccttttgaaaacacctaaaaattggggagggtccaggggcaaggctccatcccttaaccctaatggtttgggggggcctttggggaaaaatcccgttaacccaaaattcaaaaattacgcggggtaacaataaaaaacccccctttttan

SEQ ID NO: 103576 - DNA, 373 bp, Homo sapiens
tttggcttaaaggaatcttgtgattggttttattttttatccagatcactcaaactttctccctatcagcagtaagggtgtttgactttgtcactgttcctttgttccctggagtagcacttttaatttccatcaagaacttttcctttgtattcacttggctgtttggcacagaaggcccagctttcagcctgtcgtaactgtcaacatgctttcctcactaagcttaatcatttttcttgctttcgacttaaaacaaaagatgtgtaacccttcctttcacttgaacacttagaggccattacaaggttattaagtggcctgtttcaatattgtttcttaaagaataggaaggccagaggaaagggaaaga

SEQ ID NO: 103577 - DNA, 386 bp, Homo sapiens
ctgaggtgggagaatctcatgagcctgggaggcagagattgcagggagccaagatcataccactgcacttcagctgggtgacagagtgataccctttctcaaaaaaaaaaaaaatggtaggaataaaaccctcccttacctttaacaccaccaaatattattattattttccggtattatattaaaaccgggaaatggctgccttttattcagggcctcccatggggcaggccctgggctgggggctttccagaataagctctggtctttgggccactcaaagaggatggggctcagggagtgttaacagtttgctcagggtcatacaactcatccaggggtaaagtcgggacttgaacccagggtacagagttctccacgttgcg

SEQ ID NO: 103578 - DNA, 360 bp, Homo sapiens
  misc_feature (1)...(360): n = a,t,c or g
atttcgtttagggccctgccctcatgaatggattaatgctgctatataatacaacaagcgctcttgggagacgggcagctttcttctgctattctgtcctgagaggagacagngttcatctttgttttttaccttccaccatgtgaggatgcaccaagaaggtccttggcagacactgatcccaccatcttgactttggacttcccagcctccagaaccatgataaataaatttctgttctttacgaattactagcagcatagatggatgaatacagaaatgttaaattatctatgtacattttatacacacacacacacgcacacacacacacacacacacacacacacacacacaaan

SEQ ID NO: 103579 - DNA, 352 bp, Homo sapiens
tacgatcacttgagcccaggaggcaaaggttgcagtgagctgagatcataccactgcaagcctgagcaacagagtgagacccctgtctcaaaaaaaattttttttaaatttaaaaaaatttttaaaaaatgaacagacaacacaaatcaccacatgtctgaagaaagcctactataaactgcaaaacaagtaagaatgaccatgtgggaaatgaacatatgaaggccacagatgagaattttcaaaaactctaatttgtatctataaaacaagaactttatactacctagaagagaagataacgttgagaaatagacaagataaatatatgaaaaatacaaaagaaaggatt

SEQ ID NO: 103580 - DNA, 369 bp, Homo sapiens
  misc_feature (1)...(369): n = a,t,c or g
ccaggggtgggttagaaagtggtgattggttgtaatcctttcctgagctttatttctcatgaggtagggttgtgtaagtaggtgtgaggggcttaaaaagccaactgtagctgggtgtggtagcacatgcctgcaagtcccagctactcaggtggctgaggtgagaggattgcttgagcccaggaattcgaggctgcagtgggccatgactgcaccaccgcactccaggctgggcgacacagcaaaaccctgtctcaaaaaaaagttccagtttttttaaaagacagggtcttgctctatcgcccaggctggagcgcggtggcacaatcttggctaaatgcagccttgacctcctgggatcaagtgatn

SEQ ID NO: 103581 - DNA, 392 bp, Homo sapiens
taaattgaggagacttattagctactctgtgagaagacagatggatatcttgtgcagagggcaaagggagagaaattctggtttacgtaagaaaaagggaagtaaggtgaggtaaagtaatgattgtagctgtatttttgtatttcagctgtattccagctagctggaaggccctgctgactcatattctatagcagtggttcctgaagtttaacatacatcatttctttgttccttctccactcccactgcttcacttaactagtctacattaaataaataaataaagttgatcaggcactgtagctcacgcctgtaattccagcactttgggaggccgaggaggatggatcacctgaggtcagggagtcagaccagcttgaccaacatgg

SEQ ID NO: 103582 - DNA, 398 bp, Homo sapiens
  misc_feature (1)...(398): n = a,t,c or g
agctgaaggttaaggtggctgtggcaatttcttaacatcaacaacagtggaatttgtcacatcagttgactctttctttcaagaaagatttctttgtagcatgagatgctatttgatagcattttacccaaggtagaacttctttcaaaattagagtcagctctctccaactctactgctgctttatcaactaagtttatggaatattctaaatcctttgtcatgtcaacattgctcatagcatgtttaccaggactaaattccatctcaacaaagcactttctttgctcatccctaagaagcaactccttatccgttcaagtttcgtcatgagattgcagcagttcagtcccatcttcaggctccacttctaattctagttctcttgctatttccan

SEQ ID NO: 103583 - DNA, 416 bp, Homo sapiens
  misc_feature (1)...(416): n = a,t,c or g
tttcgtagtgctgggattacagacatgagcgaccacacctggctgtcatcctatcctttgaaactttgaagccaggtattgacttttctctagctatgaaagtcttagagggcatagtcttccaacagaaggctatttcatctacaacgaaaatccgttatttagtgtagccaccttcatcttttctcttagattttctggataacttgctgcagctctctatcagtccttgctgcttcaccttgcacttttatgttatggagacagcttctttccttaaacctcatgaaccaactcctgctagcttccaacttttcttctgcggattcatcacctctctcagccgtaacagaattgaaaagagttgcgctcttgctctgaattaagctttggcttanggaatggtcttactgttt

SEQ ID NO: 103584 - DNA, 420 bp, Homo sapiens
tttcgttggaggtccactccagaccctgtttacctgggtatcaccagcagaggctgcagaacagcaaatattgctgcctgatccttcctctggaagctttgtcccagaggtgcagccgcctatgtgaggtgtgtgtcagcccctactggaagatgtctcccagttaggctacacaggggtcagggacccaattgaagaagcagtctctccgttctcagagctcaaacgctgtcgtgagagaaccactgctgtcttcacagctgtcagacagggacatttaagtctgcagaagttgtctgctgccttttgttcagctatgccctgcccacagaggtggagtctagagacagtaggcattgttgtgctgtggtgggctcagcccagttcaagctcccctgccactttgtttacctactcaag

SEQ ID NO: 103585 - DNA, 374 bp, Homo sapiens
actacagtgttcattttctgctgctcttggaaacgtgcagagactgtggctggtagacctgctaaggcccagtctcttcccctagcaactgaggcagcaagagagaatccctgcagactgttcctgcattactaccagtctccagggcagatccaactggggctccccagaggccggggcggggctgctgtcgctggcgcgcgtctgctcgcgaggtcccctcttgtccacctcaccaaggctgttctgctcctgaggggcccgggccgggcagttatgcaggccgtccaggacgcatggctggggaggcctcaggaaacgcacagtcatggcataaggcgaagtggaagcaggcgcgtctgtccttccacata

SEQ ID NO: 103586 - DNA, 982 bp, Homo sapiens
  misc_feature (1)...(982): n = a,t,c or g
tttcgtgggatcccccgggggtgcaaccttgctccacctgtgctgccctcggcgggcctggctggccccgcgcagagcggcggcggcgctcgctgtcactgccggaggtgagagcgcagcagtagcttcagcctgtcttgggcttggtccagattcgctcctctggggctacgtcccggggaagaggaagcgaggattttgctggggtggggctgtacctcttaacagcaggtgcgcgcgcgagggtnnnnnnnnnnnnnnnnnnnnnnnnnnnnnnnnnnnnnnnnnnnncacctgcgatgaccacgaggaggaacaagtgggacggcgagtgatgctcagggccagcagcaacgcatggggcgagcttcagtgtcgcttgcagtgaccacaggtacggtatctacttcccagagcgcctggccgagaaataggaaagagggcagccagtaggcaggccaatacccaacaaaagtagaatcgagacgccctgagttcagaagttcttgaggccaaatctggctcctaaaaaacatcaaaggaagcttgcaccaaactctcttcagggccgcctcagaagcctgccatcacccactgtgtggtgcacaatggcgccccccacaggtgtgctctcttcattgctgctgctggtgacaattgcagtttgcttatggcggatgcactcatggcaaaaaaatcactggtgagcatcatttaagaagacccatgactagactgggctggccgagcccatgttgtgcccgtaagcagtgcagcgaggggaggacatattccaatgcagtcatttcacctaacttggaaaccaccagaatcatgcgggtgtctcacaccttccctgtcgtagactgcacggccgcttgctgtgacctgtccagctgtgacctggcctggggttcgagggccgctgctacctggtgagctgcccccacaaagagaactgtgagcccaagaagatgggccc

SEQ ID NO: 103587 - DNA, 439 bp, Homo sapiens
  misc_feature (1)...(439): n = a,t,c or g
cccacgcgttcgcggacgcgtggggcctgtgataaatacagatttttcttatgcagcttcttcacctcattgagccttcatagaactgaaaagagttagggccttgctctggattacgctgtggcctaaggaagtgtttgatctattttgaccactaaaactttctttacatcagcagtaaggctgtttcactttcttatcatttgagcgtgaagaatcaactttaatttccttcaagaacttctcttttgcatttacaacttggctaattggtacaagagagctcacttttggcctatctcatttttggcatgcctttctctcaaagcttaaatctttctagcttttgctttaaagtgtgagatctgtaactctttcagttgaacacttagaggctatcanaaggttattaattggcctaatttcaatattgtgtctt

SEQ ID NO: 103588 - DNA, 393 bp, Homo sapiens
acctcttcttgggccttcccattgcctgagacacaacaatattgaaattaaggcaattaataatcggtgcggtggctactaagcattggagtgaaagaaagagtctcacatctctcaatttaaatcaaaaactaggaactattaagcttactgaggaaggcatgttgaaagccaagaaaggccaaaagcgaggcctctcctgccaaacagttggccaagttatgaacacaaagaaaagttcttgaaagaaattaaacatgcaattccaggaaacacatgaatgataagcaagtgaaacagcctcatattgctgatatggagaaagttttagtgggctgtctaaagtgatcttctaagatcaaaccagccacaacattccctaaagccaaaacc

SEQ ID NO: 103589 - DNA, 1452 bp, Homo sapiens
cgcgcactataaaatggcgcgtgctgcaacccgcgcccgcttcggagagagaaatgctggggtgcagcttcaagcttaggaccacccaccatgcctatccaggtgctgaagggcctgaccatcactcattaagaacagaggaggctgcctgttactcctggtgttgcatccctccagacactctgctgtttcctgcctaggcgtggctgcagccatggctaggaaagtgctgccacccacccacctgggccagagctggttctgctcctgctgcagggacactgagctggctatctcggcgcttcgggcaagaactgcaacaggctctcctgggtcctgcaggtgtacagccgggcccctgccttgtgcctcagctctcgagagctgctgctgccgggtgacctgatccaacctgataaggtgccatcttcagctaccactgcaaggccctgagggcaacagcagcacggcactgcccacccggctgctgatggcctggtgccagctgggagtcctcccggcacttcgaggccactgagccacccttccagccccagcccaccatggacaggggtatccagcttcctcctcaacctcgtcctctgcccctgagccagtgacgcccaaggacatgcctgttacccaggtcctgtaccagcactagctggtcaagggcatgacagtgctggaggccgtcttggagatccaggccatcactggcagcaggctgctctccatggtgccagggcccgccaggccaccaggctcatgctgggacccaacccagtgcacaaggacttggctgctgagccacacacccaggagaaggtggataagtgggctaccaagggcttcctgcaggctaggggaggagccacccccgcttccctattgtgaccaggcctatggggaggagctgtccatacgccaccgtgagacctgggcctggctctcaaggacagacaccgcctggcctggtgctccaggggtgaagcaggccagaatcctgggggagctgctcctggtttgagctgcattcaggaagtgacgggacgatggtggtggtgaggcaaaaagcccttggggcactaccctccctgtggagctgttcggtgtccgtcgagctagccacaccctgacaccatgttcaagggtaccggaagagaagggtgtctgcccccaacctcccctgtgggtgtcactggccagatgtcatgagggaagcaggccttgtgagtggacactgaccatgagtccctggggggagtgatcccccagggcatcgtgtgccatgttgcacttctgcccaggcagcagggtgggtgggtaccatgggtgcccacccctccaccacatggggccccaaagcactgcaggccaagcagggcaaccccacacccttgacataaaagcatcttgaagcttttactccgtttttataaggaaaaaaaa

SEQ ID NO: 103590 - DNA, 6683 bp, Homo sapiens
ccggagcgggctcgccccctctgcttccgccgcccagcccgtgatcgctgctccgcggtccccggcaccctcggccccccacggcggttggatccggcgggggaaggagaaagtgagactcggtgtcatcaccaatccgtcgccagaaggggaggaaactggaatccagcagcggcgagcagcagctgggcggtcacatctggaaatggaaagccgacctccccctcctcctccacctcttcctcctcctcctccttctcctctcacccaggatcacttccgaaaccacttggccttcagcccctgcctcggccagaggtttcatttttaactgaatatttacgaaagctgaaagcgtgcgaggggggtggggtggaaatagcggctgcttcttttccaaggatttatttaatggggatgtgttcaaggcaagaccgaattcagaaggatatcgacgtcgtgatccagaagtccagagctgaggactgcctgtttgcagggcccgcctggcaggacgactgagcaagttcttggaaaaccagagatattagagcggtgaatcgcgctggtcacgttggacacctgcgcgttaggagattctggagccagagggagagaccccagaaacgccccggtcggcgacccagcccgagacgcctggggtcccaagggaagctgaacgcccggtgggctcccgggatggttcttccggttctttgtgccgccttcacccagtgaaggagcctgtatccaccctgcccagtcgctgttgggctgctgcggagcttccgctgccatcttcggatcctgtgttccgcccggggctccaccagggcagggatggtggtgagggtcgctcgtgggtcccctggcagggagcagggtctggcactcacaagggcgcacgactaggacttgtcgaatgaatcctttgtcgcctttagcttttagtcctttgaagagaggctctgattgtactttctccacaagcttcagcatggcagtatctctcaccacttgttttggtccaagggcagaaatgagcatcctggaaaccaatcagtacttccgctctgaactggaaaagtgcaaacagaacttccaagacctcacagagaaattcctgacatccaaagctactgcctactccctggccaatcacctgcagaaatatagatacatgatccccttaattcaggctcaggctgaagaactgaccccacttacgacagaagatacaggaagggagaggtgtctgctaccttttcacccagcatgtgaagaacacagtcaagtcttttgagggccttctcaggaacactgacattgcctactaccagagacagagattctgtgagcaaatggtacaaggaagccagctgacagagatccttgtcagaaaacttgccacagagtcttgctctcttacccaagctggagtgcagtgacatgatcttggctgactgcaatctgtgcctcctgggctcaagcaatcttcccacctcagcctcccaagtagctgggactacagaatcaaccccaatgctcactaacaaactgagaagaaaaaaaaaagaattacccccaagaacatctgaggaagcacaacagggacagacttgaaggtacctgggcagtcctctggttttggagtagagaaaatcacaatggtaagaaaaatgaagacaggcaaaagccactggctcccaggatgcacctctaacctctacaggcaaatcatagattccattgtccagctgtataatgaaaacagagttctcagagaagaataccggagactcccccgacttgcctgaatcaaatttccagaggctgaggaggaggaaatacaggaagtattggtcctgctgttcagagtggcagaggagaaagaaaatcccagccgtgttggaaattcacagagagaatatgaaaatcaggttgtcctgtacagtatctgcaatcagttacgatacagaaataacttaaacatgtcaagaaagatgaacgcggatactatgaggaactgctaaactacagccgagatcatctcatgctgtacccttaccgtctattggatattatggtgaagggcttcagcataacaccattttcatattacactgggattatggagaatattatgaacagtgggcacaattttactgctgctgactgtctaaggcttcttggcataggaagaaaccagtatattgatcttatgattcagtgtagatcatcaaaaaaattcttcagaaggaaaacagccggtgatcttctaccaataaagccagtggaaattgccatagaggcatggtgggtggtgcaggctggatatatcacagaagatgacatcaagatatgcacttggcctgagaaatgtgctactgataagaccgttgattcaggccctcaactctctggatcactagattacaatgtagtacatagtttgtataaaaaaggatttatttatctggatgtaccaatgtctgatgacagttgtatagcagttgcaccccttgaaggttttgtaatgaatcgagtgcttattttgattattttgaaactctactctataagatatttgtttcagtagatgagcacacaaatgtggcagagcttgcaaatgtccttgagattgacttatccctggttaagaatgctgtttcaatgtattgccgattgggctttgcccataagaagggacaagtaataaatttggatcaacttcattcatcatggaagaatgttccatccataaacagattaaagagtaccttagatccatagaagatgctcttgtcatggggtggaggggaaagtaggaggcctgtacaagaagcttcatcggcaactgacactgatacaaatagtcaagaagatccagctgacacagccagtgtaagaagcctgagtctgtctgcaggacacacgaagcacatcgcattcctgtttgactccactcttactgccttcttaatgatgggaaatctttcaccagttcagagcactggtgaaggagaagcacagagatattttgatcatgcacttactctgagaaacacaatactgtttctgcgtcataacaaagatctagttgcgcaaactgcacagccagaccaacccaattatgggtttcctctggatctcttacgctgtgaaagccttcttggtttggaccctgcaacttgcagcagagttctaaacaaaaattacacgctgcttgtttccatggctcccctcaccaatgaaatccggcctgtcagcagctgcacccctcagcatattggaccagctatcccagaagtcagctctgtctggtttaaactgtacatttatcatgtcactggacaaggaccaccatcccttttattgtccaaaggtacaagacttcgaaaactgccagatatatttcagagttatggatcgattgctaataacatcttctgggtcatgatcctggagtagttcctacctcacatgtgctcacgatgttgaatgatgctttaacacattctgcagttttaattcaggggcatggtctgcatgggataggagaaactgtccatgtcccatttccatttgatgaaacagaactacaagaagactcgtgtcaatatgggtgttcataaagcattgcagatactaaggaacagagtggacttacaacatctctgcggatatgtcaccatgttgaatgcttccagccaacttgcaaatagaaaactcagtgatgcttctgatgagagaggaaaacctgatttggcttctggctcagatgttaaatgggagtacagagtcatttgaaatggtcattgaagaagcaactatagattcagcaacaaagcaaacctctggtgccacaacagaagcagattgggttcctctcgagctgtgctttggaattccactgttcagttccgaattaaaccggaaagtatatagaaaaattgctacacatggcctttgcagaaaagagagccttcaaaaacctcttacattccagtagaaaactctctctgcaagtccttaactttgttcactcattccaggaaggtgcttcaacattggatattcacacagagcccagtttttcaagtttgctttcacagtcatcgtttgctgacatgggtgttccacttcctgcaaaaaaatttaacatttaaagatagtgtcttatcagaacggagtggatggtcaccttcctcacttcttattgctaatctccatttgcaataatttggttacaccatttgttgctcacactttctgccttttttctttcttaacgttagctttatagtgtcagccactaaaaagcatcctgctgctgcagtgcaattcttgcttaactaatattaaaagtttggggaacatattcatgttttctgaagttttgctccttattgcacatcttattgcaacaaagtgctttttagcatccagcactgtatttttttaccttgagacaatctgcatttcttttataaaactaagtatatactttataggctttatgatgactgttatgtttaaaagcagtcactgtgaaaattgcaatgataattttatatgttagtttatcaaacatcaatcttgtttaactttatattttgttacctatactttgggggatcaagggaagagatggaactcttcctctgaaaatgcttcttggtacttaaagtagtaaaactataaaacagtaaacatccagtattgggagatgatatgatagggcattatgaattcctatgggtatctaaattatgtatgtcagttggacattgtagaaggtatgtaaatcatcatggttatgtataacttaaccttgatttataaggtcttaattcagattatgactattcgttgacatctcatgagaagctttagaaaactttctatttttaaacaccatttatatgtggacttctgttgtcactgactttgggctttatattttcacagagtctttatggaaaaagtagaatttattttccactcttgtagctatagctgctgcacattttcaccctgatttatttttttgtttcttacctttgatgttttcaaaccaaggattgtgattttaggttagaattacatattagaagcattaagactatgtctttggatcagaatgctttagtgattaacctactttgaagacatactcttaagcaatctggatcttaaatttatgtgaatacatttttagaaaatgataaagaaaaatggaattacttcaaagtgtttcttgagtcattgattcttttagcatctcaaatgttaattagaataattggaatcactttttagacttttcaagttacctttcttgggaagtttgtgcagtgttatagtttagtttagctcctcttacagggtaatggtttgctagtttaaaactgtaaccaaacgaactggtcagacaacatatatctaaaacacttaaaatgttaggaagtttgggaatgttataacctaaacgtttttgctggtaactttttgttatttatagatatttgtgtatttaacatacatacttcaggaaatatatgcctttcctaaaacttaaccatgcattcaataccatggcctatctatagaattgaatattttggaccatgttatctgtggcacagtcagtgctgtgtttgaggtaaatgcagtaacggttagttttctactttgtcttatagaaggtagaaaccatgtgtatgttatgtttgtctataaaagaaaaaatactaatattaaataatttcttacgactctgagtcactcacttatttttccaataattgatattgtacattcctagtgccattaggtatgtatgtatgtaacttttacagtttttcagctgaaagttgtaagtatttttttttttttggatcggggctctttaatctcattttaatttcctttgtttgaatgaactgtagttattttctgtattcctatattaaccatctaaaccaactgtaatgacatgtacactaatacagaattgaacatttgtagttgttggcagtgaacccagttgttggtgaatttaaagcttaaaatatgggaatgatttgctgctatatttcctttgagagagaaaggaggaagaaatagaacctaatagtgatcatgaattttagggaaagtaccgaagaaccatggggtcccctctggtttcttgtgttgaatgaggcaagggtaatcatctgattccgagctgaagacctctggtcctcttaaggagggagagtgcatttttagagcttttagcaaaatgtgaaaagctgatgtttgcgccttgctttgtgaatttggctttgttttacttatacattaactcatgtaatctcttaaatcttacaagcattgatccatttcaacaaaaaggtaaatttaaaatgcagactttgttatttgccaaagaagattcatgaaaaatttacgtccaattattttgcaaatagttaatttcatttggctttttaccatgttccttcctttctttttcccgcttccttaatgtaatttaaaccctggcaaacattctttagaaaccaagaggaaagaaagaacaaatatcaaaaaagacatagaatttaatattgatacaatttcacctctaaaatggatttgaagaaatgcaactttatatcaaaaaatggcaactg

SEQ ID NO: 103591 - DNA, 1136 bp, Homo sapiens
  misc_feature (1)...(1136): n = a,t,c or g
cgccattttgtctcggcagcggtggccgtagctccatcgcattttatgtttctggcgagaagggaacggagttttcatcaggtagattggtttttgtgcggccgtcctccaccgtttcctccaggacagcacctagtcgtggccggaggagtctcagagctgtcagaaagaataagactgattttatgggaaaattaagcagatgctccagtttgagaaacctggatctgcgatctgtttgtggtctctatgaataaagaaaagcaaatagaatcttatcaggtaccagcatcaagatgatttatggtaataaggctgggtgcagtggcttgtgcctgtaatcccagcactttgggaggccgaggcgngcaantttgcctgaagtcagaagttcgagaccagcctgaccaacatggtgaaaccctgtctctacttaaaaatacaaaagagctgggcatggaggtggtgcgcgcctgtaaccctagctactcgggaggctgaggctaagaatctcttgaacccaggaagcagaggttgtagtgaagccgggatcacgccactgcactctagcctgggcgacagagagagagactgtctaaaaaaggaaaagaaaaaaatttatacgccaaaaaagatattctgagataacctgtagttaccactaactttgtgacaaaattataaaaatccacagccatctatgaatctgtaggcagacctgaagtttgaacgactggtgaagacatctgattttctttatagccaagttaggataacaaaatgcaaacaagtcattaatatttactatatgcaagatacagaaagatgaaggaaggagtaagaagttatccttcgtggaactattcaaagcaaaaatgcaaaataccagggaaagctttgaagaaccaagatttgagcaggttcttagaatatagattggattggatttgatttcaagaaagatgaacgtgtaaagcagaagtgggaagccaaaaacttttttccaaattagaattaagcattctttcaatgaacatttggaaatcaaggtagaaaaatatccctagggcctagctgaggagtctgtatgttgttgggttttgatagtaaccagtccaagattttgttattagacg

SEQ ID NO: 103592 - DNA, 572 bp, Homo sapiens
  misc_feature (1)...(572): n = a,t,c or g
gatcgacaccctcnggnnatcggatnactagtccgtgtggtgcaattcgtagacattgtctttttcctaagaagactgagtttgttaactaagtttattaattctgttcatatcaattttaaatttatcaaaaagtagctactgggtcaaagtcttgatattgaaaaactggattatgatctgttttccaagttgattttaactaagcgatttgactaactcttgtctccatcttcacagcaaaacagagcgtgacactcccaatcatctgcatgctggaaatgaggaaatggttattgaatgatacaagtgcttttcgatcatttagaaagttctgtttcccaagatctttttttttttttttttttaaaagggggttttgttttgtcccccaggtgggagggagggggcgcaatttgggttaaccaaaccctccccttctgggttaaaggaaattttcctccctaaccccccgggggggtggaaacaacggcgagtgccccccttcgccggttatttttgtttttttataaaaagaagggtttctcttttgtggcgcgggctgcccaacg

SEQ ID NO: 103593 - DNA, 354 bp, Homo sapiens
aatattcaaataacccaaaagacaggaaaggggaaacagggattaatgagaaaacaaataataaaatggtagatttaagttcttacacatcagtaattacgttgaatttttaaatgctgtaaacaaatcaattaaaagtttgtcaagagtccatagaaaaaacccactttatgctgtctattggaaacttactttaaatatggtataggtgggttaaaagtgaaaagatggaaaaagatatagcatgcaaacactattggaaagaaaaccctagtggctatattaataacaaagcaaacttcagagctaagctaatacccaaataaagaggaacattacatattgataaaagaa

SEQ ID NO: 103594 - DNA, 456 bp, Homo sapiens
  misc_feature (1)...(456): n = a,t,c or g
cttgaccnccntattgangactattagacagngcggnggaattcccatgttttcatttaagccttcagaaatatgagccaattaaactcttttctttatacattagccagcctcaggtttttttttgtagcaatgcagttatgacctaatacatttacacatgcagtaaatatacctaagttttaagctagtattcactactcactaggggtaagaatttgtatatatattccaggatgtatacatcctggagaaaaatcacagaagtgtaatacgtgtggcaagaattctactcaaaagccagaacttgtaaatctaggtaattaaaagggcatagatgtatgaaatgaaatgagggtggcaaaacctttactagagttcaatcactacttgtcataagagagtttatactgaaaggaaatcatataaatgtatgtgtcagaggctttccccagg

SEQ ID NO: 103595 - DNA, 456 bp, Homo sapiens
  misc_feature (1)...(456): n = a,t,c or g
catcgacgcccntnattgaagacccctagntccgngtggtggaattcgcaaagtgaggttcaagctctgggtctgggtcttttctccaaagcagtgaaaatagcttggactttgctgttacagaattatttaaatctggaatctgcctcttggtaagccctgtgcctggaaacaagtgacaagtgatctgatctctccagacgcaatattcatcaatgctgctatccattccctgagtttttttttttttttttttgaaacaaagtttctttttgtcccccaggttggagggccttggcacaatttaaattaattgaaacttttgcctcccaagttaaggcgattttcttgttgcctaagtttccaaaaaagtggggataacggggcccccccaccaccccgggttagtaatttggggttttaaaaaaaaagggggttcccccatgttgcccaggt

SEQ ID NO: 103596 - DNA, 452 bp, Homo sapiens
  misc_feature (1)...(452): n = a,t,c or g
attcgacgtcgattacccctaggcggngnagnggaaancgagcatatattatttaaaatctttcccagacaagcaactgctaaaagaatttgttatcaccagactggccctacaagagagggtggagagttctatacatggaaacgaatgaatggcgacacctgctaccactttattacacataatctcatagcccacagtccctgtaatgctactacacaatccaaactacagagcaaccagctaatgactccatgttaggaataaagcctcatgtctcaatattaaccttgaatgtaaacaacctaaacaccccacctaaaagacttggagtggctgattggattaaaaacaagacccagccttctgctgtcttcaagagacctctctcacatgtaacaggactcataggttcaaagtaaagggatagggaaaaaaatctatcacacaag

SEQ ID NO: 103597 - DNA, 463 bp, Homo sapiens
  misc_feature (1)...(463): n = a,t,c or g
agggaaatcgagtagcgtancactngngcnggaantcgngaatagtgctgctatgaacattgtctacaagttttcgtttgaacacctgttttccattcttttgggtctatatccagtagtggaattggcaggtcctatggcaattccatgttttacttattgaggaactgcttttccacagtggtgatgccattttgtattcccacctgcagtgtgggaggattctaatttctccacatccctgccaacacttgttataggatgtatttttagccatatctacccagcaagggtattatattccattgctcacatgcaggaactgatgtatgttacaacaaacctgcagggaaggtattgtcatccccattttacagatgacaaaacaaagaggttcagagaggttaagtgacttgcccactagatctaccactagatttgaacccaggtctctctgcttccc

SEQ ID NO: 103598 - DNA, 724 bp, Homo sapiens
  misc_feature (1)...(724): n = a,t,c or g
cccagagggagagtagcaaagggttaaaatccttttgattgacgttgtagcctccggtgccctgggctcaggcgcgcgccattggccgccagaccttgtgcctggcggccaatgggggggcgcgggtccacgagcggtgccgcgtgtctcctcctcccattggctgaaagttactgtgggaaagaaagtttgggaagtttcacacgagccgttcgcgtgcagtcccagatatatatagaggccgccagggcctagggatcacacaggatccggagctggtgctgataacagcggaatcccccgtctacctctctccttggtcctggaacagcgctactgatcaccaagtagccacaaaatataataaaccctcagcacttgctcagtagttttgtgaaagtctcaagtaaaagagacacaaacaaaaaattctttttcgtgaagaactccaaaaataaaattctctagagatnnnnnnnnnnnnnnngggaaatgcccccctgatttatggaaaaaaatttcttggccccggggggttgttaccccacccggggtaaacacaacccgggttaacccaaaaacggcttttgaccccaaaaggtcttcaagcccttttttggaaaaaagccaaaaaccaggattaattgaaggtttgacccacttaaaaaccctgattttgaatcctctaaaaaaagatgaaagtggggaaattcctgttctcttt

SEQ ID NO: 103599 - DNA, 588 bp, Homo sapiens
gcaattcgagtgaacaagtgttcattcctcaccttgaagggtaaaccttctcagaactttccgtgctccctctggttcttatttctgtttttgttttttgtttttttccagaaaaaatcaaatcagactgtaggtaaaatagggtgtccagagaaggggactgttttctaaattatgaaaacaagtaacaacagagggacatctgtgtcaatatggctcagcatataaagaacccaatttttgctgtattgcttttaaactactctatagacaacatacaaatatatatttagagagctaactgaaaacagtttattagagcatttattgaaatgtcatggtggctcacacctgtaatcccagtactttgggataccaaggcagatggatcaggaattcgagaccagcctagccaacatggtgaaacaccatctctactaaaaatagaaaaattagctgggcatggtggtgcaggcctataatccagctacttgagaggctgaggcaggagaatcacttgaacccaggaggtggaggttgcagtgagccaagatcatgctattgcattgcagcctgggtgacagagca

SEQ ID NO: 103600 - DNA, 473 bp, Homo sapiens
  misc_feature (1)...(473): n = a,t,c or g
agaatattgatgactttcgnacanngncatgatgaccattcgaacangcggngcactttgcagattcctcacctctctcagccttcatagaattgaagagaggaagggccttgcactaaattacgctttgccttaaggaaatggtgtgtttgatttgatcttttatccagaccattaaaacttccttaacgtttattagtaataaggctatttcactttcatatcatttgagtgttcactggagtagcacttttagtttccttcaagaactttgattcacaacttggctaactttgtgacaagaggcctagcttttggcttctcggctttcaacatgcctcttactaagcctgatcatttggtttttggtttaaagagaaagacatatgactcttccttttacttgaaagcttaaaagccattcgcgggatattaattgtgctaatgtcagtactgtcttgtccaagggaaat

SEQ ID NO: 103601 - DNA, 455 bp, Homo sapiens
  misc_feature (1)...(455): n = a,t,c or g
aaggcggccnnttttncccagggatagnagcaagtgcggnggcaattcggncaaacaggagaagaagaagaagatgacaggtcgggctaagcggcggatgcagtacaaccggcgctttgtcaacgttgtgcccacctttgggaaaaagaagggccccaatgccaactcttaagtcttttgtaattctggctttctctaataaaaaagccacttagttcagtcacacaaaaaaaaataaatagggagacaaatcctactgacaactaaaaaaaaaaaaaaagattgtaatttcctagaaggaggattattaattggaggatctgtctgccgcctggtttatagacattatgcaacgttatattctgtcttctgcgtggattcttcaaaaagtgaacgtgggagtgtagatccaactcaagtttttgttgaaacataagacaaatgttttgattatg

SEQ ID NO: 103602 - DNA, 454 bp, Homo sapiens
  misc_feature (1)...(454): n = a,t,c or g
catggagtcgatagcncgngcggnggcattcggncaccacactggatggagtagcacattaacttcctttaaaaacttttgctttgtttttattaagtggctgtttggagaaagaggcctagctttcagcctgtctcctatgttggcattcggcatggcttgctcactaagtttaatcaatcatttttggctttgatttaaaaggagagatgtactactcttcctttcacgagagatgtacaactcttcctttcacttaaacagaggccactgtagggttattaattcacctaatttcaatattgttgtgtctcaaggagaggcctgaggagagggagagagatggggaatagctggtcggtggaacagtcagaacatagacatttactgataaagttcactgtcttctatgggtacagttggtggcgccccaaaacaattacaatagtaacat

SEQ ID NO: 103603 - DNA, 484 bp, Homo sapiens
  misc_feature (1)...(484): n = a,t,c or g
aactgaaccctngcaggcggatgaccccntngtacaaaacaaacaaaaaattagccaggctggtagtggaagcctgtagtcccagctacttgggaggctgaggaaggagaatggcgtgaacctggaaccagtgagcccagatctcaccactgcactccagcctgggcgacagagcgagactccgtctcaaaaaaaaaagggggaatataggaaaaaagaccctgtaaaataatatacctgataagggtctagtatccagaacatataaagaactcttacaacccaccaacaaaaagacaacccaatatcaaaatgggcagaggacttgaagagacttttctgtaaagaagatatgcaaatagcatatgaaacgatactcaacatcactagccatcatggaaatataaatcaaaaatacaatgagataccactccatacccatcagaatgtcttattattttaaaaacaaaccagaaccaagttt

SEQ ID NO: 103604 - DNA, 876 bp, Homo sapiens
  misc_feature (1)...(876): n = a,t,c or g
ggcacgaggagtgacggtgccaccgcggcgcgtgagtttcgccctgtcttgtattaagtctgctcttccaggttcctggcgcttctgtacctgggacttgggatccccacaaacctggaaattctcagccgtcttccttcactcagagcaaattgagacgaccccgtgagaggccgtggagaggagtctgcaatgccgagtggaggaaggaggaaccggagtgtgagcagtagctgggtgggcagcatggctgggatcaccaccatcgaggcagtgaagcgcaagatccaggttctgcagcaccaggcagatgatgcagaggagtgagctgagcacctccagtgagaagctgagggaaaaaggtgggcctgggaacaggcagaggctgaagtggcctccgtgaacggtaggatccagctggttgaagaggagctggactgtgctcaggagtgcctggccactgccctgcaaaagctggaagaagcgggaaaagctgctgatgagagtgagagagatacaaaggttattgaaatctgggccttaaaagatgaagaagatggaactccaggaaatccaactcaaagaagctaagcacattgcagatgaggcagatgggaagtatgaagaggtggcttgtaagttggtgatcattgaaggagacatgggatgcacagaggaacgagctgagctggcagagtcccgttgctgagagatggatgagcagatcagactgatggaccagaacctgaagtgtctgagtgcagctgaagaaaagtactctcaaaaagaagcctaatgtgagaaagagaggaagattcttactgataatctaaacaaacnnnntatgcggccgttctctataataaagaatggaag

SEQ ID NO: 103605 - DNA, 587 bp, Homo sapiens
ttatttgtctgtttcttactcaagttactcactttttgttgagttttagacattgtttatatattgtgaaaattaactcctatcaaatatgtgattttcaaatatttcacccatttcttaggtgacattttcaccccactaaatttttcctttgatgtgcagaaattctgaagtttgatgtagtcccatttctctattatttgttccttatgcatttgatttcagagctaagaaaatgacatcaaattcttggtcttttgtaacaagaaattagtgccaagtccaatgtcatattttcccccatatacttatctaggaagtttgttatatttttatgttcaagtatttaatccattttaaatactgtttttatatggtgcatgtaacggaagggctcaactttatttttttcatgtagatactcagttttcaacatcatttgttgaaaaaactgttttcttccccattgtgtggccatagcaatcttatgtaaggttatttgattatgtacacacgtgcttaattctgagctattttgttttatcatccatttatttttctttgtgctaataccacattatttctat

SEQ ID NO: 103606 - DNA, 229 bp, Homo sapiens
  misc_feature (1)...(229): n = a,t,c or g
tggcggggnnnnnnnnnnncattggatcatacttagtgtggnggaattcgtttgcagggtccgtggactgtggtggtgatgtggtcctagccagtcagctactttgggaggctgaagcaggaggatcccttgagcccaagagtttgaggctgcagtgagctatgatcatggcactgcaccccaccctgggtgagatagtgaaaacctatctcttaaaaaaaaaaaaaaa

SEQ ID NO: 103607 - DNA, 479 bp, Homo sapiens
  misc_feature (1)...(479): n = a,t,c or g
aattgaactcgataagcctagtccagngtgctggaattctaacttctagcttcaaacttttcttctgtggcttccttactttgctcagccttcatagaatggaagacagctaggatgttgatctggattgggctttggccgaagggaatgttgtggctggtttgatcttctgttccgactactaaaactgtctctatatcagcaataagactgtttaactttcttaccctttgtgtgttcactggagtagcgtttttaatttctttcaagaatttttcttttgcattcacaacttggctgtttggcacaagaggcctagctattgattggcctgtcttggctttcaactaagcttaatcatttcttttcttttttttttttttggctttttgaaaaaagggcccccttttggcccccagggtggaagaaaagggggaaatctggtttgttgaaacctcccctccccgggtcaaaggatt

SEQ ID NO: 103608 - DNA, 486 bp, Homo sapiens
  misc_feature (1)...(486): n = a,t,c or g
aggcggttnnnnaaattgactccgtccgcgtggngcaattcgntatttgaccaaggaacagtggctatgaaaccaggcagaccttgtttaaaatttatctttatcagctactagctgtgtgggccttggcaagtcacttaacaattccaggtacgtgtttcataatttgtgaagtagagctaataatgctgggctcctaaaattgctatctggtaaaagaaaatatcatagcctgtctatctctctctctatctatccatctacctgtctgtgtgtctgtctgtctattatctatctatctatctatctatctatctatctatctatctatgtatctatctatctactattatctactattatctatctatttatctgcctgtctatctttctatcaatctattatctatctgctatcacctatctacctacttacctatcatctatcttcctatctactctcctatctacctacctatttaccag

SEQ ID NO: 103609 - DNA, 1246 bp, Homo sapiens
atgagtaaatcatttccattttattatattctagatcatataacttttaacttggtgaactaatccactcttagagaaacaatagtgggagttttatatatgtaatcttgcaggtgaggaggctttaaattctaaaggttgtggtgtcttcatgccaagaactgtattcactgtggttgtagataaatgtgaaagtaactttatgcttaatttaataaattttcattgattttttttaaaaaaagaaaactgaaaggagatatagatgaatccacaattatagttagaaatttcctcatgcctttttcaataattgatagaactagacagaaaatcagcaaggagtgttggctttggcagcactttctaaaatcagaatgatgccaacaagattaaaatggttcttgaatatagattacacaaaattttgtgaagcatttcatgtttttaaaaagaggaaaaaaaagaaaatcaacaagaatataaaacaactcaaaatgccattaaccaaaagaatctatttggcatttacagaatattccacacagtaacagcagaatacacatattttttttgagtgctgacgaaacacatggcaagatagagctgtcctaggccctaaaactcgccacaacaaatttaaaagagatagtaatcatccagagcagatgaaaaccagaaatcattgtagggaatccaattggaaatcagcataagaaagatatgaaaatccctaaacatttggaaatttaaaaacacacttcacaataatctatcagtcaaagaagtctcaaggaaaaatttaaaaatacattgaactggataaacatgaaactgtgacatatcaaagtactgatagaagtttttccttgtcaggtgactcctcagtcaaaaaggagcccagtagagaaatgggctggtgagagcatctgatgggctctagcaagggagacagagctgcgggggacagttcctcagccctggactctgtctgagtcccgggaatctgagtcacgagatatgaggcacctgcagctccctcttcctctcttctccctgttctggacctccctgaccttgagccttcctctccatatcctcctgctcccactcaccgtcattcagaccctctggctccccagtgagccccattctttctccttgtctcccaagcatcacatcttgtacctgtccctgtttttgcttctgttctcccaaaaaatcaaaaacctgccccacgcgtccg

SEQ ID NO: 103610 - DNA, 490 bp, Homo sapiens
  misc_feature (1)...(490): n = a,t,c or g
ggcaacaccgcaccgaccggggcgnnnnggtttgagncccatcgtagaccctatgccangtggnggaattcggnttttcttttgttttttgttttaattaaaaaacaaattgagggtcactgcagccaacctcatggaagatgactgggaaaaatgaaacccatggcttcagtaaactctatgaggcgcttcttaaagggttacttttagcttttattagttcaagacaagggtaagctatttgatgttgacctgagactttttaaataaggcaggaaagggtaaaatcacctagtggaatgtgtttagtgaaatattgtcagtttgaggggaatctcctactgataatcactgtaggtcacctaagagtcaagtagaaaaggttatatatactttttttgagacagagtctcgctctgtcacgcctgctggagtgtagtggtgcaatcttggctcactacagcctccgcctcccaggcacaagcgattc

SEQ ID NO: 103611 - DNA, 394 bp, Homo sapiens
  misc_feature (1)...(394): n = a,t,c or g
aatacagagttttagaagtacttggctacatgctgaatataagatttgtagttctcggatgcagcagctgtggccaggcagcccagtttcgggaaggctctcggtgcaccacagcctgcagacacccagcccacaccctccatgccgccaagatgtccaggaggaaggtcagctcagctaagtgtcggtgaagggagaccccgaagaagagatctgcaaggtggtcagctaaacctgctccttcaaagcgaaacaaagcccaaaaaggcagcaggaaaggataaatcttcagnnnnnnnnnnnnnnnnnnnnnnnnnnnntgaaagcagaaaaaggaggaaaagaaaaacaggctgaagtggctgatcaagaaactaaagatttatctgcagaa

SEQ ID NO: 103612 - DNA, 477 bp, Homo sapiens
  misc_feature (1)...(477): n = a,t,c or g
atggcacgggnccnnnaactgaaaccatcgagantcctgcgaagngtcgnggaantctggaggaggacagaggagttggagcttgaactggatgtgggccctctagatccacacatatggcggctttgggtgggaaggtgtgggcctgactcttgagagcagggctgaatggtgggcaccatggcgtttgtatctgaggactgggccaagattacagagggagtgagcaacgcgtggctttggatatgcatcgaggttgtcagctctgtgtccagcctgcgtgtggtaagcagcaaccactctacaccagttgctgggcacccagcagggactgggacagacaggacaggtgaacagttaaatgagcaagaacattctggggcaggcacaggggctcacacctgtaatcccagcactttgagaggccaaggcgggcagatcacttgaagccaggtgttcgagaccagcctggccagc

SEQ ID NO: 103613 - DNA, 455 bp, Homo sapiens
  misc_feature (1)...(455): n = a,t,c or g
catcgagatcgatagcaatnngcgnggacttcgcccatttttcttccgctatactttgtctctatgtcttatttcctttgatcagtctgtcgtctccaccttgcgagaaatacccacaggtgtgcaggggcaggccctcttcatctggtgcccaatgtgggttcctttctctacggngaagatacgctagagtgtgatcattgaagacaaatcgacgagagattcccgaagacttccatggtcagccttgtggtaagcttgtgcactcagagaaacccagggtaagaatgggtcaaactgaaagcaaatatgcctcttatctcagctttattaaagttattttaagaagagggggagttagagcctccacagaaatctaatcatgctatttcaaacaatagaacaattctgcctatggtttccagaatagggaacgttagatctaaaagactggg

SEQ ID NO: 103614 - DNA, 569 bp, Homo sapiens
  misc_feature (1)...(569): n = a,t,c or g
nggagtctgaccaccgttcagngngttggaattccatcacttgagccccagagttagaggctgcagtgagctatgatcatgccgcagtactccagcctgggtgacagagcaagactctgtctctaaaaaaagagaaaaggaaatcattcctgggccactgtcctagactgcactgcaggaatgcctcatgccggtcgagctctgccctgctgtgagcagcagccaccacacagcttctaaggctgcgatgagcagcctgggtgcaatagaagccatggggaagccttgacccagacttgggaggagtagggagcttcacaggacaggtgacatcttagctgagacttgaagggccgggagcagtgagtcaggccgagaagtagcanagaagactgttctgcacagaggaacacaggtgtgaaggctggaggacgggaggaaaggaggctggactgccctgggtggngagcgccatggctggaggggcggtngctcaatgccccgcgccccaggattcanggctggctgaggctacnagaatgtgccaccgtgacatcacatgaagaggg

SEQ ID NO: 103615 - DNA, 490 bp, Homo sapiens
  misc_feature (1)...(490): n = a,t,c or g
cattgaatagcgtaccctaggacagcgncgcgtaattctagattgactcctggccaatatggtgaaaccccatctttactaaaatacaaattttaataaaaaaaatttacccgggcaagggggcatgcccctgtattcccacttactaaggaggttgaggcagggaaataatttgaacccgaaaggcaaaggttgcagggagctgaaatcgccccattgcttttaaccctggcaataaagcaaaactttttttttttttttttttttttttaaaacccggggggaaaaaaaaaaaaagggggtttttaaacctgggaatttttaggggaaaaaaaaaaagggcccccccgggaaaaaaatttgaaagggagggggcccccactttacgccccttttttatttttaggggaaaggggaaacaatttttttggccaaacaaaaaaaattttccaaaagggttaaagggaaaaaaaaatttggccccccccgg

SEQ ID NO: 103616 - DNA, 401 bp, Homo sapiens
ccatgttggccaggctgggtttgaactcctggccttaagtgatccatccatcccggcctcccaaagtgctggaattataggcgtgagccaccaagcccagctgatgattggtttttaaagtcaagaatctgaaagcaattttatctccagccaatttaatgtaacagctctcaaactgaagctatcctatgatgttacaatttagagaatgctgtaatatgtaatataaggataatctgattttcaaaaagttagcctccttacttaggagtgacaataggaatagagcttagatatttcccagtcctgtcagaggtgtccttgcagggagtctggctcttttctccctttccctggccttcattgatctgtccaattttccctggcagagctctctttac

SEQ ID NO: 103617 - DNA, 389 bp, Homo sapiens
cggacgcgtgggctagttctagatcgcgagcgccgcccttttttttttttttgggggggggttcctttttaaagccatttgaaaagctttttaaattggatttccccaaaaaaaccccttttatgggaaaatttaacctttaaaacaaatattttttttgccttttttaaaccgtaaagaaccctctaaacttccttttttttttttttccccggggaaaccaaacgggtacccataggggtacgggggaaataaaaaatatccttttgggggaaggggaacgccccaaaaacccccaagaaccaccccttgaagggaaaaacccctctaattttgggggtctaaaaaacccaaaggcccacaccaaaaccttattttaacttatttcc

SEQ ID NO: 103618 - DNA, 486 bp, Homo sapiens
  misc_feature (1)...(486): n = a,t,c or g
cggcccctgaagcccctcgnaannccagttggaccgnancaacnccaanntngggngaccacgcgtccggaattttgatgatacagttttgaaatattttcactgtgcaaattccttcaaactgtttcctattacctcaagtttaaaaggtggttaggttcatttctgaaaatttgatagctgtcaaagatagcattatcaattagtttataaaggatgtactattcaataaaaggtgttaggataaatagttatatatccatgtataagagtttaaagctcttacaaaaaaataaataacttggaagaattatcaataaacatctaaagagtagatgtcagaggccaggtgtggtgtttcacacctgtaatctcagtactttgggaggctgaggcaggcagattgcttcagctcaggaatttaagaccagctggggcaacatggcgaaactctgtctcttcatataaaaattagttgggtgtggg

SEQ ID NO: 103619 - DNA, 418 bp, Homo sapiens
  misc_feature (1)...(418): n = a,t,c or g
aggttttggcatgttggccaggctggtcttgaactcctgacctctggtgatccacccaccttggcctcccaaagtgctaggattacaggtgtgtgccaccgcgcccagcccattttctttcttagtcaacctgaagctaggtaaatgctagccttggaggtgatttttcaagaaaattagaagcaatcgtgaaaacttgtcttttgaatggaactgctaaaccatttgaagctggaaaatagtcagaacctctcatgttgtcatgctatctttacagtgctacaagtattggtaaaagcccatatcaaaacttgtgataataataatagctaagccctacctaccaggatggttagaagtaaaacaaaacaaaatgggaaacaagtgttggcattgctgttaggaatataaaatggan

SEQ ID NO: 103620 - DNA, 414 bp, Homo sapiens
ggaaaccccatttctacgaaaaatttttaaaacatagccaggcatggtggtacatgcttgtagtcctagcttctcaggaggctgaggcaggaggatagcttaagcccggatggcgccactgcattccagcctgggcgacagagcaaggccctgtctcaaaaaaaaaaaaaaagggttttcccctccccaataaaaggcaaacaacaagggctcattacacttttttagggataaaaagccggaaagctttttttttttacggaaataacctttaaaaagggcaaaaaggccgggggggggggctctttcttgaaaccccacctttttgggaggccagggggggggaatcacagggtaaggattttaaaaccaccctgcccattttgtaaaacccccgtttttacaaaaaaaaag

SEQ ID NO: 103621 - DNA, 425 bp, Homo sapiens
gaaagaaaaatgaaagaaagatagaaaaattagctgggtgtggtggcgtacgcctgtagtcccaagtcccagctactcgggaggctgagacaggagaatcgcttatcactggagtccaggaggcagagagtgcagtgatatctcaccattgtactccagcctgggtgacagagagagacatagtctcagaaaacggaaaaaaaaaaaaagagagagggggtttcaccatgtggcccatcctgaggtcaaactcccgacctcaggggatccacccgcatcaccctccttaagggctggaataataggcatgacccaccggggtcagccgaaaaggcacatactctctccattcttcctccatgcgtacgcccatttttgccttggttgcccacctctgaccacaatccagaactaaccactccatt

SEQ ID NO: 103622 - DNA, 251 bp, Homo sapiens
  misc_feature (1)...(251): n = a,t,c or g
ttttttttttttggagatggggtcttactctgttgcccaggctggactgcaatggcacgattatggctcactgcagcttcaacctccagggcttgagtgatcctcccacctcagcctcccaagtagctgggactacaggcacatgctaccatgcccagctaattaaaaaaaaaatttttttttgtagagacgnagtttcactgtgttgctcaggctggtcttgaactcctgagctcaagcaaccctccact

SEQ ID NO: 103623 - DNA, 493 bp, Homo sapiens
  misc_feature (1)...(493): n = a,t,c or g
ggagncacattgacggcctngatcgatcggctgtgggaaangcggctttgtccgagagggcatgactctgtggtgtgtcctttgtatgaattgggaaaggggactcctttctccatgtggatgccacccttctctggggctcataggtgtgagcagaacctggactggatttgatgccccacttgcccctttgtctggattcctttgtgcagtgaacaacctgtgcagctgtacatggtggtgcatacacacacacacacacacacacacacacacacacacacacacacacacgntctcttctcttctctctttctttttcttttttgagacagggtctctctctgtcacccacgctgtggcgcagtggcatgattttggctcaacacagtctcagtctcccaggctcaagcaattctgtagtcccagatactcaagaggctgaggctggagaatggcgtgaacccgggaggcagaggttgcagtgagctta

SEQ ID NO: 103624 - DNA, 449 bp, Homo sapiens
  misc_feature (1)...(449): n = a,t,c or g
nctggtagacactattgagngcgtggaanncggcggaggacacatgaattttaccaggacatgatctaggcaagccaaatacagataaacttggtcaggttcagatttaaaaaatgaaaaaggataatggcagcacgcatgttggtgatgatagccaccagtgtacctgtctcttaagattcactctagtatgaactgattatatctacacctggtgcagctgtcacctttggatttccctacacctctcttccgtgttgaatgtcctgtttctttatcactatgtctttctttttcttagtttccttaggtttgtttctttttcttagtttccttaggtttgttttgaggcagggtcttgctctgtcgcccaggctggagtgcagtggtgcaatcacagctcactgcagacttgacttccctgtgctcaagcattcctcctgcctcan

SEQ ID NO: 103625 - DNA, 464 bp, Homo sapiens
  misc_feature (1)...(464): n = a,t,c or g
nggtgaanattgagacatcgagaacctcggaagngcggggaattcggaggctgaagtgggcggatcactggagcccaggagttcagttacagtgagccttgattgtgccactgcacgtcagcctgggccacagagcaagaccctgtatctagaaaaataaataagtttaaagtgggagggaaattggctaaggttattgctaaggaaaatgatatcttagagattcctagaatcatttagttttaaggattgatcacgttgtttattgattttgttaagcaaagtattttgtagtaaagatactcatttgtacaaaatatcacaatttgagttttctgtcaatgataattttttttaaaatgacatttaagatgaatgttttaaattataataatacctgttcacagttgaaaattaaaaaccatgcaggagggtgtaaaaagcaaaagccccaccacattctn

SEQ ID NO: 103626 - DNA, 423 bp, Homo sapiens
  misc_feature (1)...(423): n = a,t,c or g
cttagaagaagatacactggagaaatttaacttctcctctctgtctctcctctctccctcttctctttcttctctctctcctctctggcacctgactcctctctctccctctctctctatccccccctactatctctcctttctccctctctctctctcccagcctcctctctctcactttcctctctactccccacttcactccccccaactctcaacaaagcaagaaggtggccgtctgtaagctgagaagagagccctcaccaggagctagccatactgacatagtgatcttagacttctagcctacagaaatgtgagaaaataaatttttgttgttgangtcnnnnnaaaaaaaaaaaaaaaaaaaaaaaaaaaaaaaaaaaaaaaaaaaaaaaaaaaaaaaaaaaaaacaaatatata

SEQ ID NO: 103627 - DNA, 491 bp, Homo sapiens
  misc_feature (1)...(491): n = a,t,c or g
tggggnaggaaagcgannnnnttcgtagacttcgagatcactagtcagtgcggtggaattcaatcggtgacatttcctttgatactcctgcttttgccaggaatgatttggcaacctccgagaatcttggtcaaattcttctgtgtgtcataaggatgagaaatcattactctttaagagtgatttgagcctgggcaacatggcaaaacctcatctctataaaaattagccctgggcttggtgactgtgctcccagccactccagaagctgaggtagagaggattgcttgagcccaggaggtcgaggctgctgtgactgtgaccgcacactgcactccagcctgggcaactgagcaagactcgtctcaaaaaaaaaagaatgatttgaattttggctgcccattataaatttctgatttaaaaaaaataacagaaacgaagcaaatagaaaaagaaatcataatcaaaactgcattttgtatttggtttgg

SEQ ID NO: 103628 - DNA, 446 bp, Homo sapiens
  misc_feature (1)...(446): n = a,t,c or g
catagaatagcactaccccagngcggnggaattcggaatttttattgttatcttattaattagaagaagtttatgtttgacctttatggatagaggggtaaagtaataagagtattgtattctctcagatggatgtaacctgatttttttccctctattgtaagtaacactgctatgaacattcttgcaaatattcagtatgttcttaaatgcatatgtgatttttttttatttgatggccaagatcatagtgattctttttgagacagtcttgctatgttgcccaggctagagtacagtagctattcacagatgcagtcatagtacactgcagcttccagctctggcctcaagcaatccttccgccttattagccccccgagtagctgggactgcaggcatgcagcaccacaaccagctctgatacttcttcaggattcattccc

SEQ ID NO: 103629 - DNA, 391 bp, Homo sapiens
caaactcagctaatttctgtattttttgttgttgttgttcagacggagtctcgctctgccgcccatgctggagtgcagtggcgcaatctcggctcactgcactctatgtgtacaagaaacaagagagactgatgccgcgcactttaaagcggctaggaccatacgtgccccccacccagcacagctgactatcgcctttcaggtacaaacacatgtctaccaggatggccatgaggctcctggtggtgcgaccttaggacacacccccccaggtcataaccacttgtgtaaacactggggtgatccgacctggcctcacattcatagctttatacgacatatatacctggaccgatgcagggcctcatgcttgtgatctcatgactttggg

SEQ ID NO: 103630 - DNA, 497 bp, Homo sapiens
  misc_feature (1)...(497): n = a,t,c or g
agtctctttagtttttnagttnttttnaggggggcctcgagactcgtattccgtgtgcaggaatccgtggtgcatgcctgtaggcccagctacttgggaggctgagacaggaggattgtttgagcccaggagttcaaggctgcagtgagctctgatcaccactgcattccagcctgggtgacagagcaagatcccgtctgaaaaaataaaaactgatggacaagaagaagcaacacgatgtagcctctaggacagagcactgagctaaattcttttcttttcttgagggttcagttttcctaatcatcctaccagctcccaaaggtactcagtcgggttagtcaacctctctattcattcatagaatgggcgtgatgccagtcaaaggctgttctctggctaggacacaggggactccagccagcatgccctaatagaagtggggctttgtgctacccagtcaatgagtggccctcctcttgagaggtcacaaagtt

SEQ ID NO: 103631 - DNA, 930 bp, Homo sapiens
  misc_feature (1)...(930): n = a,t,c or g
cttaagcaaagcataaaactgataaagaattattaggtagaagatataaagaattcctacaaatcagttttttaaaacctcagtagaatatgagaaaaagatttaagcactttacagaaaaggaaacacaaatgtaaacatatggaaatgaggtttaatctcattcatcattagtgatatgtgaattaaaatcataggtatatttcatacctaaccagattggtaaaaattaaaaattttgcaaataagagttggttggaaagtttatcaccgactcttaagcactcctagggtaatgtaaatgagtataatcactttggaaaacagtttggcattatctagtaaatttgataggatgacttaacttttgacccagcaattccatttctaatgatatacttgatagaaatgtgtgcccaggtacacccagaaatatatgcaagaatgttcatagcagtgttattcgagatattcaaacatcagagacaaccctaataaattgtggtatatccatacaagggaatnctacaaaacaataaaaataaaggaatcacaaacatgtagtagtcttagatggatctcccaagaagaaaaatctgtcttatggtaggaagttattgttgaacctgaatctcctgtgatgcagtataaatgtatttcctctggttctctcctcagtggcagttaagtattaggaaagattatgtgaggattggtgtcaaccattctcagtcttttgtactaaagaaattttctggcccggcgtggtcgtcacgcctgtagtctcagcaaactgggaggccgaggtgggtggatcacgaggacgggctgagacagaagaatggcgtgaaccccagaggtggagcttgcagtgagccaagatcgcgccaaccgcactccggcctgggtgaacanagtagctccgtctca

SEQ ID NO: 103632 - DNA, 724 bp, Homo sapiens
aggtaagtaagctagaaatgaacttttccagtcacttggaaaaaataagaccaaagatgattatgcatatcacaactgatacacacatagcccagggccaggttccctcctctctggaacccctgattcctgctggtgctgttttatctccccaggtagccactgtgtctttatctccctccagagaagcaacgcgctccagactctgatgcactggaggcaggagacagctgcaggtggtggtgtgctctggaagagtagaaacagagacccctcatagataccctgtcttcagaatagacctaggctcttcaccccaccacccctgccaccacccccacccaagccactgcagtgtcttgcccagacaaggggcatagccaactaactgatccctcagatcttgccctggtccccctaagataactctttatatggcagctttctccatcttagcactttgggaggccgagacaggtggactgcctgagctcaggagttcaagaccagcctgggcaacatggtgaagtccagtctgtattaaaactataaaaaattagctgggcatggtggcgcacacctctaatcccaactactgtggaggctgaggcatgagaatcacttgaacctgggaggcagaggatgcagtgagccgagatggtgccacttcactccagcctggacaacagagcaagactctgtctaaaacaacaacaacaacaac

SEQ ID NO: 103633 - DNA, 430 bp, Homo sapiens
  misc_feature (1)...(430): n = a,t,c or g
nattgagaccattgatanacatcggnggaagccggngggaggattacttgaagctgggaggctgaggttgcagtgagccgagatcacgccactgcactccagcctgggtacagagccagactccatctcataaaaaaagaaagaaagaaacagtcatcattaatatcaggtaaacatcatttcaggtatctttccatacatatttacagatggacagagatacatggatacatacatttaattttacttaaatttgcatctgtgtttgtgaagaatactggtctatagttctctcttcctgtagtgtcttcatctggttttcatattaaggtaatactggcctcataaaatgaatttgggaagtgttctatatttccatatttaaaaaaagtttgtatagtattgctattgttaaaagaaaagtgtttcn

SEQ ID NO: 103634 - DNA, 337 bp, Homo sapiens
  misc_feature (1)...(337): n = a,t,c or g
gagaaactggccgccacagtgaaattacnctgggggttctatacaaaaagaatagtgtttttaataaatgctactgggacaactgaatatccatatggaaaagaatgtggtttggacccctaccttacaccacatacaaaaattaatttcaaatggatcaaagacctaaatataataactaaaactttgatctgctgtagctggatgaaaacaaaggcatagtaatattttttgaacttgttaacacaaactgtttggctctctaaaggaaatgtagttggaaatcttactgaccttgcattgggcagtagtttcttaaatatgacaccaacagccg

SEQ ID NO: 103635 - DNA, 361 bp, Homo sapiens
ttcctttggtggcttaggtagggcaaggcaaaaggccccttgtacccatctgctgtagagatagcatatggaagagccctgccactccctgccagtcaagcccttgtgataaatcttgatactcccatgtatatttgcctgcttgtgctgccaaggccactgaaaaaggtcagtgctttgtgaaatggagagtatgatataaacatacaagttgttagtaatttttattgtgattgatcactttttttttcttttctttcctttttttttagagacagagtttccttcttgttgcccaggctggagtgcagtggtgccatctccactcaccgcaatctttgactcccgggttcaagcgatt

SEQ ID NO: 103636 - DNA, 367 bp, Homo sapiens
gttgatttttctgtaaacattccaaagtgttgggattacaggtgtgagccaccacacccagcccaaacatcaccacttttaattcttatcacatacctgagaagtggaaatcattcccatttaataagtgaggaaacaaacttggaaaagttaggaaactttcccagtgtcacttagcaaatgacagagctgactgaatccaaaggaaatgtttcactttttttttctttttcgaggtatgatcctgctttgttgcccaggctgaagtgcagtattgtggttcccctggactcaagcaatcttcccttctcagcctctgaagtaagtaagactataggcgtggttatcctgcctagctaattaaaaa

SEQ ID NO: 103637 - DNA, 368 bp, Homo sapiens
  misc_feature (1)...(368): n = a,t,c or g
cttgtttgctattggcttccatttgtgtggaatatctttttccatccctttattttcagtctatatatgtcttaccagcgaagtgagtttttttaggcagcatataattgggtcatttttttttttttgtccattcagccagtctgtatcttttcaggggaaaatttaatccacttacatttaaaattattattgatatgaggggacttattcttgtcattttgttcaatcgttttctggctattttgaaaaacctttggttctttctctataattgggaatcattgcagctgggaaattttctgtaggggtaacacttgagccctttcccttcctcatttgnggggtggctttaccagggagtttta

SEQ ID NO: 103638 - DNA, 502 bp, Homo sapiens
  misc_feature (1)...(502): n = a,t,c or g
agagttgccagactacnccccaactgaaggcgttcngatagcagtaggaanaacccaacanccccgacgaagataccccacgcagaccctttaaagagacctatcgaggatttgaattcaaccttcgccctaaacactgatggtcttctctaaactgattattttagtcagcagttcctctaactttttttcaagcttcttagttccttgcattgggttagaacatgctcctttagcttgaaagagtttgttattatccacctgatgaagcctacttctgtcaatttgtctaaccaattttccatccagttttgttcccttgctggtgaggagttgtaatcctttgcaggagaagagccattctggtttttggaattttcagcctttttgcactagcttttcctcatcttcatggatttatctacctttggtctttgatgctggtgacctttgcatggggtttctgtgtggacgtcctttttgttgatgttgatgcccctcn

SEQ ID NO: 103639 - DNA, 369 bp, Homo sapiens
gcggaggttgcagtgagccaagattgtgccattgcactgcagcctgggtgacagagcgagactctcaaaaaaaaaaaaaaaaaatttttcggttggataaccccacaaaattttttttttgaaaagaacagggttttttttaataaggggggtttttaagggaacactttgtttatgggacagttttcacatttttttactaagaaaggggggttaaggaaatttttccagaaatataagttggtggttacaccctatgtaaataaaaaaatattttttaccttggccagtatagaaaaaaagccaccggaagggaaaatttttttttttaaaaaaaaaaaggaactttcacccagtttataaacctta

SEQ ID NO: 103640 - DNA, 359 bp, Homo sapiens
attatttcataaaatgtgtgagataactggcttatactatggaaacgtaatttcatattttacattaaatataaaaataaaatttacactaattaagaaattgatatgtaaagcaaagtctcagaagaaccaacagaaaatgaagttgaacataatttgaaagtatgatcatttattttacctctgaagcaatatagtatgtaataacaaaagaaaaatattcatatacatgatttccttttacaaaaaataagagttaacttggccgggcatggtggctcatgcctgtaatcccggcagattggggactgaggcgggcagatcacctgaaggtcaggagtttgagaccagcctggcca

SEQ ID NO: 103641 - DNA, 366 bp, Homo sapiens
  misc_feature (1)...(366): n = a,t,c or g
tttagaattgtcctatcctattgctgaattgatccctttgtcattacataatgaccttctttgtctctttttactatttttgacttaaagtcttttttatctgatataaataaatatagctacttctgcttgcttttttaacccatttgcatgggtggatatttttccatcctttgacttttagactatatgtgcttttatagatgagattagttttttgtatgcagcatataattaggtcatggtttttttaaaaaaaaaaatccattcagccgtctatatcttttaagagcaacatttaatctgttcaaattcaatgttattaatgtgtaagaacttactcttgncattttattgatttctggg

SEQ ID NO: 103642 - DNA, 376 bp, Homo sapiens
  misc_feature (1)...(376): n = a,t,c or g
gatcatgccactgcactccagcctgggtgacagagcaagattccgtctcanaaaaaaaagaaaaaagaaattgcctgaaaaaataggaattgggggagatgaggggacacaggtccccaggcctcctggacttacatagcctgggaaggcggagtcaaaaaaaggaggatggtatgcggaaagagaggcaagaaagatgccagcgagggagaacagcagggggcatgggaataatttgggatttgcttccacggattgggggggcgacaggtcttagcttcctgtggccactgtagcaaatgaccagaaatggggtggcttcaaacagcaagcatttgttcagaagaatgaaatcagggtgctgggagggccgtgt

SEQ ID NO: 103643 - DNA, 347 bp, Homo sapiens
ctcttctcaagtttttgatcatttctacaagaggttccaaactcatcttgtattttccctaccccagttctggaatcaaccatgtctccaaggaaccctagttcctttctttttttgttgatggaaaattgtgtttagaagccaagatttgggtactagcgccagctgtgtttattgttaccagagttttactgcttctaagcactctgagcaggtagagctcagaaatatctacctgtgtagtaacgtacacatacactttcatctatatttttgtatatatctatctgcatatatattacaaaccatgagtttatactgacacctctgataccattccaatgtgg

SEQ ID NO: 103644 - DNA, 341 bp, Homo sapiens
aaagatttaatctctgagattagttgttagatctaatatttttctctacgattttggctgttggcatgctaagataggtcttttccatcctaccattacataaattgtaccttaattttcttctagtacttttgtggttccattttttacatttaaatcttattgcatctgatatttatttttgtataaggtgagaggtagggatctaacttcatattttccaaaatgaatagccagttaaccaaactgatttaagaatccatctttttgttacattaatttgaaatgccgtaatgaatactgaattctaggctttttttttttttttttaaccattgaaa

SEQ ID NO: 103645 - DNA, 342 bp, Homo sapiens
tgttgctatttagccttatttttaaatatttcagtatattgcctgtttgatacatatgaacaatatgactacaactcattgggaaacaccagtatttaccttaccttctaatgtaaggcatgattccaggtattttctcatacctcaaaccttaaatctctaatttagtcccagaaacagtattctacatgtcaaaacgttttttgttttgttttgtttttggagacaagatctcaccttgtcaaccacgctggagtgcagtggcgccatcatggcttactgcagacttgatctccctggctgaagacatcctcccacctcagcctcctgagtggatggagc

SEQ ID NO: 103646 - DNA, 587 bp, Homo sapiens
gcggccgcccgccccgcgcagggaaaagcccgaccgggccttctgctccgcagaggccgggtggttgaactccgcgcgggtttcctaaccgctaaaggtgcctttcggtggtggctgtctcagaagcacgttaaaatgtcctacccaccccaatctagatgcggctgtgggggaatgggagcggccggacctcccagcctgacagtgcatcaagagctttgcggagcctacagcccggatgggacgactgaggccctcccgctggcgagctggccgagggctcgtccctctccagctaaagcgccagcttacgatacagccaaactgccggctctcatcggctgtgggagcaggaggcccccaggggtaaatcccggagcctcgtctctgaagcctggcgcttgtgtctcagaaggtgcgggacccacagggacacttgaatcagcaggctcacgaccccccacccccctgcccccgcctgtgtttgccctggacctccagctagggctgaccactaattctgtcatgtgaccccacagtgcaggtagctcccccaagaccaagcccaaggcgcgtccgtgtggagg

SEQ ID NO: 103647 - DNA, 470 bp, Homo sapiens
  misc_feature (1)...(470): n = a,t,c or g
cgggnnnnnnnnnnnnnnaactgatgactgaatccactgcggnggaattcctgcagcgagccgtgattgttccgctgcactccagcctgagcagcacagtgagacctgatctcaaaagagaaaactgtttgctcaagcagccccattgtttcatagtcccatcagcaatgcatgagagttccaggtgctccacatctttgccaacatttgatgttgtcagctttccgtcttttaattaatcagctttattgaggtgtaatttgtgtacaaaaaaacccctttaaagtctgcaatacagtgagtgcggacaggcatgccggcctgagaaagcatcagccctcgcagcctcgccctctgcaggcctctcacactctgcccccggcctggcatgtcactgtggactcatctgccttgtctagttttcacgtcaatggagccacacagggcaaactctcctgtgtccggctgcn

SEQ ID NO: 103648 - DNA, 467 bp, Homo sapiens
  misc_feature (1)...(467): n = a,t,c or g
ccccccccccnnnnnntttgtagacccctggccgtgcggtggaattctctcaatgtccttgtgcaatataaaaacattttttaaattaaaacttgttaagcttctgtcctaaaaggtatactaatgggagtagaataatcttttatagggtagattgatgtagggttttttttttatatatataataggatggagtcctcttttttcttcttgcatgctctacctaaggcttactccacggcccccccatttatgacttgcctgagcccgtctccacaaccccgtcgctctatcacccaccaattgtcccttaggcttcccccttgggcccttctgccattctcactctgcccttccattccccgccgccagctctccctcttctctccgccccactctgttcttgggtcctcgggcccgcgctcgctgccaacttgcctacccaccttcccactttgactccccac

SEQ ID NO: 103649 - DNA, 493 bp, Homo sapiens
  misc_feature (1)...(493): n = a,t,c or g
aggccnnttcgagaccatggaaggcctaggaagtcgcacacacctgtggtcccagctactccagaggctgaggtgggaggataagttgggccagggaagttgaggttgcagcgaggtgtgatcctgccactgcattccagcctggcaacagagcaagaccatgtctctataaaataaataccaattaagtatttctgatgaaattagagacgttgtaatgagatgtactataaatgtaaaatatacactggatcactggattggggagaaagtataaaactgtaaaatgtctcaatattttttactgataatatgttgtgatgattatagcttaggtgtattgagttaattaaattattaaaattaatctcacctgtttttatttttcagtgtagctactagaaaatttataattatatacttggtttgcattacatttccgttgcacatcactgatctaggcaatgagaaaatgatcaaaataatgcattan

SEQ ID NO: 103650 - DNA, 428 bp, Homo sapiens
ggttgaaagacattaattaggagtttttgttctactattttagaattttgctgactaatattcctttgactagtttgaatagcattggatcaactcagatgatggcattcttatgttttgattagtgtatacatggggtacattttttcttttacttttcacttatctgttcttttatttaaaataggctttttgtagacagcatattgtcgaaccttgcctttaaaaaaatcgaatccgacaatatctggctcttttttttttttccttgaaactggccctcggtctgtcccaggctaaagggcaggggggggatctcatggctcactgcagttttgacctcccaggctcaagggattctcctgcctcaccccgtcaggtcgttggagctacaggcccatgccaccacccctggctaatttttgaat

SEQ ID NO: 103651 - DNA, 2282 bp, Homo sapiens
  misc_feature (1)...(2282): n = a,t,c or g
gttggtcttggactcctgacctcatgatccacccaccttggccttacaaagtgctgggatgacaggcatgagcaccgtgcccggccggtcctgctttctagaaaaaactgtagtgcgcgctccagagacgtaacccgttcccacacctgagtgggcaactctagcctttgaacacagccctaggaaatgactgcaaacgagggggaagctttttaaatacaaggaaaaaggcatttgtaccaagctacatcgcagtgaaattatcattggaaaacagtggaaagaggctgtgtgtccccccacgggtcaggcgcagtcccagggaggtctagaccccaagagcagagaggccttacggggagggcacggctttgtgccaggaggtggggtatgcggccaccaggaactctagttacacagcgatgggctgaaggctgtgcatcccgcagggagtgagccctccgaccctggaggagttcaagcagctgcttgtcaggatgcagcgacaggagggacaccgttgcagccgatgcccgagacagccagaggctgccggcgactgccagcagcagagaggctgggcctggaatggacccccagaagctggccagaggcctggcagttgggaaaggctcggtcgtcctggggagggagcagcaccagcggaggccccgcctgggtcttcatcagagacactccaagctggtgggggattcctgggacagtgtcacccccggcaggccccaggtgcccaccgcccacccggccacagtgggagcagctcgggtcagggaggccgggctgaatgcaaaccactgctgaggagacaaacgcggcgccacgagcaggtcaggagagaactccctcccgcgggccgtccgcggaccctggcgtcagccagcatgtcctgagccacagacgaagctgtcccargtgtgaaagaaggtctgtgcctccgartggaagccggtcccacgctgtggactgagctgcatccctcagatgcatctgtttcagccctaaccccactgtgaggggacgtggaagtggggcctcangggtgatgaaggttatattaagtcnggaaggagganacrccaacacaattggctggaccttgatcttagacccgcagcctctagaacctgcagaaaaatgctggaactgcccagggtgtgattcttgttacgtctccccgagctggctgagacatacagctccactccaccggcctgtgcccagagaccccggggtacaggaggaggacgccgcagaggtgcgtgttgatgagtgggtcgcaccagggtggagcctcctagaagggcagggacgcaccatccttggggagtggcctggagaggcctcgggaagggggtccagggtggctgagcctcagccatcaccccatgccgtccagccctgcaagcacatgctgtgccttggacctgccttctgacggggccggggtgcccgtggggtcccagtccccgtacgagcatctcactttcccttccatggtgctgcttggtggccgggagaccatatgtcccagccatagtggcagatgctctccaggccggctaggggacaccggccctcatggcaggtgaggaggcagtgcactgttttgggggctctgaagcccggcctgcccgacttgaagtgtccagggcccaccacnttccttcctggttgaggagtttctgggagaatggtcaaatccccaatgtatcaactcagctttatctccaaaacctaccacttcccagagaacaaaattaaagaagatttcccagagatttgtcatctggcggagcaggaccagggacaggctgatgtggtggaggtggtggacacgctctcagccccactccatcccggaggctcagagcccacagcaaggacaactcctgggcccagcctctctgctgctggatgccggcagcctctggctgtctcgggcatcggctgcaacggtgtccctcctgtcgctgcatcctgacaagcagctgcttgaactcctccatggtcggagggctcactccctgcgggatgcacagccttcagcccatcgctgtgtaactagagtgcctggtggccgcataccccacctcctggcacaagccgtgcctcccgacgaccgagcctttcccaactgccaggcctctggccagcttctgggggtccattccaggcccagcctctctgctgctggatgccggcagcctctggctgtctcgggcatcggctgcaacggtgtccctcctgtcgctgcatcctga

SEQ ID NO: 103652 - DNA, 453 bp, Homo sapiens
caagtacgtgccgaggaacttcgacgaaatagcacgaataactacatgtatatcagaaaaatagatttcaagagaatttttgtttttagagacaaagtcattatatataatgctaaagggatcaattcagcaagaggacataatctttgtaaatatatatacactcaacactggagcacccagatataaaagtaaatattattagagctaaagagacagatagagtctgacacagtgatacctgaagatgacaacaccccactttcagcattgaacaggccttccagacagaaatggacttaatctgcactatagaacaaatggacctaatagatatttatagaacatttcatccaacagcttcagaatacctattcttctcagcacatggatcattctcaaagaaatactatatgttaggccataaaatatgtcttgaaacttttttaaatg

SEQ ID NO: 103653 - DNA, 466 bp, Homo sapiens
  misc_feature (1)...(466): n = a,t,c or g
natagagnactcgagacaatacggcagngcggnggaattcaacagcttgcaagatacattcccctggcacacaaggggtgtaggtcaggttccacctagctgggtatactcccactccagagtaggccttcaggacctggaggccagtgcacacccaccctgcctttctgggtctctctaccgcttcctgtccggggctgtttcttgcacctctgctggtgtctcccctattctggagcgctgggaagcccctgccacacaggcttggtctgctggcacataccctgcttctagtgctgcggggtcagcccctagagggagttgtttggaagtgcacctgtacacacacacacacacacacacacacacacacacacacactcggtttgtattaatgtagatgaggacccccctgcgcaaagggaagaggcaggtgatgagattatgtggaggaggggggagggcg

SEQ ID NO: 103654 - DNA, 377 bp, Homo sapiens
accgtgcggtggaattcctttttatagatacctaatcttggtatgaatggtcctttttacatcttctatttttttgctgagactttcatatttttacatccattgcaaaatgtttgtgattgcttgctctggcatatttatagtagctactttaaagcccttgtcagataatttcagcatctgtgtctgtgtcacttcctcccaagcctggcgtttggttggtgaggacttgcaggttccccctgcatatcgggaagtgtgagtttttgttcagggtgcatctacctggggccatggcataatgttcatctgcaatgattgtaaggtgttcagattttgtaaatccaaataaaactgttttaaagaacacaatcctc

SEQ ID NO: 103655 - DNA, 458 bp, Homo sapiens
  misc_feature (1)...(458): n = a,t,c or g
ntttgcctagacgaccattanaccangcggtggaattcgtaaaagttcagagaagttaataactttgttcttcctgtgttgaataagcattcaatagtaagtcatggatataacttcattgtaaattattacataaatcatcctaatatgaatggattccagtatccaccccctccttttcattcctgtagtccctgccaattcaggcttttgcagattatatttgaatattgcagtgacctcctgcctggtttctttctttcagccttgtctcctgttatatgccactagaaagtaagctccatatgtttaaagatgtctttcctttttcttttctttttcaggacaggttctcactgtcacctaggctggagtgtagtggcatgatcattgctcactgcagcctcaaactcctggactcaagtgatcttactgcctcagcctcctgagtagctggg

SEQ ID NO: 103656 - DNA, 495 bp, Homo sapiens
  misc_feature (1)...(495): n = a,t,c or g
tgtnnacaggagnngnnnnaggnnannnnnnnttcgagaccattggccatgcggtggaattcgcttgatgtgcattcctgctcccagctactcangaggctgaggtgggaggatggcttgagcttgagaggttgaggcttcagtgagccatgatcgcagcactgtactccagcctgggcatgagagcaggattttgactcaataataataataataataataataaataaaatgtaatgggttgaaacctgtcnnacacanaaaaaaaaaaaaaaaaaaaaaaaaaaaaaaaaaaaaaaaaaaaaaaaaaaaaaaaaaaaaaaaaaaaaaaaaaaaaaaaaaaaannnnggccccccccttttaaaaaaggggccctaaaaaccccctgtaacccccggggggtttttttttaaaccccccccctttttgggcccccccccccccccttcttttttggggggggggggggccccccccccctccttcttataaaa

SEQ ID NO: 103657 - DNA, 481 bp, Homo sapiens
  misc_feature (1)...(481): n = a,t,c or g
tggaaaggggggccgccnnnnaactgatacccctgagatcatacgacagngcggnggaattctaaagaattgccacaatctcatgatcaaacttgaacggatgaggagttgtgttcttatgggtgagcaaagaaagtgatctattgagatgaatctactcctggtgaagatacggtgaacactgttgaaattacaataaacgatttagaatatttcatcaatttagttgagaaaacagtggcagagttgagacggttgactccaattttgaaagaggtcctactgtgggcaaaatgtattgtgtgctacagagaaatctttcatgaaaagaagagtccatcaatgcaacaattactatttttagaaatttccacagccactccaaccttcagcagccactaccctggtcagttagcagccatcattcaaagcaagaccctctgtcagccagaagattacaatttactgcaggctcagatgc

SEQ ID NO: 103658 - DNA, 456 bp, Homo sapiens
  misc_feature (1)...(456): n = a,t,c or g
agggcggccttnttttnaaccgtcagcgtacntcgtgacgngcaattccanggctttaacaggatggtctccggagcctgggattctcggagggctgaccaccaggaagatacctcagaaggtagaaacctcangcggatcgccgggcggcagcgcgagatcccagcctcaggcccggattcgggaagggtcgacgaagcccttttcccaatcttcacttcacccgccgccgccccagtccccgcagccgccgctccgcggncatttttcttttctatctttttttttttaaaagacggaatctcactctgtcactcagtcgagggcaggggcggaatctcagttgactgcaaactctgccgcccgggttcaagggattcttttgcctccgcctcccgagtacctggtactaaagggattagtcagggccggggctaaaaccagtcctggccaggg

SEQ ID NO: 103659 - DNA, 475 bp, Homo sapiens
  misc_feature (1)...(475): n = a,t,c or g
attgagcccctattgagnnccnnttgnanagngcggtggaattcgaagaggggaggggtgattctggagccttggggtggctgagcattcatgaccagttaccacctggccctgacgaggagcaggggcttggggggtttctggcaggtcctcacctccactgtctgctctgcccattcagcctcctccccacctgtctacgcccccccccttagagaccccacccctgttctccattagcctctcaaggatttggggggttggggtgctcttctggctcaataaagacttcctggttgacactcannaaaaaaaaaaaaaaaaaaaaaaaaaannnnccgccccccttataaataggggccccctaaaacccccgtagacccccccgatgggccttttttagacccaccactttttgggtggcccccccccccggctttttttgcccggggagaggccccctcccctttttttt

SEQ ID NO: 103660 - DNA, 422 bp, Homo sapiens
gagcttagatgatgcgtgtgtgtgtgttctgattactccactaactgatgggtccccatctctctccctctcctcagacctcactattctctcagacacaacagtattgaaattagaccaattgataaccttacaaacacctttaagtgtttaagtgaaaaagtcacatgcctctcactttaaatcaaaagctagaaatgattaagcttagtgaggaaggctaatgtcaacagctgagataggccaaaagctagactgcttctgccaaacagtcaagttgtgaatgcaaaagaaaagttcttgaaggaaatgaaaagtacttctccagggaacacatgaacgataataaagtggccaggtgcagtggctgacgcctagaatcccagcacttcggggagccaaagcgggaggatcccctgaag

SEQ ID NO: 103661 - DNA, 475 bp, Homo sapiens
  misc_feature (1)...(475): n = a,t,c or g
aggggggagccgcgcttctaannnnaagcttgnngacggacnggcagnnngggggnnnnngngtncggggtgagccgaaatcgcgccattgcactccagcctgggtgacaaaagcaagacgcagttttttgttgttggttttttaattgccaatgaggaaaggggaagttctgtgctaggcgatagagatccaactgttgagcaggcctctctgcctgtggccttccggccggtttccagacgcccaggtggccaacattagagtccgcgtagcagtgtgaggtaacccactgagataggtcgggcctgcggagcctggcgagcagcggccctctccctggggcttcccttcaatctccgggacatttccccgacctggagctcctccgcctcaccgccaggcctctctgcagattgcaagttcacctgccactaccgctgccgcgcgctcgtctgcctggactgttgcgggccn

SEQ ID NO: 103662 - DNA, 444 bp, Homo sapiens
agcttaaacccccttatttctaggactatgagaatcgaacccatccctgagaatccaaaattctccgtgccacctatcacaccccatcctaaagtaaggtcagctaaataagctatcgggcccataccccgaaaatgttggttatacccttcccgtactaattaatcccctggcccaacccgtcatctactctaccatctttgcaggcacactcatcacagcgctaagctcgcactgattttttacctgagtaggcctagaaataaacatgctagcttttattccagttctaaccaaaaaaaataaaccctcgttccacagaagctgccatcaagtatttcctcacgcaagcaaccgcatccataatccttctaatagctatcctcttcaacaatatactctccggacaaaaaaaaaaaaaaaaggggcggccgttttaaagaa

SEQ ID NO: 103663 - DNA, 404 bp, Homo sapiens
acctgatctcttagactagtatccataatgattgagattgtcacatctaacctccatcggactgtgcctcactcatatacaccgcccacccagctatctataaacctagtgatggccatacacttatcagcgggcgcatggattataagctatccctctatgattaaaaatgccctagtccactttttaccacaaggctcacctacaccccttatccccatactagtgattatcgaaaccatcagcctactcattcaactcaagacccctagccgtacgcctaaccggtaacattactgcaggccacctactcatgcacctaattggaagcgccaccctagcaatatcaaccattaaccttgcctctacacttatcatcttcacaattctaattctactgacta

SEQ ID NO: 103664 - DNA, 661 bp, Homo sapiens
tgagagacggagtttcactctgtcccccaggctggagtgcagtagtgtgatctcggctcactgcaacttcttgtctccggggttcaagcgattctcctgcctcagcttccctagtagtggggactacaggcatgcaccaccatgtccagctaatttttgtattttttagtagagacggggtttcactatatgttggccaggctggtctcaaacttctgacctcaagtgatccactcaccttggcctcccaaagtgctgggattacagacgtgagccaccatgcccggccagggattttccactcttgaagggagtattttgttgtcactttcaactcgctgtttttttttccagacaacctcaaatatgaccacactacagcctgtacacaacaagacagtttatcttggtccatggggtaagtgtatgcctgatctttttaattcagtacaatctctgaaggtgttaacactaatgttttacaagaatgtagaggcgactcggtgctatgaagcgtgttaaacaactcacacaattgctacaaaacaccagggaggggctttttgtgtttttaatttttaaaacatttttccttttcttgtgagccatagtaggcctagagagattactgggtttttataattaaacatttatttcggtg

SEQ ID NO: 103665 - DNA, 420 bp, Homo sapiens
  misc_feature (1)...(420): n = a,t,c or g
ataaatggagaaagaaaatgtggtgtttacaaaaaatggaatattattcatcctgaaaagggaagaaactcctgtcccatgttacaatatggatggaccctgaggaggttatgctcagtggataagccagtgacagaaggacaaatactgttcaattccacctatgtaaggtccctaaagaatcaaattcattataggcagaaagtagaatgctggttactagggatggaggtggggagcaatggggagttattgttcaatgggaacagagacgcagttggaaagatgaaaagagttttggagatggatggtggtgatggttgaaaaatgagaatgtacttaatgccattgaactgtacacttaaaaatggttaagatnggatattttgtgttttatgtatttaaaataatgatttttaa

SEQ ID NO: 103666 - DNA, 417 bp, Homo sapiens
cgagaatcccttgaacccgggaggcggaggttgcagtgagccaagcctgtgccactgcactccagcctgggtgacagagcgagactccgtctcaaaaaaaaaaaaggaaaaaggaaaaataaaaaagaaaggaagcctcttaaccgaggggggcatttttacaagaaaaccattgctattagggggtaaaaaaaacctttaataaaaggaaaccaacgggttgttttgaacttgggggaggtttatgaaaaaatgcatattccctagttagggaaattatgtttttgggagctgggaaaaaggaaagggattctttacttcaaacactttataggacaaatctccttttaaaaaaaaaaggataggacgcatacccatgaaggatatatttcccttaccctaaaagggtatggcaag

SEQ ID NO: 103667 - DNA, 403 bp, Homo sapiens
  misc_feature (1)...(403): n = a,t,c or g
cagtgaaccaagatcgcgccactgcactccagtctggcgacagagcgagactccatctcaaaaaaaaaaaaaaatttaaaggatttctactaaaaattttaaaaattagcatgcctatggtcccagctactcaaaggctaaggggggaggatccacttgagcctgggagggggaggttgcagtgagctgtgatcacaccactgcactccagcctcggggacagagcaagaccctgtctcaaaaaaaaattgaatgaatgggagctgtgtatccttttaagaaagattattaaaaggatatttttttgcctccctcttccagttcagggtctaaatggctggagcctttcttggcaattcagagtccaagttgggaaccagccctgaactggacgccatcccan

SEQ ID NO: 103668 - DNA, 395 bp, Homo sapiens
gtgggggggatcatctataatatctaattctaccttagaactttcctttggtggtgggggtgggttctgggagtttgacagattgttaggttttggtataaggtcataaaatcctgtgcatatgggatttctgaccatttgccctgcctcttgcaaaataggtctaatggcaggatggtgtcataattaaggctaccaagactgcccattgttccaggctgggcagttcataatgggggcagacaatagtgcaaaaaaaattttacattttatctttagagtgtcagggtcaaattgatttccatggttgaggatgtagccaagtgtgggaatcaggtgggaataggtggaggagtttgcccataagtggttttggaaaagagaagaggactttt

SEQ ID NO: 103669 - DNA, 403 bp, Homo sapiens
  misc_feature (1)...(403): n = a,t,c or g
agccagcaaagccccatgctggagcctgtgtaatatgctccttgggaggaagcagaataaagcaattttccttgaagccgaaaaaaaaaaaaaaaaaaaaaaaaaaaaaaaaaggggggggccttttaaaaaaaatcttgggggggcccaattttaccgggggaggaaaaaaaaaattttttttctataagggggggtaaaaaaaacccactggggaatttttggaaaaaaactttttttttggggggggaaaaatgggccccactcccccaaaaaaatttaagcttttggggaaaaaaaaaaattttaaaggggaaaagggggaaacaaactgcgaattttgttgggttggaaaaaatttgtggcgcncgccccacgcataacaacaaatcaccgcccgcct

SEQ ID NO: 103670 - DNA, 430 bp, Homo sapiens
  misc_feature (1)...(430): n = a,t,c or g
attgaaacccattgaggacntctaancagcgnggtggaattcacccagtagtagaattgctaggtcatatgggaattctgtgtttaaccttttgaggagctgccagacggttttccaaagtggctgcaccgtttgacattccctccagccgtgtatgagggttcgctttctccacgccctcgctaacacctgcgattttcttgttatgtgagccttctcgtgaatgttattccactgacattaatctcatggcaccgtcagtgattgaaatgatcttcttgttctctgtcttcgcctctggatcatgaccttcccgaggactgaatgtgtcataaaatccccagtctctagcagtacatgtgtattgagttggatcacatgctgctggacccatggcttgtcatcatgtgtacatgtagccgactttgac

SEQ ID NO: 103671 - DNA, 436 bp, Homo sapiens
gatcgcgccactgcactccagcctgggcgacagagcgagactccgtctcaaaaaaaaaaaaaaaaaaggcaaaattcggccccttttggctctttttttcaaaaaccaaaacccctcctttaaaaaaaactcccattctttttacggggccctaatggaacccaccccccccacatattcccccctttttcttttggaaagttcaaccccccctttttcctttcaggggaacccttgaatttcctggccccattggcacatgcaaattgcaaacccttggaagtccggggtaatgggaccccccttgtcccttaccccatcaaagccccgggagggggggccttatcccggggagaaagggggaggaccccccttcttttaggggccttccccctccccatttttaaaatacccggtgccaaggttttctttcaag

SEQ ID NO: 103672 - DNA, 407 bp, Homo sapiens
  misc_feature (1)...(407): n = a,t,c or g
ctatagtcccagctactcaggaggctgatgtgggaagatcacctgagcccgggagctggaggtttcagggagctcagatgtgccactgcattccagcctgggctacagagcgaggccctgtctcaaaaaaaaaaggctcatgacttcgtctcctaaatgagaccatctctagctgaggcctttgcttgcattctcatgggcagggccagcagatactgatggagcagatgttctctgaggctgtaggtgctggggcacagatcttttcctcatcctactacctagggaaggggagaaatgacaagcgaggcaactgcaggtgaaaagtgtttggagagaggtttctatagggctccagtctatgcactgagcccaggcatagacttcagagatgcttcctgaaaagn

SEQ ID NO: 103673 - DNA, 410 bp, Homo sapiens
cggggtttcaccatgttgcccaggctggtcttgaactcctgacctcaagtgatctgcctgcctcggcctcccgaagtgctgggattataagcatgagccaacttgtccagccacatattttgaatttttgatgttacaacttacaacttttaaaactgcatatcccactatcaattgttgtagttataattatttttaatagttttatctttaatcttcatattaaagatataagaggtttacatactatgcttacaataggccgaatagccacttcccactcattttttccaccatagaaacttgcatccaggggacttctgcatatgtgggcttaggggaagggtgttgcagtcaaagcaccatttcccttactgtctgatataggttggctctgtgtccccacccaa

SEQ ID NO: 103674 - DNA, 416 bp, Homo sapiens
  misc_feature (1)...(416): n = a,t,c or g
gctcacgcctgtaatcccagcactttgggaatccgagggggatgggtcatgaggtcaggagttcgagaccagcctgaccaacatggtgaaaccctgtctctactaaaaataccaaaaaaaaaaaaaaaaaaaaaaaaaanttccccggcttgggggggggggcccttaaaccccacttactgggggggggggggaaaaaaaatattttaaccccgggaggggaaatttgtgtgaaccaaaaattgcccatttgttttttacctaaggaaaaaaaaaaaaaccccttttaaaaaaaaaaaattttttaaaaaaaatttggggggggaaaaaaaaaaaaaaaaacccccctgaaaaattttttaaaaaaaaaaggggggggaaaaaggccccttgttaaaaaaagaacggcctccccg

SEQ ID NO: 103675 - DNA, 401 bp, Homo sapiens
  misc_feature (1)...(401): n = a,t,c or g
atttagccgggcgtggtggtgcacatctgtgatcctgggtactcangaggctgaggtggaaggatcgcctgcttgagcccaagaggttgaggctgcagtgtgccatgatcacgccactgaactgtagcctgggcaatagaacaaggccctgtctcaaaaataagtagtacaaaaataaaaagtaaaagtataaagtttatttactccatcagctgagatttgttttcttctacaagtacaatatttaaaaatggcaaatttaaaaacaaactgctccacttgtctaaaatagtaaatatacaaaaaaacttatttgcagattttttaaatgtgagacaattttctgttttctctgagagaatcctaataagatttgtgacattggtctcccactataaaan

SEQ ID NO: 103676 - DNA, 329 bp, Homo sapiens
gattagagcagttcaactccaaactaatctatagattaaacaccatcccagtgaaaatccgggcaaggaaactgagaaagtgtttctaagatctatgtggaaatgcaaaaggagcaagaataatcaaaacagtaaaagaactaagtcatgtgattttcactatctgacttcaagacttactataaagcagccggacaccgtggctcatgcttgtaataccagcactttggaaagccaaaggaggacagaccccctgaggccagcagttcaagaccagcctgaccaacgtggcgaaaccccatctctactaaaaaaaaaaaaaaaaaaag

SEQ ID NO: 103677 - DNA, 390 bp, Homo sapiens
acttcgtctcaaaataataataataataataataataataataataataataataataaataaatagttcagtgcagtttccattgtttcctgatagcatattgtttaggattcctggggccaccataacaaagcaccacaaactgagtgacttaaaacagtagcagtttcttccctcccagttgtggagcccagagtctgaagtcaagaagtcctcagggccacactcctcctcctcctcaggatagaggggagaatccttcctcttctagtttctggtggctcctggcatttcttggcttatggcagtttgactccagtctctgcctgtgtcttcacgtagcctttttcaatgtccctctgtgtctatatccaaatctccgtctcttt

SEQ ID NO: 103678 - DNA, 420 bp, Homo sapiens
tttctcatgtccagaaaagattcttgatatgattttaattcttgtaaattagttgagatttgtgttttttttttttgttggttaaacaggggggctatcctggaaaaggggctgatgaaaaaaatgtttatcctgtagctgttgggggaaaggtcctgcaaaggtctgttaggcccagttggcctaaacctaatgcttctttgcggattttcggcctaaatgatctgtcccctgctgtgacgggttgactgaatccccgccctcccttttgtcccggcaggctttgtgcccttttttttttttagtttttggaaacacaggggggttctgcatcccctgctggtctcgctgaggcatattacaccccctctgggtctcctccctgctgtggaaaattatatccttggggtataaacaacg

SEQ ID NO: 103679 - DNA, 423 bp, Homo sapiens
gttgaggctgcactgagccaagatcatgccactgcactccagcctaggtgacagagtgagaccctgctaagaaaaaaaaaaaaaaaaaaaaaaaaaccgggtgggttgggggaaaaaaaacccagggagggggtaaatgggaaaaaaagggggggtttctcgggggaaaaaaaaaatgggttgtgggtaaaccccccggggggaaaggggggacacaaaaattgtaacccattatctcggcttttaaaaggaggttcttaggaggacccccaaggttagaaatagggccggggtcccaaaaaccaaggggttggaaaaaacctcttcaagaccttgcgccgggggagttttgcccgtgggttaaagatgaggccaaagaaatttggttttgtatacggaaccccccaaacttctttaaagtgg

SEQ ID NO: 103680 - DNA, 408 bp, Homo sapiens
tttttcttggtgctcctaatgtaagtttattcaaattgtggggggggcggtggggggaacaaacaagtaaactgcagttgtaagagaaaaaaggggaaaataaattattttggggttttttattacttggaactttatttattggaggatatagatttaagataattttttgtttggttggttattttatttttatttatttatttggggagatggagtttcgctcttgttgcccgggctgtaatgcaatggcacgtgctcggttcaccacaaccttcccctgcctggtgcaagcggttctcctgcctcaacctccggagagggtggtattacaggcatgcgccggcacccccgtctctactaaatatacaaaaaattatcctagggttttggctagcacctgtgtat

SEQ ID NO: 103681 - DNA, 412 bp, Homo sapiens
  misc_feature (1)...(412): n = a,t,c or g
cctgctgttgcaacttcctatcagagctcctcttgccaggaacaaagcgacagccgtctgctggtgagctgggctaatcctgttaaacaattcacagatctgacgccggacacgctttttgaaacctgagggagtggcacaaacggaatccgcgtggccgacgtgagcctttatttagaataattccagataaacagctctgtgacccggcggagttttgtgcttgctgctcaggctggagtgcagtggcgtgatctcggctcaccgctacttccgcctcccaggttcaagcgattctcctgcctcagcctcctgagtagctggaattacaggtctccacgtgggtttgtcccacaagtaggttctccacaggtccccttaggaactgttctgttgtgacttctgctgaacn

SEQ ID NO: 103682 - DNA, 389 bp, Homo sapiens
  misc_feature (1)...(389): n = a,t,c or g
gtaattctatgcctaatattttgaggaactgccatactattttccacagtggctgcaccattttatattcctacaagcaatacacaagggttccaatttctccacatcctcaccaacacttaactattttctccctctctttttttttaaataatagccatcctaatgggtgtgatttattatttatttttaaaactaaactttattttgtaataattttaaatttacaaagctgtataattttaattaacattattgaaaaatttaaaacactgtgtattgcagaaaaaaaggtaaaagttatgtgaaaagtagagagaatatttgcaaactaatggggcttatatttgtgatatgttaggcagacttactgaccaacagtgggtcan

SEQ ID NO: 103683 - DNA, 393 bp, Homo sapiens
  misc_feature (1)...(393): n = a,t,c or g
gctggtctcgaactcccgatctcaggtgatccgcccacctcggcctcccgaagtgttgggattataggcatgagccactgtgcctggccccattatcatatttttaaccttaaatttttaaagcttctttgaggaagatttattcattacccacgctataacatacaagtcttgtatctcaaaagattttaataaatccttatttaatgaccaaattaattaaaaatccagaaataaattacaatttttctaattattatagttcttccaaaatcttgcttatacagaatcatttcattcatgcaaatttacattggactttatggagatcagaagatcacataaacaccctaacagaaggggaaaataatagatgtctgttaccttgtattn

SEQ ID NO: 103684 - DNA, 407 bp, Homo sapiens
  misc_feature (1)...(407): n = a,t,c or g
aatagatacacaaacttacaagtgtgatttaactaatgagaacacacacacacgactgcatgtgaacctggaggaatctgaatacgaccagtggattgaatggtgttgatatcctggctgtgacatggtactatcacttgcaaaatggtaacactgggggaaacggggcaaaagccacaagggatctctcttattattattttttttttttttgggaacacagtctctttttgtcccccggaatggagtgcattgcaggggcccaatctcggctcgttgaaagctttgcctcccgggtccacccctttctcccacctaagcctcttgagtagctgaaactacaggcgcatgctactgcacctggtttgaaaataatttttttttaaggctgccactacattgctatn

SEQ ID NO: 103685 - DNA, 189 bp, Homo sapiens
cggacgcgtgggggtgcacacctatcatcccagctacttgggaaggctgaggcaggaggatcattttagccaggagttcagggctgcagtagctataatgatgcccctgcacttcagcctgggtgacagagcaagaccctgctcataaaaagattttttaaataaattagaaaaaaaaaaaaaaggggg

SEQ ID NO: 103686 - DNA, 402 bp, Homo sapiens
  misc_feature (1)...(402): n = a,t,c or g
cccacgcgtccgcccacgcgtncggttttattattattaaaacgggtaaattttattccgtagtggacatggttctatgggctttactttgttaattctactactattaaatattttactttaggtgtttgggactttagtcataattcttctattccaatttccttttacacagtcaggagtggttccataaactgaaggtatttaaatccagtatgtcattagattgtagtggattaaagataatttctgatattgagatcacttgaggtcaggagttcaggactagcttggtcaacatggtgaaacttcgtctctactaaaagtacaaaaattagatgggcgtggtggcttgcagctaattccactggaggctgatgcatgagaatcacttgaaccctg

SEQ ID NO: 103687 - DNA, 465 bp, Homo sapiens
  misc_feature (1)...(465): n = a,t,c or g
ggatgcggggnnnnnaaatgaagataaccatgcgcaccgcccgtgaattccggtcgacccacgcgtccgggggattcatgagctgatgagggggatggtgggattcatgagctgaggagggggatggtgggattcatgagctgctgaggagggggatggtgggattcatgagctgctgaggagggggatggtgggattcatgagctgctgaggagggggatggtgggattcatgagctgctgaggaggggcctagggagccgcaccttgtcatgtaccatcaataaagtaccctgtgctccncccnnnaaaaaaaaaaaaaaaaaaaaaaaaaaaaanggggggggggggggaaaaaaaaaaaaggnngggggcccccggcggggagcaaaaaccctttttttttgtcccaaaaaaaaaattttttgtgccccgctccacaccttgaggggggggaggcccgccc

SEQ ID NO: 103688 - DNA, 395 bp, Homo sapiens
cggacgcgtgggcggacgcgtgggcggacgcgtggcggacgcgtgggaaaaaaaaaaaaaaaaaaaaaaaaaaaaaaaaaaaagggggggggtttttttggttcccccgggggaaaaaaaacccctttaaaaaaggggccttttttttttttttttttcccaaaaatttgttaaaggggcctttggggggttttaaaaaaaaccctttttaaaaaaccggcccggggggggcctcttgttttttttttttggtcccaaaagggggtttttattttaacaatttttttttggcaaggggggttttttggggaaaaaggggggaaaaagtttcctggggggggggggggttttccctttccttcggggaggggggcagggggcccccccaaaaaaag

SEQ ID NO: 103689 - DNA, 411 bp, Homo sapiens
tttcgtggatggctgggtcatatggtaattgtatttttatgttttcgaggaagtgtcacagttttccacgggggctggctgttccatctgacattcccaccagcaggccacaagggtttcagtttctccacatcctcgcccaaaacttggcattttcttttttgtttttgtttgatggtagcattgtgatctgcatacactttccactctgatgtttttgtttattgcattttgtttctgtttattgcattttattgcattttattgcatttctgccctcccccatgaggaagtatgtgagctctgtgacaccagcactctcacctgacctattgagtctcacgttccaaagcactggatacatttgttggatgagtctccttcgttcttttgtgaatgaacccccttctg

SEQ ID NO: 103690 - DNA, 404 bp, Homo sapiens
  misc_feature (1)...(404): n = a,t,c or g
tttcgnctttgttttctactaaaatggggttgcatttcttattgagttgtaggagcatctttaaaatattgataaatatatttgagcaaatgttttccccagcttattgcttgtttatgagttcttgcttcagtggtttcaatttttttttttttttttttttggaaagggggtcttattttttcccccaggttggagggggggggcccattttgggttaattgaaaccccccctttcggggttgggccctttttcttgcttaaccctcccggaggggtgggaattgaagccccccccccccgaccccggtttttttttttttttttaagggaaaactggttttccccgggggggccaggagggtctcaatttcctgacctgggaacccccccccctcgccctc

SEQ ID NO: 103691 - DNA, 1829 bp, Homo sapiens
ggtgatctgctggatctccggcagcatcctgcagtccggcccaggagagaagtggggaggcggcggtgggggcggggcggcgtccggctctgagagagctgggggaggagcgcggcggcgacggcggcggtggctctagaaggggaggtggaggatctcctttcctcttctcagacccgggagcgtccgggacgcggagcccggagctggggcgacgaggcgattgcgggggcctgggctagctgctggctaccaatattctactttctgtctctatgaatgtgactaccctggttacctcatataatctccctggaaaaggagacatgaatgtctgcaatgatacttcctgacaagaagttgatacaagaaaaggaaaggagattaacagctagtgagcagaatttcgaacagcaggatttcgtattttttgcttccaactgcacacttccgttgcccacttttaaatcagagatacctacactcaaaacccagacaaggcaaaaggatacttttcttgtatattttttgagatcgaagaaacgacaatgtccaggaaacagaaccagaaggattcatcaggattcatttttgatttgcagtccaataccgtactggcccagggaggagcttttgagaacatgaaagagaagataaatgcggtacgtgcaatagttcctaataagagcaacaatgaaattatcctggttttgcagcactttgataactgtgtggacaaaacagtacaagcattcatggaaggtagtgccagtgaagtactcaaagaatggacagtaacaggcaagaaaaagaacaaaaagaagaaaaacaaaccgaaacctgccgcagaaccaagtaacggcatcccagattccagtaaatcagtttccattcaagaggaacagtctgcgccttcctcagagaaaggtggtatgaatggctaccatgtcaatggtgccatcaatgacactgagtctgtggactcactcagtgaaggtttggagacactttcaatagatgccagagaattggaggatcccgagtctgccatgctagatatgctggatagaacaggatccatgctgcagaatggtgtctctgattttgagaccaagtctttgactatgcactctattcacaattctcaacaacccaggaatgctgccaaatctctctcaagacctaccacagaaactcagttttcaaatatggggatggaagatgttcccctcgccaccagtaaaaaagctaagttccaatatttgaaaaatctgtaaaagacctccagcgctgcacagtgtctcttgcacggtatcgagttgtagttaaagaagagatggatgcctccattaagaaaatgaaacaagcctttgctgaattggagacgctgattaatggatcgagaaagtgggcgttgcttgctgaaatggacaaagtgaaagctgaagcaatggaatttttgctcagccgacaaaagaaggctgaacttctaaagaagatgactcatgtggctgttcaaatgtcagagcagcaattggttgagctcagagctgatatcaagcactttgttagtgaacgtaaatatgatgaggatctgggacgagtagcccggttcacctgtgatgtagagaccctaaagaagagcattgattcatttggacaagtgtctcatccaaagaacagctattcgaccagatcccgatgtagctcagttacatctgtgtccttgagtagaccaagtgatgcctctgctgcttcctcttccacctgtgcctctccacccagccatacaagtgctaacaagaaaaactttgcaccgggagtgtatt

SEQ ID NO: 103692 - DNA, 404 bp, Homo sapiens
tttcgtgagagactgaagcacgagaatggcttgagctttggaggtggaggttgtagtgagctgggatcctgtcactgcactccaacctaggtgacagggcaagactgtgtcccaaaccaaaaaaaaaaaaaaaaaaaaattttgggaaaaattcaaggcgggaaataaaaatttttttttttttggagaaaaaaaaaaagttgaatttttaatcccccaaaacctaaaggggttaagggaaaatccttttttttctaaaatgggagggtcggcctttccattgttaggtaaaaaaaaacaagtttttattttttggcccccaatatttggaaataatttttgaaaacaaattccccaaaggttaatacggaaaaattttttggaggagtttccagggaccacta

SEQ ID NO: 103693 - DNA, 420 bp, Homo sapiens
  misc_feature (1)...(420): n = a,t,c or g
tttcgtgtcttgtctggctctttacttgaataaacaaatgaaatttttgagataatcatgaaagtttgaaccctgactagatatttgataacagnncaatttaaccattgattatctgaagatattattgctaattattttaccttagggtaacagcatcaacctttaaggccttatctttttcataatgaagcatgtatggatgaaaatatgtgtctgggatttgtttcaaaataataaagactacccatgtaaaaagtcattgaactgcatacaggccgggtgcggtgggccagcacgttggaaggccaaggcgggtggattgcctgagctcaggaattggagaccagcctgagcaacatggcgaaccccatctctactaaaaaaatgcanaaagcagccaggcgtggtggtgcatgc

SEQ ID NO: 103694 - DNA, 439 bp, Homo sapiens
agcccttgtaacatcttaatgcaacacattagttgtgtgcttgtggtggtgtcagtgtaaacaaacctactgcgttgccagttatttaaaagtataccacataccacagtatgccacattatcaagtacataatcctagataataacaataaacaactgttactagtttatgcatttactatactatttattattattttagactactttctacacatgcatacacacatatttatacacacatatatgtataaaagttaactataaaacagccacaggcaggtccttcagaaggattctagaagaaggaattttaatagaggagatgggggtgggcacggtggctcacacctgtaatcccagcactttgagatgtcaaggtgggtggatgacctgaggtcaggagttcgagaccagcctggccaacatggtgaaactt

SEQ ID NO: 103695 - DNA, 425 bp, Homo sapiens
  misc_feature (1)...(425): n = a,t,c or g
gaacacgtgaaaaagaagcataaatattgaaattagcattattcatgaagaatgagaactaataaggaacttaaattaggcacaggcaaaatgtaaattaaatatacaaaagtgctgggattgtagatgtgagccactgcgtccagcctacttgcttaatttttaaacattctaaagattgtttgtttgttttttgagatagggtcctgctctgtctcccagactggaatgcagtggtgtgatcatggctcactgcagcctctacctcctgagctcaggccatcctcccaattagctgagatcacaagcaagcaccaccagctagttttgtagggacggggtttcgccatgttgccagggctggtctggaactcctgggctcaagtgatccacccacctcggcctcccaaggtggctagattacn

SEQ ID NO: 103696 - DNA, 357 bp, Homo sapiens
cccccttatcagatacatgatttgcaaatattttcttccattctgtgagttgccttttcattctgttgataatatttgatgcataaaagtgtttaattttgatgtttaatctattttttcttttattgcctatgcttttggtgacaatattagctttttaaagtacagtgctttcagtgtgtttaaatttggagtgggagggcatttgtaattttatttttgtggcattacaatcatttcttactatataatctgtttagtgcctcagtttgtggagcaagggctaccacatgatttggattttatttggatcctgagtttcatagatcaagtagtgagtttagatacttactgagg

SEQ ID NO: 103697 - DNA, 410 bp, Homo sapiens
  misc_feature (1)...(410): n = a,t,c or g
ttgcccaggctggtctcgaactcctggtctcaagtgatccacccgcctctgcctcccaaagtgctgggattgcaggtgtgagccaccgtgcctggcacccccctttcttatttgctggtgaactggtggtaaactgtgccacagattaaaaaaaaaaaaaaaaacccctggaaattcttttttttctgctacttaagcgggttcataaatcaaacttctaaaaaagggttttgccaggcaagttaaccgggaagggtttttcccgtggggaacccttcttccccctttgctttggggtttaaggtttgtggctgaaacggaactttggttgggccagggctcctcccccaggatgcccggggagaggccccgggggagggccttattttgggggcttaggaatcccagan

SEQ ID NO: 103698 - DNA, 422 bp, Homo sapiens
tgggtgcagcgcaccaacatggcacatgtatacatatgtaactaacctgcacaatgtgcacatgtacgctaaaacttagagtataataacaaaaaagaaaacatttaaaaaaaaaataaaaaaaaattaaaaaaaaaaacaaaaatcatatgatcattttcaatagatgcagaataagcattcgataaaatccagcatcgttttatgataaaaaccctcaacaaactaggcccagaaggaaaacacatcaaataatgaaagccatatatggaagagggggacaagatggccaactacacacagccaagaagggccactcccactgagagagaacaaaatatcaggtaaaccaaaattacttgagcggatcttcagagagaaaatacttattggatggtgagatgatgcagattctaaaaaag

SEQ ID NO: 103699 - DNA, 418 bp, Homo sapiens
tctctctccagctgagttctttcagaaccatgcccatagtttatattcattcataagtattttgttttcctcactaatactccttttacctcagatgataaaccctcgtgtgtgtgtgtgtgtgtgtgtgtgtatgtgtatgtgtctccctttctgtgtttctgtctctgtctctctgtttgtctcaggcaggagtgcagtggtgtgatcatagctcactgcagcctcgaccttctgggctcaggtgattctcccaccatagcttctgtagtaggtggtattacaggtgtacactgccacatctggcctactttttatttcctattcctcataagattgaaaagcctgatgctgtaataaaccagtagtgaaatggccttgactaagatgggagtccattcacatggtctgtttaatt

SEQ ID NO: 103700 - DNA, 402 bp, Homo sapiens
caacctctgctatcttcacacttctcttatgcagcttcctcacttctctcagcctttatagaattgaagagagttaggctcttgttctggattaggatttggtttaagggaatattatggctggtttgatcttctgtcttgatactaaaactttctgcatattcgtatgttcactggagtaggattttaaatttcccttcagaactttttctttgcattcacaacctggctaactggcataagaggcctagctttaggcctatcttggctttcaacatgcctttctcactaagcttaatcatttctagtttttgatttgaagtaagagacatgtgactcttttcagttgaacacttagagggcattgtagcattattgacctaattttaatagtgtcccaag

SEQ ID NO: 103701 - DNA, 427 bp, Homo sapiens
  misc_feature (1)...(427): n = a,t,c or g
aacagaatacaaaaaagtttattaatgaggtttatattccacattgcaactaatctttaagaaaataccatttatcaagttcagtgtagtatcaaagaggaatatttacaaagaagaacattaaaatatgcctcacttttccaaaaacatatctgcgggagtctggcttttcttcatttactttaaccaaaactatatcacagcagatcaaatgcagaatcagattggataatccagctgttttctgttcaaccaaatgttaaagagatttcaaaacataaaataggctggtgacgaggtcacgcctgtaatnccaacactttgagaggccgaggcacaaagatcatctgaggttaggagtacgagaccacccttgccagcatggcgaaactccatctctattgtctctactaaaaatacacatatt

SEQ ID NO: 103702 - DNA, 400 bp, Homo sapiens
aacagtgcaataagatgttgagagagagaaaccacattcacatcacttttattacagtatattgtaataaaatgtactgggcaaggaggcaaggtctgtgggatgggaggcggtaaggggccaaattagtagagtatccattcaaatgaagtggaaaggattgatcaaaggagaaaaattgaagatggagaagagtcaagcttgtatctgcatttatttttttttttttgagacagagactaattttattgcccaggcaggagggcaggggcatgatctcggttttatggaacctccatctcccgggttaaagcgattcccctgcgtaagccccccatgaacaaaatggattaaaggcatgcaccacaacccccgggtaatttttgtagagacggggatg

SEQ ID NO: 103703 - DNA, 387 bp, Homo sapiens
tttcactgtgttggctttgatggtctttaactcctgacctcgggtgatccacccgccttggcctcccaaaatgctgggattacaggcatgagccaccacgcctggccgagagtttgattttatagcattagggttttaaagctaggttttaaaggtaggtcactggccagtttttatttcaatatatagtaggtaaacatacaggtctaaaatgatctaacaattccttaaaagtaaggctttgaaggttgcatttataaaagagacttaaatagctcttttgctctttagtgggatatgacaaaaatgatgtgtggcatttggagcctgaatgggaaccccagctcttctttttgcttcatttcctcattttggagaattgagtcg

SEQ ID NO: 103704 - DNA, 407 bp, Homo sapiens
  misc_feature (1)...(407): n = a,t,c or g
tgtttttgtgtggatgtttatttttaaatttcttgggtatatacctaggagctgaatgtatgagacatatggtaattttatgttaaacattttggggaactgctagattgttttccagagtggctacattattttataatcccaccaataatggttgaggatttcagtttctccatgtccttaccaaaaattgtcatggtctgtattgctgtagccatcttgggtttctaaagattgagcattctgctgggtttgtcatgagccatgttgcttgcacatctcatgaggtgtgcgccacaccttctttccctccatcacagtgccgtggctctaaaagttttctgtgtgaattcagacaggggatggctttcaggtactctgtgcagntaaccggggtctgctgacag

SEQ ID NO: 103705 - DNA, 395 bp, Homo sapiens
  misc_feature (1)...(395): n = a,t,c or g
aattttttgtatttttagtagagaccaggtttcaacgtgttagccaggatttcaacgtgttagccaggatggtctcgatcttctgacctcatgatctgcccacctcggcctcccaaagtgctgggattacaggcatgagccactgcgcccggctgggatctactcttatcctgcagttcttttcgttctctctacttacagggcttcaaacattacctgaatgctgatgactcccaaacctacctctggtttattcctttcttctgagcttcagattctccagcttcagctacctgagggacatctctgcctatatgtctcttagctgcctcaagcttaatgtgttcaaatccaaacccatcatcttccttagccctctttggctgctggtttcn

SEQ ID NO: 103706 - DNA, 397 bp, Homo sapiens
acgttctgatgcatgaatgtagtatctctccatttattttagatctgtaatttctttcagctgagttttgtaggtttcagttgacatgtctttcccatcttttgtcagattattccgtttcatatttcttgacgttattgtaaatggtatcattacataaatgtaattttttaaaatttaaattcacaattgtttgttgccagcatataaaaatacggatgattttttaaaaattgtttaattgtggtaaaatacacatagcaaagaagttaccatcttaaccattcttaagtgtagacttcagtagtgtaagtatattcacattgttctgcagccaatttccagaacttcttctttcaaaacaaattctatacccatgaaacaacaactttccatt

SEQ ID NO: 103707 - DNA, 386 bp, Homo sapiens
caaactcctgacctcgaagtgatccacctgccttggccacccagattgctgggattataggcgtgagccaccatgcctggcctggttcttttttctgggctaaaaagtgcctgtgtgggccacgtgcggtgtaaaaatgcacagattggccggacatgggggctggcgcctgtggacccggctaccctggaggctgaggcgtgataatcgcttgagctccggaagcagaggtgcaggcagctgagattttgccactttgccactgcactccaacctgggtgaccgagcatgactccatcacatataaatattagaaaaaaggggcgccctgttggagggcttctagttaatgcacgctgtctggccacgccttatttttttttgcg

SEQ ID NO: 103708 - DNA, 402 bp, Homo sapiens
  misc_feature (1)...(402): n = a,t,c or g
caccatgttggttgggctggtctcgaggtgctgacctcgtgatctacccgcctcggcctcccggggtgctgggattacaggcgtgagccgccatgcccgcccctattttttctttcattacacaagttaagaatggataattatactaaaaataaggtagaaataccatgttcggtgttgctaaaattaaaaagtgaacattaggctatacctgataccaactttggatttcaaaggttaattttacattttatttttgccccttctgggagcctttcagctctgcctgtgagtgctcctaattctctgcctctctcaatgctggnttgagtggaagaatttctctctgctgctacacttctttcttcttctccttctccttcttcttcttccttttttttt

SEQ ID NO: 103709 - DNA, 386 bp, Homo sapiens
cagctgtggtggcatatgcctgttgtcccagttactcaggaggctgaggtggggggatcgcctgggcctggaaggtggaagctgcggtgagccgagactgagccactgcagttagcctgggcaacagagtgagaccctgtctgaaaaaaaagaaaagaaatgcaaatcaaaatcattaaattcataaaaatttggccatcacttctttttttttttttttttttttaaaaaggaaatttttttttttccccccgccttgaaggcaagggggcctttttggtttaacggaaactcctttttccgggttaaggggtgtttccttttttaacctttttatatggggggattaagggggggccccccccccccaggttttttttgttttt

SEQ ID NO: 103710 - DNA, 479 bp, Homo sapiens
  misc_feature (1)...(479): n = a,t,c or g
cgcgagccccagatagagaccntattnggagagcagtaattcaaaagaaagaatacccacagaaaggggaggcatgaacagaggatgaatcctcacaattttttggtgatatatgacactatcaggtatattccttttttttcaaaacttggaaataagagatcagggtgtcaaatgtcctccttagttttacaaaataaattagcaagaaaattgaaaaaatatgtatcaatttatattctgaactagctctctttacagaaaaattcaaaaaaggtttctatatatgcttgctctagaagtgctgaagatatgtaatacatattttatgaatactgaaagatttcccttgaaattgtttggacaattttcattagaattatctcaatttaattttttccatttttatttccaaagatttatcattattttttaagagacagggtctagctctgtcacccaggctggagtgcagtggg

SEQ ID NO: 103711 - DNA, 470 bp, Homo sapiens
  misc_feature (1)...(470): n = a,t,c or g
gtggccgnaaactgaacctagctanctncgnaanngncgnggaannnggntaatttttgtatttgtattggggacagggnnnaagatgttggccggggtggtctcaagctcctgacctcgggtgatccacccgcctcggcctcccaaagtgctgggattcactcacaggcgtgagccaccacacccagccaaaagacagaattttaacaaatttggttaaagatcgaattggcttttatttgtgattcatgaatctgggcagcctccactctgcaaaacggaatgagagctcccacggggcaaatggtagaatagtggtttttgtaagatagagaaaaggctaattagttaacactaggttacttttcttgtaaggattaaagcagaggggacttccttattatgctgctcaggtagactggaaatctggtttgtttagggatctacctgcttaaagtatcagtctgatt

SEQ ID NO: 103712 - DNA, 423 bp, Homo sapiens
ctggaatgcattcagcaggaaaagctaaaagaacaggactccaggagataagccaaggccaagtctatcagagggtgagccagcagcgggaaggggaccagcccttcccctagcgttttttctgcccgctccagaatccgctttagaaactgttaaatgcagaaagtggggcctccaccacccgcgatgctgccccaggtctagcagaagacaggtgtaaggccaggcgggtgcggtggctcatgcctgtaatcctaatgctttgggaaggccgagacgggaggatagcctgaggccaggagttggagaccagcctgggcaacatagcaagaccccatctctacaaaaagtgataatttttaaaaaatgggctggctgggcccctgggcatggtggctcacgcctataatcccagcactttgg

SEQ ID NO: 103713 - DNA, 390 bp, Homo sapiens
cccacgcgtccggtgttagggttctttgtttttggggtttggcagagatgtgtttaattgctgtggccataagcggggggaggttgggctttgacaaacactgttataaacccaactgccaccatccacgccattcacaccatgcctctcctattcctgcacaatctcaactgcatcagcatttagatttccaggactctacctccactgctgtattaacccatgtccgtatcctcaaaagtactcctgatgcccctcacccacccctgaaaatcccacgcgcgcgaaggaatattcagagggatcacactctttcatctaacttattctactacaatcatcagctgaatgtaactgaggaactaacctactacgacctcacctagattt

SEQ ID NO: 103714 - DNA, 403 bp, Homo sapiens
gcaggaggatcgcttgagcccagcagttggagaccagcctgggcaacagcaagaccctgtgtctattaaaaaaaaaaaaaaaaaaaagggcccgggggggttttaacaaagggccctttggaaagcgggggggaaaaataatttttaaaaccgggaaaaaaggggaattttggaatagggccagtggggggggaacccccagggattttaacatttaaaaaaactatggcctttaaaaagaaaaaaaattgggtggtcctatggatggagggatggaaggagggaaaaaaagggcctccctttgtgccccgggggggagggcaggggcccaaattgggttaacccaccctttggcctccaaggttaaggaaattttccggcctaaaccttcggggaagggggg

SEQ ID NO: 103715 - DNA, 443 bp, Homo sapiens
tttgaaggagagaggccttgggagaaaccaaccctgcagacaccgtgctctgggacttccagcctgcagatatgtgagaaaatacatttcttgttgcaacaccccatccatggttcctgcttgtggaagctctagcaaagaaaaacacctgctatgtgtgcacacacatgttgttctcagtgctcttgggtaagaacctgggagtgggagtgctggctcatatgataagtacatgctcagcatctgaagctttgccaaactgctcgccaatgtggcatcatctttcatccccatgagcaatggatgagacttccagttctccaaactcttcaccaacacttgatattgatcacctttttttatttatattttttagaggcagggtcttgctatgttgcccatagtggtctcaaactcctggcctcaaaggatcctcctgcctt

SEQ ID NO: 103716 - DNA, 485 bp, Homo sapiens
  misc_feature (1)...(485): n = a,t,c or g
aggttagggggggttcgaaaaccnttcngatanccctagtccagtgtgcgtggaattcctgagggaggagggatcactggaggccaggagtttgagaccagcctgggcagcatagtgagacctcatctctacaaaaattanaaaaaaaaaaaaaaaaaaaaaagggggggggggaacccacctggggccccatttccttaaaaaactgaggcaggaggatcttttgaccccaaaaaaatgaaaatttcatggagccggaattaccttaattggctgggcgctttgggaaaaaaaaaaaaaacttttttaaaaaaactaaaaataataaagggtnagggccagtttgattaggttaaatgttggcccaaggcaaaaaaaaaaccccaattaaaacatttttaattaaaaaaagaactttggactctttttttatttgggaaaaaaaaaaaaaattgcctgccttgccagcctaaaaaatttgtaag

SEQ ID NO: 103717 - DNA, 454 bp, Homo sapiens
cgtgcggtggaattcccaggagaggggcttctggaagccagagagggcgtgcacacacaggcgggggagggagcctgggtgcagcagggtgggccactgcgactcaccgagggccagcggcgctggggccaggggctggagtttggagagtgagcagagagcacgcaggggctgtgaacaccaacttctctttcaggtcaatttgctgcaaaggggaaggtaaaggtggaggtaactaaggagcagggcaagagaggggtgtggttttctgtagggtccagccctacgggggcttagcaggtgtcctccccgtgtgcagagaccagagattgtaataaagacacgagataaagagcagctgggccccgggggaccactaccatcaagacgtggagaccggtagtggccctgagcgcctaggtgcgctgatatttattgcatacaaaacaagggg

SEQ ID NO: 103718 - DNA, 476 bp, Homo sapiens
  misc_feature (1)...(476): n = a,t,c or g
ttggaagcctcgagatccctagtccangtggnnaaattcgcgctcctcacttcccagacgaggcggccgggcagaggcgctcctcacttcccagaggaggtggccgggcagaggcgcccctcaatttgttttttcttaatgccttatacggtcttcaattaattcagtacacaacaacatatatattcattctactcctgacagacatttaggttgtttccaatttttggtcgtcaccaagaatgctgctgtaagccgtcttgcatatgtcttttagtgaatatagatacccacatacgatcacatacacacacacacacctgctgggtacatacctaggcatggaattgctggatcacagcttacaaatatattcaactttagcagctagttatcatcaaatagctttccaagttggctgcacctcatatttccttttcccctctcatatttaattaccagnggaaaaagccaaa

SEQ ID NO: 103719 - DNA, 484 bp, Homo sapiens
  misc_feature (1)...(484): n = a,t,c or g
gaaacaaaattggaaaccccnntttgtagatccctantccatgnnnnnnaattccagagcagctgcttgagctccgtgggggccattgtgtggcccttggggtgtcctgccctgggggcggctgcagggccgcttgtgtccctgggtgttgctgcctgctgtgcggccttcccagtgatgtttgtgtgtgtgtgtgtgttgggggggttccatgggaagcaggctggggggctgggctgctccgggtttctgaggcaacagcagggaggggccaggaaactgcagctcaggaaggaaggccggccttgcaggagggggcctggggccagcttgggctgagcaggcgccagacattctgtgctgcggccccggcccccactggctgggagctcctgcccaagttccgctggccccacccttgtctccacctccatgcttgtatggctgcctttattcagaccgtggtgacttgngcttgggtctg

SEQ ID NO: 103720 - DNA, 418 bp, Homo sapiens
tttcattctgcatttgggcatgactcgtataggtataaagcaagagctaatatcttccagactgttcattaaaaattcaaagtatgggctggttaataagcactacttacagtatgagtattaaaaaatttccagaccaggcatggtggctcatgcttctgtagtccaggtgctttgggaggctgaggtgagaggatcgcctgatccaggagcttttgagtttacagtgagctacgtttacaccattgtactccagcctgggcagtagagcaagactgtctcaaaaaaaaaaaaaaaaggggcggccgttttaaaggatcaaagtttacctccgcgggcatgcaaggaaatagtttttttatggggccccctaaattaatttcactggccgcggtttaaaaacgcgggaaggtgaaaa

SEQ ID NO: 103721 - DNA, 392 bp, Homo sapiens
aaaataataataataaaaattagctctgtttggtggtgtgtgcctatagtcctaggtacttgggaggctgaggagaggatcgcttgagcccaggagtttgaagttacagtgagctataatcatgccactgcagtccagcctgggcaacacagcaaggctatgttgtttcaaaaatacatatactagactggagatgaggtaaagtgtccatgaatgtgaaattaggtcagtggaaattattcagtctggagaacagacagaaaagagatgggggacaaaaaaatatatccttaggggtctatgggacaattttttttttcaacctgacatttgtgtcattgaagtcccaaaaggaagggaaaaaactaaaaaaaaaaaaaatataaaaaaaa

SEQ ID NO: 103722 - DNA, 403 bp, Homo sapiens
  misc_feature (1)...(403): n = a,t,c or g
aatacttgggagactgaggtgggagaattgcatgacccttggagattgaggctgcagagagctatgattgtgccgctgcattccagcctagggacagagcaaaatcctgtctcattaagaaaaaaaaaaaaaagggggggccttttaaaagaaacaatgtttaccaccccggcattgaaagtgatatttttttatatggggacccaaaatacttgtgacacgcccgaaattaaacgcgattcggtagggaaaaacccggggcttcccaacttaattcgcccgggggaannnnannnagcaaaacatcttaatattatttttagtttggagtgtttgtagaatatttaaataaacattaaaaaattcctaagggaagggacagggggaaaactaatacaaacaa

SEQ ID NO: 103723 - DNA, 389 bp, Homo sapiens
  misc_feature (1)...(389): n = a,t,c or g
cccacgcgtccggcttgaacctgggaggcagaggttgcagtgagctgagatcatgccactgccccacagcctgggcaatagagcaagactctgtctcanaaaaaaaaaaaaaaagaaaaggaaagggtttttttttttacaacccccgggtcaaaaaaggaattggcctaattcggtcaaggcgggggaaaccaaaggcctaaaacggggaaattaaaaaacaacaaaaatttattttttacagtttgggaggctgaaaagcccaaaataaaggggctggcaagtttgatgtcgggggagggcctattcttaaaaaacggaagttttttgttgggtcctcacacaggggaaggagctagtaaactttttgaagcttttttaataaggga

SEQ ID NO: 103724 - DNA, 411 bp, Homo sapiens
cccacgcgtccgtgcatatgcaagtctgtgtgtggacatacacattcatttcctatggataaatacctaggagtggaagggttggattgcacagtagatgcatgtttaactttaaaagaaactgccaaattattttccaagtggttgtatcattttatatcccagcagccgagcatctgagtctcagttcttccacatccttgccaacacttgagatagtcattcttttaatcttaaccattctagtggatgtgtatttgtttatgattttagtttgcatttctctaacaagtaatgattttgagctttttttttttttgccataaaaaaacctttttgggggaaccatcggtcaaaatttttaaccggtttttcacggggttattggtttaattaagtagaaggggtttg

SEQ ID NO: 103725 - DNA, 352 bp, Homo sapiens
  misc_feature (1)...(352): n = a,t,c or g
aacaaaggaccttaatagaaatttctcaatagaagacatacagatgagccaccacacctggctaatatttatatttttggtagcgacgggagttcaagactggcctagccacatggcaaaacctcgtctctactaaaaaatacaaaaccacagtgaggtatcatctcacatctactagaatggatattatcaaaggcaaaaggtaacaagtgtgttgggaaaatgtgagataaagggaccctcttagactgttgatgagaatgttagtacaaccaatatggaaaatagtatgagtatggaagttctgcagaaaataaaaactgaaccttttttttcccccccccccccaaan

SEQ ID NO: 103726 - DNA, 377 bp, Homo sapiens
cttgctctgtcacccagtgcagtgataactattatggctcgctgcggcttcgaactcctggactcaagtgatcttcccgcctcatcctcctgtgtagctgggaccgcaggggcgcaccaccatgcccggccaacttattttttgtagagacagggtctcaccatgttgcccaggttgaattagaactactgcattcaacctcccttcttgttttatcttacccaggtgctgggatttttccctgagtattctttcttctggaactacaacacatttttattctgtatcacccgctcggcctcgtctctttttctttcaaattttaaaagccacctgagctttttatttttttcttcaaaaaaattttattcatcttt

SEQ ID NO: 103727 - DNA, 386 bp, Homo sapiens
acacattcaagaaaagcagctgccaaataaagactccacattaaatccttatttcctgctaatctccattttaaaaagaaaagacgagaaaatacaaatgcccagtaaacatatgaaaagatgttcaacatcactagtaattagagaaatgcaaattaaaataagaagtcacttcccccattaagttgggaaaatattaaagtctgcaaatatcaagcgttggtaaatgtgtaggaaaaggggaaactctcattacctgctggtgaacatataagtgaacatataagttggtaaagacattctagaggataatcttacagcatccacttcttaaaacacaccaatcttattacccagcgattccacatctcaaagaaacacaagca

SEQ ID NO: 103728 - DNA, 395 bp, Homo sapiens
agttttggtaagtttcccaggctggttttgaactcctggcctcaagcattccttctgcctcggcctcccaaagtgctgggattataggtgtgagccacagaacccagcctatgccctatttgaatagggaaacctgctttatggtgtgatagcctgtggaaagggactgcagtttaagtgatgattggtgtgaaggatagtgagactttcatgataactcctagttcattttcctgattttggctgcttctgctgaaactccaagtgtatctctggcccatgttattttaaaaggcaagcttctagagaggtgaacatggggagaacatggaaacaacaacaaaaaaagctgagctgctcctggctaacatggtgaaaccccgtctctactaaaa

SEQ ID NO: 103729 - DNA, 431 bp, Homo sapiens
  misc_feature (1)...(431): n = a,t,c or g
nnnnccggacgcgtgggataattttaccacctcactccagcctggctgacagagggagaccctgtcactttaaaaaataaaataaaataaagtaaacctgccattttacaggatacagtgatagtgcatggtctgatcccttgccctattcattttaagtgccacattctctattaactccccagggcctgtgagcatccactccttgagggaggtgtccatagcatggtgtagagagcataattttgtaccttatatagttaagtcatttattccatgtagccctgatttgattaggccttgtttggtttttgtttttgttttttttgagacagggtctctgcccaggctggaatgcagtggcgtgatcacggcccactgcagccttgaccttctgggcttaagcggtcttcccacctcagccttctgaa

SEQ ID NO: 103730 - DNA, 415 bp, Homo sapiens
tacaggtgtgagctactgcccctggccagctttatctttttatttggtgttcttttttttttttttttttttttaaaaaaaagaaattttgttttccccccggggggggggggcgggaaaaaattttggtttaggggaaccccccccccccggggtcaaaaaaattttctggtttaacccccggggggggggggcttaaaaaggggggggccccccccccgggggcaaaaaaaggggggaaaccccctttttacaaaaaaaaaaaaaaaaaatggggggggggggggggccccggggattcttatttttggggggggggggggaaaaaaattttttaaacccggggggggggggcccgcttgaaccaaaaacccattattggccttcgcccgggtaaaaaaaaggaaaatttttt

SEQ ID NO: 103731 - DNA, 424 bp, Homo sapiens
atttccttaaatttttttccgactcacatatgaaattttcattttggcagtgatgtttttaatttccaagagctagttctccgattccttttcgaggaaggttgttgttttatgggtacaatagtgtcttaaaatctcttaatgatattaatcagaatttaagttctcgtctctctgctatgttgtcttcacttaatctggatttagtttttttctttgtttatgcagacctttcacattcatatcagattttatttttttttggcagggggcgggggggcgggggtggacagagtctcactttgtcgcccagactggagtgcagggacacaatatcagttcactgctacatccacctcccaggttcaaaacagttctcctgcctcagccttctgagtaactgaaattacaggcacgcgccact

SEQ ID NO: 103732 - DNA, 297 bp, Homo sapiens
cccacgcgttcgcctcaggtaagtaatctgaatcacaaatcctttatctctttttatttatttattgatcttctatctgtctgtctgtctgtctctgtctattttgagacaagtctcactctgttgcccaggctggagtgcagtggtgcaatcacaactcacctcagcctcctgagtagctagggccacaggcatgcaccaccatgccaggtaattttttgtagagacaaggtttcacaatgtttcccagtctggtatcgaactcctgagctcaagccatctacctaccccagcctc

SEQ ID NO: 103733 - DNA, 488 bp, Homo sapiens
  misc_feature (1)...(488): n = a,t,c or g
agggtctccnnnaatagannncccctagatnnccntnnnnnnatcccnnnactaattgcagggtcgaccgcacgcgttcggtctcatgtaaaggatgccattttctaagggtataaaagtaattgatgatgggatacaagctgtattgatgtaggtgccaatcatctgatagtccctgtattagtccgggttccctagagggacagaactaataggagctgtgtgtgtgtgtgtgtgtgtgtgtgcgtgcgtgtgtgtgtgtataaaattaggatatatataaaaccacaagaggatatatatataattactatatatatatagcacttactatatttttaatctatctttatagctaagtgtttatttcttatgtaaaccgaaacagtatgtgagacaggtctcagtcaatttaaatatttattttgccaaagttaaagacatgcctggaaaacacacacacacttaaaaacacacacgagggtggg

SEQ ID NO: 103734 - DNA, 283 bp, Homo sapiens
ttttgcccatccagagaatttaaatgttcttctgagggcagagtaaatgcatattggggactatccctaatgaatgaaaattggctttggcttcctaatggaaaagaaggcatgagccaaatctagtacagaatactgatctctctgagcttgcagcacagctttagttgttgatgccatatcagatatagctgatcaaatggggtgacaccaatttatcaagtcttccgtaatctatagttaatttaccagatccatcagcttttcttccaggccatcctag

SEQ ID NO: 103735 - DNA, 380 bp, Homo sapiens
attggagctaagttatactaacgtcaaaaaatgaaatagggagtattcctctgtgatctcttctctgaaacactttatgttagagtgaaatcgtgtgttccttgaaagtttgttaaaactcaccagtaaagccaccttaacctaatgttttctttgggataatttttttttttttatttttactgaaaagacagggtcttgctccattgcccaggctggggctggcacccaggggtgggaataatatcttactgcagcctcaaacttatgggctcaagggatcctcccacctcactctcctgtgtagctgggaccacaggcatgccccaccatgcacaggtaatttatttttttatttttttgtaaagacagggtctcgt

SEQ ID NO: 103736 - DNA, 379 bp, Homo sapiens
  misc_feature (1)...(379): n = a,t,c or g
cttctctcagccttcttggaattgaagagagttaagcatttgctctggggtaggctttgacttaagggaatgttgtggccagtttgatctatcaaggtcacttaaactttctccatttcagcgataaggcagtttcgttttcttatcatggtgtgttcactggagtggcacttttaatttccttcaagaactcttcctttgcattctcaacttgactctttggcacaagagtcctagctttcagcctgtcttggctttcagcatgcctttgatttaaagtgagtgatgagggagtaaatggctcgtgcctgtaatcccagcactttgggaagccaaggcaggcagcggatcacttgaggtcaggagtttgtgaccggcn

SEQ ID NO: 103737 - DNA, 412 bp, Homo sapiens
cggacgcgtgggatcgcttgaacctgagaggcggaggtggcagtgagccgagatggtgccactgcactccaaccagggtgatagcatgagactccgtctcaaaaaaaaaaaaaaaaaaaaagaaaaaaaaaaaaaagggaatgccccccgggatttaaaaacaaaacggcccaacgggggaaaaggctgtttttattaaaaaaccaaaaaaatttacccacccgggggggcaaagccttgaaaaaccatttcttgggggggttggggaagaaaaatcttttaaccttaaaagggggggggggaagaaacccaaaagggcccccttgccttccacccgggggaaaagaaaaaaaccccgtttaaaaaaaaaaaaaaaaaaaaggggggccccttttaaaaaacccccctttcc

SEQ ID NO: 103738 - DNA, 412 bp, Homo sapiens
ttgcagtgagctaagatcgcgccactttactccagcctgagcgacagagcgagactctgtctcaaaaaaaaaaaaaaaagagggggggggggggaaaaattttgggaaaacctgggcctaaaccccaatagtttaagttttttcccgggggttggcaaaaaaggggaaaaaaaggggccggccttgaggtaaaaaaatatttccccgggaattggatttttaaggggggggggggttaacctgggggaaagctttttttacctgggtttcttagaaaaaaagggggaaaaaggggggtcccccccctttcccgggaaaaaaagaaaaggggtctttacttaaaaacaaaatccaaaaaaatttttttttgttggcctggagtaacccaaaaatgggccaaaccctaagggaa

SEQ ID NO: 103739 - DNA, 432 bp, Homo sapiens
  misc_feature (1)...(432): n = a,t,c or g
tcagcatgtgaccctgtccctatttcccttcccccgcccccccccccttaaaaaaaaggccggacgcgggggctcacctttgtattcccaccattttgagggccgaggctaactgatcacctgaggtcaggagttccaaaccaccctggccaacatggggaaacctcctttttattaatcccaattactcgggaggctgaggcaggaaaatcgcaaatcgcttgaacccaaaagggggaggttgcagtgagccaaaatcatgccactgcactccatcctgggggaaaaagcgaaactttgtcccnaaaaaaaaaaaaaaaaaaagggaagggggccctccctgtttttttttttggaaaaagcccccccctccttgggggaaaaaaccccccccaaaatttttttgggggttttgtaaaaaattttttatat

SEQ ID NO: 103740 - DNA, 417 bp, Homo sapiens
cggacgcgtgggtggaattcaaatccaagagcatctgactccagagggaattgcattttctttctttctctttttttttttttggaaagggggattccctttgtacccaaaggggggggcagggggtaaataagggttggcggcacccttggttgggggggtaaaagaaaccccccgccctaaccctttggataaggggaaaaaacgggttggggcccccaccccgggaaaatttttttaaaaaaaaaacttcttttttttttttttttttaaaaagggggtttgtctttccccccaggggggagggaaagggcccatttttggttaaaaaaaacccccccctcccggaaaaaagaaattctccccccccctcccccaagaagggggggggggggcccccccccccccccttttttg

SEQ ID NO: 103741 - DNA, 412 bp, Homo sapiens
cccagctacttgggaggctgtggcacaagaattgcttggacccaggaggcggaggctacagtgagctgagattgtgccactgcacttcagcctgggcaatagagcgaggctttgtctcaagaaaaaaagaaaggtctaccttctagagactggacgttatatgtcatcggctttttttcttaagggcggcctcttaaagatatttcaggagcagtgcagtgttgggtgactgaagctcctccaagatatttggggctcttgcaagagtgaggtgatagagcagtgaatggggttgggggctggccagagggaacagcttgctccctgtggagctgtacattctcaggctgtggagtaaattacagaaacactgtggcacttcttgtaaaattggaaatgcaagtcagatggt

SEQ ID NO: 103742 - DNA, 396 bp, Homo sapiens
  misc_feature (1)...(396): n = a,t,c or g
gcgagcctctataccattttccataatggctgtacgaatttacattcccaccaacagtgtacaaggttcccttttctccactccagctttctcaattaaagacgatttatacaactgaaaaaaaaaaaaaaaaaaaaaaaaaaaaagggggggagatttaaaaaaaaaaaanttaaggttccttggggggcgggccaaaacttttttttagggggcctataaattaattaattggcccggttttaaaaaaaccagagaaggaaaaaccggggggggccccaaattaaagggtttgggaaaaaaccccctttttccctatgggtgaataaaaaaaaaggcgggggnnngnnnnnnnnnnnnnnnntttnnnntnnntnnnngggccttaacattttg

SEQ ID NO: 103743 - DNA, 379 bp, Homo sapiens
  misc_feature (1)...(379): n = a,t,c or g
atcatttgagcctaggaggtggagctgcagtgagctgtgatcgcaccactgcactctagcctgggtacagagtgagaccctgacacacacacaaaaaaaaaaaaaaaaaaaaaaagggggggtttttgtaaaaaaaaaaatgggttaaaaaaaggggaggggaattttttttggggacaaaaaaaaaaattaaaattttggcgaggattatttaattcccccaaaacgggggggggggggaaaaaaaaaagggaaaaaaaaaaacccttttggattttaaaaaaaaaaaaagggaattttttggggggggtttttttttttttttttnccccccaaaacggcgggggggagaattactaaaaggaaaaaaaaaaaaatt

SEQ ID NO: 103744 - DNA, 422 bp, Homo sapiens
  misc_feature (1)...(422): n = a,t,c or g
tcagaactaatgaggtgatcgaaagaaagagaagcaagccatgtaaatacctgggagaagagcatttgaagcaaaggaacagcaagtgcaaaggccctaaaacaaaaatgtgcctgccatgtttaaggagcagtaacaaggctgaagagtaaaggacaagtgggaagaatggtaacagaggccagatcatactggtgaccatggtaacaaattggcttttctcctttttttttttcccccttaaaacagggcctcattttgtcattcaggctggagggcaggggcgcgctcatggttcattgcaggcctaaatttttgggctcaggggaccttcttgctttggtttccttanaagcggggacggcaggcttccaccaccacgcccagctaagttttttttttaaaaaaacggggcttttttt

SEQ ID NO: 103745 - DNA, 412 bp, Homo sapiens
agacttaaacatccctgcctgacggctttgaagggtgcagaggacctcccagctcagcgtttgagctctgctaagggtcagactgcctccttatgtgggtccctgacccccatgtatcctgactgggagacacctcccagtaggggctgacagacacctcatacaggagagctctggctggcatctggcagttgcccctctgggtgcttccagaggaaagaacaggcagcaatctttgctgttctgtagcctcctctagtgatacacaggcaaacagggtctggagtggaccctccagcaaactccagcagacctgcagcagaggggcctgactgttagaaggaaaactaacaaacagaaaggactagcacgtccacacagagaccccatccgaaggtcaccaacatcaaag

SEQ ID NO: 103746 - DNA, 387 bp, Homo sapiens
accactgcacctggccaagttgcagtcttcttgctgatggagggtcttgccttaatgtaaggtggtgattgctgagggttggggtagctgtggcaatttcttaaaataatacaacattgaagtttgctgtgtcaattgactctccctttcacaaaagaatgatctgtagcatacgatgttgtttgagagctttttacccacagtagaactttcaaaattggattcaatcctgtcaggccttcgtactgctgtaccaactaagtttatgtattattgtaaatcattgggttcaatcctgtcaagccctccttctgctgtaccaactgagtttattctaaatctggtggcatctcaacagaggttacactgtgttcaccaccagaaaaa

SEQ ID NO: 103747 - DNA, 406 bp, Homo sapiens
aagggactttggtaattcagtatccgaaattcaatcagtgttttgtgacattcttagttgtgatctaccttatgttgtatacacatggtcactcacatacataggtgtattattctgcaattgctgagtaattgatgatccttcattctctctgtgattcataggctctctgggttggataaatcacttcggggaattatatctactagtatatttatgtcactagaattcctttgagaagctatcactgtgtacatttactgtatctattaactttcttcatctccctcttcctccctttcttcctttcctttccctttcctttctcctctcctgtcctttctctctccctccctctttcttttctttctttttcctttttctctctctctttccccctttgtga

SEQ ID NO: 103748 - DNA, 478 bp, Homo sapiens
  misc_feature (1)...(478): n = a,t,c or g
aggaggtgnccncaactaagatgcaatangatctggcagcgcgaccggggggattcccggtcgacccacgcgtccgagcatgttattttgaggaagtcacgttacttctctgggcctcacttcccttatttgtaaaattagggtgactagatcagaagtgtatcagattaacttttccaagattataaatgttgggggggctctacctaagagattctgattccttggttctgggatgtaaccctaagtaaaggttgtccataggctattgttagacccgtctgttgaggacccttggaagaaatctctgaaaggtcccttgcaaccctaacactctagattttttttttttgaaatagcggcttgctttgtcatccaagctggagggcagtagcgcaatcacggttcaccggggtctcgacctcccaggctcaagcaatcctcccatccttcagccttccaagtagctgggaccgag

SEQ ID NO: 103749 - DNA, 485 bp, Homo sapiens
  misc_feature (1)...(485): n = a,t,c or g
ngcnctggcttcccgggcccnnannccgggggcctgnntcctncgcagnnctnaanncngggcgcacccacgcgtccggntttatacttcatgaactgatttagcaacacaggaatcctgtttctaaaacattaaaatcctatgaaaagaggtttgaaaagataaaccatagtgattgctacagcatgagaaagcattttttaaagagagggtctctgttgcccaggctggggcgcagaggtatgagcatggcttgttgggtacaggtgatcctctggcctcactgtcctgagtagctgggactacgggtacacaccaccatgcccagctgggttcatattattttttgtagagatgggggtcttgctgtgttgcccaggctggtctcaaactgctggcatgaggagattctcttgccttaaatcctcatcttcaagcctatttaaaactgaaaacccttatcctgaatttcttatcagtaaaag

SEQ ID NO: 103750 - DNA, 291 bp, Homo sapiens
cccacgcgtccgcccacgcgtccggggattacagatatgagccaccacacctagcccacaatttttctataaatctaataatattctaaaacaaaaagtttattttttgctgggcacggtggcacatgcatatattcccagttattcaggaggcaggtgcaggtaaggcaggaggatcatgcaaacccaggagtttgaggctgtagtgcactatgatcatgcctatgaatagccactgcaccccagcctgggcagcctagtgagaccccgtctctaaaaaaaaaaaaaagg

SEQ ID NO: 103751 - DNA, 410 bp, Homo sapiens
cataactcaggatcaacatcttgccagagccaatttccttgtctcccttaacagctccagcagtatttatgccatggacaaattattcttcttgtgatactttctctcttgcttccatgacactactcccacttcattttctttctacctctctggctcttccttggtcccttttcctggccccttctctctttcagatctctaaacatcagctatatctcagccctgttctactgacactctctagctgttattttctaaacccatgtttcagaaaccatatcttgatgaatcttggaaggccgaggcaggcgaattacttgaggtcgggagtttgagaccagcctggccaacgtggtgaaaccccatctctcctaaaaatacaaaaattacctggccgtggtggcatg

SEQ ID NO: 103752 - DNA, 416 bp, Homo sapiens
cggacgcgtgggcggacgcgtgggcggacgcgtgggttcctgtcagtctcttcctgatttcctccttacactcagttctcttgtccccttggcctcttagtggctgggtgaccttgggtaagtcactcaccgtgtctgagcttcggttccttcagctgggaaaaggcaacagagaagttcccacctcatagggtcctgcagcaattcactgggtcaaagccctcagaaccctcttcagctcagagtgagcgcctccggagtgctcgctgccattattggtattattattattgttattattattgctatttttgaggtgggaggatcacctgggcccgggaggttgaggctgcagtgagcccaaatcctaccactgcacttcagcctgggtgacaagagtgagaccctgtctcagg

SEQ ID NO: 103753 - DNA, 407 bp, Homo sapiens
cgcagtgagtggagattgcgccagcctgagcgacagagcgagactgtcaaaaaaaaaaaaaaaggttttttttttttttcccggggggggggggggggaaaaatttttgggttaatggaaccctccccttccggtttggggcaatttttcttgtttacccctctggaaaacgggggttaccggcccccccctttgggggggccctttttttttttttttaaaaaaggggggtttcccctttgtggcccggggggttttgaattcccggccctgggaacccccccccttttgttcccaaaggggttgaatttccgggggggacccacacccccggcccggtttttttttttttgggggccggttttttccgttttttccccgaaaaacgggagggttttaattttttt

SEQ ID NO: 103754 - DNA, 405 bp, Homo sapiens
  misc_feature (1)...(405): n = a,t,c or g
cggacgcgtgggcggggtttcaccatgttggtgaggctggtctcgaactcctgacctcatgatccacccgcctcggcctcccaaggtgctgggattacagccatgagccaccacgccctgcctatgcctcttgtttcaaggtgtctttacgcacacactccggggtaggtaaaagcccaccccatgtaggcactgggatgggactgcttggatccaaaccatctttattgcttaaacgaccttgggcaagttcttctgggcctcagcttcctcagctgtgaaatggatcacacactaagccatgggactttcgcatgaggaagacggacatgaggactagctctcacaaacagctgagtaggttcctagcactcagaaagtgctcacgaaagatcgggcaagccn

SEQ ID NO: 103755 - DNA, 407 bp, Homo sapiens
cggacgcgtgggcggacgcgtgggcggacgcgtgggaacaaactttgggagccggacagtgtctcatgcctataatcattccaggtgcccaagaagctgaggtgggaggattgcttgtgcctagcagcttgaggcagcagtgagctatgattgtgacactgcactccagcctgggtgacagagcaagactccatttcttaaaaaaataaaaacttgtgttacttcaaaaatggggagacattaacataattacatgtgggctctagaaaatgaatatttgtcatttcatttaggaggagaggagaatttttaaaaggttaaaaaaaacttattttttttcttactacaaaatcaattgatggtcgcggggatggctagaaaaaaatctcctttcctcacaaaggggg

SEQ ID NO: 103756 - DNA, 410 bp, Homo sapiens
cccacgcgtccgagcctgaatggactaagacagtacccaagagtacactgctatagcctattattataattgaatgtttcgttttataagaaactgacaaaattttccagagtggatgtactattttatgtttctatcagccatgtacaagtgatcccgattctcttcatccttgtcagcatttggtctgatgtttttaatggtcactgtggccttgatttacatttcttcaatggctagtaatcttgagcatctttcaatgtgcttatttgccttccgtatctcctctttgatgaaatgtccttgtttttcacccattttctaataggactgcttgaattttttttttaactgctgagttttgagagttcattatatattctagacacaaggccttttttgatatgtaa

SEQ ID NO: 103757 - DNA, 398 bp, Homo sapiens
cgacatgttgcccaggatggtcttgaactcctgagctcaagcaatctgcccgcctcggcttcctaaagtgctgggattataggtatgagccaccatgcctggctttttttttttttcttttaaaacaaaaaaaaaaattcaaaaaaacccctatgggtttctaagaagaaaacggcttggttaaaataggggcaaaaaaaaactttgggtttttttatggggaaacaaaacagaaaaggctccccctaaaccctctaaaaaaagaaccaggggggccgggggtcccagggggggcccaactgagggtttttccacacccccctgccagggctcaaggttgaccccccataaaagaacaaacgggggtttccttgaaataaccagggaccagggtttgg

SEQ ID NO: 103758 - DNA, 408 bp, Homo sapiens
acagggttttgccatgttgctcagactggtctcaaattccttggctcaagtgatctgcatggcttgacctcccaaagtgctgggattataggggtgagccactgcatccaccccattgttagtttttatatgggaaagtgtattggctcattttattcatttactaaattctcatgtaattaggtaccttcttttttctttttcttttttttttcttagcagaccttaactatgtttttccacacagataacacatgaatatgttctcattgtaaaacattcacataatacagggaaaggatcagctctcccttaatcccccttttcctttgcaggtccacctttctccacagaaggaccactggaatcactttcggatattttcttttttaaataattttttatttg

SEQ ID NO: 103759 - DNA, 421 bp, Homo sapiens
  misc_feature (1)...(421): n = a,t,c or g
catgaacccgagaggtggagcttgcagtgagctgagattacgccactgcattccagcctgggtgacagagccagactccgtctcanaaaaaaaaaaaggagacccttaaaatggttggagggaagggttccagtttaaccggggggggaatattttgataaaagggcccccccttttggaaaagggccacaaacatgagggcccgggttttgactttccataaaaccttaaaacccggttaaattttttaaacccaggaaaggggggggggggctaacttaaggctttttaaggttgaaaaaccagtgtttgatcctagaaagggcctcaaattttttttaaaggaccagggaataaaatacttttagagaccctaggtccttaaggcatgacccaggggtcaggggaatggtttttgccn

SEQ ID NO: 103760 - DNA, 401 bp, Homo sapiens
ttggtcaggctggtctcgaactcctgacctcgtgcgcctcagcctcccaaagtgctgggattgcaggcgtgagccactgtaccagccagatagccagatgcaaagaactgaaatggctgcagtagttgtttgtaatagaaaaacctgggaacaaccaccatgtccattaataaggaactggacagccggggtataccatttcatgctgtgacaagggatgaagtccacagaggtatgctgatctccaagctattgttaaataagaaaataaaatctcctagatctagacatcctttgggcaatatcttacacttatacaaaggagaggttaaccccatcctatataataaatgccaaagtgttgagaaaagttcaaaagctacccaatttgtttttattag

SEQ ID NO: 103761 - DNA, 391 bp, Homo sapiens
tgagattccatctcaaaaaataaataaataaataaaaattggaatttgttcaaatgcaaataaaggatagataaatcatctaagttttatcaaaccatacatcttatcaaacaaaataaataccaaagacgtgagcaggctaaataccttttcaattaattctattttttaataaaatgaaacattttaaatgtcacgtgggccacttgtggtggctcagacctgtaatctcagcactttgggaggcaaggcaggctggtgaaaccccatctccacaacaaatacaaaaattagctgggtgtggtggcgtgttctgtagtcctagccactcgggaggctgacataggaggatcgcttgagcccaggaggtcaagactccaatgagctgtga

SEQ ID NO: 103762 - DNA, 406 bp, Homo sapiens
gcgtgcgcatgttttcccagctacttggggaggctgaggcacaagaatcacttgaacctgggaggcggaggctgcagtgagccgagatcatgccactacactctgggacagagtgagactctgtctaaaaaaaaaaaaaaaaagggcgtaagaggatgagggacagtaaaaaaatggtaaagggaagggataggaggcccctttgggttgaaaaaatttgggggggcaaagtattacaaattttaagggggaattattctcccagggaggccacctcattttgtctccaaatctcccaaaaacaacagatgtccaaaagggccaaacagaacccaggataatttaaacatcagttttattcctgtttacgggcttgaaaaaacttaacatcagctgtcatgccctt

SEQ ID NO: 103763 - DNA, 392 bp, Homo sapiens
  misc_feature (1)...(392): n = a,t,c or g
gggagagtcgcttgaacctgggaggcagatgttgcagtgagctgagatcatgccattgcactccagcctgggcgacagagcaagactccatctcanaaaaaaaaaaaaaaaaaaaaaaaaaatttttttccccaaaaattaaaaaacttaattaagggggccaatttttaaaaaaaacaaacttttcggaaggggctaaaaaaaaaaccctttttaaaaaattttttaacaggaaaggaattggatttggggttaaaaaaacccatttaaccaatcccttaaaaaaaaaagctcggccctaaggggtttcctggggaaatttccccaattttggaaaaaaaaataagggcaattttttaaaaacctccccaaaaaaaaaaaaaaaaaaaaaa

SEQ ID NO: 103764 - DNA, 383 bp, Homo sapiens
atagtccttgaggattgctcactgtctaaatctattattttattgttttttgtcctgcatgcacacaaaactatgtacggttgcagagggaccatatttgtgggacctatagctaagaaatcctgagatatattgtttctataaggatcagaaggactaatcttaaatttcagcaggaggaacttagagtaaacattaaaaataacttgtccagcctgggcaacatggtgagaccgcgtctcaattaaaaaaaaatcacccaggtgtagtggtgcgcgcctgtggtcccaactactcgggaggctggggtgggaggatcacttgaacccaggagctgagactgcggtgggggctgtgatcacgccactgcatccagcctgggg

SEQ ID NO: 103765 - DNA, 412 bp, Homo sapiens
ctctctcctgtgattagcactgtcatcccaccagacaaccatgtgagaaacttaccatgtgagaaaccacttctactccccacctcttgttccatgaccaagtcataccagttttatagcctacattttcttgactccaactcctcctcttggtctctcttccattcctcgtgctcatagtctcttcatctgaacactgaaaaacctactgctcagcctccactgcctctcttttgtccccacagatctttaccagccagagaggctgtctaaaccaccgcgcccggccaaaaagtacaaatttcttatcctatgctgggagtggtggctcacgcctgtaatcccagcactttgggaggccgaggagggtggatcacttgagctcacgagtttgatatcaacctaacaaaaa

SEQ ID NO: 103766 - DNA, 412 bp, Homo sapiens
ttttgttctttgtcttttctccttttccaagaataatgcaatctcagtcacaaagaaaatttctggttctattttaagaggaattctgtagtgttttgagtaccagttaaatctttgcttttatgcgtgtgtgtgtgtgtgttgcttttatgcgtgtgtgtgtgtgtgtgtgtgtgtgtgtgtgtgtgtttttttttatgtaaccagcctactagagctgtcttagaaaactaatggctgtttttgaatggccagtaggtgtctttgtaaaatgcagtaagttgagtatcgagtaagaaattaccaagtagctaaagaaacactagcccaaattagcatatagggtgggtagatgatcgcttatacgttatagaagctctctctgatgaaacatttcagtagtggagctgtt

SEQ ID NO: 103767 - DNA, 436 bp, Homo sapiens
agacagagtcttgcttgctctgtgtgagtaaactgggactacaggcacaagccaccacgcttggctaatttttgtatttttttgtagatatgggttttccccacatttcccaggctggtcttgaacttaagcaatccatcagccttggcctcccaaagtgctgggattacaggtgtgaaccattgtgcctggcctcaaaatgtagttttgattttatatatttttcctttcaatgagagcagattttacttcatgtattttgaaactgtaattaggtacacacctgtttagaactgttttcttgatgaattcacccatttatcattatgaaatgtctcatcttatccttagcaacattgcttgttttaatgtaaccacttcagctttcctttatgaatgttaggatgttatattttttcccatccatttagtttga

SEQ ID NO: 103768 - DNA, 422 bp, Homo sapiens
ttgcagtgagccgagattgtgccactgtagtccagcctggatggcagagtgagacggtgtctcaaaaaaaaaaaaaaaaaagaaattttttcagggacacttgctcaaacatagaaaaatgctttgtatgtgggaccatacctgtagcatagaaaccacggcagtgaaatggagtcttgctgttggggggagaggttaaactcacctcctaacaaaaggaggggagggagggtcagtggatggaaaatttttaaaaggaaacataggggtaaggggatggtggccaactgacctagcacgatttttgctgaaaacaggcctaggggatcaggcctcccctgggggctggtggagggtgaggaacctgatcaaataggggggggatggaatattgggggtggggcgtctctgttaaactggat

SEQ ID NO: 103769 - DNA, 422 bp, Homo sapiens
atttgcaaatatttcttccattctatgagttgtcttttcactttcttgataatgtcatttaacacacaaaagtttttaattttgatgaattccaatttacttatttttgttttgttttgctttttgtgtcacccaagaatccattgccaaattgaaagtcatgaagatttcctcctctgtttactttaagacttttgtagatttaactctgaaatccattttgagttagtttttgtatatggtatgaggtaggggtgtaaattctttcttttgcatgtgaatatccagttttctcagcaccatttgttgaaaaaaaagttctctccccactgaatggtctttttttttaattgacagataaaattatatgtattaattgtgtacaacatgatgttctgtcatgtttagtcattgtggaatgt

SEQ ID NO: 103770 - DNA, 428 bp, Homo sapiens
cggacgcgtgggcggacgcgtgggggagtgagccgagatcacgccactgcactgcagcctccttggcgagagagaaactgcctccaaaaaaattccctgagggaaacctgtatgcagaacgccctgatcccaataaagggttggcctgggggtccctgtctctctccactttccctggcctcccagcagtctgtgcaccccagggcccgtgggtgataaaagctgtttctatccaaaaaaaaaaaaaaaggggcgcccgttttaaaggatcaaattttacgtccgcgggcgggcaaggtattattttttttatggggcccccaaaattaatttcccggcccgttttttaacaccgcggggaggggaaaaccccgggggtaacccaattaaatcgcttggaagaacatccccttttcgccggtgggcac

SEQ ID NO: 103771 - DNA, 380 bp, Homo sapiens
tggtctacaaaagttgtgtgtgtgtgtgagatgtctttgactggttttggtatcactgtagtactgacctcagtctaatcactttatttttgaaagttagttttgctggatttacaattcttggctgataggttatttgttttttcctttcagaactttgaatatattggccatgtgtggtggctcatgcctgtaatcccagtactttgggaggcaaaggcaggcagatcacttgagcccaggagttcgagaccagcctgggcaatacggtgagaccccatctctacaaaaattagctgggcatggtggcatgtgcctgtagtcccagctactcaggaggctgaggtgggaggatcacttgagcccagagaggtcaaggg

SEQ ID NO: 103772 - DNA, 378 bp, Homo sapiens
  misc_feature (1)...(378): n = a,t,c or g
tccaggtcaggtggattgcttcagctcaggagttcaagatcagcctgaccaatatggtgaaatcctgtttctactaaaactacaaaaactaggtgggcatggtggcacaggtgagaggatcacttgagcctgggaggtcaaggctgcaaggagccaagattgtaccactgtactccagcctgggtgacagagcaatatcttgtctcanaaaaaaaaaaaaaaaagaaaaaaaaatggggttgggaaacccaattggaccagttttttaaaaacccggggcaaaatgggggtccttaatgaaaattttttttttttttaagggaggggggggtaaaccccctcccttggaggggcccacctttgaaagaaaaaaaaaaa

SEQ ID NO: 103773 - DNA, 397 bp, Homo sapiens
ccaagttgggattacgggcatgtgccacaacacccagcttgggaggctgaggcaggagaatcgcaggagggagacgttgcggtgagccgagatcgcgccattgcactccagcctgggcaatgagagcaaaactccgtctcagaaaaaaaaaaaaaaaaaaaaaaaaaaaaaaaaaaaaaaaaaaaatttacaaaaaaaaaaaaaaaagattttaaatgaatagacaaaaaaaagatgcgtggggggccccttttaagagagggtatattgagacccggggtcccctcccatttttttttttttaggggctccctatttaaaatgtggggggggggttttttaaccaggggggggggaaaacacttcggtgggcccgaatttttgtttgttttggact

SEQ ID NO: 103774 - DNA, 402 bp, Homo sapiens
  misc_feature (1)...(402): n = a,t,c or g
cacggtgtaaacaaagctgccagcaagttcgaacttggagacgcccaccgcagctcctcaaagccactgcagccagactgcgtctccagatttctcctctctgggcagggcatctctgaaagaaaggcagcagcccaaatcagcggctcataaccctgggacagggcacgtgggggaaggggtggttgcgggtgcaacttcagcagacttaaatgtgcctacctgatggctctgaagaaagcagtggatcttccagcacagcgttcaagctctgctaagggtcagactgcctcctcaaatgggtccctgacccccatgtctcctgactgagagacacctcccagccggggtggacagacacttcatacaggagagctccagctggcatctggcgcgtgcccn

SEQ ID NO: 103775 - DNA, 250 bp, Homo sapiens
  misc_feature (1)...(250): n = a,t,c or g
ttcagttagactgaacaagaacaaagagaatactcaaatcaggaataaaaaaggagataccatcaaccttacagaaataaaaaggattataaaggaatactctgaacaactgtttgccaacaaattacattactggatgaaatgaacaaatttctagaaagataaaacccactgaggccaggtgcggaggctcaacgccttgtatcctagcgcttttggagggccanggcgatagatcacatgaggccaa

SEQ ID NO: 103776 - DNA, 417 bp, Homo sapiens
gaggctgaggcaggagaatcgcttgaacccgggaggcgaaggttgcagtgagccgagattgtgctgcactccagcctggcgacagagcaagacttcatctcaaaaaaaaaaaaaaaaaaaggtttaaacccccccccaataaaaattaaccggacttaataaggaagggggcctttgaaaaacacaaggttaatctaaatggggaatttcaaaaaaaccaaaaaatattttttggttggttttaaaaacacaccctctttgtgcccaaggttatgggggggggggccttccctcaccccctggagaagggggggttaaaaacccggcccccctgccccagttattttttaatttttgaaaaaaaaggggccttccttgggtggccggggtgggcctaaaattttgggcttagggaac

SEQ ID NO: 103777 - DNA, 434 bp, Homo sapiens
  misc_feature (1)...(434): n = a,t,c or g
nnnttcgtccgatttccttatatatgctagatagaggtgtcatcagatacatgatttgtaaaaattttcccttgttctatgaattctatgaattatcttttcattttcttggngtctttggaagcataaaagtttccaattttgattttgtccagtttttctatttttcttttgttgctcttgcttttagtgtcatatctaagaaaccaatgcctaatccaaggtcataaagactatgtctatgttttcttctaagagtttggtaatttagttcttacattgagatctttgatccatttcaagttaattctgtgtatgatgtgagggaggagtcccttagcttctgcatatgcacttttcccagcaccatttattgaaaatactcttctttccccattaattaccttaccacccttatcaaaaatcggttagct

SEQ ID NO: 103778 - DNA, 421 bp, Homo sapiens
acaacccatacatgctggaagctctcaatctagtaggagaggatagacacgaaagctcataattttgttttgttttgtttttgagacagggtcagtctctgtcgcccaggctggagtgcagcggcatgatctcagctcactgcagctttgacctcccaggctgaagtgaccctttcacctcagtacccaaaagtagctggaattacaggtgcccacctgccagaaaactcagttttacttaaattatttattttcaacgtgtagctcatgaagatactaactttaaatggcagggagtagattgagaatcatcatggaagaccttttttttttttttttgaaagggagtctccttccgccccccagcctggagggcaagggcaggatttgggctcacgtgtttctccattttggggtaagg

SEQ ID NO: 103779 - DNA, 441 bp, Homo sapiens
  misc_feature (1)...(441): n = a,t,c or g
cccacgcgtccgaaaatttgattaattcaaaagaaggtaaggaaagagaagtanaataaaatatagttaagacaaacagaaaacaagttggttgacttcaatctaatcatatcaatacattaaatgtaaatagactaagcagctcaatgaaaaggtttagattgtcagatgaaattttttaaaaagcatggcccagctctatgctgtttataagagatgtactataaagacaagggcacatgtacgttgaaaataaaaggatggaaaaacatataccatgcaaatgctaataataataaaactgaatggttttattatcaggaaagataagacttgaaagcaatatgttatcagagttaaagagggataattagtaataaaaatggtcgcctcattaagaagatttaatcctcctttttattttaaatgtgtatgcaccta

SEQ ID NO: 103780 - DNA, 424 bp, Homo sapiens
  misc_feature (1)...(424): n = a,t,c or g
gaccctataatagntctatttttaacaatttaggaaatgttcatatgattttctgtaatggctgcaccaatttacactctcatcaacagtgtgcaggtgttcccttttgttcatatcatcatcaactttttttatctttagactttcttaagtctaaaggggtaaggggatatctcattgtggttttgatttgcgtttccctgatgagttgtctgccaagcatgttttcatatacctgttggtcatgtgaatgtcttctttggaaaactgtctatccaggtcctttgctcatgttttaatctggctaaaatatttatccattcttaagcatccatctcaagtacacttctgctagaaagagcatctgactacctaatattactctacaacatatttacctccataactgtatggtttctatttt

SEQ ID NO: 103781 - DNA, 488 bp, Homo sapiens
  misc_feature (1)...(488): n = a,t,c or g
cgaagtccccnnnggggnnncaaaaccgatngcaatancgagagtcntcggaacggaacacccgggncgacccacgcgtacggaatcgcttgaacccgggagacagaggttgcagtgagctgagatggcgccactgcattcctgggcaacgacaacagtgaaactccatctcaaaaaaaaaacaaaaaacaaaaaaaaaccaccacctatttgactttggcttaaccgccggctatgaaccatgaaaatagatcccaattatccattacagggttcagttttcctggctaacactgccctacacaaaacatctgtccttgacacagggacaaaccttgtctctcctaaggaataagtcatttttatcctctaagaaaggagttgggaaaaacatgatgtttccctatgcacctccgggccaggaatgtaaaaatcaagttttgttatcaatcataaaaactgtctaagattttcattggacatgctcn

SEQ ID NO: 103782 - DNA, 513 bp, Homo sapiens
  misc_feature (1)...(513): n = a,t,c or g
agctgcggttagccggcggncccngacccctaggggnccctagnngntctngccannnnccncnnnnnnnnnnnnnggnnngancnannnnnnnncttgcatctggtcattcatattctattctaaatggtatttcattaaatgaatattcaaaaaattatccactatctgcggacatgagagctatttccagtttttctttttgcttgtttgattcgctggtacaaacagtgcttctatgaccatatttgaatatgtctttggtgcacatatgcaaaactatttctaaagtatgtatcttagagtggtattgctgagtcgaagactatatgaattttcaactttgctaaataacactaaattgttttttaaagtagtggtaccaatttactcttcagtcaaaagtgtgtaagtgtttttattgctctacatcttcaccaatatttggttttgtcagactatatagttttgccaatctgatagaaaaaaactggcatctgtgaaagtcatttg

SEQ ID NO: 103783 - DNA, 497 bp, Homo sapiens
ttgcatctgtgttcatcagagatattggcttatgggtttcttatgttgcatccttgtctgtttttcgtatcagggtaatgctcacctcatgaaatgagttagggagaattcccttcaattttttggaatagttagaggagaatgggtgttcttctttgtaagtatggtagaattcaataataaagccatttggtcctggattgggaccaaatgggagacattttattactgattgaatctcattactcattattgggctgttcaggttttctatttcttcctgattgaatcttggaagattgtatgtatccaggaattgatccatttattctgggctttccagttcatgcacagcagttagcagtagtctctgatagctaggcatggtagcttatgccggtagtcccaggactttgagaggccgaggtgggagatcctttgaagccatgagttcaagaccagcctgggcaacatagcaagaccctgtctctaccaaa

SEQ ID NO: 103784 - DNA, 409 bp, Homo sapiens
  misc_feature (1)...(409): n = a,t,c or g
aagaagctgcccccatgcctgtcaagttcttccaactgctcgaaccttctggacctccaggcctcagcatgtcttgtctgggtgactgcaatggctatgcttgcttttctgtctctctccatcaatcagncaaccaatcaatcgatcaatcatctatcaatcagctatccacctattaatctatgatcaataatctattaatctatatcatttacttctataatcattgatctagcccatgtatgttcctatctaccctttatcatgtctatcaatctatctatcatttatgcctctatcatgtctatctttcaataatttatctatcaccaggcacggtagcatgtgcctgtagtcctagtaattcaggaggctgaggcaggaggactgcttgatgctagcagatcan

SEQ ID NO: 103785 - DNA, 395 bp, Homo sapiens
tgaaaatcaaaggcgcgggaaggacacctacactaagtccttattttcagatcatgaaatagagactcaaagcgggacagtgacttgctgagagtatcacagcttgttactggttaggacttcaatgcaggtctgctgccttcctatcaagtgctctccctttatttttgtttttgaaacggagtttcgccactgtactccagcctgggtgacagaccgagacttcgtctccaaaaaaaaaaaaaaaaaaaaccccccccccccccctggggggctccccccctgggggggaaccttataccccccggccgggggttggcccccccccccccccctttgaacacccccccagggaaaacccggggtgttttcaccctccccctaaggcttggccc

SEQ ID NO: 103786 - DNA, 441 bp, Homo sapiens
ttcaaggcctactgagatcttagatcaacctgcttttctgaatcccagcctaggattttcttttcctttttcttttaggggttcctttttctgttactgctttttttcccctcttaaatgcacattgcattaaaaaaaaaaaaaaaaagtaggccctcaggaggttgaggggggaggaccacttgagcccaggaggttgaggttgcagtgagccatgatcacaccactgtactccaactggagcaacaaaacaagactctgtctgttaaaaaaaaaagtaaaaaaaaaaaaaaaagggggggccccttttaaagaaacaaattttactaccccgggctggggaggaataattttttttattgggcccccaaaataaaatacccgggccgcgttttaacaacgcggggaggggaaaaaccctggggtaaccaaattaattgc

SEQ ID NO: 103787 - DNA, 432 bp, Homo sapiens
  misc_feature (1)...(432): n = a,t,c or g
gtgatccgcccaactttgctcccaaagtggtgggattataggtgtgagccaccgcaaccagcccatatatgcatatttaatatacatgtgtagcatatacatacgcatatacacatctatgcatataaattaacaatatgtatatatgtgcataaattcacatatattttctgtataaagacagcaagagaggcaggcggagaaagaatcagttgcagtctggaggaatatacgtgtgttacatggtttccctgcctttaaattctctgttaatctgtattccttggaaagaagatgacagcatgtatcttggcctacatgtttctaaagacaaacctctaagctcttgaagttctgccatggtgtatcatagtacattgaagncagaaagcccattataggaggaggatgcctggctagaatagtgttctt

SEQ ID NO: 103788 - DNA, 417 bp, Homo sapiens
  misc_feature (1)...(417): n = a,t,c or g
ataatctcggctcactgcaacctccacttcccgagtagctgggactacagtcgcacgccaccgtacccagctaatttttgtatttttagtagagacagggtttccccatgttggtcaggagtttaacatcatcttgagcaacatagtaagatgctatcaaaaaaataaaataaaatagatatgcatggtggcatgtgcctgtagtcctagctactcaagcagctgaatgagatgtgctgaggcaggagaattgcttgaacccgggaggcagaggttgtggtgagccggggtcgcgccattgcactccagcctgggcaacaagagcgaaaactctgtctaaaannnnnnanannnnnnnnnnnnnnnnnnnaaaaaaaaaaaaaaaaaaannnnnannnnnnnnnannactaactact

SEQ ID NO: 103789 - DNA, 404 bp, Homo sapiens
ctttgatgtccacagcaccactgaggcaggagaatcgcttgaacccgggagacggaggttgcagtgagccgagattgcatcattgcattccctcctgggcaacagagcaagacgcagtctcaaaaaaacaaagaaagggagcccaccaacccgggcctcccagggcagcagcccaggcctgggaacagggacacccatcctgtactaaatctaaaaccctgatctcaagtgacaagccccttcctcctgcccctgcgggaagaaaggaccctgatgtaacaagagaataaggtgtggctcttgagggaaaaattatcagtgacgttctcaaaccatctctacaaaaaaaaaaaaaggggggggccgtttaaaagaaccaaattttacgaccgcgggcttgcaag

SEQ ID NO: 103790 - DNA, 398 bp, Homo sapiens
cccacgcgtccgcccacgcgtccggctggcgggagtctgtagtcccagcttctcaggaggctgaggtaggagaattgcttgaacctggaaggcagaagttgcagttagctgaaatgcaacgattggtgtcgcaactgcacctcactgccactttccatttccaggggaaaaagatgtttatgcctcagactaaccaggacctgggattacttatgtgcacgacagcgccagggataacttatgttactgaccatatacccagtgactccgagcttgctaggagtgaactacacttcaggcctcatgtgatgcaattactgggtgagtcaacgtcccggcctgagatattctactacgagacaccctaaaaaacttaggtgataatgaaagtttgccta

SEQ ID NO: 103791 - DNA, 413 bp, Homo sapiens
cggacgcgtgggctatactgggtgacagagcgagactctgtctcaaaaaaacaagcagaacaaatgaaagattggcatattgttaaaaacacattagccaagtatatgctgtctataacaaacttctaatataatgatacaggtgagttgaaagtaaaagggtagaaaaatatatactatgcaaacattaatcaaaagaagcaggaatggtcatgtttgtattagatgaaacagacttcagagcaaagaaaattaccaggggcattaaataatgatagaagtgtcagtacacaaagaaaacagtgatcctaaatttatatgcgtctaacaaaagagttacaaaatacatgaaataaaaagatacagacattaaaggagaaatagacaaatctacaactatagttggagacttg

SEQ ID NO: 103792 - DNA, 407 bp, Homo sapiens
  misc_feature (1)...(407): n = a,t,c or g
cccacgcgtccgaccatgttggccaggctggtcttgagctcctgacctcaggtgatccatctacctcagcctccaaaagtgctgggattataagcgtaagccaccgtgcctggcctgatttttttttttttctctcctaaggttcggatactttgggaatccgggtttgttttataatcagtctagaaccctcctaaaaatgaaatttctttggccaataaaggccctttttatgtatcttttggagggctttttcttttcttggggaaaaccagttatgggcatttttttttttaaaaaaaattttaattgttgttccccaggctggatttaaaggggggaatttcggttaacggaaacttccgcttccggggtaaaagttttttttttaccccacctattgggan

SEQ ID NO: 103793 - DNA, 393 bp, Homo sapiens
aaaacaaaccaaaaaactctgacagagatgtctgcctccttttcctctgcccttcctttctcttagggacacaggtatcactaaaaacttgttgaaaactaggctgggcatggtggctcatgcctgtaatcccagcactttgggaggccgaggcagggggatcacaaggtcaggagatcgagaccatcctggccaacatggtgaaaccccgtctctactaaaaatacaaaattagctgggcgtgtcggtgcgtgcctgtggtcccagctgctcgggaggctgaggcaggacaatcgcttgaaccttggactgggaaggtggaggttgtggtgagccgggatcgcaccattgcactctagcctgggcaacaagagcaaaactccctctaaaaaa

SEQ ID NO: 103794 - DNA, 388 bp, Homo sapiens
cgtgatccatccgcctcggcctcccaaggtgctaggattggaggcatgagctactgcgcccagccccattaatttcttgttttgaatattgtgctatacttacctaagatgttaacactgggaggggctgggtgaagtctacacaggacttttctgtacattttgtgcaacttcccatggatctataattattttaaaataaaaaaaattttaaggatgctgttgaggggaatggggaaaagatttgacaaagagaggggctactcttttttttgatcggcgactacagtttcatctctatttaaatctgtatcatcttaagctgctgtaacagaataccatagtctgggtggcttaaacaccagatatgtattttctcacaattctg

SEQ ID NO: 103795 - DNA, 407 bp, Homo sapiens
  misc_feature (1)...(407): n = a,t,c or g
cccacgcgtccgccatcttccaagtgttttcaagaaaaaaagaaaaaaaaaaaaaaaaaaaaaaataaaaaaatgggggggggagcgaaattgcggcttatttttaagaggggggggggttaggggaatttttttttaatgggaaaggatagttttttttttggggggggagaaaaaaaaagggggggggggtaaaaaaggggggggcccaaaaaaatatgtttttgtgaaaaaaatattttttttgggggggagaataaaaaaaaaagggggggggaaatttnggcccttntttttgttttttgcccaagtttgagggtcaatttttggcattgggttgggaacgggcctaaatccccaaaggaaatgtgagcgggggtggggaccctcctcttttttttttgagg

SEQ ID NO: 103796 - DNA, 406 bp, Homo sapiens
  misc_feature (1)...(406): n = a,t,c or g
attctgtaatatggatacaccacaatttgtttattcactcaccagttgatagaaatttggcttgttagcagtttttggctattgtaaataatgctgctacatacaagtctttgtatgggcatgtgtgttgtttctcttgagtaactaccttgaagttggattgttgggttgtatggtaagtgcataaagtttcatagttgtctaagaatctgccatgctgtttccaaagtggctgtaccaatttgcattcccacctgcaatgtatgagggttccagttgcttcacagccttgccaacactgggtatgttctcccaatttctgtactaatttcttggtagactagcaccaatctgtagaccatacttcatgcaggactactccaacccattcataggaatatgtccn

SEQ ID NO: 103797 - DNA, 405 bp, Homo sapiens
cagtgagctgagatggcaccattgcactccagcctgggtgagaagggtgaaactctgtctcaaaaaaaaaaaaaaaaaaaaaggggcaaaaaggggaaaaatttacctgacctggggggcgggcccctatttttttaccttttgggaaggttaaggcggaaaaaccctttgcccccaggagttgggggtttaaggaattaaaaaccgggcccctgccccccaccccgtggggaaaaaagggaaaccccttttttccaaaaaaaaaaaaaaaaaaaaagggggggccccctttaaaaaaaaaaaattttaccccccggggggggaaaaatttttttttttttttggggccccaaaatttaattcccgggcccggttttaaaaacggggggaagggaaaaaccccgg

SEQ ID NO: 103798 - DNA, 405 bp, Homo sapiens
ctctgtctcaacaaaaacaaacgaacaataatggtgacctcacagaatgagttaggaagtattccctttgcttctgtagagaattggtgtaatttcttccttaaatgtttggtacaattcaccagtgaacccatctgggtctggtacttttcgttttggaaggttattaattgttgatttagtttctctaagagatacaggtctatttagattgtttgctttttcttgggtgagttttggcagattgtatcttccagggaattgataaatttcatctaggttatcaaatttttaggcatagagctgttcataatatttcttatttatttacttttgagatggagtttcgctcttgtttcccaggctggagtgcaatggcacgatctcagcttactgcaacctccg

SEQ ID NO: 103799 - DNA, 486 bp, Homo sapiens
  misc_feature (1)...(486): n = a,t,c or g
gacgcgccccaatagagactgaaaccatgtgcaggaactcgngcgtctgagatccaagctactcaagagaattgcttgaactggagaggcggaagttgcagcgagctgagattgtgccattgcactccagcccgggcagcagagtgagactccttcaaaaaaaattaataaaagcaagcacatagggtgcacatttgcccttccctcttgggatgcagggcgatcccacaggtgctgtgcatccccaacaatgacctggactgttccagtgttttgtcgcagagtttctccctttttttgtactgggatttctccccagaaacaaacccatatgtataaaaagtagttgggcttgctataaagatgactagtggaaacctcaatagaggtacgatttcctaaaataaatcttgttcagatatgacagggcagagtacaacagtagagctctcttctcagcactcagggtgcaggcctcacttttcc

SEQ ID NO: 103800 - DNA, 466 bp, Homo sapiens
attagatttgccccgcgctgcaggaattcggcacgagctgagatggaagaattaattgagcccacgagttcaaggctgcagtgagtcgtgattgtgccactgcactccagccggggtgacagaagagaccttgtctcgaaaaggaatctgaaaacaatggaaccatgccttcataattctagaaagttattttcaactgataaatctatattcacccaaataatcaagggtgaaggtaaaataatacatttttagacaagcaaagactcaggggttacctccatgtgccctttttagggaagctgttggagaaaatactccagcaaaatgaaggagtacacaaaccagagaatgacatgaatccagcaaataggatccaacacaggcaatattccagctatggagctagctttaaaaaggaacagtaaaaatattaatcggttagctgggtggaatggcccatgcc

SEQ ID NO: 103801 - DNA, 470 bp, Homo sapiens
  misc_feature (1)...(470): n = a,t,c or g
atcgatgacgactctcggaccngccgnggaanncgnccgccannnnaaggcttgagtaggcggntctatgctcacagngtaaacaatttattatgaagctcaaactgggcagagcccaccacagctcagcaaggcctactgtctctgtagattccacctccaggggcagggcatatctgaacaaaaggcagcagacagcttctccagacttaaacgtccctgcctgacagctctgaagagagcagtggttctcccagcaccgcgttcaagctccgataatagacagactgcctcctcaagtgggtccctgacccctgtgtagcctgactgggagacatctcccagtaggcgccgaaagacacctcagagaggtagatgccccactggaacgaagcttccacagtaaggatcaggcagcaatatttgctgttctgcagcctccactggtgacacccaggcaaacagggtct

SEQ ID NO: 103802 - DNA, 412 bp, Homo sapiens
ggtgaggtttcaccatgttggccaggctggtcttgaactgctgacctcaggtgatccacccatctcggcctcccaaagtgctaggattacaggtgtaagccaccatgcctggcctgttttaatttttttagtacacctctgctgaaaggaagcatccttatttgtaacacaccactcattaggctgtgttacaacttattttgtgttatgattagttctatgctgttactagattttgagttacacaaggtcagggactttgtcttattcatgtttgtatcatcagtgcctcatacagtcagtgctgcaaaatggatgtgtttgaaggaatgaacagctctagatttatgcccttcataagtaagttccctgattttaactattttggggaattttgtggatattgtttggc

SEQ ID NO: 103803 - DNA, 469 bp, Homo sapiens
  misc_feature (1)...(469): n = a,t,c or g
cagtgcttangctagntggttagcaccncacacgccagcttggacgaggggtttcaccatgttggccaggatggtctcaatctcttgacctcgtgatccacatgccttggcctcccaaagtgctgggattacaggcatgagccactgcacccaactggtggaagaaatttctaagcagcaaagcattcaagaggtgacttggatgctattaaaggcattcagttttataagggaagcaaagcataaaagttcagaaaatttgcagcctgacaatgcaatagataataaaatcccattttctgaggagaaattcaagccagctgcagaaatttgcaaaagcaatgaggagctgactgttaatccccaagacaatggggaaaatgtctccaggacatgtcaaagacgtttgcggcagcccctcccattacagacccagaggcctaagaggaaaagcccagggtccccatgc

SEQ ID NO: 103804 - DNA, 442 bp, Homo sapiens
  misc_feature (1)...(442): n = a,t,c or g
nttcgagacctcgagaccgctaggnggaccaccactgctagcttccaacttttccggagcttcttcacttctctcagccttcaaagaattaaaaagttagggcctttttctgattaggctttggcttaagggaatgttgtggctagtttgatcttctgtccagaacataagaactttctctccatattaacaataaacctcttttgctttcttatcatttatatgttcagagaagtagcacttttaatttccttcaagaatttttcctttgcattcacaatttggctaactggtgcacatggtctaactttcagcctgcctcagctttcaacatgccttcctcactaagcttaattgtttctagcttttgatttaaagtgaaagatgtgtgactcttccttttgcttaaacacttacaagccattgtagggttaatagttgg

SEQ ID NO: 103805 - DNA, 583 bp, Homo sapiens
  misc_feature (1)...(583): n = a,t,c or g
nggaaccnnnnaatgancnatcgaccccgtccgtgtggtggaattcggagatgtgtatattagctatccattactgtataattaattatacacaaaactaaactatacactaaactaaaacttcacagcttaaaacaggaaatatgtattatctcacacaatttctgagagtcaggaatctgaaaatggcttagctagtttggttctggctcagggtgacctatggagttgcagccaagatgtcatctgggactactatcattggaaggctcagctggggctggaggctacacttccaagatggctcacttatagggctattggtgggaggcttcagttcctctccacatgaaactttcctcatgccatggaactggcttccctcagagtgaaagacccaagagagagactaagacagaagctgcaatgtttttatgacctagtcttggaagtgacttactggcatttctactgtattttattcattagaagcaagtcattaagtccagcccacattcaaagtaagaggatttaagctgaacctcttgaaaaaatggtatcanagtatttacggacattntaa

SEQ ID NO: 103806 - DNA, 495 bp, Homo sapiens
  misc_feature (1)...(495): n = a,t,c or g
ngcagaggccatggangcctacngngctgagtaannngcggcgcangcctgnagncccagctaactgggaggctgaggcaggaggatcacttgagcccaggagattgaggctgcagtgagcatgatcgcgacactgcactccagcctgggtgacggtgagactttgtctcaaaaaaaaaaaaaaaaccaggggagggcaaacggcaggcccttgaggacacatcacacagggcccggtatttaagggtcaagaaaaaaaaaaaaactccaaccctttaaggggaggaggacagggcccaaaaagggcttttggttgacaaaaaaacagccaaaagcggcccaaaccctccggaatgcctcggccttggccctgggggtggagggggtctgaccaggagcccacctacagaaggaagggaggctgccatgtttctttgaaacacagttgcctctccccagctcgtgccttgaagccacctgccggggggcgaggat

SEQ ID NO: 103807 - DNA, 481 bp, Homo sapiens
  misc_feature (1)...(481): n = a,t,c or g
gatggaaaanannnnttttgtgnttgatnagcactagcccagngncgnggnnncccagagtttcacagngttggtcatgctggtctcaaactcctgaccttgtgatctgcccttctcggcctcccaaagtgctgggattacacgtgtgagccaccgcgcctgagcgagtggtaacagtttttttgaactgagtagaaatcactgtgaagaagatcacatgtgaaggtctggtctccactttttgctgctaataagagactaagatctcctttaaacggcttcctccctgtctgagtggagtggtggtgtcatgagggtgcaggtagattttaatcgtaactcaaaaactcccaaccttcttctggacgctcttccacagtcaggcccggaggcatggtttgctttgtgcccacgaggtcttggaatggtaccagcatgcaattatgggagatctatttcatgtttttcagaatattggatt

SEQ ID NO: 103808 - DNA, 464 bp, Homo sapiens
  misc_feature (1)...(464): n = a,t,c or g
ganagttccggctccnnnncaactgataccttgcnatcntcggagaancngnaaaaaaaatctaaaactttgatttgctgtgcaactttgcctgaagggaaatactggactattctggccctaggcattttcagccatgctgggagttttgtgttagtctaggctgtgtatttcagcttctggcgagtttgtgagcatgacttagcatccttgtattttgagaactctggaaagagggataacaagtttgtgtttctagttcttcaagcccaagggccagcctggaggcagggggaggtgcataagcaccttctgccttgtgtttatcattttgcctttgtcgtcctaactcagcagcctcaatccttcttttgagatgggagtctcactctctcgccaggcggagtgcagnggcgtgatctcagctcactgcaacctctacctcccaggttcaagcaattcgn

SEQ ID NO: 103809 - DNA, 470 bp, Homo sapiens
  misc_feature (1)...(470): n = a,t,c or g
tgttccnnaggtgccgcactgatccccccagttaggcaggcagagccgnggaannncggggttttgccacatcagccagactggtctcgaactcctgatctcaagtgatccatccgcctcagcctcccaaagtgctgggatgacaggtgtgagccaccatgcccggcccatctgcactttttagacaatcagttagagaccccgtaatctgtatgctctagtcttctcctgccaaataagatggtaatgagaaatcttggttagactggccagccctggccctgcctgtttctaataggtgtgtgtgttttatattccagtgcaagcatctcttggcagtttacctgagtcaggttatgaggacctgtcagcagctaagtgtctctgacaagcagttgactgacatattattgatggagaagaaacaagaagcataaaaggtacagattgagcatcattctttcaaaatn

SEQ ID NO: 103810 - DNA, 474 bp, Homo sapiens
  misc_feature (1)...(474): n = a,t,c or g
agtatacaaanattggannnccctgaagtcatctgcaanncnnnnnattcttcgcttggacccacgaggcggaggttgcggtgagcaaagatcgcaccactgcgctccagcctaggcaacagagcaagattctgtctcaaaaatgaataaataaaaataaataaataaataaaaataaaattggaaagcaatcacatagcttacagaatccgtggaaaggctggaggctctgaaaatggagaaaaacaacagaagccaagtgacctaagacacagcctaatcactctaccgtagcttcctgccgagagtgctgccgttctaccacagctggattctatttgctgcacactgacagaatgaaacctaaactagctcctcctaaactgtgtttgaagaaccagtttttaaaattaccaaccccttgcagattgatatttctgtaaagtatgataaaaatgaattactagaaaaatc

SEQ ID NO: 103811 - DNA, 455 bp, Homo sapiens
  misc_feature (1)...(455): n = a,t,c or g
acttgatnacatgagaaacngcggnggaanncnnnagcagaggctgcgtagcagcaaagattgctgttgcctgctccttcctctggaagctttgtcccagaggggcactggcctgatgtcaaccagagctctcctgtatgaggtgtctgtcaatccctgttgggaagtctctgccagttaggaggcacaggagtcagggaccaacttgaggaggcagtctgtcctttagcagagctcgagccctgtgcttggagaaccctccttctcaggatctgttgctctcttcagagccagcaggcaggaatatttaattctgctgaagctatatccacatctgccccttcccccaggtgctcttaagcagtgagatgggagttttatctataagaccctgactggggctgctgcctttctttcagggatgccctgaccagtgaagaggaatttagagaggc

SEQ ID NO: 103812 - DNA, 413 bp, Homo sapiens
  misc_feature (1)...(413): n = a,t,c or g
ggtgagtagtgtgattgaggtggagtagattaggcgnnnttacaaatagacgctaaggagggtgatggtggctatgatggtggggatgatgaggctattgtttttctcggcgctcaggaagcatggcactctggcgggcataccagcgggccctggccgctcacccgtggaaagtacaggtcctgacagctgacttctggggaggaaggcagcactgctggccccatgccagtagctatacctgccgacccaggcctcctggactgaaggacacgcttcctgctcctcactccaagaagccacttcttgcccctctgccttctgcgcatgaaactcaaaagccacaaaacagctggtggagaggcggggtctgcaggaacaccagagaggccggactctgaccatggtgtccc

SEQ ID NO: 103813 - DNA, 397 bp, Homo sapiens
  misc_feature (1)...(397): n = a,t,c or g
tttcgtcacggccggattcgggtggctcctctccgaggtgaaatctgagaagaaatccttggatctcttttcttanaagaggaaaacgaaaaaaagtttctggaccccctcgggttttggtttgcggccccctattccaaaaaaaaaaaagtttttcaactcccggggaaaacaggggggttttggccggggctccggctccagggggggggggggcagcacctcgggccggggggggggttacatgggaaaagtttttggtatggggcaatagaatttcacaggggaccaggggttggcgaaagggggttttgtttttgtttttttggggaggacaaccattgggattaaaggtgccttgaaacgcctgtttgcaaaaatgagcatgatctccggg

SEQ ID NO: 103814 - DNA, 444 bp, Homo sapiens
  misc_feature (1)...(444): n = a,t,c or g
natcganncctcgtagacctctgnccangcggnggaattcaaaatacaaaaattaactcanacgtggtgatgtgcacctgtaatcctagctattcaggaggatgaggcacaagaattgcttgagtcaatattgcaccactgcactccagcctgggcaacagcgagactcttgtctcaaaaaaaaaaaaaaaaaattttggtgaaaaaaccccccccggcaaaattaggggccacccagggggggaaggaaaaggaaattgggatttaagggttccttcacgggcttggccttagggcttttttggcttttttccaaaaaaaaattttttttgggccagggcccggaaaaaaattggccctctttcaagtaaagcccccttttaaaatggggcccccccccattgatttttgggaacctggggaaaaaggttaagccggccccat

SEQ ID NO: 103815 - DNA, 486 bp, Homo sapiens
  misc_feature (1)...(486): n = a,t,c or g
aggggnaatcgagnccatcgagnaccactcgtccagngcggnggaattcggcaggagaatcgcttgaacccgggaggtggaggctacagtgagctgagattgtgccactgcactccagcctgggcgacagtgcaagactccgtctcaaaaaaaaaaaaaaaaaatttttttttttggaccggcccctcaccccttttttaaagagccggggagggcccctaataaccggggggttttaaaaaaagtaactttttggctcggggcctattaaagggagggggtgggactaaatgtttttcaaggcccttctccctttgaaatatttggattctaccccaatagtgggaaaaaaaaaagggggttccacctccaaaaaaagggggcacccccaaactttggggtaaggccccttggaaataataattccctaggatttttttcttcgcggatcttaacagggaattttatttttggaggaaggagaag

SEQ ID NO: 103816 - DNA, 442 bp, Homo sapiens
  misc_feature (1)...(442): n = a,t,c or g
nattgtggactactcgtccagngcggcggaattcgagaacattaaggttgactgagccaaagtagcacacccaaggtgtgatacagcctgcgttcaaacccaggttgtcccatactctagagactgtgatgttaggacaaagtgtgatttcagaagatttgtaaagagaagaaagttgttagaatcacttctctaaagcatgctgattttgagattgctaaaattagaaactgtaccagaatttacatgacactttgtttggttttgaattaagtcattatgaggaagtacattaaaaaatgttaaaaggttcttcctgggaatttgtaatgcattcttcatttctaataaatgtattcttatatgctcggnaaaaaaaaaaaaaaaaaaaaaaaaaaaaaaaaaaaaaaaaaaaaaaaaaaaaanaccaaatagcacctcc

SEQ ID NO: 103817 - DNA, 455 bp, Homo sapiens
  misc_feature (1)...(455): n = a,t,c or g
gggtantttgaaccttgtagacctctgtncaggnagtggaattcccctccctccccacaatacacacacccctacagagagcctctggggacatactgctcagacatctgccacaatatgtgtcaccccctcactgggctcccccagtgtaaaaggacaggcactgcaactcctgtcccatccatacttaggggcattgccagaggccaggaccagaggactttggacacggtgagacccaagatgctgaatctcgctgtcaatttaggatctgtttgcagcctcccaaggtcatgcccaattgctggaagaactcatggctacaactctctctctcacacacacacacacacacacacacacacacacacacacaccatggtctcttttctgaagcaggtggctctctctctggtctgcaacagcttataagtttgccgagctgccctgcactc

SEQ ID NO: 103818 - DNA, 358 bp, Homo sapiens
ctgcagacccagctacttgggaggctgaggtgggaggatcattctggccctggagttggggctgcattgagctacgatcacaccattgcactccagtgtggacaacagaacaagactgtctctaaaaaataataataataataaaagacaccaaaacaacttattataacagattgaatgcagaagcagatatgagaatctagatggcttacattaagccagacataaagaaatttggaaaaaatgtaaaactatcccactctcctcactaaagctttcttattttggaaaatatgattatttcccataaaaatatattattcacgttaaaatggaatgaatttttaatcttaagatg

SEQ ID NO: 103819 - DNA, 473 bp, Homo sapiens
  misc_feature (1)...(473): n = a,t,c or g
gcganattgaaacttgagggcctgaggaattcggcacgaggagagagagagacagagagcgagagagagagacacgagacagcagagagagagtagagagagtgagagagcgagagagatagcacagagagagagagagagagagagagagagagagagagagagacacacacactctctctctctctctatatatgtgtgtctttttatacacccccatacttttttctctcatatatatacacacacagagacaggctcccccccccctctctgccccactctctctctctctattatagagacacaccttctcttgtgtgtgtgtgtgtgtgtctgcgctctctctctcttttttctctccccaccgcgcgcgcgggacacatatctctctctctctctctctctctctctgtccacctagagagatgtatacacgttttctctctctccccgcgcgcctctctctctct

SEQ ID NO: 103820 - DNA, 414 bp, Homo sapiens
  misc_feature (1)...(414): n = a,t,c or g
ggaggnnnagaatttgacaagaggtagaatatagagatagagaaatcttaatggaggaaaaattattattttcagatcaaaataactgtatacttggaaaacacaaaggattttattcagaaattacacaccaaatgctggtgaggatgaaaagaaataggaagggccattcattgttggtgggaatgcaaaatggtatacagccagtttggaagagagttggcagttccttagaaaactaaacatgctcttaccacacaatccagcagtcgagctccttgatatttatccaaatgaactgaaaactcatgtctgcacaaaagccttatatgaggccgggcgtggtggctcacgcctgtaatcccagcactttgggaggccgaggcaggcggatcacgaggtcaggagatcgag

SEQ ID NO: 103821 - DNA, 402 bp, Homo sapiens
gggcgcctaggctccctcttggaggctggatttctttttcttcgcccatgggggccatgggtcttaatagggccaccggaatcatgggttctttcttttttttttttttgaaaaggaagtccccccttggaccccagggggaagggagggggcaaaatttgggttaagggaaccctgggccccgggggtaaacccatttcccgggttaaaccccctgaaaagcggggaacaacggggaaggcccccccccccgggggaattttggttttttaaaaaaaaagggggttccccaaaaggggcaggggggttctaaacccccgaccctaggggaaccccccgccttggccccccaaaagggttagaataacgggggggaccccccccccccgccccacaaaaaag

SEQ ID NO: 103822 - DNA, 470 bp, Homo sapiens
  misc_feature (1)...(470): n = a,t,c or g
agagccccattgaaacctagngacagtatgaccatgactacggctagcctggccggaggtttacaacggcgggactgggaaaacaagaacctgctgcttccggtcctcgcgcgccccggcctgcgcagacacccctgaagcgcgaggccgcccgcccatctttgcgccacctgcctgagggcgcctgagctcccaggtcctccgcccgctctcctctcctcattcctgctgcctccttgagatccccgcggaggaggacctgccggcgacggctccggcactttggcatcatcacacgccctttccagccgggcgtcagactcccagactctggccccggattggcccctgggcttgcgctgctgtgccagccgcatccagggctctccccgctctccgcaggcctttatagaggcggccagggcatggagccccttccagcaagagccatgggcactcccgctcacccn

SEQ ID NO: 103823 - DNA, 446 bp, Homo sapiens
  misc_feature (1)...(446): n = a,t,c or g
gggtgaattcttaagggattaaatgggcgatgtctatttagtgcttagaattaaaatggtatagaggagaaggggaaaagggcagacacatacgacctcttgtttgcatgtggctggtaggtcaatgaacacctggccctacctgactgtgggtcctgacatatgtaatgtcctcctgggccagccccttcacacctcctggaggatagagatgatccacaggctggtagacagtcttccttctacgctgggtggtgggacaggtggagggagaaaacactctttctttttttgagacagagtctcactttgtcacccacaacacccttcttctttatttgaggcggagtctcattctgtcacccacagtggaatgcccggggtaatctcagctcattagaacctccgcctcccaggttcaaacaatcctcccacctcagcctccn

SEQ ID NO: 103824 - DNA, 435 bp, Homo sapiens
ccaagcttggcacgaggagtggcgtgatctcggctcactgcaagctccgcctcccaggttttatgccattttcctacttgggagactgaggtgggaggatcgcttgagcctgggaggtcaaggctgcagtgagtcaagatcatgccagcgcactccagcttgagtgacagagcgagaccctgtctcaataaaaaagaaaacctccatgatatatgacataaacattattttaaggaaaaccattttaaatattggttttaacttttatatgtcctcaaatgtgaaaaactttaaagagatgtaaaaggcagatggccttttgatggagattccaggtgaatgaatgagcatttcaggcagctgcgtataaccgagccctagctcacatgactcaggaaccatcccttcattcagcacagtttcttggtcctccag

SEQ ID NO: 103825 - DNA, 443 bp, Homo sapiens
  misc_feature (1)...(443): n = a,t,c or g
ggtgggacgagggtttgcagagacaatgaaattggcaaacaactttttaatggaatttattactcgggaggctgaggcaggtggattgcttgagcctagaagttggaggttgcagtgagctataattgtgccactgcactccagcctgggcgacagagcaagaccctgtagaccctgtctcaggaaaaaaaaaaaaaaaaaaaaattttttgttaaaaaccagggcccggattttttatatttcagttaacccctaaaccagttatggaaatttcttttttggggattttaccatatcctgggatcaggtttagagggttaaaagaaaaaaaaatgttttgttttaaaaaaataccacccccccttaactttggggggggggacaaatgggcccttttcccacttaaattctgtaataaccgggcccaatggcagggattggn

SEQ ID NO: 103826 - DNA, 470 bp, Homo sapiens
  misc_feature (1)...(470): n = a,t,c or g
nattcgatgaccattangccagtgtggagccattccgaggcggggggatcacctgaggtcaggagtttgagaccagcctggccaacatggtgaaaccccgtctctactaaaaatacaaaaattatccaggcatgatggccactcaggaggctgagtcacaagaatggcttgaacccgggaggcagaggttgcagtgagctgagatcatgccattgtactccagcctgggcgacaagagcgaaactcagtctcaaaaaaaaaaaaaagttttcttaagggaacccaaaaagggttctttgcccctaaccctttttttgggtgggcccgcccgttaaaaacccttgggcttcttgagtaaaaccctggcccggtggtttaagggggttgggggggggggccccaaaacaaacctggccttgccaagaacttttaaaaggcggtttttgggccctttccaaacaaaccttgtg

SEQ ID NO: 103827 - DNA, 432 bp, Homo sapiens
  misc_feature (1)...(432): n = a,t,c or g
ggctggtctggaattcctgacctcaagtgatccacccgcctcggcctcccaaagtgttgggattgcaggtgtgagccactgcgcccggccaaagagtgatgttggacattgtgaatagtgaagaggaacattccatgctggcagagaaggaagccatgccgggcagaaagaagtacctggaagcccagaggccgcacagaagggctcacgggagtggagagtctggtttgaggggggccgtgagggctgaagatgcagaggcaggctcggcctccgctatgaggagggccctgagtagggcgggggcgtgtttaagatggactggagagctgtgacagggcccagataagagatgcctgaagctgggtgagcctgtaatcccagctactggggaggctgaggtgggaggatcacttaagctcaggagttcan

SEQ ID NO: 103828 - DNA, 417 bp, Homo sapiens
cggacgcgtgggcctttcttttcttccatgtcccatcctcccactctatccagccagcatgaatacctgagcataacaccttctgaggatatgtgacaacttgtcttcacatgggcacacacctgtggtcccagctactcgggaggcggaggtgggaggatcacttgagtccagggaggtcaaggctgcagtgagctatgattgcaccactgcaccccatcttgagcaatagagtgagaccctgtctcaacaaaaaaaaaagggtttccttttcagcctcaaatttctttttcagtatataaaaaagatttatatacttctttcagtaagatttatatacttctcggtcttctctcatttgagccaactgtgtgataaggctatcaaaaatgtgaatgcatggcctggcgtggtggt

SEQ ID NO: 103829 - DNA, 455 bp, Homo sapiens
  misc_feature (1)...(455): n = a,t,c or g
acccctagngngccgcangancgtagaggctagtacnnccccannnagnngnnngagctgacctcgngatcatcccacctcggcctcccaaagtgctgggattacaggtgtgagccactgtgccctgctgggaacaacgtttttaaccaactttgcctaagcagacaacagagttgagacattctggtagagaaataatagcccacatttgttgaattgtttttagctctttagttataaagagctttttacaaattaatttatgtaatcctccaacagtacaatgagatagataattttaattttacagactcaaactgcagaatggaaagtttaagtaacttaatgtcaaacagctaataagagatcaagataataatctaggctctttacctatctcctgggcataagcactagcttttttagtgtaaacagaatcaaattgtcattagatt

SEQ ID NO: 103830 - DNA, 460 bp, Homo sapiens
  misc_feature (1)...(460): n = a,t,c or g
ntggttaaaangaactnaactctcnnnnnnnnnnaannaaccgggccggcttctctttcgngtactgccccctctgattccagagctctattattgcaaaccctctctccccgtattcacgggggggataaccttgtatgtagggggggttaagaaaaccactaaaaaactgtttgaagtaataaatgagtttagcaagattgcaggatacaaaatcaacatacaaaatataaagtgtatttatatacacttgcagggaacaatatgaaaatgaaattaggaaaataattcaattacagtagcatcaaaaataatactgatggctgggtgtggtggtgcctcttgcctgtaatcccagcactatgggaggttgaggcaatagaatcttttgagcttaggaactggagaccagcctgggcaactcagngagatctcatctctactaaaaattgaaaaaatt

SEQ ID NO: 103831 - DNA, 407 bp, Homo sapiens
  misc_feature (1)...(407): n = a,t,c or g
aaaaaagcatccatattttctggatactccaaattggtctagaagtttagttttagagatgaaaggcaaatttaaaaatcatgtttgttatgtatatttcaccacgatttttattttattttattttatttttgagacatggtctctctctgtcacacaggctggagtgcagngtcatggtctcggctcactgcaacctccacctcccatgctctagtgatcctcccacatagctgggactgcggatgcttgccaccacgctcaactaatttttgcattttttgtagagtcacggcttcgacatgttgcccaggctggtcttaaacttctttactcctaaaactcctttgaccacctaggactaccaaaatggtggtattatatgagtgagacaccatgcctggccc

SEQ ID NO: 103832 - DNA, 414 bp, Homo sapiens
gcgccggggcactgaggctgcagtgagctgtgactgtgccactgcactccagcctgggtgacagagtgagaccctgtttccaaaaaaaaaaattcacattatttcattaacaaaagaggccagtgtggaaggaataaaagaggaacaaggaatgggatctcttacttccctaccatttatagggaaggtctagcctctttttttctctttgaaaacaaagagccaaaatgtgagagaccactgggcactgccaaatgaagctgttactggactccctgcagagagaaactcaagtcaaaaaaatattatgttgaatggcctgcccaagtataggtaagcagtaaattagctatgaaattcttgtttttatggctctttttaacagagtcatcctaacccctattcgaggcccac

SEQ ID NO: 103833 - DNA, 432 bp, Homo sapiens
  misc_feature (1)...(432): n = a,t,c or g
ggaggaggagatggacgcagaggttgcagtgagccgagattgtgccactgcattccagcctaggtgacagagtaagaccctgtctcaaaaaagaaaaagaaaaaagaaaaaaaagaaaagagaaattaattatgaagaggtcttagaaaataaatctccaaacccacttatagtcacagataataattgggcgtacaggtatatgtctttccagtcattctttctgtgcattttatagctgtttgcgtggcttttatgccattcgagtcacgttggacaagcagttttgagccctgcatgattatataatgggcgcttccccaggtcattggaatgacttgtgggtgtcttgatcagagtgtggttttctgtcgcatgaacagattgtggttcatgggcctgtttctgtactgttgtgcgttgaaggggttn

SEQ ID NO: 103834 - DNA, 411 bp, Homo sapiens
ggagggaggagggtcacttgagcccgggaggcggaggttgcagtgatcccagatcgcaccactgcactccagcctgggcgacagagcgagactacgtctccaaaaaaaaaaaaaaatgctgccctttaccttcctttttaacattgtttagggggttttttgtttgttggggttgttttttttaaagggaatccccctctgggggggcacaggtctgcccccccatgcctggttgatttggggatattcggggagatggggtttcaccttgttggacaggctgtgttggaactcctgaccttgggggagctgcccaccttgccctcccattgtgctgggattacaggtgggacccacagtgcttggccaggagggttttgacttatataagtttttttaaaactgtcgccc

SEQ ID NO: 103835 - DNA, 265 bp, Homo sapiens
tgcacacaagaagaagcccgccaagcacatagcaccatccacatttttatatggggaaactgaggcacgtaggagtatgcctaaggctgcacagctaaaatgtggtagagctgggatcattttgtttgtttttaagacagagtcttgctctgttgcccaggatgcagtgttgtggtgcaatcatggctcactgcagccttgacctcccgggctcaagcgatcctgctgactcagcctgccgagtagctagaaccacaagcatacc

SEQ ID NO: 103836 - DNA, 431 bp, Homo sapiens
  misc_feature (1)...(431): n = a,t,c or g
ggaggcaggaggacgggaagcactggatggctgtggcctcacaggcagggagagtggggtccaaaggcgcagagacagcatggggtgtcagggcactgcagggagagggacaagggcaggtaaggagggaccttggaggccggaacatctttcacggaggcctcctgcttcctctgtgctgctgagctgggccattcatctggcctgggtggagggaagctgaacagggtccctctgcgacctggaggccccaggccctaccctgagcccttggtgctcttggagccctgagctgctccagctgcatgtgatcaccacacacacacacacacacacacacactctctcccaacacacacacagacacacagagcctgtgccaccagccctcattctctgtctcacccagggccagaanggttctgtctaan

SEQ ID NO: 103837 - DNA, 467 bp, Homo sapiens
  misc_feature (1)...(467): n = a,t,c or g
gcnactagccggcccnntttgaaatgatagcctcacgccgccgnacnnnnnnncaattcccgggtcgacgggaggcaggagggtgcggtgagccgagatcacaccactgcactccagcctgggcgacacagcaagactcagtctcaaaaaaaaaaaaaagaaaaaaaaaacccaaaaaaaaaaccccccccgggggggtttatttcccccccttgcccaaaaggggattttttgggggcttttccaactaaaaacccccggaggaggggtttaaaattttggggaaaaaaaaaaaaacccccttggggtttattggggaccccccaataaaaaccttgggggggggccctttaaacccggggggaacccccttggggaaaaaacccctaaaaattgaattttttcgcccaggggggggaaatttggggttttgggggaattaacccccctggtttcccatttaggcc

SEQ ID NO: 103838 - DNA, 435 bp, Homo sapiens
tggggtttctccatgttggtcaggctggttttgaactcccgacctcaggtgatccacccacctcagccttccaaagagctgggattacaggtgtgagccctggtgcccggcctgtttcttctttttccaagtaactaagcatgccctcaaatgggtcaaaaccctaaaaggtatttattgtctgattcacatcaagagggtggagagtcattttgggagctctgagggagcctgggaatccgctcagtgtttccagtgcccccttggctacgtggctgaaggatgcacagtaatgacttgcagggagaagaggcctctgaaggcttgagtccccgctgtccctccggaggccacctcacatttgtcttcaccactaccctctactccatgaggttgtataatccttgaaaaacgccacacctaatcgcctgtgag

SEQ ID NO: 103839 - DNA, 389 bp, Homo sapiens
agtgcctctcataagctcctttatgatttacactgtttacgaaaaacctcccacacttgattttctttgaagagtttacaaagatttgtaatttcagcctgggcaacatggtgagatcttgtctctatatgaaataaaaaaaatttaaaattagctggatgtattgatatgtgcctgtggtcctatcccttaggaggctgaagcaggaggattgctcgagcacataagttcaaggctgcagcgagccatgatgtctctcttgtattccatcctgggtgacagagcaagaccctgactccgggcgccagatataaaaaaagaaaaaaatttctcttgggcggcggggaggaatttttttgtttttaaaaatttggcatgttttttttttg

SEQ ID NO: 103840 - DNA, 415 bp, Homo sapiens
  misc_feature (1)...(415): n = a,t,c or g
agcgtgcataagttaacttccaatttacatactctgcttagaatttgggggaaaatttagaaatataattgacaggattattggaaggttgttataatgaatgaaacattttgtcatataagattcatatttacttcttatacatttgataaagnaaggcatgggtgtggttaatctggtttatttttgttctacaagttaaataaatcataaaacttgaaaaaaaaaaaaaaggggcggccgttttaaaggatccaattttacgtccccgggctggcgaggaaatattttttttatggggcccccaaaattaaattcccgggccggcgtttaacaacgtcgggacgggaaaaacccgggggtccccaatttaattgctttggaagcaatcccccttttccccccggcggaaaaa

SEQ ID NO: 103841 - DNA, 383 bp, Homo sapiens
cccacgcgtccgcggagatgggacggtctgatgccacatgggctcctggatggggtcacaatggggcaggaaaggtcgtgaggggaaaactgagggaagctgaatcgctgtggcatttggttactaggaaggtgccagcgttccccagctgtgagcaatgccctgtggttacacagggtggcccctgaagaggaagctggtgaggcgtgggcggggactctctctttgcaactttcctgtaaatctaaaattactccaaataaaattgtttattaaaaaaaaaataaaacaggctgggcacggtggctcacgtctgtaatcccagcactttgggaggccgaggcgggtggatcatttgaggtcgggagttcgagaccagcctg

SEQ ID NO: 103842 - DNA, 418 bp, Homo sapiens
agcaattaggccgtttcgctttcttatcattcctgtgttcgctggagtggcacttttaatttccttcaagaacttttcctttgcattcacaacttggctaactggtgcaacaggcctagctttcagcttagctcagcttttgacatgccttcctcactaagtttcatcatttctagcttttgatttaaagtgagagatgtgggactcttccttttacttgaacacttaaagatcattgtagggtattaattggcctaactttaatattgttgtgtcttggaatcggaaggcctcggaggagagaaaaagagatggggagcagctggtcagtggagtaatcagaacacacaattatgtggtaacttgataaataagcttggccttttattattgggcacagttaattggtgccccaaaa

SEQ ID NO: 103843 - DNA, 414 bp, Homo sapiens
atttattgttgtataatttataaaaagtaaaactgaaaagaaaaattgatgtctactaagattgttaattgagtaaatataatacatcctaattacagaattctacacggccatgaacaatcattttgtagaataatacttattttcaagggaaaatatttatcttaaatagtcaagtaaaggggatgctcatatgctgctggtgggaatgcaaatgagttgagccactgtggaaagcagtttggagatttctgaaagaacttagaacagaattcaaaggaatataaattgtagacatggaatcaacctagatacccagcagtagtggactggataaagaaaatgtggtacatatacttcatggaataccacgccagccataaaaaagaatgaaatcatgttctttgcagcaac

SEQ ID NO: 103844 - DNA, 415 bp, Homo sapiens
  misc_feature (1)...(415): n = a,t,c or g
attaagctttggcttaagggaatgctgtggctggtttaatattctatccagataacttaaacttgctccgtatcagcagtgaggctgttttgctttcttatcattcgtgtttagtggagcagcgcttttagcttccttcaagaacttttcctttgcattcacaacttgcctgactggcacaaaaagcttagcttttggcttattggctttcaacgtgccttccttactagcctcctgaataatttctcgcttcccatttaaagtgagagatatgacactcctcctttcatgtgaacacttagaggcccttgttgggttactaactggcctcatttcaatattgtgtcttaaggaatanggaggcctgaggactgggagagattggggaacagcaagtgttgagcagtcagacaca

SEQ ID NO: 103845 - DNA, 385 bp, Homo sapiens
tttcgtggcaggagaattgcttgaacctgggaggtggagatttcagtgagccgagaatcgcaccactgcactccagcctggtgacagagtgagactccgtctcaaaaaaaatggttatgtgtctgtgactgtatgtcattgcatatatagagttgagatcagagccagctttgcttgggaggattttgtggaagaagtgagttttgggtagagttccaaagggagggtaggtagcgtactttggcagaaagacgtgtacataaagcttccaaggctggagtgattaagtcataagcattcaagggtaagcatgaaccatttgagaacgaactgtaaattcgtggttgaaaatagccaggctagaagtgaaggggaggcaaggttg

SEQ ID NO: 103846 - DNA, 387 bp, Homo sapiens
tttcgttaatcccagctatccagaggctgaggcacaagaattatttgaacctgggaggtggagtttgcagtgagctgagattacgccactgcactccagcctaggcaaaagagcaagagtctgtctcaaaaaaaaaaaaagggtttataagggggggggggtttttagagggttaaaaaggttccctaaccctaacccccccccttttaaaagggggaacccaaaatttttgttttttgggcccaatccctttgggccccaaaaactttggggccccccggccctttggtcccctaaaacggccccaaaaaaaccttttttggtttctttaagggaaaaaaccggttttttccccacctggccggcccccattaatggggggggaac

SEQ ID NO: 103847 - DNA, 420 bp, Homo sapiens
  misc_feature (1)...(420): n = a,t,c or g
tttcgtggctggagtgggtggctcacttgagcccaggggtttgagagcagcctgcacaacatggtgaaactccatctctacaaaaaaattcaaaaattcagcgtggtggcatgcacctgtgatctcggctacttaagaggctgaggaaggaggctgtgatctcaccactgcactccagcctgggcaacagagcaaaaccctgtctcaaaaacaaaaaagaatatgataaaggtgagggaaggattaaccactgggaaaattaagttagatccttactgatcccatgtacctgtattgatgtaaattaaaattttaacattaaacaaaactgaaaccatggaagtgctggagcaggtgaatgtttatgtactatgaagatgagggagaactctcttaaccttggcaggaatcataatttgn

SEQ ID NO: 103848 - DNA, 414 bp, Homo sapiens
ataattttatacagttatgtaatattgcatctttacatttattttcatttctcttgaccgcgaatgtcaccatgtacagtctgtgtttctgtgtgtaagttttgataaattttaactttttttttttggagagggagttttgttttgccacccaggggggagaacaggggggcgatctcggttaattgcaacctttgcctcccgggttcaagcgattctcccgtttcaccctggatttgggtatttaatggaagaaaatcataaaagactagtatctacatatatttaaggcatccaggacatacctttttaattttttccatattccaaggctatggggttcatcggcaagttttttcaaatggtggcaaacctccaaaaaaattttcaagggaactcgggcagttaaaactt

SEQ ID NO: 103849 - DNA, 427 bp, Homo sapiens
tttcaccatgttggtcaggctgatctcgaactcctgacctcaggtgatccactctcggcctcccaaagtgctgagactataggtatgagccaccgcacccggccatatttttccttcttttagtactcaagttttaatgaggacatatctctttttcagctctatgtcatttcctttggtgtaataggagcacagtgtttatacttagcaactactccatgactgaattaagagatagatggggaatagattaagaagccactacagaattgcaaaaaataaaataaaataaagtgagttaaaatgtcagggtaatataggaaaatacattgggaaatgaaaaaacactccatgtgactggttcacggaaatgaatgaccctcttcctcttctgtttctttcttagagaaagactagggcagaattc

SEQ ID NO: 103850 - DNA, 405 bp, Homo sapiens
aaacaatagcgtcagaaatacagttatgcggttgtccctacactctgatcttacaaagctcagctgtgtaggtctcctgggatgattcaggaaactagatagcaatctcttatattgtcttataattatgaaaatatcttctatcaaaattgtcaagtcacaaatgtctctttgtaggaatgagactaagcatctttgcatatgttcatgtactttttttttttttttttcccaaaacaaatttttttttttgtcccccaggcggaaaaccaatgggggaacctgggtaaacggaaccccccccccccgggtttaagggatttttccggcctccccccccaaagaagcgggatttcggggggggccccattaacccgggttatttttggttttttaaggggaggg

SEQ ID NO: 103851 - DNA, 293 bp, Homo sapiens
cactaataaaactatgtatgcatatagttactcattaacctagcagttctacttctagaatttatcctgaagatacgcccctaataacacaaaaatacatatgtaaaattttattcattgtagcattgtttatatttccaaaacattggaaactatgtaaatgcccacacataggagatagattaaactacagtgtatttatacatggagatactatgtagctgtgcaaaagaatgaagaaaatctctaccaattgatgtataatgattaccaggagattttggtctctgact

SEQ ID NO: 103852 - DNA, 377 bp, Homo sapiens
ctggaagaatggtttgagtctgggaggtcgaggctgcgatgagctattgatcacaccactgcactccagcctaggtaacagagcgagactctgcctcaaaaaaaaaaagaaaaaaaaaaaaaaccccccccaaaaaaaaaatttggccgggggaaaaaaaaaaaaactttttttttttttttttcccccacttctttttttctttttttcccccttttttttcctttccccgggggccccttttaaaaaaaatttttaaaaaaaaccggttataaaaagcctaaaaaaaaaaaaaaaaccccccggggggaaataaaaaacaaaaacccccaaaaaaatcccccccacaaaaaaaaacttttaaaaaaaattggggg

SEQ ID NO: 103853 - DNA, 377 bp, Homo sapiens
gaattgcttgaacctgggaggcagaggttgcagtgagcttggtgatcatgccactgcactacagcctgggcaacagagcaagactccatctcaaaaaaaaaaaaaaaaaatttttttttttccggcccgggcttatatcctttatggggggggaaatttataatatgcccgccccctttttttcaacccccggggtgggaaaaaaactttgttttattttaaaaaagggccttttagggattttggaaaaggaaaataatttttcctaaaaattttgcccttataagcgcctttaaaaaaaggggaaggtctctttaaaaaccccgggttttttaaaaaaacggcctaaataaataaaaaaaatgggggtgggggag

SEQ ID NO: 103854 - DNA, 529 bp, Homo sapiens
  misc_feature (1)...(529): n = a,t,c or g
aactggtggggttcttgtcgctgttgttttgannnnnnnnnnnnnnnnnnnnnnnnnnnnatccagccacaatgcctggcttaggtcaactaatttttgacaaaggtgcaaaggcaatttgatgggaagatgatagtctctacaacaaatgatactaaaataattgaattccatccacaaaaaaggggggtttagatctttatctcaagccataagtgaaacaaattaatttggtcagctacagcggctcacacctgtaatccccagcactctggaaggccaaggtgggcagattgcctgagtcccaggactttgaggccagcctggacaacacggtgaaaccctgtctctacaaaaaaaatacaaaaactttgctgggcatagtggtacacatacattantgggaaaacccagctacttgggaggctgaggcgggagaatcacctgagccaggaagtcaaggctagagtgacatcatgccgctatactctagcctgaatgacagagtaagaccctatctcaaaaatta

SEQ ID NO: 103855 - DNA, 378 bp, Homo sapiens
gagaaatggttgtaccttgatttaaatccatgtagaaattctaatacattgattaaaggagcaggatatggtgagattctgtaatcttatgttcatgactcgtctcagtttagatcaaagttatttttattaagtcacagaaatcttagaacaaataaaattacttggaagtaaaattatgtgtttctgtattttacagttacatttcttgtgttttttgtgtggttctttcgtaggttcaacctatttttatattttcaagaaatatatggctgggcacagtggctcacgcctgtaatcccagcactttgggaggccgaggcaggtggatcacctgagatcaggagttcgagacctgcctggccagcatggtgaaac

SEQ ID NO: 103856 - DNA, 214 bp, Homo sapiens
ttaattcaaaaagatacaaatatatattacatcaaagaagcgttataaattcctaataagcacattaaaagatatctagcatcgtcagtcattataaaatgcaaattaaaatcatgagatacacactagaatggctataatcaaaaggacggataagtgtttgtatgaatgcagagaaactagaaccctcatgcattgctggtagggatgttaa

SEQ ID NO: 103857 - DNA, 399 bp, Homo sapiens
aaatggctaataagcacattaaaatattttcagcatcactaatcagaatggaaatttgaatcagagccacgatgagagagactgattcatacctatcaagtggctggttttaaaaagtaaaagagaaagtaacaaatgttggcaaggatgtggaagaactggaattgttatacactttcagagggaatgtaaaatagtgttgctgctgtagaaaacagtttgacagtttctcaaaaagttaaacatacggctgggtgcagtggctcactcctgtaatcccagcactttgggatgcttgaggccaagagttcaagaccagcctggccaacatggcaaaaccctatctctactagaaatacaaaaattagcctggcatggtttgcaccttagtcccagctt

SEQ ID NO: 103858 - DNA, 386 bp, Homo sapiens
cttaaaaaacactgttggtctcagtggcacacccttgtagtcccagctactggggagactgaggcatgaggattgcttgaacctaaaaagttgtatccagcctgggcaacatagtgagaccctgtctctaaaaaaaataataataatactgttaaatagcagaaatgactgctgtgagtcaggtggtgattttccccattcttgcctttagtaacaatcctggaatgtgacaaagccatctgcaggagaggcaaatcatttgacttttttctcttaggcccttcattttatttttttaaattactattattattttttatttttgagagagagtcttgctctgtggcccaggctggagtacagtagcgcagtcttggctcactgca

SEQ ID NO: 103859 - DNA, 327 bp, Homo sapiens
gaggttaattataatccaaagggtaagcactaagggaacaaccaaaaaaactgtacagaaaaggaaatgagaaaggaatcaaaatggcacagtacaaaaaaatcaggtatatatgcaaaaaggcagtaatggaggaattgaggaacaaaaatatatgacatatagaaaacaaatagcaaaacagcagaagtgtgtcctttatctgtaattactttaaatataaatggattaaactctccaattaaaaggcagagatgaacagatttttaaaatcccattcatatgttgtctacaggagactcactttagattcaaaggtacaaatag

SEQ ID NO: 103860 - DNA, 649 bp, Homo sapiens
gagttcggcacgaagagctaggcaccatgattcaataccctgtctctactaaaaatgcaaaaattagctggaaatcgcttgaacctgggaggcgggggctgctgtgagccgaggtcattccactgcactccagcctaggcaacagagcaagtctccacctcaaaaagaaaaaaaatttaaataaataaataaacatagctacacaatgagaagactggacctagggactgggtaggatatagcagggcaaagtctccacgtgaagtccaaaccctagggcagctgcacctccccaccccactggccctccaccacacggacactgactcacagcagagccacgctcctagagacacttggggtgttaagcatcttgttggggttgccacaaacattcaaatagtaaaatcaaccagggcagtcgagactggacatttctatgtcgatgtctgtttatacctgagcaaagaaatactaagtggccgtgtccctagccagatcaggagtcctggtttttctttctttttccattcccccctcaacatttgcttatgaaaaatgtcaaacatacaaaaaggttgagaggattattcagtgacatccctaaacctaccacctggttttgtttggtacggagggaggggaatgg

SEQ ID NO: 103861 - DNA, 390 bp, Homo sapiens
ttttttttttgagtcggagtctcactctgtctccccggcttgagtgcaggggcgtgatcatggctcactgctacctccgcctcccaggaaaatcgcttgaacccgggaggcggaggtttcagtgagccaagatcgcaccattgcactccagcctgggcaacaagagtgaaactctgactcaaaaaaaaaaaaaatcctttgaaggattggtagggttaaatggcaaaccggtttgttggcttttaaagggttaccggaaaaaagacctaggaattacccctgggggtcccacccttgtgaatggcaagaatatggggccccaaaaacaccaaaggccttttgaaaggaggggccagtttaagggggaagaaagataaggtttgtttgaaa

SEQ ID NO: 103862 - DNA, 398 bp, Homo sapiens
  misc_feature (1)...(398): n = a,t,c or g
gtggggaggtgctgcacacttttaaacaatcaaatcttgtgagaactcacaatcttgatgacagctagagatggtgaagccactcatgagaaaccactcccgtgatccaatcacctcccaccaggccccaactctaacaccggagattaattacatttcaacatgagatttgcataggaacaaacagtcaaactatatccggtatatacttaagagtagaattactgggtgataattctgttttacgttttgaggaattgccaaactatcttcctcagcagttaaaccatttacattcccaccagcagtatactaggtttccaatttctccacatgttcaacaacactagttattttttcttctaattatagccattctagtaggtacaaagtggtan

SEQ ID NO: 103863 - DNA, 462 bp, Homo sapiens
tatttcatctcctctattaactttaatcacattttcaacatgcagccaagaatgaagctttgacagtaagccatacatttacacaggcaggcattgtcaattttctgcagtcgccacactgagataacacaagagagctggatattttctttcttgtgcctttctttactaaagagcaataaaaaatatgtgaaagatttatccatacctcaaatttgtttaccataaatctcgaaattattgcatttacttttgcttggtttatggcaaataaaaaatcaacttagttcttcagttagattttttttttgttgagatggagtctcactctgtcacccaagctggagtgcagtggtgccatctcagctcaccgcaacctccgcctcctggagttcaggtgattctcgtgcctcagactcctgagtagctgggattacaagcgtgcaccaacatgccgggcta

SEQ ID NO: 103864 - DNA, 396 bp, Homo sapiens
  misc_feature (1)...(396): n = a,t,c or g
taggggccctggcggtcgaggactaggatcgggcacgtgctttcaccccggccgaggaggagaacccattgtataccaacacctattctgatttttcgggcccgcccgagaattatattcttatcctaccaggcttcggaataatctcccatatgtaacttactactccggaaaaaaagaaccatttggatacataggtatggcctgagctatgatatcaattggcttcctagggtttatcgtgtgagcacaccatatatttacagtagggatagacgtagacacacgagcatattttaccccaccctaccacacattcgaagaacccgggtacattatatctagacggagaagaaaaaccaaggggtttttgttttagggggccgggggtttttn

SEQ ID NO: 103865 - DNA, 407 bp, Homo sapiens
  misc_feature (1)...(407): n = a,t,c or g
ctttccctctccctctccctctccatttgcctctgtctccctctccctctctttccacggtctccctctcccagaacacacttggtttatcgatggcagtccaaccaagcctaatcgccactcacaagcaaaggcaggctatgctatagtaccttccatatctatcattgaggctactgctctgcccccttcactacctgttaacaagccgaactcattgccttaactcgggccctcactattgcaaagggactatgcatcaatatttatactgaccccatatcctgcaccaccatgctgttatgggctgaaaagtttcctcactacacaagggtcctccatcattgacgtctctttaatagaaactcttctcaaggcctttttacttccaaaggaagctggagcan

SEQ ID NO: 103866 - DNA, 597 bp, Homo sapiens
  misc_feature (1)...(597): n = a,t,c or g
gcaagttacaaagcagctgctcagtatgagcccgttctgggagcagtggggagaggagtggtcatattgcacaggtttcattgtgttctcagtggctgtctgctgatttttactgtttccctttgactcatctatttaccttaactgtagtttctaagtttttttgaagtgttcattactaaggtaattttttttttttctntttctttggaggggacagagtcttgctctgttgcttaggctggagtgcagtggctcaatcctcctactcactgcaaccttggccctcacaggttcaagcgattctccctacctcagcctcctgagtaactgagtaactgggcattacaggcgcctgccaccatgcccagctaatttttgtacttttagtagagatggttttaccacattgggccaggctggtcttcaactcctgacctcaagtgatctgcccaccttggcctccccaaagtgctggggattacaggcatgagccactggtgcacggtctaactttcaacaggagttttaatttttttttttaaatttaaaagaaaagaccgagaataaaatgtacagagtttaaaggtagaggca

SEQ ID NO: 103867 - DNA, 409 bp, Homo sapiens
gtaaaataggacaattacatttggcacatcaatctactcttcctttcatgaaagagttctctgtagcatgtgatactgtttgataccattttaaccacagtacaacttctttcaaaatttgagtcaattctcccaaacccagccactgcttcatcaactaagtttatgtcatagtctaaatctttatcatttcaataatgtttgcagcatcttcaccaggagtagatttcatctcaagaaaccactttgctcatctataagaagcaactcctcatctgttcaggttttatcttgagattgcagtaattctgtcacatcctcatgttccatttctatttctagttctcttactatttctttttttttttttcccaaaacaaagtctttttttgtcacctaggacgggagg

SEQ ID NO: 103868 - DNA, 349 bp, Homo sapiens
gtatggcacaagaggcctagctttcaacctatctgagcttttgacatgccttcctcataagcttaatcgtttctagctttttggtttaacgtgagagagatgcgactttccctttcacttgaacacttagaggccattgccattgtagggtgattaattggcctaattttaatattgtatctcagggaatagggagttctgagagagatgggagaaaggtgggggaacagccagtcagtggagtagttagaacacacacaaaattgatcaatgaaggtcactcttacatgagtgtggttcatggattggaataatagtaatatcagagatcaccataacagataataat

SEQ ID NO: 103869 - DNA, 260 bp, Homo sapiens
  misc_feature (1)...(260): n = a,t,c or g
aactttgtctggtgttaatacagcaactccaaccttcttttgactaatgttagcatagtatattcttcttcctatctttttaaagattttatatttaaagttcatttcttgtagatagcaaataattgagtcttactttnnnnnnnnnntccatctaatagtctctgcctttaaaatgaagtgtttaggccatttagatttaatgtgattattgatgtggttggatttgagtctatcactttgctggttatttatttatt

SEQ ID NO: 103870 - DNA, 270 bp, Homo sapiens; identical to SEQ ID NO: 103378
  misc_feature (1)...(270): n = a,t,c or g

SEQ ID NO: 103871 - DNA, 383 bp, Homo sapiens
agcaaaagtaaggtgcaggatctaaaactggagaatttaatgccagcaaaggatggtttgataattttagaatgaggtttggtttttaaaagtcaagataataggagaagcagctcctgccaaccaagaggcagcagccaggcagcccagctttgctaagggtctctctcagtgtgctgaggctgcggaaaggctgcagcctgcaggcacttggcacacacccttcctgcttgctaggatgccaagaggaaggtcagctccaccgaaggggacagcgaaggagtagctcatgaaaggagatctgcacacttgtcagctaaaccctgccctgccgaagtggaactaaaccccaaaaggcagcagaaaaagggtaatcttccgag

SEQ ID NO: 103872 - DNA, 378 bp, Homo sapiens
ccctgccctcagagagcttacacacgaggagagggggccaaccaaaaaaacaaaaaaacaaaaacagctgacagtttaacaaagtgctgcaagtgctgcaaagaaaataacaggatgctgaactagagaatacctgggggatctgccttgggcaaagagatcagacagtgtttcggggtgaaggggcaagctgagattggaaagatagaaatgagtcagccaacccaagagcgggaggtagttgagggaattggttctcagaaagcagcccaggtggatcatctgaggtcaggagttcaagaccagcctggccaatatggtgaaactccgacactactaaaaatacactaattagccgggcatggtgcaggtgcctgt

SEQ ID NO: 103873 - DNA, 372 bp, Homo sapiens
aacaacctgcacaacctggatttttttaaaaatacaacacttgagcctcagagttccaggctgcagtgagctgtaattgcaccattgcactttagcctgggcaacatagtgagacgctgttttaaaaaaaaaagtggctgggcgcaggggctgacacctgtaatcccagcactttgggaggctgatgtgggcggatcacttgagttcagaagtgagaccagcctgggcaacatgatgagaccctgcctgaactttaaaaaaaaaaaaaaaaaaaaatttttattaaaggggccgcaggttttttcttttaagggggggtaaatttaagttgggcctgggccgggttttaacaacgcgggggggtgggggaaa

SEQ ID NO: 103874 - DNA, 421 bp, Homo sapiens
taatcattcatgtgttcactggagtaatacttctaatttccttcaagaacttttcctttgcattcacaacttggctaactgatgcaagaggcttagctttcggcctgtctcagcttttgacatgcccccttcctcaataagcttaattgtttctagcttttaatttaaagtaagagatgtatgactcctcctttcatttgaacacttagaggccactgtagggtaattaattggcttaatttcaatatcactgtgttgcaggaaataaggaggcccgaggaaagggagacagacagagaaacggccactcaacggagcagtcagaacacacactactttttactgcaataaagcgaaacacaataaaatgaggtatgcctgtatttaaacaatactttgatatctaatctgaaaacatatt

SEQ ID NO: 103875 - DNA, 402 bp, Homo sapiens
  misc_feature (1)...(402): n = a,t,c or g
aatttttttgttctttatggagacagggtttcaccatgttgcccaggctggtctctaattcctggactcaagtgatctgcctgccttggcctcccaaagtgttgggattgcaggtgtgagccactacacctggccctttcatttttatgttatgtagatgggttctttccttaaacctcatgaagcaacctcttctaacttttcttcagcttcctcaactgtctcagccctcatagaattgaagagagttatggtcttgctttggcttatggaatattgtggttggtttgatctttccagtccatgaaaacattcttcttaccagcaataaggctggttcactttcttggtattcctggggttattggagnagcacttttaatttccttttaataactttct

SEQ ID NO: 103876 - DNA, 389 bp, Homo sapiens
  misc_feature (1)...(389): n = a,t,c or g
tcctttttctctaagatttttataggtttagctctcacatttaggtctttgctccattttgagttagtttttgtatatagtgaaaactatgtgatggttttgctttttttttgcatgagaatattcatttttttagcaccatttattgaagagactgtcctttcccattaagtggccaggctggtctcaaactcctgacctcagatgatccacccgcctcgacctcccaaagcattgggattacaggcatgagccaccgcctgtcctcaacagtggtttttgcagaaatagagaaacacagccaggcgcggtagctagttcaacctagtttgaataatatcaatttagtttcaataatatacaaacgctctgctcctatatgtctctcn

SEQ ID NO: 103877 - DNA, 374 bp, Homo sapiens
tctcatagagacatagtgaaaatttctgaaagccagccaggcagctgtgcaattgtccttaagtattttgtagcttttacaccattaacgaaactgaaagtgcagggtagagtgctcagtgccagcctgaccaacatggaaaaaccccgactctgctaagaatacaaaaattggctgggcctgatggtgcatgcctgtaatcccagctactgaggtggaggttgcggtgagccgaggtcgcgccattgcactccagcctgggcgacaagggcaaaactccgtctcaaaaaaaaaaaaaaaagggtttttttttttgggggggggaatttttaaaaattaagggggggtaaaccttttttttaaaagcccctttg

SEQ ID NO: 103878 - DNA, 376 bp, Homo sapiens
gggtttgggggtgcacacctgtagtcccaactactgggaggctgaggcgggagaatcacctgaatccacgaggctgagggtgccgtaagctgagattgcgctactgcactccaccttggcaacagtgtgtaacttcgtctctaaaaattatataataaacttgcataaccctatgcgaattcaagttttggataaaaagtgatttaaaaagtcactttatagatggcctcttaaccatcataactagagattgcatctacagaaaatgatgcttaagcatttggccatttagtagattatagaacaattctaacacttcaaaccttttattcatgaaggaataaaattgttaaacaataatactgagaagtcactg

SEQ ID NO: 103879 - DNA, 372 bp, Homo sapiens
  misc_feature (1)...(372): n = a,t,c or g
gttacataggtatacctgtgccatggtggtttgctgcatctatcaacccatcatctaggttttgttgttgttgttgtttgtttgtttgtttgtttgttttttgaggcagagtttcgcctttgttgcccaggctggagtgcaattgcacgatctcggctcaccacaacctccacctcccgggttcaagcgattctcctgcctcagcctcccagtcatctatgttttaagccctggactcatcatcaataaacactgttacagcnnanaaaaaaaaaaaaaaaaaaaaaaaaaaaaaaggtttttttttttggccccccccccttttttttttttaggggggggtttttttttttgggcccgggcccggtttat

SEQ ID NO: 103880 - DNA, 370 bp, Homo sapiens
  misc_feature (1)...(370): n = a,t,c or g
taggttttttgtccaaattccccaccttaatgacatcatcttcactaattacatgtacggcgaccttatgtccaagtcaggtcacattctgaggtactgggcgctaggactttaacatgtgaattttaggggaacacagttgaacccgtagcagtacttaacctttctaatcctcaatttcgtcatcttaaaaatgagtaaactacacattaatgtgggtaccatcaaaaaaacaaaaaaaccaacccaaaaaatagtaagtgttggcagggatgtggagaaattggaactcttatgcactattggaaggatcataaacaggtaaacactatagactatagttcagcagtttcttaaaactagaattatn

SEQ ID NO: 103881 - DNA, 377 bp, Homo sapiens
  misc_feature (1)...(377): n = a,t,c or g
cccatttccgctcatggcccagagaccaactcacctagtgcccctgtctgcaagctccgggacgtccttgcttatgccttctaccctgctctggctgccctggctttacaaggctcatgccgtgccaaccgtaccactatccaagctttttgaccacaccaagccctatgcagtctcaaaaaacaacctgggtgccttgtctatttgaagctactaagttatccctgttcctcccaggtccagattcattttataagagacaaacctacttctatcttaagtaaggggaagggatttgagactgaagatattgtgagaaagactcttcaagcccatttcaaatatgtccacacttctaacccttttcttgcatatcn

SEQ ID NO: 103882 - DNA, 381 bp, Homo sapiens
aatatcctgcacaacctggatttttttaaaaatacaacacttgagcctcagagttccaggctgcagagagctgtaattgcaccattgcactttagcctgggcaacatagtgagacgctgttttaaaaaaaaaagtggctgggcgcagtggctgacacctgtaatctcagcactttgggaggctgatgtggccggatcacttgagttcaaaagtgagaccaccctgggcaacatgatgagaccctgcctgaactttaaaaaaaaaaaaaaaaaagcttttttatttggggcgccggggttttttttttttatggggggtaaaatattatttgggattgcggcgccatttataaatgggggccttgataaaacacgtggaatg

SEQ ID NO: 103883 - DNA, 384 bp, Homo sapiens
aatacactgcagttggatctacagagtctggagctcagaggagaggtctgggctgtccatataaatttggatttagtacattctagtttttgaagtacttattcagttttacatttctaagaatgtgttagattttgataaaacaagaatgagtcagtaaaatgtgctagtttttgatttatcaaatacttctagggtaaggggaagaaaggttatctgtacagtgttctgcttttaaatagctaagatgacatataaacatatccctccaaacttttttttttctgagacgggagtctcactctgttgcccaggctggagtgcagtggcgtgatctcagctcactgcaacctctgcctcccgggttcaagtgattctcctgct

SEQ ID NO: 103884 - DNA, 401 bp, Homo sapiens
aatacatttcctgcaaagtgcaccagttataacatggattaaaaaaaagaaaaaagtgggggagcggccaactcagtgaaattacatacatatatacacacaaaaaacacatatatacacacacacacacacatacacacactccttagacaccaaaaagtaaacttaggtggaatgaaagagattttaatgcatgttcatccactaagtgatttgcttttacagattctattacacacactcagttgtagagggacattatgtactagccaattaatggggtgccaatgttaccataaccagaggcttaattgctttcttactgaactggaaacttcagcttcatcccatataggtgactttcatctagtttttctagtgtgatttttttttttttttta

SEQ ID NO: 103885 - DNA, 433 bp, Homo sapiens
ggggagggcggcggtggctgcagcggctggagcggggtagagaccgccgggtctcggcccgcaccaggagcggaacaagacttgctccccgcgccagccctcggcagatggcagggacttaattccgtctgctacccagcttggcctcaacctaatcgccgccagcccctcgccctcctctgcgctgcaggccttgggcccgggcaaaggctggagtgcagtggcatgatcatggcccatcacagcctcgacctcccgggctcaggggatcctcccatgtcagctgggaggcatagctgggactacaggcacgtgccatcatgcctggggagtttcaccatgttgcccagggtgggcttgaactcctgggcccaagtgattggcctcccacagtgctgggattacagatgtgagccaccacacccggccattt

SEQ ID NO: 103886 - DNA, 375 bp, Homo sapiens
aatacatgtgtgccagctgtagtagtccacgcctgtacttcaagcatctcaggaggccgaggcaggaggatcacctgagcccaagagctttaggctgtagtaagccaaggtcacaccactgcattctagcctgggcaacagagcaagaccctgactcttaaaaaaaatacaatgtgtaatggtgatataataactcaaaggttaatcatctctacttttgaaaacaataatgaataccttgctttgcatttgtgtagcctcacatttttttcagagttcttcaaaaaatattatctcatgttcatgctacaagcaaccttgggtgggaacaaaggttaaacatcattaatttcactttaaatttttccttctttc

SEQ ID NO: 103887 - DNA, 356 bp, Homo sapiens
aatacaggggggcatgggagagggaggccgccgtgccatggctgagggacacaaagcaaagacagggagagaggggaagaggacagactcagacagtccagcccacggcaggctgtgggctttggcaccagggacatttgggaccagagcatgctgcactgtgaggctgccttgcgggggcgtgtcctgtgcacggcagggcgctgagtggcatccctggcctctattcactagatgccgactgcaccccagactcccagctgtgacaactaaagtgtctccagacactgccatattccctggagggaaaaagtgctgggcttgagaatcactggtctatggcatcaagaacagag

SEQ ID NO: 103888 - DNA, 368 bp, Homo sapiens
aatacatcctctgggtagataacagtagtgggactgctggatcaaatcgtagctctacctttagttatttaaggaatctccatactgtttttcatagtgattgttctagtctacattcccaccaggtataacacatatggccactacctgctgtaactcacacgctcaaaccatagcaggaatccctatgtcctcgctcctctaagtcagcccacaccctaagcactgtggccttgcagactccagggtggaatggagaatagccaactcttgtcctggcacccctctgccaaatcccactcttggccagagtcccttcccagccttgtgttcccttgacatctcactgtcaggttagagagaactgc

SEQ ID NO: 103889 - DNA, 407 bp, Homo sapiens
ttcgccattcgtgcatacctgcagttgtagctactggggaggctgaagcgggaggatcacctgagcccaggaggccgaggcctcagtgagccatgattgcaccgctgcactccagcctgggtgacagagcgaggctgtctcaaaacaaccaaccaaaataacggacaacacaatgtggaaggagaagcctgcagcagcagaccattcacaacaatctgtgagaaaaaattcatcttgtttgtgccctaactgaagaggactgacgattagcagcagaaacaacagccaacaccacagacatcccaattggttcagcttacagaattctgattaaaaaattaaagccgagcaaactttccacttgctagtggcaaaacagttgagcccaggtcagctgcagacaaaag

SEQ ID NO: 103890 - DNA, 422 bp, Homo sapiens
aatacaggtcctctagtaagactttcctgatcattcggaggggattcatcccttctagtaccttccttctagctcacttatccactacgctgagtaccttgagtcatttccaaaaaggctgggtaaaactcttttttttttttttttttaaaaagggatttcctttttggccccccgggggggggggaagggccaaaccttaatttatgggaaccccccccccccaggttaaaaaaatttcccggccctaccccgccaaggaggggggaaaaaggggtggccccccccccccgggccaattttggttttttaaaaaaaagggggtttccccttggggggggggggccaaaaccccggaactgggaaaccccccccctgggccccccaaaggggggggaataactgggggacccccccccccc

SEQ ID NO: 103891 - DNA, 1421 bp, Homo sapiens
ggcagcggcaccgttatggaattaccggctcgacgatttcgtctgctcagcacacagcccctcagtgccttccctcctcccccagggctggggtgggctggcggggccacccctgctgatccatcccttggcttctgggcccagctcccctgactgcacagaggggactgtggagctgtgggctggggcctcatggaggcatgtcctccttcccagccaaggtgctgggatcctgactgtcacctgccccaaatccagcctgggccctgtgcaccctgggatgggtcacaggaggcctgagaaccaggtccaggctgcggtttgggtgaaggacaaagggacgtcctcttctgctcgctttgcctgttctgcttcttctgtttcttcatctcgccttcttttcagctccccctgggcccagctccctgtccagcactgaagacctgaaatggaccttactcagccctgcacagagcaggaaacttcagccgcagtcgctgcacagggctggggtgcgtgatctccagtggcagggtcgtgcaggagcagagctcacggcagcctgcggccggcgccccctcgcccggagacagctgtcctcttgcagggtctgccgtgccggagggaaggctgctgttggagtctcttaatggctttgctctggtcgtgagtgcagaagggacgatattttatgcatcagcaacgatcgtggactatctgggcttccatcagacggatgtaatgcaccagaacatttatgactacatccacgtggacgaccgccaggacttctgccggcagctccactgggccatggaccctccccaggtggtgtttgggcagcccccgcccttggagacaggagatgatgctatcctggggaggctgctcagggcccaggagtggggcacaggcacgcccaccgagtactcggccttcctgacccgctgcttcatctgccgtgtgcgctgcctgctggacagcacctcgggcttcctgacgatgcagtttcaaggaaaactaaaattcctgtttggacagaagaagaaggcgccgtcaggagccatgctcccgccgcggctgtcgctgttctgcattgcggcacccgttctcctcccctccgcagcggagatgaaaatgaggagcgcgctcctgagggcaaaacccagagcagacaccgcagccaccgcggatgcaaaatgcggtcttgactgaccttgtcagagtccaggctcccgaactagtttgagatctgggactcagcagcacccggcacgctgccgtccctcccgttctttggcgcctttgacgggcagcacatcttctgtattcacacccgtgccctccgtgggagcaccaggacccgccaatgtattgcggccgctctagagggtgcaagctttcgaaatcatgtcgagctg

SEQ ID NO: 103892 - DNA, 383 bp, Homo sapiens
  misc_feature (1)...(383): n = a,t,c or g
nnnnnaacactcccgtatgcttttggttttgtcatgctggcatgaatggttgttattccagcttaccaagaaatttcaggagtcactttgctaattctatctaaaaatttgtatcattaaaaaatgttaaaaccaacctaacacccattataatagctgctacttttttaaaaaatagaaaataaggtttggcaaggatatgaagaaatcgaaacccttgtgtattgttggtgggaatgtaaaatggtacaactgctatggaaaacaacatgggtggtcctaaaaatattaaaactaggaccaccataaagattcaataatcccacttctgggtataaaccaaggaactgaaatcaggttctgcaagagatattcaaacaccc

SEQ ID NO: 103893 - DNA, 388 bp, Homo sapiens
aatacagtggtggtgtgcacctgcagtcccagatacatgggaggctgaggcaggaggattgcacgagcccaggaggtcgaggctgcagtgagtcacgatcgtgccactgcactccagcctgggtgatagggtgagatgcttattcaaaatagataaataaagagccaactaaaaaaaagtccgtcttttaggcagggtaaaagttttatcatagtaggctgtcaatgagcagcacttttcttaatttaaaattttgcatttgaaaaatggagaacattagagaagtcatttacaacattatacaaataggttagaaatagatcaaggaaacagattttaaaggagttgatattctatgttttaaaagaatacccaggccgggcgcggt

SEQ ID NO: 103894 - DNA, 435 bp, Homo sapiens
  misc_feature (1)...(435): n = a,t,c or g
gcacgcgcacgtatgctnnnnnnccctacagcggccgcaatacactggttttcagctccatcaggtcctttaagtacttctctgcattggttattctagttagtgatttggctaatcttttttcacgggttttaacttatttgccattgactcgaacttcctcctttagcttggactactagattgtctgaagccttcttctctcaactcgtcattctccatccagctttgttccattgctggcgaggagctgtgttcctttggaggaggataggcactctgatttttagaatttccgctttttctgctctgttttttccccatctttgcggttctatctaccttcgggctttgatgaaggcgacgcacagacggggttttggtgcggatgtcctttctgtttgttagttttccttctaacaatcaggaccctcc

SEQ ID NO: 103895 - DNA, 387 bp, Homo sapiens
atctgccatttaacctgaacccagcattttcttatattagtgcaggaaggatgtgaatttccagcttagttttactctgttatatatattcattatcaaatatcaataatcagtgacagtgagagtaagttaaaaacaagtgtaattaatatattgtaatcttcacatctgcagtctactctgctttttgccctactatagtatttctgaattttttttttttttaaataaaggcttgctccgttgcccaggctggagggcaagggcgccatctcgggtcattgcagcctccacctcctgggctaaagcaggactcctgcctccctcccgaggagttggaactacaggcatgacctaccatgcccagtttattttttttgggtttgg

SEQ ID NO: 103896 - DNA, 382 bp, Homo sapiens
cggacgcgtgggctagaacctattccatgataccatctcatgaaaaatacccacgtttccattatgataaatcctatgcaaatataagatgctggcaggcagggaagattgttcttcagtgggtctaccttgccaaaatgagggcttatcacctgactcccatcctgtgcatctcaatgatgagcagtgtcaattctggattccctgccccttgtcttcttactctgagagagagcagtggtccagcctgggtaacatggcgaaactcatctctaaaaaaattatgaaaattatccagatgtggtggcatgtgcctgtattccaagctactcaggaggctgagatgagaagatcacttgaacccgagaagttggggctgcag

SEQ ID NO: 103897 - DNA, 417 bp, Homo sapiens
  misc_feature (1)...(417): n = a,t,c or g
gaagcttgtcccgcagaccgtccgaattccggtcacccaccgtcgaaaatttgttaattgagcaacttttcaggatcggaagctattaagaatgatgaggtatgacactgtaataacactgtagtaatggtgacattcatctctgtctttgaactttactggtataagggagctactgcttttttgttaggagaaacctgttgattgtgaagtatatgagatctgtccatcttttattcattatgcttctatattgnggagattaatggtacgtgacaactcagtataatttttgtattttgcaaaaacaggagaaattgatatatcgtatagctctgttagaaatcccagctctttgagaggcggaggtgggtagatcacttgaggtcgggagttcaagaccagcctggccaacan

SEQ ID NO: 103898 - DNA, 402 bp, Homo sapiens
cctctgttaactttatttctcaattttttacaggtttggataattaagggagcactagaaaacttttttttttttttaaaaaaggaactcggccccccggcgggaaaacaggggaacgggccaaaccaaatgaaatccccgccccggggaaaaaggaattttttttgcccaaaccccccgaaaaaggggaaataaaggggcaaggccaccaggccaaattaatttttgatttttaaaaaaaaccgggtttaaaaaggggggggggggggggtcaaaaccccggcccgggggaaccccccccccgggcccccaaaggggggggaaaaacggggggggccccccccccccacccaaaaagggttttttcgggggaaaaaaaaaaaaaaaaaacccgccccgccc

SEQ ID NO: 103899 - DNA, 400 bp, Homo sapiens
cttgcatggtttacttaatgcataacataagattcaggttcattgtttaaaatgcagaaagtctagagctgtgtggagcacttgaagagtgggtagctcaaattgagatatgcagtaatgtgaaatacccagcagattttgaaaacttaatataaaggaataacttagttttttatattgattacatgttacaatgataatattttggttatatttgattaaaaatatgttattaaatttcacctatttctctatatttttagtgtggctactagtacatttaaaattgtttgtgtgggctgggtgcagtggctcacatctgttgtccccacactttgggaggctgagacgggtggatcacatgaggtcaggagttcaagaccaggctggccaacatggt

SEQ ID NO: 103900 - DNA, 403 bp, Homo sapiens
cccacgcgtccgattgcccaagagtgcaattgctgggttgtataataattgaatgtttattattttagggaactgcctgtttttcaaattggctgtatcattttacagtgtatgagtgatctgatttcttcacatcctcaccagcatttggaggagtaacttttttattttagtcattctgataggtgtgggaggtgatagatatctcattgtggtttttaacttgaatttttctaaaggctaatgatgttgagtgtctttttaatgtgcttatttgatgcttatatatttatgtatatatagcatatacatatattgcatatttatatataacatatacatgtatatatatatttatttcccattataatttatttggggaaatatctgtatatttgtcctg

SEQ ID NO: 103901 - DNA, 405 bp, Homo sapiens
taaaattaagaaatcacttctcagcaaagatcaaatttagagaactccttggaaaacaccctccaatgatgaagctccttatagtatttaataaaaattaataaaaagttgacaaagatgtggaaaaattggaaccttcacacactgctggtgggagtataaaatggtgcagcctctttggaaaacagactggaatttacttcaaagattaaatatagagttaccatgtgacttagcaattccactcctaaatttatacccaagagaaatgaaaacaagcatttatatatgtacatgaatgttcatagcagcattattcataatagaaagtggagacaacccagtgttcatcagctgatgagtaggcaaaatgtggcacatttgtataatgaaatgttgtttgtc

SEQ ID NO: 103902 - DNA, 372 bp, Homo sapiens
ccccgctactcagaaggctgaggcgggagaatcacttgaacctgggagaaggaggttgcagtgagccgagatcaagccactgcactacagcctaggagcgagactctgtctcaaaaaaaaaaaaaaatttttgggttaaaaattatagttttttttgaactagggacccagggtgttttatggaattttagccaaatgggggccacctttaaataggttttaggggattatacccttccctaggggtgaccatacatgattatttttttccggggtttttttgggtttttataaaaacatacaaggctccgggttttgggcttaattttttaataaaaaatagattttttttttacggttaaaagctttttt

SEQ ID NO: 103903 - DNA, 435 bp, Homo sapiens
  misc_feature (1)...(435): n = a,t,c or g
gcnnnaaatcacttgaacctgggaggtgtattttgcagtaagccaggatcgcgccattgcactcaagcctgggcaacaagagtgaaactccttctcaaaaaaaaaaaaaaaaaaaaaagggggggggccctttttaaaaaaaaaaaattttttaccccggggggggggaagaatttttttttttagagggcaaaaaaaaaaaattcctgggccccctataaaaaaggggggaggggaaaaaacccccgggccaaaaaaaaaaatttccgagaaaaaaaaanntngngcttttgtgaaaatgttttcctgtgaagacaatgattttttccttatggaggctgttgacacacagcacttgccctttcttttatatacttgaataaaacatatgattattttggcctaatcaacaaccattctaattatgtcgatttt

SEQ ID NO: 103904 - DNA, 431 bp, Homo sapiens
  misc_feature (1)...(431): n = a,t,c or g
naaaacttgaacctgggaggtggaggttgcagtaagccaggatcgcgccattgcactcaagcctgggcaacaagagtgaaactccttctcaaaaaaaaaaaaaaaaaaaaaanggggggggcccctttaaaaaaaaaaattttttttcccccggggggggggaaaaaaattttttttttaggggcccaaaaaaaaaaatccggggccgggtttaaaaaaacggggggggggaaaaaccccgggcacacccaaaaaaaaagccgtgaaaaaaaaannnnntngttattttaaatggtattgatggtccagttgttgtcctgaaactagacgaagtacatgctccatacataagtttttttgtgtggaagaatatcttgaacacactggtgatctggtttcaagcctggacttcaggatcgtctcaaaagttt

SEQ ID NO: 103905 - DNA, 389 bp, Homo sapiens
aaaacaattacccatgaggtaattactgaatgcatttggttgaaagtccttctgctatattttccaaactgtatgtgtatatatgtgcgcatgcatatatgtgtttgtgtgtgtgtacacatatctatatgaatggaccatatcgtaagttataaatgcatacatatattcatgtatatataatcattagatcatactataggttattttacagtctttttgttgaatacgttgtgagcattttatgtcattattttttacaagatttgaaaaataaagtataaataccagttaatttttgaaatcaaccttattaaggaataagttccatgcagcaaaatccctttcacctctactgttcgatgagttttgacaatgtatgcaaccgt

SEQ ID NO: 103906 - DNA, 399 bp, Homo sapiens
  misc_feature (1)...(399): n = a,t,c or g
cggacgcgtgggtttttttttgacattttgtttcattggggggctgaatattttccatgccctcactcctttaagaaaaaaaaaaaaaagggaaaaaacccccccccccttttctttgtggggggaataataactagggttacccgggggagacacccggggggggggaacaattgaaaaccccccctttgaaagggcccttaattcccagaacgggggaaaaaaacccattgttgggcccaaaaacccggcccctgggctggggtctttgttccacccccaaattttgggaaaaaccaagggtaagggtggtagaccttaactaaaccaccccctgcctggaaaaaagggccccttggttaaaagcaaaaaaaacccctgcgtttgaaataaggatcn

SEQ ID NO: 103907 - DNA, 406 bp, Homo sapiens
actattagtgagtattcaaatggtttattatatgtgtaattggctccaaaaaacagtggaaaaaatagaaaaatatttgaaggaagaatggttgaaatgtttctaaacttaatgaaacaataaacccatagatccaagaagttcaattagagctaaacaaaagaaacatgaagaaaactgcttcaaggcacatcataagcaaattgcacaaatcagtgaaaagagaaactcctaaaagcagttagaggggaaaaaaagacatgtttgatacaagggaaagaataaagagaaggatgacatctattttttagaaacaatgtaagcaaaaaaaacagtagggggccaggcacaatggcttatgcctgtaatcccagcactttggaaggcccaggcagagggatcactt

SEQ ID NO: 103908 - DNA, 374 bp, Homo sapiens
  misc_feature (1)...(374): n = a,t,c or g
cctgaatcaaaacacaagccatgtgcagtgcatgcctgtggtcccagctacttgggaggtggcttgagaggatcacttgagcccgggagttccagtccagcctgagcaacacagtgagaccctcatctctaaaaagcgaataaaaacaaaaaaaacaccaaaacaaccaggatgtctcccatttgcactccacttaagggtggagacttaggctgatcacatcactgcactccagcctgagtaacagactgagaccctgtctcaaaaaacaaaatgagacaaaaaacctgctcgtaataaagtgtgaaattatannaggaaaaaaaaaaaaaaaaaaaaaaaaaaaaaaggggggggcccttttaaaaaatctt

SEQ ID NO: 103909 - DNA, 407 bp, Homo sapiens
agatccactccagatcctgtttacctgggtttcaccagcggaggatgcaaaacagaaaagagggctggctgtttcttcctctggaagcttcataccaaaggggcacctgccagatgccagccggagctatccggtatgaggtgtctgttgacccctgctaggaggtgtcttcagtcacgatacatggcggtcaaggattcacttgaggaggcaggctgtcccttatcagagctcaagcgctgtgctgggagatacacaggtctcttcaaaggtgggaggctggatcatttaaatctgctgaggctgtgcccacaaactaccctttgcccaggtgctctgtcacaggaagatggtagttttatctataagcccctgactggggcagctgcctttctttcatatatgct

SEQ ID NO: 103910 - DNA, 398 bp, Homo sapiens
cagtgcttcagtggaggaagtcactgcagatgtggtagaaataggatgagaactagaatgagaagtgaagcctaaggtgtgactgcattgctgttgatctctggtaaaatttgagcagatgaggagttgcttcttatgaataagcaaataaagtatcttcttgagatggaatctactcctggtaaagatgatgtgaacactgttgaaatgacaaaggagtccgaatattccataaacttaaagcagtggcagggtttgagaggattgactccaattttgaaagactctctgctgtgggtaaaatgctatgaaacagcatcacgtgctacaaagaaatctttcatgaaagagtcaattgatgtcgcaaacttcattgctgtcttactttaaattgccac

SEQ ID NO: 103911 - DNA, 454 bp, Homo sapiens
  misc_feature (1)...(454): n = a,t,c or g
tgacccccctagataagctgtnacnnncgcccgcaccggtccggaattcccggggtttgtatgtagtatgttcagtttttcttgggttgaatttccaaatatttagtaatgcttcccattagtggcatgggattaatttttttcgttatattttcaaggtttttttttttttttttttttgggggaaaaatttttcttttcccccggggggaaagggatttgcccaaaacccccctttggcccccccccccccccggggaaaggtttttcccccccccccccccccggaaaagcaaaaaaaaagggccccccccccccccccccccggttttttgtttttttaaaaaaaaccgggggggggttttttgggggggttttttttttttttggggggaaaaatttttttctcccccgcgggcggaaagggggggccccaaaaaccccctttcccccc

SEQ ID NO: 103912 - DNA, 372 bp, Homo sapiens
caataataagatctccacaaatctgtgatgtcttttcgatttttgatgtgctctaatgaaaacaaaagaaaatttataaagcttagaagaatctcattgattgtatatatatagttgatcatagtaggaagagttttattactggctgccatttccctttctaattgatttacataagctttaaaagatgttccgtttttatggccagatcttttgtaaatgattcaaaataggtgttggtataaatttccataaaaagttatcaattatgggctgggtggggtggcttatgcctgtaattccagcactttaggaggtcgaggcaagtggattacctgaggtcagaagttcaagaccagcatggccaacatg

SEQ ID NO: 103913 - DNA, 422 bp, Homo sapiens
  misc_feature (1)...(422): n = a,t,c or g
tgctggactatgaagtctaaatcaggtgggagcaggagtgaaggcagaaaaggccaagagaggacccaagcagagagttgtggggataagaggtctccatgaggccttaaaacaggtgtactgggcatcctgagagagctgggaggaggagaattgcttgaagctgggaggcggaggttgcagtgagctgagatcccaccactgcaccccagcctaggtgacagagcaagactccgtctctnaaaaaaaaaaaaaaaaaaaaaaaaaaaggggggggggccctttaaaaaaaaaaattttttaccccgggggggggggaaatttttttttttttttggggccccaaaaatttttttcggggggggggttttaaaaaggggggggggggaaaacccggggggccccccaaatttatggggtgg

SEQ ID NO: 103914 - DNA, 560 bp, Homo sapiens
agggtgatgggattacaggcctgagtccaaccataagtaagtttttgttttttgtttttgagtcaatctctctgtcccccaggctggggagcagtggtgcgatcatggctcactgcagcctcacctccaggcgggagccaccatgccggtcaattaacttttttgtttcagtaatcactttaaatgtaaataatctgaccaatggaaagatcggcagaatggattttttttaaatgatgtaatacacaatccaaatatgcaacttacaaaatactcactgtagacccaagacacaaattgtttcaaaatgaaaagacggaaagagataatccatgcaaatagtaaccaaaagagagctggggtggctatactaataccagacaaaatagattttaagccaaaaaatgttacagaaagacatcgtatgttggtaagagagtcaaatcacaagaagatgtaacaattataaatacgtatgaactgaaaaagaaaaaaaaagggctctaaaatgcacagtctaacaaaattgaaggaagaaatagttttacaataacagagac

SEQ ID NO: 103915 - DNA, 388 bp, Homo sapiens
aaatccttaacttttatggggccttgtgtttgtcttaaaagatcatgcgcatggccgggtgtggtggctcacacctgtaatcctatcctggatcccttgagtcaaggagtttgagaccaatgtgaacaacatagtgagaccctgtctctacaaaaaataaaatattagccaggggtggttgtgcacacctgttgtcccaactactacagtggctgaggctggaggagcacttgagcctgcactgagctgtgatctcaccagtgtactccagcctgggccacagagcaagaacttgactcaaaaaaaaaaaaccccgccaaaaaaaccctctgggatttttgatttcgggcccctaacccttggttttatgggcagaatatggaaaaag

SEQ ID NO: 103916 - DNA, 396 bp, Homo sapiens
cagcgaggaaatgctaactaaaaccattaggagattttattatgcgatccatttgaatgactaaaaagagtgattattgcaagcattggtgaggctacagagtaactggaactctcctatattatgaaggagaatgtaaaatagtgtgactactttggggaaatgtttagctatttattgttaaacatatacttatgtgatgacccagcaattcctcttctcccctatgtaccttacgaaaatgaaaacacggattcactcaaagacatgaccgatgcccatagcagctttattcataatagccccaaactggaaacaaaatgtccaggaacagatgaatggataaacacactttaacatacccatgcagtgcaataccacgtggcagtggagaga

SEQ ID NO: 103917 - DNA, 639 bp, Homo sapiens
tgcagtggggggctggtatttgggggcagggagagggggaaaagtccgtttgctggtactgagtgactttgggcaagttacttgcctctgtaagcctcaatttcctcatctataaaatgggataatattagctttcttgtaggattgttgggagaattaaatgagataaggaatatttgtaaagcagttaacatgaaacaggccctcaataaatggaaactaattttattgtttgtaatagaaaacaacaatgtgtcagcttctagtaataactttaaaatattctatgcatactatatagcaaaggcagttttacttataatcacagaacatataacactaagtatagttctaatacttaagaagcaaaataacaccagggcagtaaccaaatgctgggagaggaggtagagaaaaggaaaccctcatatggttggttggatgagaatgtaaattagtacaaccactatggagaagagtttggaggtttctcataaaagtaaaaatagagttaccatatgacccaacaatctactgggcatatactcaaaagaaaggaaatcagtatatagaaaaatatatttgcactcccatgttttgttgcagcactattcacaacagccaaaacttggaagcacc

SEQ ID NO: 103918 - DNA, 404 bp, Homo sapiens
tcgatcccatatacttatgaggctgaggcaataatttttacttgaacctggaacgcggaggttgcagtggtttgatatcgatacagtgcactccagcctaggcattatagtaagactctgtcttgaaaaaaaaaccaagcagactaaccacaactacaaaaattaaaaaaccccaaatacatgttattggccagaacatactcccctgttcaaatgtaaatataaggaaagtagggaaatacagtctcttatcagggcaattaatactggggattctgtttactagggaggaggacagatcatatttggttggccgcattagcagggaggaggacagatgagatttggcggccaacattagcctctgccacagggagaatttgatcagaagcaaatagacgaac

SEQ ID NO: 103919 - DNA, 389 bp, Homo sapiens
acagtttcactctgtcacccaggatgtagtgcagtgtcaccatcatacctcactgtaacttcaaactcctgggcttaagcgatattcccacctcagcctcccaggtagagccatcacacctggctaattttttattattattattattgtagagacagggtctcactttgtttcctgggctggtctcaaacttctggcttccagtgttatcctctcatcttggcctcccaaagtgttggggttatcagtgctaccacgcctggcccagttaatgtttttaaaatagatcaataggtcgggcacagtgactcatgcttatgatcctagcactttgggaggccaaggcaagccgatcacttgaggtcaggagttcgagaccagcctggcca

SEQ ID NO: 103920 - DNA, 423 bp, Homo sapiens
agcttacagacaacagtatttatttattgcagtccatatggactgctatgtgggcaataccaagaaaaatcctgtctcaagaaaaaaagtactactctttttatggctgaataattctcattatatagataggccacattttatttattcattcattaggtgatgaacatttgcttctaccttttgggggttgagaatatgctgctatgaacattcatgtacaagttttggatgaatgcctatgttcagtatttggggtaattacctaagagtggaactgttgggtcatatggcaattctgtatttaacttttagagactattttgagaagaggcaatagtttggagcgcacaagtctctgacactgcccttcattggtgaagatacaagctcgacttaacagcctatagcagagcttttatg

SEQ ID NO: 103921 - DNA, 399 bp, Homo sapiens
  misc_feature (1)...(399): n = a,t,c or g
catgttggcccggctagtcttgaactcctgggctcaagaagccctcccaccttagcctcccaaagtgctgagattacaggcgtgagctaccgcaaccagcctccttttctttttgttgtttagaaaaggatcgtggggtttcatcatttgctcagatgtttctgtcttctttgttacactgtcttttgcatcacactctcccttgtcttttggaacctttcactttctcccaatttaattttctgcttccctgcccaggactcagggatcacctgaggcctttcccctttcttggtgggccccctgttttccagtttctacttgttctttcttggttctctttctagntttgctagaggaagtttgtaatatcttcaaaggaatggaaatgtaggaggg

SEQ ID NO: 103922 - DNA, 419 bp, Homo sapiens
  misc_feature (1)...(419): n = a,t,c or g
ctgtacgcaacagaattgggactccaagaccaaagatctccctcagctgcccaggctggaatacagcggcaacataatcattcactgtagcctcagagccttgacctccctggctcaagcgatcctcccgcctcagcctcccaaggggcagggactgtaggcatgtgccaccatgcccagctaatttttttttaattgtcagtaaagacgcaaacctttcattggagaacagtcttcccccacaccataccatagaaatactgttcactatatctgggtcaggaggactgactctcccaactcctttcttcaggagtggatacatgatccaggactggccagaattctacatcaagcccgtaggcgcggaggagaatacaaattagaggatcagccagcacacttgatgggtgatgagn

SEQ ID NO: 103923 - DNA, 388 bp, Homo sapiens
cccacgcgtccgggcaggatgatagctttaacctgggaggcgaaggttgcagtgagccgagatcgcaccattgcactccagcctgggcaacagcgaaactctgtctcaaaaaaaaaaaaaaaaaaaacctccctctttggggggtttgtttttttttaaaaaactttttccaggggcaaaaattttcctttttttttttttttctaaggcggggggtttttaattttgggggggggggaaaaaaaaaccccccccccccttttaggggggggttttttggaggaaaaaaaataaaccgggggagagggggggcggccctcaaaaataaatagtggaaaaatgtcttttttttttcaccgccgggtcccctttttggggacccggggat

SEQ ID NO: 103924 - DNA, 397 bp, Homo sapiens
tcttgttctggattaggttttggcgtaaaggcatgctgggctggcttactcttgtatctagaccactcacattttctctgtatcagcaataaggctgtttcactttcttgtcatttgtgtgttcagcagagcagcatttttaatttccttcaagcacttttcctttacattcacagcatgcctgactgttcggtacaagtggcctaggctaggttctggcctgtcttggctttcaacatgcctttcccgctaagcttaatcacatctagcttttgacttaaagtgagagatatgcaacttttctttttacttgaacacttagaagctatcatagggttatcatgtggcataatttcaatatcattgtgtctcaaggaacagggaggcctgaggagag

SEQ ID NO: 103925 - DNA, 443 bp, Homo sapiens
gcgatggaattcgcatgcctgtggccccagctgctcggggggccgaggtggtagggacgcattttttttttaagtcaaggccatgatcgtgccactgcactccacttgggcgtcagagtgagccacggactcaaaatagataaacaaataaataaataaatatgtaaatataaataaatatctgggtatggagaagaaaagtcttctgtaatagatgctgagattaaaatgcaagagtatcccaaaattcctagctagaatgagcaattccatttgcccttagcttgtgttgggaaatgaaaagtaggttatgtttggaaaagtatgacaaactacattttggaaattctgagtttgaataacatgttggtttccatgaggagatacttccaattaagttgaagtgtcatactggaccccaggaggggggagtcatatctaag

SEQ ID NO: 103926 - DNA, 431 bp, Homo sapiens
  misc_feature (1)...(431): n = a,t,c or g
gtgtcttctagcatgattcacttttctannnnacggggtcgacccacgcgtccgccaatttttgtgtgtctcttgtttggacacagcttatctctaggtcctctggccagggccttgcaaggctacaattaaggtgtttaccatgctgcattcttttcttttcttttttttccttggtcatatacaggctgcattcttatttgaggctcccctggagaagaatatgcctccaagttccgtcaggttgttgacagaattcctttccttgcaactttaggattcaaggcagcttgcttctttaaagcagcaatggaggaagagtctgacgtttgtgtaggggtacagttcccttttaaagggcttttacctgtttcagtcaagtccacccaggagaatctctttttttctgagatggagtttcactcttgctg

SEQ ID NO: 103927 - DNA, 586 bp, Homo sapiens
ttttttttttttgggacagagtcttgctctgtcacttagactggagtgcattggtgctgtctccactcactgcaacctccgcctctgggattcaagcaattctcctgcctcagcctcccaaatagctgggactacaggcatgcactaccatgcccagataatttttgtatttttagtagagacaggggtttcccgagacagggtttcaccatgttggccaggctggtctcgaactcctgacctcaggtgatccacccaccttggccttccaaagtgctgagattacaggcatgaaccaccgcgcccagccgggaataatctttacttgctatccttcagagtcattacttggtggagctccttctcccaagcttatttcagattctcttgcctttttaatggttttctcctctttaaaaaaatcactccatgcataaaacttataaaacaggaaagcacagaaaagaagtgcctcgtgatactataaccaaaggatactcagtcaattcttttttatttaaaaaaaaaaagtatgacatcatttcagactttcagaaacattttcgagaataggacaatttcttta

SEQ ID NO: 103928 - DNA, 414 bp, Homo sapiens
tttcgtgcagtgagctgtgattgtgccactgcactccatcttgagtgacagagtgagaccctgtctccaaagaaaaaaaaaaaaaaagggcccccaaatggccccggggggggcctaaaaaacaaaaaaccttgggcctgggcccggggaaaccttatggctttgaagggaaaattccccaaaaaccgggtaaaacaacctaccaaggctggggccttattgtttttaccaaaggcttggaaaaaaggggggccagaataaatcgggggagttacctctttctttcttgacataccgggaaaaaatcggccttttgtgggcccttgccctaggggtgggaggaaaaggatattttaccttttttgccaaggggggggaaaaaaaaattttccttgaaaaaggcccagccctttc

SEQ ID NO: 103929 - DNA, 422 bp, Homo sapiens
tttcgtccagatctctagctgcgtgctgggattatctttgctctcttcaaagctgcgagacagggagatttaagtctgtagaggctactgctgtctttttgtttgtctgtgccctgcccccagaggtggagcctacagaggcaggcaggccttcttgagttggggggggctccacccagatcgagcttcccggctgttttgtttacctaagcaagcctgggcaatggcgggcgcccctcccccagccttgctgctgccttgcagtttgatctcatactgccgtgctagcaatcaacaagattccgggggcataggaccctccgagcctagtgcgggatataaactcctggtgccgggttttttactaccggcagaaaagtcgcaccatttatgggggagtgacccgatttttccggggcccc

SEQ ID NO: 103930 - DNA, 432 bp, Homo sapiens
tttcgtggcgggccggaggggctgggattgaagaccattaggcgctgccaaacactaattcggcgtccagagcagtttcaaaccggaacgggccgcgctccctcgccctacttgatccaggcaacgaatgccgagcacctaccacgtgcaaggctccggagacacaaagacgggggagaagccttgtgcaaacgggaacaaaggctgtggttcatccatattgcgatcgtgcctacacaggaaaagattttctttttaatcactcaaggccttagtctggtgtggtggggcgtgcctggaagcccagctactccggaggctgaggcaggaggctcacttgagccaaggagttccaggctgtaatgagctatgaccaggatactgcactccagcatgggcaacagagccgagactctgtctcaaaaaaaaaat

SEQ ID NO: 103931 - DNA, 458 bp, Homo sapiens
  misc_feature (1)...(458): n = a,t,c or g
natcccgggtcgacgatttcgtgtgatcagtgatctttgatgttactattgtaatcattttggggcaccgccaaccacactcatgtaaggtggcaaacttaatctctaaatgtgtgtgtcctgactactctaccatccagctgttcccccatctctctccctcttcgtgggcctccttattccctgagacacagaaacattgaaattaggccaataaataaccctacaatggcctctaagtgttcaagtaaaaggaagagttgaatgtccctcactttaaatcaaaagctagaaaatgattaaccttcatgaggaatgcatgttgaaagccaagacaggctgaaatctaggcctcttgcaccaaatagttgaccaagttgtgaatgcaaagaaaaagttcttgaagaaaattaaaagtgctattccagtgaatacacaaatggtaagaaagcaaaacc

SEQ ID NO: 103932 - DNA, 408 bp, Homo sapiens
tttcgtgaggaactgcgttcctttggaggaggagaggtgctctgcgttttagagtttccagtttttctgctctgttttttccccatctttgtggttttatctacttttggtctttgatgatggtgatgtacagatgggtttttggtgtggatatcctttctgtttgttagttttccttctaacagacaagaccctcagctgcaggtctgttggagtaccctgccgtgtgaggtgtcagtgtgcccctgctggggggtgcctcccagttaggctgctcgggggtcaggggtcagggacccacttgaggaggcagtctgcctgttgtccgatctccagctgcgtgctgggagaaccactactctcttctaagctgtcagacagggacatttaagtctgcagaggttactg

SEQ ID NO: 103933 - DNA, 421 bp, Homo sapiens
tttcgtccgcttcgccattcgtgctgctgagacatctgttgtcaacctagctaatgttccattttaggtaatctatcttttaactttaccttaacaccttctttttgtctttggtgctatacgatttcagtgtatgggtgtgggtttgtttttttctttttctctttttttttttttttttttgaaaaaaaaattttctttttcccccgggtggaacccaaaaaccgaatcccggtttacccaaaaattcttttccccggttaaaacaattttcccccctcacccccccgaggtgggggaaaccccggcccccccccccccccccggtttttttttttttttttaaaaaacccggggcttcccccttttaaaaaaaaggggccaaattccccgaccttataaacccccccccttggcctcc

SEQ ID NO: 103934 - DNA, 420 bp, Homo sapiens
gttcctgatgtttcctcagggcctcagaataaaaaagtgtacttttaaaggaactagcatttttggggcacctgctgcgtatcccactgtaactaaagcatatcatttaaccttcacgccagctgagggtaggtattatcccacttgttaaatctgagaaaactcagaaaggtgaagtcacttgcccaagaactaatggctagtaatggcagaaaggctgtccagtgacctttatggagttaggtgtagtcggacctctgtatccatgttttctgcatctgtggattcaaccaacctcacatcgaaaatatattcatttaggctgggcatggtggttcacacctgtaatcccaacactttgggaggccaaggtgggtggatcaactgaggtcaggagattgagaccagcctgactgaccg

SEQ ID NO: 103935 - DNA, 379 bp, Homo sapiens
ttgtactcctgacctcaggtgattcacccgcctcggcctcccaaagtgctgggtttacagacgtgagtcgccgcgcccatccaggggcacgtttcttaacagcccctctgggtgctcacgaatttccggcatcagcaatccaccatcctggcataattttctgtgttttgcatccctgcctcccggtcataaacaaaagagtgacctcagttccatgcgagtggctgcttgtcccaagcagatgggtgtccggcgtccccgcctttttcaggactgtcaggtgggccctgtggtgctggagctgtgttcaggtgaacactatttgaggcttcagacagcttgtaagtgctcctgcgggcgcctgggctgctggcagagg

SEQ ID NO: 103936 - DNA, 424 bp, Homo sapiens
caatgccgtatttaattaaatgcttgaggcactagcatagtttacatttgtttcagtctgtgtacatttcaaagggatctttctttcttttctttcttttttttttgaaaccgaagttccggggtcccccttggggcccaaacggggggggggggggggaaactcgggtccatggaaccccccccccccgggtttaaggggatccccccccccccccccccaaagaactgggaagggagggccctacccaccccccccggggaattttttttttaaatttttttttagaaaaagaggggttctcccctatgacacccgggggggccccaatcggtgacctagggaacccccccccccggccccccaaaattttggggggcccaatccgggggaccggtttggggcaagaaccccctcttttaag

SEQ ID NO: 103937 - DNA, 401 bp, Homo sapiens
cagggtttcaccatgtttgccagactggtctcgaactcctgacctaaggtgatccacccgccttggcctcccaaagtgctggcattataggcgtgagcccaatgcccggccctttctttgtaatttcaacatgcttttttgtaactctaaagaaagttctgttttatgttgcttgtttttgaattttatgtaaaaaggagtcatatttttctttgacttgctttgatcatctaaattatgttcctaagattcatccattttgttgcaggaagctgtaggtcaatttccctgccatatagtcttgcatcataagaatatacatcaatttattttcccactctatagtgttgataagcattttgatttctccagtttcttgctgttaccaacatactgctctg

SEQ ID NO: 103938 - DNA, 406 bp, Homo sapiens
cgcttgaacccaggaggcggaggttgcagtgagctgagattgcagcattgcactccagcctggacaacaagagcgaaaatccatctaaaaaaaaagagttcaagttttggctctggcttggcacagtggctcatgcctataatcccagcactttgagaggccaggagttcgacaccagcctgggcaacagagtgagaccccaacactcaaaaactaaccaaaaaaattagctgggcttggtggctgtagtcccagctccttcggaggctgagattgctagagtccaggatgttggggctgcagtgagccacagtcatgccactgcactccagcctgggcaacagagaaagaccctgtctcaaaaaaaaaaaaaagggggggccccttttaaggaacccaccttacg

SEQ ID NO: 103939 - DNA, 546 bp, Homo sapiens
tttttttttacatgctaaatctctagactttatttcaaaataaagtagtaaattatgttctaacaaaagaccaatgacatttataagggagaataaaataagcaacaaatttaaagcgcaactaggttactttatgctgtctgcatttgtatagtggattttggtgctaagatgcaagtctgaaccagtgtaattctgtgctttgctgtgtttacaactttccttaaaaaatcaattcctaaaatgaacgtattttcaaaagtcaaattggtgaacttgcactttaaaaaagctttttaaaggcacatttttatgaatcttcctttccataatctggtaaaaatcatttttcattgtagaggcaaaactctttttttggacatatccaacccatatttgaaaaagcaagtgagctcctctaaacctaattgcaaaatcttaaggaaatctgattgtttctagaagctaaagattactggctgggtgtggtgcctcatgcctataatcccagcactctcggaggccaaggcaggagcatcactggag

SEQ ID NO: 103940 - DNA, 1259 bp, Homo sapiens
  misc_feature (1)...(1259): n = a,t,c or g
ttttttttttttattttaggaatatatatttttaaaaggattcaataatctttttaaagcaaaatcaaagtatggctacaggaggagaggaaatatccaaattgtaatcaatgcagattgtttacttaaggccttatatttgtacctgtataaataccatatcacagcacaaaaacataccccatctggctctcttaaggtacatgataaatcagactaatgcacattcatcaaagtggcatcatctcaggatatgtgcatatttgacgtgggtatgaattcagggtttccttgggtctctttcaaggactctcctttctcggtcggtatttctatttccttattttccttctgtttatgaagaactggttatttttatattttaatggcccaatttttccacttacttggttcatggtcagttcccctggnaatggtactggccctatggaaccggtgacatggtactccttataaacagaaccagaagttaaaaggatggagacattcacaccaatcaatggattattttaaaaatagaaaacaatgataaaaattcagttgccaacttagaggattttatacattatgaagtgttctattttccttccagggtctgaaatttatttctcaagaaaacagattttatttctaagcctttactatctttgctagaaacagaaaaaccagttttctctttgacaaaattgtcccaggagaacaacacaaatgctttttccaaattagagcataagtcttccttaaatgtcctagtgtgacaataaggatacaacagccatcttttaaatgtcatgaaggctattgttaagacggtgtttttggccgttttgcagatggtccatcgaagttagttctgttatcaatgttattttcatcttctgcatcatcttcatcatcaccgtccaagtcctcgtctggagccgccgccacccggtgctgcacttccccctgtaccagagggtcgaataattccgttaccatgtccttcatctgggccacgccagacaacaggccctggaaagggtcgccgtcacccggcgcctcacaggacacccgcagcttctgcggcttcccttcctgcccgacgtactctcccagcagctccatggtgaccgctaagcttccagaacacgacaccgggaagcgccacccggaggcggaaatcagcccgcgtccggcgcaggcgggaattcccgcgcntggactagggttctcaatgggtctcattcgnggggggc

SEQ ID NO: 103941 - DNA, 576 bp, Homo sapiens
aataccgcgccgcaattcccgggtcgacgatttcgtgggagacccgccgcctccctccctccctagctgacttgctccctcccgggctgcggctgctgcaaaagccagcagcggcagcgggagctgtccggaggccggcgtcgagggtttgccgctgtctctgctattccatcctccccataggggctctctcccctctcccatctcaagatggcagccagcagctctgagatctctgagatgaagggggttgaggagagtcccaaggttccaggcgaagggcctggccattctgaagctgaaactggccctccccaggtcctagcaggggtaccagaccagccagaggccccgcagccaggtccaaacaccactgcggcccctgtggactcagggcccaaggctgggctggctccagaaaccacagagaccccggctggggcctcagaaacagcccaggccacagacctcagcttaagcccaggaggggaatcaaaggccaactgcagccccgaagacccatgctcaagaaacagtgtccaaaccagaagtgagcaaagaggccactgcagacct

SEQ ID NO: 103942 - DNA, 384 bp, Homo sapiens
aatacaccgtgtgtgtgtgtgtgtgtgtgtgtttgtgtgtgtgtgtgtgtgtgtcccaacaaccgggtgccccaaaggcccaatccagagagagggcaggggttggtgagtgccagggagcccgaggaagaccaggtccccacagcaaatggaaagggttctggcacccaaaactgccaaaaagggctgccccaggccaggtgaccacagatccagacttcagaactgcagagatacaagggccaggataaaatgggcagactccgttgaaagacctccttgggccgggcgcggtggctcatgcctgtaatcccaacactttgggaggccgaggcgggtggatcacctgaggtcagaagttcaagaccagcctggtcaacatgg

SEQ ID NO: 103943 - DNA, 422 bp, Homo sapiens
gatgggtacgtttgcgtggatcctccacgagcggccgcaatacagtactacgtaaaaagaactaaacactttaaaagtgcagttatgtcaaaaataagaggcgtggaagctataaggcatagagaaaacaaatagcaaatgacaaaagtaagttattcattattaataaatatttaaatgtaaatgaattaaactctccaatcaaaaagaaagattggcaggatggataagaaaagaaaaacatgatccaagtatatgccatctataaaagactcacttgacccaaagacacaaatagtttgaaaatggaaggatgaaaaaagatataccatgcaaataattaccaaagaaagcaggagtggctatactaatatcagacaaaatagactttaaatttaaaaaaaaggttgtaagagaaaaag

SEQ ID NO: 103944 - DNA, 427 bp, Homo sapiens
  misc_feature (1)...(427): n = a,t,c or g
caggaccaggagagatcgggaacgttaagagggancctccagagcggccgcaatacagtgcgagagtgtgtgtatgcgtgttttacacagagtgtcgtggtttggctcccaagccggagtgcagaggtgcaatcatagctcactgcctgcttaatgtcctgggctcacagtgatcctccaacctcagagtctggagtagttaggactacacccagctaatttttaaactttttgtacagacaggatctcactgtattgcccaggccggttttgaactcctggctcaaaggatcctcccaccttggcatcccaaagcattgggattacaggcatgagccaccactcctggctgaaagctgctttttaatagcactaaattttaccatgatgttttcaaaagcttttcttccctctcaaaagaagaaaa

SEQ ID NO: 103945 - DNA, 399 bp, Homo sapiens
aatacagggaggctgaggcaggaggactgctagaaccagggaggtggaggttgcagtgagccgagatcacgccattgcactccagcctgggcgatagagcgagactctcatattaatataaaaaaaaaaaattttttaaattttaagaactccttaaaaaaaaaagaaattttaaaaatccgggtttgaaattaaaactttttggaaggtcaaaatggcccccaaaaaaaaaccaatggaaaaaaaaacttaacccctgaagggttataagcggattccctaaaaccctttaaatgggaacccacccaaaaggcccttaaaaggagaagggtttaaccaaaggggggggtttcctccctaaaaaaaaaataatgtttttcttctaaaaacacttgtgat

SEQ ID NO: 103946 - DNA, 377 bp, Homo sapiens
aatacacttcctgtaggttttgtacatttttatgtttaataagtatttaatctttgttgctattgtaagtggagttttctctaccattgcgactgactgctaattggctactgtctgtatatgagtctattgattttttaagttaattttatatcctgctattttattgaattctattatcatttggattaattttaccagtgatcccctgtagttttccagccatattacaggttgactatcccttatcaaaaatgtttgggttgggccgggcatgttggctcacgcctgtaaatcctagcactttgggaggccaggcgggtggatcacctgaggtcaggagttcgagaccagcctggccaacatggtgaaacccc

SEQ ID NO: 103947 - DNA, 380 bp, Homo sapiens
aatacaggccctctgcttggttacaacaacaccagcagcatgctgggtagctctgcagacccttccagctttgccatggtgacaggacagatatgtggtgccccttccctgaagagttacaggaccgctgttcttgtagatccacaagcatgcgtgtggccaaaggcacaaccccatgttttctaaaagtcctacaaaacatttacacagtggctcatgcctgtaaccccagtactttgggagcccaaggaaggaggatcacttgaggccaagagtttcagaccagcctgggcaacataacaaaaccctgtttctaccaaaaaaaaaaaaaaaatttaaaatttatttgcgtatgggggggcgcccctgtagttccaatt

SEQ ID NO: 103948 - DNA, 379 bp, Homo sapiens
  misc_feature (1)...(379): n = a,t,c or g
aatacatcttgggtatatagccaggagtgggcttgctgggtcatagactaattctaatgcttaatgttttgaggaactaccaaactattttccaccattttacatccccaccagcaatgtacgagaatttcactattacattttcaacaaatgaggataattcttgaacgaacagagaggtatgctgccaccgcagaacgacaacccactacccagaagactgtattaacaaagcagaagtatatgtccggcaggaaaacggagaataaaatgttgcaggtccaagtgtattaggcaagtgagttaacctcgcagagccccggttccttattcgaaaaccaaaaaaagggccgctgtattgcctttttaccttgcagcn

SEQ ID NO: 103949 - DNA, 2155 bp, Homo sapiens
gcggccgcgggcgcccctgccctggagcccaccccgcgctctgccctccctaacaatgggaatggggcagaaggaggcgccccactgcggggaggtgaggggtgggtttgggactggggtccgcggtggggggaggtgcgatctcgggctctcgcctctccgctccctctggctctggagttgggggcccctgtggggctctgaagtccgcctgagacttgggtcaagagtcaaactgtcgccccccgctcctcccccaaaatccgggtgagcggtaaggaaagtgatgccaagtcttcgaagcctcagtgacaaacgcatagcaaagaacacatccactccagagataccttctcgaaacaaaagattttcctacctgcttatacttggtaaccgagggaattactaagacttcttgctcatttctgagtattgtctttatatcctgacactatgaatgctacttggatgcctcttaagtctgttctctggggaggcagtaaggggccgtggagctggcctcggcctcggcatcgggagaggctggacttcctgtctctctgtgctgaatggctgcgatggcgcccgctctcactgacgcagcagctgaagcacaccatatccggttcaaactggctcccccatcctctaccttgtcccctggcagtgccgaaaataacggcaacgccaacatccttattgctgccaacggaaccaaaagaaaagccattgctgcagaggatcccagcctagatttccgaaataatcctaccaaggaagacttgggaaagctgcaaccactggtggcatcttatctctgctctgatgtaacatctgttccctcaaaggagtctttgaagttgcaaggggtcttcagcaagcagacagtccttaaatctcatcctctcttatctcagtcctatgaactccgagctgagctgttggggagacagccagttttggagttttccttagaaaatcttagaaccatgaatacgagtggtcagacagctctgccacaagcacctgtaaatgggttggctaagaaattgactaaaagttcaacacattctgatcatgacaattccacttccctcaatgggggaaaacgggctctcacttcatctgctcttcatgggggtgaaatgggaggatctgaatctggggacttgaaggggggtatgaccaattgcactcttccacatagaagccttgatgtagaacacacaattttgtatagcaataatagcactgcaaacaaatcctctgtcaattccatggaacagccggcacttcaaggaagcagtagattatcacctggtacagactccagctctaacttggggggtgtcaaattggagggtaaaaagtctcccctgtcttccattcttttcagtgctttagattctgacacaaggataacagctttactgcggcgacaggctgacattgagagccgtgcccgcagattacaaaagcgcttacaggttgtgcaagccaagcaggttgagaggcatatacaacatcagctgggtggatttttggagaagactttgagcaaactgccaaacttggaatccttgagaccacggagccagttgatgctgactcgaaaggctgaagctgcccttgagaaaagctgcccagtgagaccaccacttcagagggacttagcaactttctgaaaagcaattcaatttcagaagaattggagagatttacagctagtggcatagccaacttgaggtgcagtgaacaggcatttgattcagatgtcactgacagtagttcaggaggggagtctgatattgaagaggaagaactgaccagagctgatcccgagcagcgtcatgtacccctgagacgcaggtcagaatggaaatgggctgcagaccgggcagctattgtcagccgctggaactggcttcaggctcatgtttctgacttggaatatcgaattcgtcagcaaacagacatttacaaacagatacgtgctaataaggggttgatagttcttggggaggtacctcccccagagcatacaacagacttatttcttccacttagttctgaggtgaagacagatcatgggactgataaattgattgagtctgtttctcagccattggaaaaccatggtgcccctattattggg

SEQ ID NO: 103950 - DNA, 997 bp, Homo sapiens
ttttttttttttaagatggagtcttgctctgtcgcccaggctggagtgcagtggcgcgatctcggctcactgcaagctccgcctcgcgggttcacgccattctcctgcctcagcctcccgagtagctgggactacaggcgcccgctaccacgcccggctaattttttctatttttagtagagacggggtttcaccatgttagccaggatggtctcaatctcctgacctcgtgatctgcctgcctcggcctcccaaaagtgctaggatttacaggcgtgagccaccgcgcccggcctattttattttttttttgagacggagtctcgctctgtcacccaggctggagtgcgtgcagtggtgcgatcttcgctcactgcaagctgtgcctcctgggttcacaccattctcctgcctcagcctccctagtagctgggacgacaggtgcccaccaccacacccggctagttcttatattgttattattattattttttgagatggagtgtcacattgtcatgtaggctggagtgctggagtgcagtggcacaatctcggctcactgcaagctccgcctcccgggttcacgccattctcctgcctcagcctcccgagtagctgggactacaggtgcccaccaccatgcctggctaattttttgtatttttagtagagacggggtttcaccatgttagccaggatggtctcgatctcctgacctcgtgatccccccccctcggcctcccaaagtgcccatgacctttttattgttgggcagtgaaagccatggtgaaatgaagaatgtcctactgtcatgtgatgtgatcagaaaacatactgcccagagtcccctgcccccacccccaaaaccagtacttgatccatcctttgactgttgtggggattggcacaaaggttgggcacagtagtagttaggctcatgggctctggagccaacctacctggatgctacacatcccagctctgcccctcgctagtt

SEQ ID NO: 103951 - DNA, 365 bp, Homo sapiens
aatacatgtggccttctctgatgggattgacccctgcattggggcctggcagtgtcagtcttgggccagatggggctgccctgcaaggcatggtcttgggcttgcttcatacagacaggaccaggccagctctgtctcctcctagcgccatagtactgggcaagttcctcgggcttccaagctgtagtgtcctcaactccatactcagagtaacctcatcaacatggatgcatctcagagataccagtttgagcttaaaatacaagcattagggcaggcacggtggctcatgcctgtaatcccagcactttgggaagccgaggcggctggatcacctgaggcctggagtatgccaccagcctggg

SEQ ID NO: 103952 - DNA, 1037 bp, Homo sapiens
cgtccccctctcatcattccctagcgaacgccaattatcttgcaagataggagatatttcccatccccttcctttgtaaatatctcatctcccgctggagagcccaggagcctattcctggcatggatgttctgtccacacttgaggctgggcggtgtatcagacccttcaagcagcctggctggggcccaggactgagtctggggtcagctttcacggtcgcttttcccttcctcaccacccaccacagcccaccttgcatgcatggccagcccctccactccagcctgagccatgtgtgcccctgcgggaggacccattcatgccagaaagctggtaactccctcccagcatccctgcggaaggagtcagtttctgagagtgtgacttttcaaggcgaatgatggggaagggttccccagtccccacagtggccccacctctgggccctgcaccagagcccttctgtgtcacggcgggctgtgcacccatgcacacacctacgcacacacaacactccgcactgcagtatattcttgccaaagatttcctttaaaagcaagcacttttactaattattattttgtaaatgtttatcttcttctgtcttctccctccctgaatctattttactgttgtttattgttgaatctgtgtgtcagccaggagagcgctgtctggccttgaacatgggctgggatgggaaagggtctgggagaagatgggcaacaaagagccagggagtcatggacatcgcagcgacgcagaccccagcaggttcagtcccgtgctgccaccagctgtccagctggggtgtctggagggaagagggcagaggagggtcatgtcccttcagctgggggaggggcccagtgagctccaaaatgttggaggacctctgtttcatattcccacgcctggggctcttgccagcagtgggagttactgttagagggatgttcccaagtttgtttttccaatcagtgttaaagctgttttgaaactctcctgtgtctgtgttttggttgtgcgtgggg

SEQ ID NO: 103953 - DNA, 478 bp, Homo sapiens
aatacatggcctctagttccatccatgttcctgcacaggacacaatctcgctcttcatatggctgcacaggattccgtggtgtacatgcgccacattcttttttttaatccagtctaccattaatgaaaattgaggctgattccatgattatgctactgtgaatagcctagcattattttttaaaagacggccctttccccaataaatagacttggcgttttcgagcggtcatataaatataaggctatttacggaccctctattgtaaccttacacaaacacaatcttgactataagattgtttgttactccgcttttcaagaggtatagcctacatgccctccccttgagtgtgggctggacactgtgactcactcctaacgaacaagatgaggtgtaattgcgagggggcaactttcgacgctaggccgtagtagggaatagagcatccttcctggtctctccttggtctggggg

SEQ ID NO: 103954 - DNA, 450 bp, Homo sapiens
  misc_feature (1)...(450): n = a,t,c or g
aatacatgtgtcggtagtctcagctagctactcggngggctgaggcgggaagagagcccgagcccggaaattggaggttgcagtgagccgagactgcgccactgcactccagcctgggcaacagagccagacgccatctcnnaaaaaaaaaaaaaaaaaaaaaaaaaacccccntttttttctcaaatccccaaaccccaaaaaaaaaaaaggggctttttaaaccaaaaacccaaaaaaattttgggaaaaaaaaaaaaaatcttcatctgggaaaaaggggcaaaaaaaactttttttttggggggaaaacccggctctaaaaaaagggcccccggaaaccccaaaaaaatttaaaggggggcccacaaccccttttgggcccaaaaaaaaaagttttttttcccaaaaaaattttttaaaaaaaaaacccccttttttaaatatttg

SEQ ID NO: 103955 - DNA, 444 bp, Homo sapiens
aatacatcctcctgttttcgctccgctctgcctgcctccctcaatctcaattgtttccccatcctttatgtgcgcgtgtctcttggtggccttggggtctctgtctccctcttcctgccttgctgtcttcttctctgtccaactttcttgcctcgcttatctctcccgccttcctgcatctcttcccgcctctatcatcctctccctgggcctccctcattcctgtttctgtcactccgtcctctctctctccgtcttctccccgtctctgctgcttccgtctctctccttcttcctgccgctctttccctccccgtctccctgggcctctctctgctcctatcttgatcccatctctgtgggtgtccccatccccaccttgtctatcttcctctctctcccctcttacctctgtatcttcccctgaccccattatccaccctc

SEQ ID NO: 103956 - DNA, 516 bp, Homo sapiens
  misc_feature (1)...(516): n = a,t,c or g
aatacagccccttttccaacaagtttagaatcagcctttgttgttgttgctgttcaagacagggtctcgctctgtcgcccgggccggaatgcaggggtgcgatcactgactcactgctgcctcgaactcctggctcaagccaatctcccatctcagcctccaagtagtgggactacaggcatgtgccaccacccctggataacttaattntttgtagagacaatgtttcccagtctggtctcaaactcctggcctcaagcaatcctctcacctcagccttcccaagtaccatgattacaggcgtgagacacctggtcctagagccagcccttgaactcaaatgcagccctgcttcatgcctggtcctagagccagccttgaactcaaattgcagctgacagagcaattggggctcacagtaagtgctcaataacagggagcttgcattcggaactatgttttttggccaaaggcccaaagcctttttttagaacatgaattctcaaacccaataaa

SEQ ID NO: 103957 - DNA, 864 bp, Homo sapiens
gtgttgggattacaggcgtgagccacggcgcccggtctagttctcacagttttcacccgacttctgcgccggtcttctctggccttgaaaggcagagagtccgttccgattttcccctgagctgggcaagtcccctgtgagagctctggggcatctggcttcggggcattctttgactaaggtggatggaggttgcaggtcttttcctgggtgggcgtggggcggggcagcgggttcccagcgtcctcctggcctgggcgtcttggaggctgttgggacgcattccgtccccttgcgcggggcggggccttgaggcgctggggcgggattggcgggggacggtcgcggagccccgccccgaagcacagggtcgagtcccttctttccgctccaacgcacggagggtgaggtcggtacgcggtggtggcgtcacggcgccagctcctcccgacgccgaggtgggttccgggagacccgcgggtctggctgcgagagattgggtaactcaaggcgtccctggagtacactgaggataagtgtttgagaaatgctgtctgaaggaatgaagtcagtctatgacaacgtctctctgccgtgaatcattcctgcagatgaaaaagtgtgacttggcagctggagccggcgcacgtgcaggagccaccagtggtgcaggagcagttggggtccatttcaagccgcggtaaggctggagatctcaagcgataatggagagacagcaaggcgcacgtggacggcgtgttcaccaattaccaaactttttgacctgagcaactagaagaatggagttgccattatttgacacaaagaagactgcaggagggacaggtttgagtagaaatatga

SEQ ID NO: 103958 - DNA, 517 bp, Homo sapiens
aatacagctgctggcttggatggagggctgagccactgactcgtatacacggagatggtgagatgcctgttcaatctgagaatttctgtatgtgacttgtaggttgtagtatcccgtgtcctctagggtgacgttctggaaatgcagatctccactgggtgatattgtctctcgaccgctgtatgcaggccctggagtcctaacgtgagtgtctattacatatgctgcgattagctggttgggctccaccgttttccctttgtaccagccatagctgtaaagattctcgcgcagataaaccacagagagatgaacattctccccttcagcaacttcatagggcgctgatgcaataaagagccaggcagtggtgggtgcctctcacaaagctaacatgtgatgctgtgagcaagagcccctgcccgggatgcattttcttgggggaccccctgagggggcccccaagtctttgcctgctggtctgttcttctttgggacaaggccttggcttccgacg

SEQ ID NO: 103959 - DNA, 517 bp, Homo sapiens
  misc_feature (1)...(517): n = a,t,c or g
aatacacgctcccanaacgttttaccctcctttntcctttcttattttcagacattgactttcttttttctttttattttctttcttttttttttttttgaaaacggggtttaattttgccccccggccggaagggcaggggggaaacaagggttaatggccccttcaccctcggggttaaagggaaccccccaatttaaccccccaaaccaggggaaataaaggaaacaggcaaacaggcccagtaatttttggaattttaagaaaaaacgggtttcccccatttggccaagggggctttaaacccccgggcttaagggaaccccccggcttggccctccaaaggggggggaataacgggcagaacccatacccgccctggtaaatttttttaaagaacaaaacgcggggagaaatctccccaacccccctataataagcccaacaaaaaatttaaccctgccccaatggaagaattttcttcttttaaggaagggagggggccctcacttaacag

SEQ ID NO: 103960 - DNA, 403 bp, Homo sapiens
aatacattgttggtcattattaaataaagacatccttgttgctgctcatcctagattaagatgtggaacagcccaagttaagaagctacccaactctaaagtgcaaaccaaggtctgccatcttgacaatctgcccttgggcccttcaatataggtctcatggtctcatatttggtttttcgtggggttttttgtcttttgagacagagtcttgttctgtctcccaggctggaatgcagtggtgtgatcatggctcactgcagactcaacagactcaacctcccaggctcaagcgattgatcctcccgcctcagcacccccaagccgctgggaccacaggggcatgccatcacacctgtctaatttttgtatttttgtagaggtggggtctcgccaagccgcg

SEQ ID NO: 103961 - DNA, 405 bp, Homo sapiens
  misc_feature (1)...(405): n = a,t,c or g
aatacaatgtgtgtgtcggtagtctcagctatgctactcggggggctgaggtgggaagagagcttgagcccggaaattggaggttgcagtgagccgagattgcgccactgcactccagcctgggcaacagagccagacgccatctcanaaaaaaaaaaaaaaaaaaaaaaacccccctttttttttaaattcccaaacccccaaaaaaaaaaaggggccttttaaaccttaaaaccgaaaaaaatttgggggaaaaaacccagttttttaatttgggtataggggcgaaaaaaccattgtttatggggggtaaccccggggctcaaaaggggggccccgggaacccccaaggaatcctaagggggggccccaaagcccttgggggccaaaaaggaaggggtttat

SEQ ID NO: 103962 - DNA, 413 bp, Homo sapiens
aatacagtgggtggttggtgtaaatgagtgaggcaggagtccgaggaggttagttgtggcaataaaaatgattaaggatactagtataagagatcaggttcgtcctttagtgttgtgtatggttatcatttgttttgaggttagtttgattagtcattgttgggtggtgattagtcggttgccgatgacatatttgaatggtgtcgatgtctgctgggggccagctttttccatcgttactgccacttacagatgtttgtcgttacacaccttcacctatgcgcttgcgctggagatttttcctgggttacgccgctgatccatgtctttgtcgttcttatgaagcccgtgacattttctttgggtgaccgtgccccagtctatacttgttcgtcgcccctccttggctctgg

SEQ ID NO: 103963 - DNA, 386 bp, Homo sapiens
aatacatctcctgagtactgtcctcattttgactgggtcctccattctgagacacctcggacagaggtgtcttgcccatcttgccagcgtctctgggcacaggctcagcctgggtcagcgggtctactggctcttgcttgatggatctgttgtagcagttggagctctgggcaaagggggaggggtccctggacactgagtggagtaggggggccttgtgaagcatatactccttggggcctgggtacgcatgctgctggtggtgaggagtggtgtgtactccatcttttcaaataaactctcgttatctctcacactttgcacggcctatttttagcaaaaaacgttgatacacatgcgttttatctactccctcctgaactggc

SEQ ID NO: 103964 - DNA, 519 bp, Homo sapiens
  misc_feature (1)...(519): n = a,t,c or g
cgctgctctgagcgccgcacacatctggggggncagaggtaacattccctttgtcatttctaattgtgtttctttcaatcatcctctgtattagtctgctagcagagtggcttattaatattttcaagaaacctacccggaattcatagatcttttgaatttctttttttcatgtctcggtttctttcagttcagctcagattttcagttatttcttgtcttcctctagctttggggttttgtcttgcttctctagttctttcagttgtgatgttaggttattaatttgagttcttcctaactttttgatgtgggatttagtgctataaagttccctcctaacattgtcttagctgggtccagaggctctagtatgttgtaactttgatctcattattttcaaagagcttcttgatttctgccgtagtttcattatttattacaaagtcattcaggagcatgttgattgatttccatgtaattgcatgagtttcagcaattttcttagtcttctatttn

SEQ ID NO: 103965 - DNA, 428 bp, Homo sapiens
aatacatgtgctgccatgaacatttttaacataaatttctgtacaaatttgattatttccttaggataatttcatcaaaaaaatttggtgcctggtctctgggtccagctgctgggaaggaggacactgcagtctcagcacccaccagctcctcctccttcctcctcccccgaggtgaatgtgccctcagaagtgcaagctgctgattaactatgctgcattttttatgacgtgaaagttcggaaatgctccacgccacaaaaaaaaacccggaaaaggaaaaagggctgtcttttttggccccaggccaaacaagggcctttgttgaaaaaggggggaaaaaaacttggttggaaaaacctaaagggtccccaaatccggctttctagctatgggggggaatggttctctgaaaaagaagccctctg

SEQ ID NO: 103966 - DNA, 495 bp, Homo sapiens
aatacaagtggggagaggcgaggcggagggagaggaggcaagccaggctgcatgcaggggggcaccaggtgccactcgccacgagaagggctgcttgctcatgctctggaggaggtgggggagtatggggagcaggcaaagaaggctccaggccaccccttcgtgggaaagcacaaagactgctgatggtcaaggagacagatgagatagtggctcccagaggcattgcagctccccccacccccagagcatgagcaccacaacctcatctgtttcccctgcccgccaccggatactagagaatgatgcccacttcttactcgggttttgagtgacaggcgggtggtcgttttcttctctcccagcatccagacgaggttatagacacctcaccctcttgatctaaatgctggtaattcgctctacgtcctggtcctcgtggagtataacaaaccttgagagcattatatcactaggttgatggtgacttgatcc

SEQ ID NO: 103967 - DNA, 481 bp, Homo sapiens
aatacatggctggtttgatcttctatctggatcactcaaacttttatccgtatctgcaataaggctattttggctttcttgtaatttgtgtgttcactggagtagcatttttaatttccttcaaaagctttttctttgcattcacaacttgcctgtttggtggcagagacctggcttttggcctatttcagcttttgacatgccttcctcactaagctgagtcccttctagcttctgatttcaggtgagagatgtgtgactcttcctttcacatgaacacgtagtggccactgtaggccattattaactggcctaatttcagcattgtttgtgtcagggaatagggagacccaagtagaggaagagagacgtgggggggtggtgaacagctccgccggcggatcatgtacaccccccccagcggctaccgaatatacttgtctgtcatttatgtcctgggtagtcacgcccctcaaccaca

SEQ ID NO: 103968 - DNA, 375 bp, Homo sapiens
aatacatgccgtgtattaaatatgcactcacaggaaaaggtaggcacatatacaaagaaatttaaaccataatgggtcatctctggttagtgagctcttatttcaatctctttgtactttctaaaatgagtacgtatttcttgaaaaatcactgaaactggctgggcgtgttggttcatgcctgttggggaggccaagacaggtggatcacttgagctcaggagctcaagactagcctgggcaacgtggcaaaaccccgtctctacaaaacatacaaaaattatccaggcatggtggcatgtgcccgggaggctgaggtgggaggatcacctgagccgaggggaggttgaggctgcagtgagacgagatcgaccg

SEQ ID NO: 103969 - DNA, 533 bp, Homo sapiens
agtcgccgttaggtaggagcctctagaccggacgctgccgccgccatgttgaactggaggcacgttcgcttccaatggctccccggctgcaaatcacggcgggagcgcctcgggcctcttgtcttttgaccctgtccttggaacccgaggagacttgccgttcccgggggagggtgtgtgtgagtcggggggcggaggccgtctacgccatcgtaggggcggggggagccgagattagagcatcagcctgagagaagcggtgcttctggttctccgctccgcctcggatctttcagcgaggcctcgggccagtcatctcgccgcctcgtacctcagttttcccatcctcgaagtggagctgggcctgcctgactcacccattcatcaggtgggggccttgacgctctgggagccctttcaaaggacgttgccttacacgaaatcgtacttatcgttattcactctgcagtaaccacctggatttgagttgggggtgtttgcatagtaatttagcttcctcttcaccctcctgc

SEQ ID NO: 103970 - DNA, 423 bp, Homo sapiens
aatacaagccaggtgtggtagggtgcacctgtagtgtgttatactcaggggcgatcacctgagcccaggagactcaggacgcagtgagttatgattgcgccactccactccactctaggtgacagagttagaccctgtctcaaaaaaaaaaaaaaaaaaagtcggagggtttgaacttttatgggaaaaataaatttttttagttaaagggttaacatttaaatcactaaaacggttggtaaaaggtcggcctggaaagggaggggacctaaaatttgcccccaaaaataggcttttttgaaaaaaaaatttttttggagctgaaagctattaaaagccgccttatttatgaggggcgttaaaaaaaaaaaaaaaagggggcccccaatcggggaaaaggttctttttttcccctcccaattg

SEQ ID NO: 103971 - DNA, 754 bp, Homo sapiens
cagggacaggccctcctgaggcacctccaccgggagcctgttcaagggtgactttcccaggaaccaggaagtgaccaggccgcgttggcgtcatcactccgacctaaggactgcaatgcaccgaacccagactggcttccgggagggctggaggagggcctgcaggggctttggggccagggccctgccctgtgaatcattcacacatggtggcctggaggggctctgtttgctctgagaacacggggagcaggctgttgtgtctcggctcgatctttgcccactgaattagtgtttatttctccccgcttgtgcttggcctggaggacggggccagggagaacacccacacacaggcagttcatcctgggagcgcttccccggggcatcagtggccagtaggtgttgggggaggggctctaggaagtggagcagtctggtagcaggggtagggaattgtcccacagtacagatgggcaaatcaaggctggccttggaggctcccagaatgtctgagagcactgggcggcctgggtggtgctttggggcctgtctgggcgcctccactcatcccgggtgatgggtcggtgacttccccctggagcctctggttcctccctgatgtctgctgcagagggtggttgtgcaaatcaggcatgatgagttacccgccgcctgacactcgggacctgacgcataattggtgtccacctccccctccactgaaggtggtgtctgtctccagggctgtatt

SEQ ID NO: 103972 - DNA, 434 bp, Homo sapiens
  misc_feature (1)...(434): n = a,t,c or g
aatacattgggcctgaagatctgattgaattgctataatctcatgatcaaacttatacagaagaggagttgctttttatggatgagcaaagaaagtggtttcttttgatggaatccactcctggtgaagatgctgtgaacgttgttgaaataacaacaaagaatttagaatattgcataaacttggtagattcaacagtggcagagtttccaattttgaaagacgttctactgtgggtcaaatgctatcaaatagcatcgtatgttacggaaaaatctttcctaaaaaagattcaatcaatgtggcaaacttcactgttgttttaataaattgtcacagccgccctaaccttcaacacccaccatcctgatcagccaacagccatcaatgtggaggcaagatcctccatcagaagaaaggntgacttgctgaag

SEQ ID NO: 103973 - DNA, 431 bp, Homo sapiens
aatacaggggtggggtggaggggtttaaaggatggtctttacaggacaggtggagcacattaagggagagcccatgagtgtgtggggtctgaggtggaggcagagctgtgtgcacacgtgtacgtgtgtgtgcatgtatgtatgagtgtgcatgtgtgtatgcctacgcagtgggaacataaagttccggtaagtgtctgctttgctgaagcgtctgtctggtgttggcgaatcaggagaaatcaggcaacttgacgtcggcttgcaggagaaaacattttacttgggggctgtttgcttgcaaaatggtgtgtgtcattctagaaccctaaaaagttgctgtgttccacggcttcctatgtgttctttttgaacttgatgttatttaggactgcccttctgtcggttgtttattttttgtgaatgttact

SEQ ID NO: 103974 - DNA, 472 bp, Homo sapiens
gatctgccgcacgcgatttaagttaggatccctagagcggccgcaatacacggtggaggacacaaatagaagcagattcttttacaggcagacagacacgtaaaccacccggtaaaggcacggcgccagggcccagaacagatcactgcccgccgagggggcagggaggaagcaaagtgggtgggagcctagaggggaggccttccacccagagaccatccctctctaaggtggcagcgtgcccagcacacagcaggctccaaaggccctccaacgcatagtcctaaacacggggggagacaagtatgtggagatatatttatgcaagaagacaggagctggaatctccgagtcagcctgaagagtgcagtgtggaactgacctaaggcatcatgcgggactgagaatctgggaggggtgggttcccaatacctaaatccatgggtccaccatggggggctctaactcttcg

SEQ ID NO: 103975 - DNA, 492 bp, Homo sapiens
atacatgggagctggagggaatgggagggactagggactaggaggggctggtgttggggcaggggtgaggcctgcggcagggggatacccatggctgctgagcccctctgagaggagtgaggagagcagttggctgctggtgctgacctcaccctggcaccccatcctcggctgtgcttggggtggtagccgctgggaagggaggcgccgctgggaagggaggggccgccgggaagggtgttctccctgaagttggggctggccttgacctcacacaaaaactctaggcatcccagaggaggtgtggagcccacgacaccctgtgccttttctggggcttgcaaggatgcacaatccccagggacctcaaaaatatcattgtgcctccttggagaggctggggccgaggacgaacctgtggggcctttatctaaatctctcccggatcgaaaatctgcggatcccatatgagcactttaccactcctctccg

SEQ ID NO: 103976 - DNA, 440 bp, Homo sapiens
cgtagtttgatcctccgaccggccgcatacaagtgctgctggattcagtttgccagttttttcctttagctcggagaagtttgttattaccaatcatctgaagccttcttctctcaactcgtcattctccatccagctttcttccgttgctggcgaggagctgcattcctttggaggagaagaggcactcttgatttgtagaattttcagcttttctgctctggtttctccccatctttgtgggtttatctacctttggactttggtgatggtgacgtacagatgcggttttggagcgaatgtcctttctgtttgttagttttccttctatcagtcaggaccctcagctgcaggtctgttggagtttgctggaggtccactccagaccctctttgcctgggtatcaccagcagaggctgcagaactgcaaatattgcacg

SEQ ID NO: 103977 - DNA, 470 bp, Homo sapiens
gaggttatcaataagctcctagtccagacgccatgggtcgtgttcacagaggaggacaaggctactattacaagcctgaggtgcaaggtgaatgtggaagatgctggaggagaaaccctggtaaggctccaggttgtctacccatggacccagaggtactttgacagctttggcaacctgtcctctgcctctgccatcatgggcaaccccaaagtcaaggtacatggcaagaaggagctgacttccttggtagatgccataaagcacctggatgatctcaagggcacctttgcccagctgagtgaactgcactgtgacaagctgcatgtggatcctgagaacttcaagcttctggtaaatgtgctggtgaccgttttggcaatccatttcggcaaagaattcacccctgaggtgcaggcttacttgcataagatggtgactgtagtggccaattctttgagatacaaata

SEQ ID NO: 103978 - DNA, 438 bp, Homo sapiens
cacagactcagagagaacccaccatggtgctgtctcctgccgacaagaccaacgtcaaggccgcctggggtaaggtcggtgcgcacgctggcgagtatggtgccgaggccctggaaaggatgttcctggcctttcccaccaccaagacctacttcccgcacttcgacctgagccacggctctgcccaggttaagggccacggcaagaaagtggccgacgcgctgaacaacgccgtggctcacgtggacgacatgcccaacacgctgtccgacctgaacgacctgcacgcgcacaagcttcttgtggacccggttaacttcaagctcctaaaccactgcctgctggagaccctggacggtcacctatccgccgaattcaccccttgccgtgaacgcatccttggaacagttcacggcttttgagatcacctggctgacg

SEQ ID NO: 103979 - DNA, 445 bp, Homo sapiens
caccatgagcttcaataccctggcaatctgccttgactgtttgtgctcaaccctacagcctacccgttccatcccgggctatcccagttccccactgccagggaaccccacgccacccatgaccccaagcagcagcgtcccttacatgtcaccaaaccaagaggtcaagtctcccttcttgcctgatctcaagcccaacctcaactccttgcactcatcgccctctggaagcgggccttgtgacgagttgcggctgaccttccctgtgcgcgatggggtggtcctggagcccttccgcctgcagcacaacctggctgtaagcaaccatgtcttccagctgcgagactcagtctacaagaccctgataatgaggcctgacctggagctgcaattcaagtgctaccaccacgaggaccggcagatgaacaccaactggccagcctcg

SEQ ID NO: 103980 - DNA, 573 bp, Homo sapiens
ctggcatgccagcctcggcaaagacagccactgcatgttcctgggtggagaagatgctgcagctagaccactgctcctgaacacccagggagaaaagggtctcaatgaggatggccgtctccacagttatttgcaggcagtcagcaatgcaggcacccttcagtggcctggaggccgagtaaagctcctgcatgcccatcaaacccggcatccattctccacaatgtctagggccttgtgtccccaggtggccaggccgatgtcagcaactttgtagggcagtttgtcagacatgctggcggcacctttgatggacaagggcaaagggggctgggccatagtctggggacaggcactgggtgggcagtgttgggcaggcagtgctaggcaggtgagtatcattttttatagatgtatagtgtttctacatagaaacatcatacagcacaaagtactcaactaatcctttgttaactgtttagatttttctaatttttataattatataacactctggtgaacatttttgtacatacatatttacatctgattatttatttcctttggatagat

SEQ ID NO: 103981 - DNA, 419 bp, Homo sapiens
gttaattgtttgttaaaaattcagcagtaaagccatccagtcctgagattttctttgttgggaaatgttttattactgattcaaacttattacttgttattggtctgttcagatttttctatttcttccaggctcaaatttggtaggttgtatatatccagaaatttatacatttcctgtagggtttccaatttgttaacatataggtgttcataattgccaccgtgcccgccgaccttatttaatctttataagcctcacttttcacatctagaagacagacacaaataatacctattcctcttgcttatgggtttctttgggttgcatttatctgtgaaatgctattaaaatagctagtgtgtactcactactttctaagcactgtaatcctcacagcagcttcacaaaggtcattg

SEQ ID NO: 103982 - DNA, 399 bp, Homo sapiens
cggcgtgatggtgtgcgcctgggatccctggggcttgggaggctgaggcaggagaatcgcttgaaccagggaggcggagggtgcatcgagctgatattgcgccattgcactccagcctgggtgacagagcatgactctatttcaaaaaaatttttagaatatacctgatatgaaataaatggaggcatcttccttgccctgccaacagcctgagggaccacagggccctgggaacgcccagcctgtctgtctcgcgggagctagacgcacacacagagttggcatgctcagaaccaccagccacattaaaaggtccaacgctgaaaataacccacacatccattaccattagaatgagtcattaaagccaggcctggcgggctcgtccctggaaatcca

SEQ ID NO: 103983 - DNA, 411 bp, Homo sapiens
tggccaggctggactcaaactcctgacctcagatgatctgcctgccttggcctcccacgtgctgggattacaggcgtgagccacgcgcccagcatgatgaggattcttgaggatcctttcagggcttaggcctctcccagctcctatcccactattattagggtcacagaggaggaggtcaagactgggatttacccatgaaggctctttggatgaaatcagctggatattggctgggtcactttgttaaagaccagaacctggggtgggaagcctgtgcctgtttggatgtcagagcccacagccatgggcccctggcccagcttcctaaccagtttggccctatttgccttggaagcacttgcgctgtggggtcaaatggacccacgcgctgatcttggacttggcgct

SEQ ID NO: 103984 - DNA, 414 bp, Homo sapiens
  misc_feature (1)...(414): n = a,t,c or g
ggcaggagaatggcatgaacccaggaggcagagcttggcagtgagccgagatcacgccactgccctccagcctgggcgacagagtgagactccgtctcaaaaaagaaaaaaaatatatgaaatatggttgattctctgactagggggatttcatcatcaacctcccttcctccttattgtttttctgcctgtaggtatcttcattaaaagatgaaggcttgcagtcttcaatttaaggtaaaacacagaaaggcaaatgtatgagcttgttaagacagatttaaacagttattaagcaatgaatagaagtgattatatctgccctggatctcatttagaggtgtggttgaagagaacaagagagcacatggagtctgaaaatgtgtatctatattttgggctagaaattanggn

SEQ ID NO: 103985 - DNA, 963 bp, Homo sapiens
aattgtattatgttttgttgccttgccactttgagtatcttatctgaaaatctgttccttgccatgtttttctcctgttaacataaactatgtgccctgtgaatttctggggactgaatttgaaattgctcctgccaaccgtttggggcctggcgtgtatctgaatgcctgaatatctccccgctgaatgaatttcgtattctgccctgaattcactcgggtatattgattggctggatgatcttggtgccgcccacttgacgtttccagaagagtcaccgaaggaaaagaaccaggagtgtagaggatgatgaggagggtcacctgatctgtcagagtggagacgtactaagtgcaagatgtatagaatatttttcaacacttattaacttttcagataacataatctatatatagattaagctttcagggatttggaaatctttttttctttctcttttttgtttttgttttatttttccatttcttttggtgggggggattgtatttttgctttctttagaaatgtaatgtttgttatatagaacttccagaacagtaatcaaattaatgaaattagacctaataattatgttttttgatggtgttgaccaataaaatatctagtgataaggaaatttgtagcatcaactagaataatctacattgatagcatttattgtgataagtacattgtttccacttcttgatatgactgagatttatttctctcttttagatgaaattgttgatactttaggtgaaggagcttttggaaaagttgtggagtgcatcgatcataaagcgggaggtagacatgtagcagtaaaaatagttaaaaatgtggatagatactgtgaagctgctcgctcagaaatacaagttctggaacatctgaatacaacagaccccaacagtactttccgctgtgtccaagatgttggaatggtttgagcatcatgg

SEQ ID NO: 103986 - DNA, 269 bp, Homo sapiens
ccacagactcatagagaggccaccatggggctgtctactgccgactggaccaacgttaaggccggctggggtaagggcggagcgcacgctggcgaggatggtgcggaggccctggagaggatgttcctgtccttccccaccaccaagacctactttccgcactttgacctgagccacggctctgcccaggataagggccacggaaagaaggtggccgacgcgctgaccaacgaccgttgcgcacgtggacgacatgcgcaacgcgctga

SEQ ID NO: 103987 - DNA, 303 bp, Homo sapiens
cagatgaatgcggctgataagacctgcaataatccagaggggctactctgatctatgtagataacgaaaatggagaaccaggcacccgtgtggttgctaaggatgggctgaagctggagtctggaccttcaatcaaagccttagatgggagatctcaagtttcaacaccacgttttggccaaacgttcgatgccccaccagccttacctaaagctactagaaaggcttcgggaactgtcaacagagctacagaagagtctgtaagagaccaagggacacctcgtacaagaacatccaagatct

SEQ ID NO: 103988 - DNA, 514 bp, Homo sapiens
  misc_feature (1)...(514): n = a,t,c or g
atagatttacatnttccgactgattacgaattcaatacgactacctatagggaatgtggccctcgacgtccagaattcagcacgagcctggacctgctgtcccagccctgccgcgctgtttacatgggttggcgagaagaacgacattcccttcgagctgcgcatcgtggatctgattacaggtaagtccatcctcgggtttggggaaccgaaaagtcaggaaggggacaggtaggcatacatagcttagggaacttctcccaacgccaccttcttcctggggccattgctggtctggtttggagaccgaacagagaaaggtgagccagcagggagatccaagagtcggggctccccaaaactctgctcggtctcacggaatataccacggggttcccctgaggccgaataaaggggtggggatcatgaagagaagccagacaggaggacaaaaacgggcgcagctgggtgcaggggcacacgcctgtagtcccaacaactcgagaggctgtgg

SEQ ID NO: 103989 - DNA, 445 bp, Homo sapiens
ctgcatagggctcggcgtggtgcacacctgtaatcctagctatgcgggaggctgaagtgggaggattgcttgaacccagaaggcagaggttgcagcatggccgctattgcgccactgtactctaggcaggctgctagagctggactttgtggctgacccaaatcaagaagtttttacgtgaagtgacaggaaagcacattgccctagcctggttactttgtgtgaaatgccttgtcttctgtatttaaaacgcttgcgaaatgctaacagttactttggcaaggagttataattaggggcaagagtacgttagctaatagctagatcttttgccttactagctagggttttatgcattaggccattattctggacagatggtagtaatgctatgcacctcaggcggcatgccttaggctcctggccctcatagggccttcagggg

SEQ ID NO: 103990 - DNA, 419 bp, Homo sapiens
atttattgcttgctttgttcttggtcaagccggttcactttttggccatcagccattgcaaaacctccacaacaaagaagtggaaagtcatgcaatcagaaaagccataaactacagctggggccaggggaagagggaagttagctgaagactttgtaagcagaaacatcaggaaaccttctgacatgttaataaagatactctagagtcacatcttgtgtggaaactcaaatccgcattgttggggcggaagtcggagtcagtgactggccccagctgtcaccccgagccttcagataagacggtggaactaggcagggcgccgtggctcacgcctgtcatcttagcactttgggaggccaaggagggtggatcactttagcccaggagtttgagaccagcctggacaacatagtgag

SEQ ID NO: 103991 - DNA, 443 bp, Homo sapiens
gtttgccagtattttattgaggatttttgcatcgatggggatcaggggctaaaattctctttttttgttgtgtctctgccaggttttggtatcaggatgataccctaactcattttatgaggccagcatcatcctgataccaaagcctgaattcatctattttctaatcaacgtaggaagacttcacggaggtggaaagtgagtcctctctggtaggaaaggtagggatttaaaaatccaggagcttttgaatgaaagagaagtggctgggacaggaagggatctgcaggcatctagcacagttttagaaagagcgtgggagcctactaacaattacaaccgcttggagtgggctggagtgatctgacttaatgttttatagtgatgttaagtcatatgtatcacatagtttctgaagtttgatagcaataggaatcctttct

SEQ ID NO: 103992 - DNA, 463 bp, Homo sapiens
  misc_feature (1)...(463): n = a,t,c or g
ggtctcaggtcatggcggtcgcggggcccgcgcccggagctggcgccaggcccaggttagatctgcaatttctccagcggttcctgcaaatactgaaggttttgtttccttcttggtcatcacaaaatgccttgatgttcctgacccttttgtgcctaccctactggaacaatttgggaactaccaagttggcttgatccccaatcaatactatggggtcctgggaaacaaagacttggaagggtttaagactctgacattcctggctgtcatgctcattgttctgaactccacggtaagatctttccctctctctgtgtctctcgtcctctccagtccagtgtgaccgtaatgcctagtggaacttatcctccaggaagcaggaagcaagctgtggnggtgtggttcctcccttttctgggaactatagggataattgcctttattatacacgccgatcttt

SEQ ID NO: 103993 - DNA, 404 bp, Homo sapiens
cggcacgagcgcagcggcggggagacctcagcgctacggggcggaactggagtcctctcccgcctgccggcctgcctgccacagtcgtactccgtcactccgggagcctcatggctgcaacctgcgagattagcaacatttttagcaactacttcagtgcgatgtacagatcgtgaggactacaccctggcctctgttccccctgctgccacctttggggccgatgacttggtactgaccctgagcaacccccaaacgtcattggagggtacagagaaggccaactggatggggtgaacagtcacagttttggccgaagacgcagggactggactggatcagtttccaagcggagaagaacaagtacgaagcaagcgccattggcttcccacgatgggacaagg

SEQ ID NO: 103994 - DNA, 443 bp, Homo sapiens
cggatcttttctccagcaattgggggaaagaaggctatttctctgaattcgcttagagtaaccagcggcgtatattttttaggcgccttttcgaaaacctagtagttaatattcattagtttaaatcttattttatttttaagctcaaactgcttaagaataccttaattccttaaagtgaaataattttttgcaaaggggttacctcgatttggagctatttttttcttccaccgtcatttctaactcttaaaaccaactcagttccatcatggtgatgttcaagaagatcaggtcttttgaggaggactttaacgaccctgaaaaggtgtacggcagtggcgataaggtggctggctcggttgatagtggaggtgtgtgaagatactcgtgtcaaagccgttaggatcctggcttgcggagtggctaaagagctaaggatg

SEQ ID NO: 103995 - DNA, 461 bp, Homo sapiens
cggacgcgtgggcgcgcgcggctgaggcgaggtcgctcggcgcagctgttgcggggccatggcggggaccgcgctcaagaggctgatggccgagtacaaacaattaacactgaatcctccggaaggaattgtagcaggccccatgaatgaagagaacttttttgaatgggaggcattgatcatgggcccagaagacacctgctttgagtttggtgtttttcctgccatcctgagtttcccacttgattacccgttaagtcccccaaagatgagatttacctgtgagatgtttcatcccaacatctaccctgatgggagagtctgcatttccatcctccacgcgccaggcgatgaccccatgggctacgagagcagcgcggagcggtggagtcctgtgcagagtgtggagaagatcctgctgtcggtggtgagcatgctggcagagcccaatgacgaaagtg

SEQ ID NO: 103996 - DNA, 463 bp, Homo sapiens
cagcaggcggcgaagatggcggagaacagcggtcgcgccggcaagagcagcgggagcggcgcggggaagggggcggtgtccgcagagcaggtgattgctggcttcaaccgccttcggcaggaacagcgaggcctggcatccaaagcagctgagttggagatggagttgaatgagcacagcctagtgatcgatacactgaaggaggtagatgaaactcgtaagtgctaccgcatggttggaggagtgctggtggagcgaactgtcaaagaggtgctgcccgctttggagaacaacaaggagcagatacagaagatcattgagacactgacacagcagcttcaggcaaagggaaaagaactaaatgaattccgggaaaagcacaacattcgtctcatgggagaagatgagaagccagcagccaaggaaaactcagaaggggctggggctaaggccagctcacctt

SEQ ID NO: 103997 - DNA, 447 bp, Homo sapiens
gcgtaggcggccctgagggggtgtgttgcaggggtttccaagcccagcaccagcacccttgcccttttccatcaggggttcagcctaaggtccccgctgatgggcggctcccgagtcttggagaagagcacgagaacctaaaccgcccccgaagtgcggagaccccctgggcaggctgaaagaaggcggcggcgtctgtctctgcggcttctggttctcacttgtcgaacagctttgctgagccatcaaggtctaatggaagcatggttcggcattcttcatctccatatgtacgatatccttcggataagcctttccttaatagtgatctacgacgctccccaagtaagcctacacttggctatccagaaagcaacagcagagccatattttctgctcttagaatcttcaggataaattcgacgcttgaacctgataggatcaagc

SEQ ID NO: 103998 - DNA, 418 bp, Homo sapiens
  misc_feature (1)...(418): n = a,t,c or g
gaggccggcttggtcactatggaggagataggcatcttgggggagaaggctcaggatgagatcccagcactgtccgtgtcccggccccagaccggcctgtccttcctgggccctgagcctgaggacctggaggacctgtacagccggttccaagaagctgcagcaagagctggagttcctggaggtgcaggaggaatacatcaaagatgagcaaaagaacctgaaaaaggaatttctccatgcccaggaggaggtgaagcgaatccaaagcatccccctggtcatcggacaatttctggaggctgtggatcagaatacagccatcgtgggctctaccacaggctccaactattatgtgcgcatcctgagcaccatcgatcgggagctgctcaagcccaacgcctcagtggccctccan

SEQ ID NO: 103999 - DNA, 459 bp, Homo sapiens
  misc_feature (1)...(459): n = a,t,c or g
aaacgatcccagtgtcggttgcgggatccgcctcctctcagtttgcccctttagccctccacctttcccttctcctctctcgcatttccgccagtcggcttacccgctggccgcctcctgacaagcgggagggatccgcggtggacccagggaagcggaggagcctggcggccaccccctcttcctcacttccctgtactctcatcgctctcggcctccgacacgttccaagatgagatgggattctccaacatggaagatgatggcccagaagaggaggagcgtgtggctgagcctcaagctaactttaacacccctcaagctctacggtttgaggaactactggccaacctactaaatgaacaacatcagatagcgaaggaactatttgaacagctgaagatgaagaaaccttcagccaaacagcagaaggaggtanagaaggttaaaccccactgt

SEQ ID NO: 104000 - DNA, 718 bp, Homo sapiens
cgagtgtcctgcgagagcggcgattggcggggtggcggctctaggagcgtcggtcgcctctctgagggccggccccggaggcctcggagcgccgggcctaccggacgtttgcggcgaagctgccctgactgaaaagcgtccgcggggccgtctgacaggtccgggaagaggcccctgaggggcggacgggcgcgtctccaccgttttcgcagagggatactggtgaagcgggagtggtgtgcggcctcaggtccgggcggcactggggttagggactgcggagggaagtggtgcgtgttttttgtcctgaggggtaagtaaaagctcgctcttgtccggaatgctttcagaaattaacggataaatctccacctccaccaattttagtgtcccattgccaaattttcttgagttgttttaatcatctaatgaagtcaggtgccagaaggcaactggatctcgccaggcggccttgaagtttgttaaaaagtagggaccagagcatcaggaaaaatacaaaattctgagtaaaatgctgaaatcccgtacctctgagcttgccggtgtaaggatggtaggatttaaggaagacgatttccttaaggtagaagttcgtttttatgaatatgtttttaagaaaattccatcttatcgcccttctctaaccagttttctccaagtttggcaagcaagtttgagaaagagaggacgcattaat

SEQ ID NO: 104001 - DNA, 395 bp, Homo sapiens
gcagaagttgtctgagtgcgttggtcggcgggagtcgggccagacccaggactctgcgactttacatatttaaatggatgagatggctaccactcagatttccaaagatgagcttgatgaactcatagaggcctttgcaaaagttgatctcagcagcaacggattcatttgtgactatgaacttcatgagctcttcatggaagctaatatgccattaccaggatataaagcgagagaaactattcagaaactcatgctggatggtgacaggaatacagatgggaaaataagtctatgacgaatttgcttatgtaagtatgtgataattcacagttattagaagtagtatatgttgcctcgtgtaatgggatggtattggaataaagaccgggtgg

SEQ ID NO: 104002 - DNA, 621 bp, Homo sapiens
  misc_feature (1)...(621): n = a,t,c or g
cgacgatctcgtgcgttgccggcgaagaggggagcctgacgactcggaaatttgaataccacagtagcatggagtgtgacctcatggagactgacatcttggagtcgttggaagatctaggttacaagggcccattgttggaagatggagcgctctctcaggcagtctctgctggagccagttcccccgagtttaccaaactctgtgcttggctggtgtctgaattaagagtgctctgtaaactagaggaaaacgtgcaagcaactaacagtccgagtgaagctgaagaattccagcttgaggtgagtgggctactaggggagatgaactgcccgtatctttcactgacatctggggatgtgaccaagcgccttctcattcagaagaactgcctcctcttgctcacatacctcatctcagaactagaagctgccagaatgctctgtgtgaatgctcctccaaaaaaaagctgaagaattggaacatagttatattggctggaggtttggacattcctagagcaatacatatgcctttcaactcttgaaagacctcactcncgcctccttcttgcggacgcgtgggtganccnnnaattccggacgggtaccgcagtgaacg

SEQ ID NO: 104003 - DNA, 371 bp, Homo sapiens
gagagctagcaccatgagcttcaataccctgccctcgtgctcggtgctgcctggaacgggcccataacccctcagccttgcgcagtctcggatccccccgagaagatgtcacctttgctaactctcctgcccccatcctgcccctctgctgggagggtgtctgcttctccccgccagccctcgatcccctaaacctccttctttcataaggctggggaagcgaggcctggggagggaagggactcacctgcccggcagatggggtcctcacctgcccgctgctgccagctacaccttcgttgcccatgccctgggatcaaaccctgcccaccagctcccctcgttcaaccagctgccacgtcctgtaaccc

SEQ ID NO: 104004 - DNA, 415 bp, Homo sapiens
cctcagactcatagagaacccaccatggtggtggcttctgccgacaagaccaacgtcatggccgcctggggtaaggtcggcgcgcacgctggcgagtatggtgcggaggccctggagaggatgttcctgacctttcccaccaccaagacctacttcccgcacttggacctgagccacggatctgcccaggttaagggccacggcaagatggtggccgacgcactgaccaacgccgtggcgcacgtggacgacatgcccaacgcgctgtacgccctgagcgacctgaacgcgcacaagctttggttggacccggcaacttcatgcttctaagccactgtctgctggtgaccctggtcgcccacctgcccgacgagttcacccctgcggtgcacgcctgcctggacaagttactggg

SEQ ID NO: 104005 - DNA, 454 bp, Homo sapiens
ggctgaggttatcaataagctcctagtccaaacgccatgggtcattgcacagaggaggacaaggctactatcacaagcctgtggggcatggtgaatgtggaagatgctggacgagaaaccctgggaaggcttctggttgtctacccatggacccagaggttctttgacagctttggcaacactgtcctctgactctgccatcatgggcaaccccaaagtgaaggcacatggtaagaaggtgctgacttccttgggatatgccataatgcacctggatgatctcaagggcacctttgcccagctgagtgaactgctctgtgacaagctgcatgtggatcctgagaacttcaagctcctgggaaatgtgctggtgaccgttctggcaatccatttcggcatagaattcacccctgaagtgcaagcttcctggccgaagaagatgaatgcagtggcc

SEQ ID NO: 104006 - DNA, 396 bp, Homo sapiens
cgccctctcttcctctcagccttccgcccccatgcatcccttctacacccgggccgccaccatgataggcgagatcgccgccgccgtgtccttcatctccaagtttctccgcaccaaggggctcacgagcgagcgacagctgcagaccttcagccagagcctgcaggagctgctggcagaacattataaacatcactggttcccagaaaagccatgcaagggatcgggttactcgatgattggtgtcaaccctaataatgatttctctgatattacaggcatgcatagagggtggtatagaactgatagatatcgtcatatccttttcaagtggattctagatagtgtgagggtacagacggaatggtcgtatggtgttgcatgtctctataaacc

SEQ ID NO: 104007 - DNA, 374 bp, Homo sapiens
tctgtcaaccccacacgcctttggcacagggaagtggggaacctttatttcccttctttttctctttagctcggcttattccaggggtgtgtttcgtcgagatgcacacaagagtgaggctgctcatcggattaaagatctgggagaagaagatttcacagccttggtggtgattgcctttgctcagcatcttcagcagtggccattcgaagatcactgtccaattagcgaatgatgtaactgaattcgccacaacatgtgccgccgacgagtcatctgagaattgcgaccaatcacttcataccctgtttggagacttattgtgctctcgtgcaactcttgatgagagccattgtgttcaggacggccggccg

SEQ ID NO: 104008 - DNA, 347 bp, Homo sapiens
tttagaactggccagggtataaaaagggcccacggaatccgttctaggatcccaaggcccaactccccgaaccactcagggtcctgtggcagctcacctacgcaatggctgcaggctcccggaatccctgctcctgcttttgccctgctctgcctgccctgcttcaaagctgggccgccaaaccgtccgttatccaggctttttgaccacgctatgctccaagcccatcggcgcaccactgccattgacacctaccaggagtttgaaaacctatatcccaaggaccacaatattcattctcatgactccgacctcttctgctttagactctattccgacaccctcag

SEQ ID NO: 104009 - DNA, 438 bp, Homo sapiens
aactgggaggcataggttgcagtgagctgagactgtgccaccacactccagccaaggagacagagtgtggctttgtctcaataaaaaaaaaaaaaaaaggttaaaattaggggcaaacccctttggaaaaatttttgaaaaggcccaggtttttttaaaaaattttaaaacccccttgggaattttaggccttgggttttacggggaaaaaagcccttggttaaaactttaagatttcaaaacctttttggaaatttaaaaaacgggattttaaaaacttccttaaaaaaatgggccttaaaaaatatttcaatctttttaaaaatttaaaaactttgaggcaaatgtaaaaaatgccccctttggaagggatttaagggtttgaaaaggtttttttaaccctttgtgccccaaaaaaatggttaattttggtttcac

SEQ ID NO: 104010 - DNA, 251 bp, Homo sapiens
actcggctgcactcagcatcggagccaggagctagtggccgccgccacgtcccaccagacctgcatccaagcaagtgaagatgttaaagagatcttgccagagccagaaatggaaagtacagacctctgaaaatatctattgaaaatgggcaacttatgattggatcatatatagtcagccttcagattcctgggataacgattatgattcctttgttttacccctgttggaggacaaacaactgtgctat

SEQ ID NO: 104011 - DNA, 1271 bp, Homo sapiens
agacgatttcgtggaggatttctctctagctcgactcactctggactgactcgctccctggctttctcagttcgttttgggagataacttgttttgctccaagccgcatccgttgaccccttacagtcggatggtctagatgactgaatggagttttgagttggacttttgtgtccctgacggagttgggcctgatcccagagcactgggggtggggaggaggtgttactgtaaaatgcaagttggataaaaggaggacctctcgccaagggccccaatgagtggcacacagtctactatcaccgacaggtttcccctcaaaaaacctataaggcatggaagtattttgaaccgagagtcaccaacagataagaagcagaaagttgagcgcattgcatcacatgattttgaccccacagatagctcctccaagaagacaaagtctagttcagaggagagtagatccgagatatatggtcttgttccagcgttgcgtaatcatccagaaagatgacaatggatttgggctgacggtcagtggagacaatcccagtcttcgtacagtctgtcaaagaagatggagcagccatgcgagcttggagtacagacaggtgatcgaatcatcaaggtgaatggaactctggtgactcattcaaatcatctggaggtggtgaagctaatcaaatctggttcctatgtagctctcactgttcagggacgcccacctgggtcgccccagattccacttgccgactctgaagtagagccgtcagtcattggacatatgtctcccatcatgacatctcctcattcacctggagcatctgggaatatggagagaatcactagtcctgtgctcatgggggaggaaaacaatgtggttcataaccagaaagtagaaattctgagaaaaatgttacagaaagaacaggaacggctacagttattgcaggaagattacaaccgaacacctgcccaaagattgctaaaagagatccaagaggccaagaaacacattcctcagctgcaagagcagttatccaaagccacaggctctgctcaggatggagctgtagttacaccctccagacctttaggggacaccctaacagtcagtgaggcagaaacagatcctggagatgtactgggcaggactgactgtagcagtggagatgcttctcggcccagtagtgacaatgcagatagtcccaagagtggcccaaaagagagaatttatctagaggaaaacccagaagaacaaaaaaaagggg

SEQ ID NO: 104012 - DNA, 950 bp, Homo sapiens
ttttttttttttacatagcaaattctttattttcatattaacagtaaaacataaaacagaaacattaaaacagggcataaacagagttcccatggccctgttttcaaagcaggggcaagaatacatacaatgacaagacattttgagttcgtttaactccaaatcctcaagtggggaaaaaaacttagaggtagtgacaaaggaatatggtggggcagagactggtggagcccagaagactaaagcctggatttataaatgtgaagtcctacaacggggactgggaatggcatcagggtttttttttggtttgttttttttttttgagatggagtcttgctctgtcacccaggctggagtgcagtggcgcgatctcgactcactgcaacctctgcctcccagggttcaagcaattctcctgcctcagcctcccaagtagctgggactacaggcatgcgcaccactgcacccagttaatttttgtatttttagtagagatgggggtttcaccatgttggtcaggctggacaaggctttttttctttggagaaatcactcacgatcatatgaatttgcttccaaaacatccaaatttaatgtactaatgcaaggactggtaagacttaagattcacataacgtccctcatagttaagtctcttgcttcctactattagtggaatcaatcagcatcaggtacttcaaagaaagtcaaatcctaagcctgcccaggcccaaagacaaagccagccaggacctgaccacctgtatcctcttggtggcaatctgctgaagccagatgagttctgctttttaattccaatcctattctgccactgaaactaggcctgggcaaccactcttaatcattaacatatcaaaaggagtatctcctctgagaaaagagcttttctcaggttctagaagctagcttttacaaaagacgtcttc

SEQ ID NO: 104013 - DNA, 343 bp, Homo sapiens
cccacagactcagagagaacccaccatggtgctgtctcctgccgacgggaccaacgtctatgccgcctggggtaaggtcggtgcgcacgctggcgagtatggtgcggaggccctggagaggatgttcctgtccttccccaccaccaagacctacttcccgcacttcgacctgagccacggctctgcccaggttaagggccatgggaataaggtgtcctgacgcgctgaccaacgccgtggcgcacgtggacgacatgcccaacgcgctgtccgccctgagcgacctgcacgcgcacaagcttctggtggacccggtcaacttcaagctcctaagccactgcct

SEQ ID NO: 104014 - DNA, 342 bp, Homo sapiens
cgtctttaaaccctgcgtggcaatccctgacgcgccgccgtgatgcccagggaagacagggcgacctggaagtccaactacttccttaagatcatccaactattggatgattatccgaaatgtttcattgtgggagcagacaatgagggctccaagcagatgcagcagatccgcatgtcccttcgcgggaaggctgtggtgctgatgggcaagaacaccatgatgcgcaaggccatcccgagggcacctggaaaacaacccagctctggagaaactgctgcctcatatccgggggaatgtgggctttgagatcaccaaggaggacctcactgagatcagggg

SEQ ID NO: 104015 - DNA, 366 bp, Homo sapiens
ctggaagaatcgcttaaacctgggaggcagaggttgtagtgagccgagattgcaagcactgcactccagcctaggtgacaagagcgagactcggtctcaaaaaaaaaaaaaaaaaaaaataccctttttgggaaaaccaaaaataaggtattagggcaaataacctttttggtttgggaaataataaggtttttttaaaaaactttccttaagtacccttgggcctaaggttccaaaaatggtccctggaaaatccccctaatttacccttaacctttaagggcctgggaataacctttaaacccctattttaagcccctaaaatatagggaaccttttttaagaagggggcccttgggggggaag

SEQ ID NO: 104016 - DNA, 405 bp, Homo sapiens
cggctcgagtgctggctggagccccctcatggtgcaggcttacagggactaggctgggtgtggagctgcagcgtatccacaggccccacgatgcaggccctggtagctactcctctgcattggagccctcctcgggcacatgagctgtcaaaaccctgccagccccccggaggagggctacccagaccctgacagcacacgggctctggaggacgatgaggatcctatcttcatagaccccgagaacaagctgccagaggctggctccaacttcggctatgacctgtaccggttgcgagccatcatgagccccacgagcaacgtgctcctgcctcctctcatggtggccacggacctatgggacctgtcgctagaagcacagcaactaacagaatccatcattcg

SEQ ID NO: 104017 - DNA, 361 bp, Homo sapiens
ctggaattgagcaagacatcattccataaaatacagtaattgttccagtgagctgagcagaagaggttagacagaagggctaaagaaagcagaagcaaagaacagagtatattagttacttttcaattagttactttttcttacaaggctgggagagggagacagaacaatagaaaaataactggttgattcatatggaggtcagagtggaagcaggtgtgagagggtcccacagaagaaaacatggcagccaaagtgtttgagtccacggtaagtttggcttggccttagctgttgcaggagacctgtgaactctgccttatataatgtggatgttgggcacagagctgtcatctttgag

SEQ ID NO: 104018 - DNA, 371 bp, Homo sapiens
aatttacccctgacgcggcggcggccgacgggaagctgggtgtgcttaggtcgtggtggccccggtggtggtgggctccgggcgggctcgcgtcatcctgcccccgctgcgatgcattcgcggcgcccggacggatttgatggcttgggctaccggggtggtgcccgggacgagcagggttttggcggcgccttccctgcaaggtccttcatcaccgggtcggacctgggccactgggtgacgactctgacagatatcgcccggcaggcgcaactctgcactgtggcgtgaagagcccgccctacggcgtgcccaccaactgcaccccgtacgaaggccccacggaggatccctttgacagtggcagtggg

SEQ ID NO: 104019 - DNA, 359 bp, Homo sapiens
cactgactcagagagaacccaccatggcgctgtctcctggcgacatgaccaacgtcaaggccgcctggggtaaggtctgcgcgcacgctggcgattatggagctgaggccctggagaggatgttcctgtactttcccaccaccatagacctacttcccgcacttcgacctgagccacggctttgcccaggttaagggccacggcaagaaggtggtcgacgcgctgaccaacgccgtggcgcacgtggacgacatgcccaacgcgctggccgccctgagcgacctgcacgcgcacaagcttcgggtggacccggtcaacttcaagctcctaagccactgcctgctggtgaccctggccgt

SEQ ID NO: 104020 - DNA, 358 bp, Homo sapiens
acttctgtgcgttggttattctagttagccggtcatctaattttttttcaaggtttttaacttctttgccatgggttcgaatttcctcctttagctcggagtagtttgattgtctgaatgaatccttcttctctgaactcgtcgaagtcattctctgtccagctttgttccgttgctggtgaggagctgcgttcctttggaggaggagaggcgctctgatttttagatttttcagtttttccgctctgttttttcccatctttgtggttttatctacctttggtctttgatgatggcgatgtacagatggggttttggtggtggatggcctttctgcttgttagctttccttctaacg

SEQ ID NO: 104021 - DNA, 352 bp, Homo sapiens
ctctgcagacttaaatgtccctgtctgacagcattgaagagagtagtggttctcccagcatgcagcttgagatctgagaacagacagactgcctcctcaagtgggtccctgacccctgagtagcctaactgggaggcacctcccagtaaggggcagactgacaactcacatggctgggtattcctctgagacaaaacttccagaggaacgatcaagcagcaacatttgctgttcaccaatatctgctgttctgcagcctccgctgctgatatccaggcaaacagggtctggagtggacctccagcaaactccaacagacctgcagctgagggtcctgactgttagaaggaaa

SEQ ID NO: 104022 - DNA, 368 bp, Homo sapiens
gtgaagccattggtcctggacttttctttgtttgaagactctttattactgattcaatctcattactcgttattggttggttcatattttctatttctcgctgattgaatcttggtaggtagtatgtatctaggaatttgtccacttcctcagatttttcagtttgttggtgtaggttgtccataatagtctctgatgattgtaactgtgttatcagttgtagtgtctccttttccacttctgattttatttgggtcccctttcttcttctcttgattagtctaggtggtggtttagttctgttctgattttttatttgttttagagatggcatcttgcgatgttgcctaagctggactcaaactcct

SEQ ID NO: 104023 - DNA, 385 bp, Homo sapiens
gaaacttctgtagacttaaacatccctctctgacagctttgaagagagtagtggttctctcagcacagagattgagatctgagtatggacagactgcctcctcaagtgggtccctgacccccgagtagcctaagtgggagacacctcccagtaggcgccgactgacacctcatacagccgggtgcccctctgagacgaagcttccagaggaaggatcaggcagcagcatttgctgttctgcaatatttgctgttctgcagcctctgctggtaatacccaggcaaacagcgtctggagtggacctccagcaaactccaacagacctgcagctgagggtcctgactgttagaaggaaaactaacaaacagaaaggacatccacatca

SEQ ID NO: 104024 - DNA, 388 bp, Homo sapiens
ggcgggagaatcacttgagcccgggaggtggaggttgcagtgagcagagatcgcaccactgcactccagcctgggtgacagggtgagactctgtctcaaaaaaaaaaaaaaaattgccaggaggttttgggaactatgtaaaaattttgtcccttttaaaacgctaacccattagttttacctttccctgaggattttaaaattttatcctccaatttataaatgggttttttactgcaaaaatgaaaaacttttttttttaaggaatggtttttgatccaacacgtttatgagtttctgaaactttgtctaagtttatttgggctgccttaacaaaattttgcaaactagggggcttaaacaccagaaatttatttctcacagtcgg

SEQ ID NO: 104025 - DNA, 377 bp, Homo sapiens
ggaggattgcttgagcctgggaggtcgaggctgcaatgagccatgaagtatgccactgtgctccagtctgggtgatagagcaagactctgtctcaaaaaaaaaaaaaaaaaaaaaaaaaaccccccccttttaaaaacccttttttcccccagtaaacccttttttttaaaaaccccaaaaaaatcccctaaaagggaaactttcccccttttgggacccgggaaaaaaaattggaccttttttccaattgggaaaaggcttttattcaacattttttccggccagtttttattggggccccttttgggggttggcaaaaccccggaacccggggaaaaaaataaaaggtcacacccggtttcttaggttggaaacg

SEQ ID NO: 104026 - DNA, 381 bp, Homo sapiens
gaagcttgctccaggagaatcgcttgaacctgggaggcggaggttgcagtgagacaagatcgcaccattgccctccagcctgggcaacaagagcaagactctgtctcagaaaaaataaaaacaaaaacaaaaacggggtatccattgctgtacttccctgatcccctgaaataatgcatacatcctgcagcccagtacttagcagagagtaattgctcaataaatgtcagttccttcctcgttcctttctagaagaggaaagtgggcttaaagttcaacaccagtccaggaagctagtgccagggagcccacaactaaagcaactgtgtggcttgcactatgatttctaactaagcctgcatcagccagtctctgctctct

SEQ ID NO: 104027 - DNA, 354 bp, Homo sapiens
gtcccagctacttgggttgttgagtcaggaagatcccttgagcccggaagttcagggctgcagtgagctgtgtttgtgccactgttgctgcactttagcctaggcaatagaataagatcctgtctccaaaaaaaaaaaaaaaaaaaaaaaaaaaaaaaaaaaaattacaaaaggatttaattttcccctttttaaattttttgaatttttgtaaaaacctaaaacctttttttttaaacccattttaaaaattttacagtttttaaaaatttttttggggtttggcccccataattttaaaaattcccccatattacgggggttaaaaaaagggtttttttttaaccccctttt

SEQ ID NO: 104028 - DNA, 337 bp, Homo sapiens
tctttctctcctctctctttctctctttgtctctctctctttctctccttctctctctctttctctctctcccttccttcctttatagcaaaacaaaaaagacaaacacagtcatacatgcctcaaagtttagagttacaacactgctaatcccatccataaactgaggctggaggaaaggacctttcctgcttctaagcctcagcctaactggaaacagatttttatctcatctggccaggcctctttccccatgcaaggatccttcctaaagaggaaaacaaaaccaaaacaaataccccaaacaagagttttccacaagtagtttaataattcc

SEQ ID NO: 104029 - DNA, 348 bp, Homo sapiens
tttaccatggaagctcatggtaaactaaattcaaaaacctacagcagataccaaaaaattttttaaaaagaaattaaaatatacaaccagagaaaatcaccttcacaataaggaagacaggaaggaaggaaagaaggaagagaagaccaccaaacaacatggcagcagtaaatccttacttattaataaaacattgaatataaatggactaaagtctccaatcaaaacacacagagttgctgaatgaataaaaataaagacccaatgctctattgcatacaagaaacacccttcacctataaagacacacatagattaaaatacaaggatggaaaaagatatttcatg

SEQ ID NO: 104030 - DNA, 354 bp, Homo sapiens
gaaggggagagctacagagtgattaccccccaaacgcccacccaatagggtttagaagcttaaataccacctaaaggttacaaaaagagtgtgggctcggatcagtggcataacatgttcggggagctggagaaggggaagcctggctagcaaaggtggtcttgttatgtaaatgaagccccacaggtggcagccctcaaaagaatagatggtaaatgttttagaccttttttgttgtatgagacagagtctcgctcttattgcccaggctggattgcaatggcacgatcttggttcactgtggcctccgcctcccgggttcaagcgattctcttggcctcagcctcccaagtg

SEQ ID NO: 104031 - DNA, 408 bp, Homo sapiens
  misc_feature (1)...(408): n = a,t,c or g
cggcacgagatttttccatctgcccctgatgagtctgcagccttcactcagggtcccttcagccacaaggacaaaaaaaaaaaaaaaaaaaaaagggccccaggatggggggtccccctggaagccccagcttttaaaagggaaaagggggaaaaatcccaaggcaagaaaagggaaaccttccgggtaaacagggaaaacccttttttttacaaaaaatcctaaaaaaataactgggccgggggggaaggcccttgaagcccaagttattcgggaggttggggcggaaaaattgttgaacccaggggggaaaagtttccagggacccaaaaaaatcccttggatttcaacctggggggacaaacgaaaacttttcttaaaaaaaaaagggtgggggaaaaagattcn

SEQ ID NO: 104032 - DNA, 373 bp, Homo sapiens
aaagctttctagtttatgtgaagtttagttagtggtgtataggttagtccttcaaatttaggtttttgcgtcatctagacttcagttttttaagtgtgaaaagtccttcagtttttcttgattgtacaatgaccccattagcatatatcaagtaaccctttacaggagagtctttttctgggttctctattctgctaattggtctcttagatggaaagctaactttcttttcttttctttttttaaaatggcgtctgaccctgtagcccaggctggagtgcaatggtgcgatcttgactcactgcagcctcaacctccctgggcttacgtgatactcccactttagcttcccaggtgtctgagactacaggca

SEQ ID NO: 104033 - DNA, 345 bp, Homo sapiens
caggaagattgcttgaacccgggaggctgaggtagcagtgagctgagattgcgccactgcactctgggtgacagagcaagactctgtctcaaacaaaacaaaaacagtcaatctacagccaaacccagagccaaggaacatttccgaggatcctgccattgttgggtgccttcatgcattatgtccatgaggaaggaaagagcttccctttgcaggaaactggctcaacttggcccagatctaatgctgataattggcagaaccgcttcccactacaccatgatcatgcaggtgttcccgtgagtgtgacttagctgttgggtgtgaactgagagaggagatttt

SEQ ID NO: 104034 - DNA, 391 bp, Homo sapiens
gctacttgggaggctgaggaaggaggatcactggatcccataagtttgaggctgcaatgaactgtgatcacaccactgtactccagcctgactgacagagtgagactccgtctctaaaataaaattaatttttaaaaagataaaaatagaaaaacataccacattcatacattagaaaattctacagttttaagatggcaattctctctcccaattaatctacagcatcaatgcaatctcaaagaaaatcaaatgagcttttttaaaaaaaactgatgagctgattttaacgtttatatagaaaggcaaagaatctgtactagataaaccaattttgaaaaagaaaaacaatattgtaggacttaaaatatgtgattttgagacttactat

SEQ ID NO: 104035 - DNA, 329 bp, Homo sapiens
tgcatagatggggttttggggtggatgtcctttgtgtttgttagttttccttctaatagtcaggaccctcagctgcaggtctgttggagtttgctggaggtctactccagaccctgtttgcctgggtatcagcagcggaggctgcagaacagcggatattggtgaacagcaaatgttgctgcctgatcgttcctctggaagttttgtctcagaggagtacctggccatgtgaggtgtcagtctgcccctactaggggttgcctcccagttaggctactctagggtcaggaacccacttgaggaggcagtctgtccattctcagatctcc

SEQ ID NO: 104036 - DNA, 226 bp, Homo sapiens
cagaactgtattttcaatttaaatgatattcctacccagtctacttgcttcttcatattttcctctgttggaaatgcagcctgtattttatttattttgtttttgagatggagtcttgctcttttgcccaggctggaatgaagtggtgtgatctgcaacctctgccccctgggttcaagtgattctcttgccccagcctcccaagtagccggggtcgacgcggccg

SEQ ID NO: 104037 - DNA, 296 bp, Homo sapiens
gtcaattttcagacaaagcccattaagaccaaccattcattttggtccccttaggaattgcaatgttacttcaaaaacacgttaaattattgtatagccttacatctttataaagtgatctcccatacattatattttggttatcatcatttgcttcatccatgtgattcttcttattattattttttcagaggtagggtctcactctgttgctcctgctggagtgtagcggtgcaatcatagcccactgtaaccataaactcctgggctcaagcagtcctcctgtctcagtgtcc

SEQ ID NO: 104038 - DNA, 363 bp, Homo sapiens
  misc_feature (1)...(363): n = a,t,c or g
ctcacgtcctatcttccaacttccaccccattatcacctaaatcaccaattttctgattaacaaaaatcacttttcatatctcagggtcttcactttcagttatttttaaagccttaaaaagttagttttctttttttctatttatacgcacaatttttttcccttctttgacccaacactgaagaactcaacaagacactcgctctatctgtctctctctctctctctcttcttgtctcactctgttgtccagattggagtgcggtggcacaatcattgctcattgcagcctcaacctcccaggctcaagtgatcctcacacttcaatgtcccaagtatgctgggcctacaggctcatgccn

SEQ ID NO: 104039 - DNA, 339 bp, Homo sapiens
cttgaaccgagggggcagaggctgcagtgagttgaggatcacaccactgcaccccagcctgggcgatagagtgagactgtctcaaaaaaaacaccaaaaaaaaaaaaaaaaaacccccccaaatttccaaaaaaaataatttcccccggcctaaaaaaaaagcagaccccaaatttttaaaaaccttatttggccctgggccccaaaacctttgttaaaccttcccaaaaaaaaattttttttggcccccaaaattcaaaaggggttttaaaaacctttttttcttgaaatttttttggggggcttaattttaaaaaaaaaaattctaaaattttttcg

SEQ ID NO: 104040 - DNA, 343 bp, Homo sapiens
  misc_feature (1)...(343): n = a,t,c or g
gctgaggcaggagaatcgcttgaacctgggaggcggaggttgcagtgagccaagatcacgccactgcagtccagctggggctacagtgcaagactccgtctcaaaaaaaaaaaaatggcatttttcccttcctaaggcaaattttcccataaaaaatagggtaagtttaaaggggccttaatcctaaaaaaaaattgggaaaaatattaaatcccattttataaagttttcccaaaccaacccaaaaaatttttaaaaaaagccctaggggttttttcctagttggcaagtaaggttaaattaaaggggggattaaaattaccctttaaattaattctccacn

SEQ ID NO: 104041 - DNA, 232 bp, Homo sapiens
agcaatgctaacattatactgaataaggaaaagctgaaagctttctttctgagatccggaacaagactaatcatccccactttcagacctcttattcaacatagtactggaagtcctagccaaggacattatgcaagaggtagaaataaactcatactaataggaaaggacgaagtcaaatggtctctgattgtggacaaaataatcttatatgtgaaaaactctaaacact

SEQ ID NO: 104042 - DNA, 326 bp, Homo sapiens
cttgaaccgaggaggcagaggctgcagtgagttgaggatcacaccactgcaccccagcctgggcgatagagtgagactgtctcaaaaaaaacaccaaaaaaaaaaaaaaaaaaccccccccaatttccaaaaaatataattccccccgggcttaaaaaaagcctttccccaaatctttaaaaaccttttttggccctgggccccaaaacggttgttaaacctgcccaaaaaagaattttttttggcccccccaaggcaaaaggggttttaaaaaccttttttttctggaatttttttgggggccataattttcaaaaaaaaaattt

SEQ ID NO: 104043 - DNA, 338 bp, Homo sapiens
gctgatttaactctagtttctccatcctgctggcaggcaatccccctaaaatacaattgtattcaatcaaacatttctatatttgaacctctacatagtacctgcccttaaagaattcaccatctggtagggaagacatacgtctcatgattcccttgtccaaaatccccaccaatacaatcattctgaagaacaatttatcaacttctagtagagtttaagatgggatgaccgggcgtggtggctcatgcctgtaatcccagcactttgggaggcctaggtgggcagattgaggtcaggagtttgagactagcctgaccaacatggagaaaccccat

SEQ ID NO: 104044 - DNA, 366 bp, Homo sapiens
  misc_feature (1)...(366): n = a,t,c or g
cctgaacacatttgcctttcaagaagattaatggagttcagtgtgcagcagataagcttgtctgggaggagcaggcgagagctaagctgtgtcaacacagcctaagggcaggagagaaccaaattgattactcagatactctccacctctccctccttcccccttccattttcaattctaatacaatttgaatgctgtgtataaatgccaanatataattataaatatctaattcattattactcatatttatttttcatatttatttttttcatattatccattatatttttttcatcttattcttttatctaacttcttttatttttttatcatatttttttttttttttcattaccctctttg

SEQ ID NO: 104045 - DNA, 372 bp, Homo sapiens
ctaaaaatacaaaaaattagccgggcgtggtggtgggcaactgtaatcccagctactcgggagaatgtcttgaaccgaggaggcagaggttgcagtgagccaagattgcgccattgcactccagcctgggcaacaagagtgaaactctgtctcaattaaaaaaaaagaaaaaaagaaaatccctgcttaccaatgatgcttgacttttctatgcttgtgtgtgctggagtagggggaagggtatggtgaagagaggttctcccctcctcagagcatatggttcattttgcccactcttgagcctggattgtaggctcttgctatccgaggagaaactagacggggaatgccctggaagaatgatctggaaca

SEQ ID NO: 104046 - DNA, 1250 bp, Homo sapiens
aacattcttgtttttgcttttstttttttaaataattctagtctggagctaactgtggagcagccaaatagtagctggcatgttgattcaaaccatgggctgaatttgctcataggctgtgcatcagacaaaagcttgaatatttgtgttgtatgcttgttccaaccaccgcttgtgtgagcatttttgtggcttgtacagaaagtacacttttaaattgtctcttgcatcactaaaatttttttaaaatgagcataacaacgaaaggcatccagctgactttttgattcccaagattattgattggattgacttttttacattaaatttttcccagcaaaataaatcatatggcgagtccagggaataaaaagtcaaaagaaacaaatagaagctttttttttaaaaaaatgtattgcttctgaacttttttctgccactgctccctagccctgttttagtttgttattgctgcttttcttttttctttctgtatctatgccttttttttcacagtagtccttggctctgcacggaataaatgataccctcaaatctaattggatgtgctttcgcctttgcatgtaagtacggtagtaagaaacctttgagatctttctgacttttcaaaattagagaaagcaaatgggatggatagattttttttttcttttcaaggggggcaggaaggtaatggtttgagtagcctttgtttaaaaaaaagactaaatatatttaaaaggccacatttatatttttttcacaagaaccacataataaattccacttcttgacctgaatttggaaatccgaaattactaatccaggccaggtgtggtggctcatgcctggtaatcccagcactttgagagggtccgaggtgggcagatcacttgaggcctggagttcaagaccaccttgggcgaacacggtgaaaccccgtctctacgaaaaaatacaaaaattagccaggcgtggtggcacgtgccctgtcagtcccagctacttgggaggctaagtcaggagaattgcttgaacttgggagatggaggttgcagtgagccaagattgcaccactgcattccaacctggggtgatgaagtgagactctccaaaaaaaaaaaaggaaattatttaatccctggcctgtggctcttacatagcctcatgggcatcattggatagctcagagggcccttgattctggcaaggcaaataaagccagaatgagaaattaccatcttctacta

SEQ ID NO: 104047 - DNA, 405 bp, Homo sapiens
cggacgcgtgggtgtgaatatagcacctttttccataaaaggtgctatattcacaggttccagggataaagcaccttttatggaaaaaggaactttttgtgattaagaatcttgagatagggagatttatcttggattatcctggtggacccagtatcatcacaagtttccttataagatggaggcaagaacgttagagtcagagaaatatgtaaatatagaagcagaggccgggccgggcacagtggctcacacctgtaatcccaaagctttgggaggccgagttggggaggatcgcttgaggccaggactttgagaccagcctgggcaacacgtttctacaaaaaaaaaaaaataaaaaaaaaaaaaaaaaaaaaaaaaaaataaaataataatatggattta

SEQ ID NO: 104048 - DNA, 373 bp, Homo sapiens
  misc_feature (1)...(373): n = a,t,c or g
tgaataatgctattataaatactggcatccaagtatctgcacttatttcagcctatgctttcagattcttttgaatatatacctaagaatggaattgccgggtcataatgcaatcctctaactttctgaggaccaattaaactgttatccacagaggctgcaccattttatattcctaccagtaataacaagggttcaaatgtctcactatctttgccaacaatcgtgccttttccattttttcttttcttttttctttattttgagatggagtcttcctctgtcacccagtctggagtgcactggcatgatctcagctcactccaacctctatctcccaggttcaagccaatcttcgggccnaagcctcccn

SEQ ID NO: 104049 - DNA, 103 bp, Homo sapiens
gagacaggagaatggcgtgaacgccggaggtggagcttacagtgagccaagatcgcactattgcactccagcctaggcgacagtgcaagagtcgacgcggccg

SEQ ID NO: 104050 - DNA, 340 bp, Homo sapiens
tggacacctgatttgcaacagtttcctagactgaacccaatatagaaggaatttcaagacatgctagaggccgttggtcttctctatttatagggatcacttatgaagaaataaacaacaactgtagtctaaaaattaagtaagtttcaaggatcaaagaagcctgagataaaagcgaattctttggatttagctttattttatcataactatattacccgccaatgcttcaccagttacagtaatttttttggagacagagtttcgctcttgtcgcctaggctggagtgcaatggtgtgatcttggctcactgcaacctccaactcctggttttaagcg

SEQ ID NO: 104051 - DNA, 194 bp, Homo sapiens
cagctagcaacatgatgacagagttaaaatcacagataccaatactaaccttgaatgtaaatgggctaaatgctccacttaagagacacagagtggcaggctggataaatgacccaaccatctgttatcttcaagagacctatttcacattaagaacaaccacaggctcacagcaaaagaagtcgacgcggccg

SEQ ID NO: 104052 - DNA, 315 bp, Homo sapiens
cttgggagggtgtgggcataatagtaccctgggatgatatcatttaccgtggaacgcgctctgtgaagcatgccttattcctcttgccctttcgtacatatgaggaatttgaagtatatagaaaccgacctggcttactacggtctgaactcagatcacgttggactttaatcgttgaaccccctaacctttaatagcctctgcaccatcgggatgtcctgatccaacatcgatgccgaaaaccctattgttgatatggactctagaataggattgcgctgttatccctagggtaacttgttccgttggtcaagg

SEQ ID NO: 104053 - DNA, 333 bp, Homo sapiens
ccaggaggcggagcttgcagtgagctgagatccgccactgcactccagcctgggcaacagagtgagactctgtctcaaaaaaaaaaaaaaaaaaaaaagggaccccaggcaaaaacctggttttggaaaggaaagggggaaagggaccggttttaacccaaagtggtatttgcggccaagggaaagggacccctttttgaaaaaaaaagcctttgggccaataaaacgggttttgggggtccagcccctgggggggcccaaaatggccggggggcttttggaaaaccggaaaagggaggaaaggcagtcttttgacaaaaaaaggtttttttt

SEQ ID NO: 104054 - DNA, 366 bp, Homo sapiens
cctgatcttgggtgggtgtgggtataatgctaagttgagatgatatcatttacgggggaaggcgctttgtgaagtaggccttatttctcttgtcctttcgtacagggaggaatttgaagagatagaaaccgacctggattactccggtctgaactcagatcacgtaggactttaatcgttgaacagacgaacctttaatagcggctgcaccatcgggatgtcctgatccaacatcgaggtcgtaaaccctattgttgatatggactctagaataggattgcgctgttatccctagggtaacttgttccgttggtcaagttattggatcaattgagtatagtagttcgctttgactggtgaagtctg

SEQ ID NO: 104055 - DNA, 353 bp, Homo sapiens
tgtgcctgtaggcctagctacccaggaggctgaagtgggaggatggcttgcgtccaggtggcagaggtggcaatgtgccgtgtgattgcgccactacactccagccttgtgccactacactccaccccagacgacagagctagaccgtgtctcacaaaaaaaaaaaaaaaaaaaaggggaaccccatttacctgaaaggaatttggggggccccttttaaaaaggggggcccaaatggggcttaacctttgggggggaacccttatcttttttccgaaaaacactggttccaaaagggccctagtgctaattttaaaataaaattttttaaagggctaacccttttctttaga

SEQ ID NO: 104056 - DNA, 1070 bp, Homo sapiens
  misc_feature (1)...(1070): n = a,t,c or g
gtctcaggaattacttttttgtttttatttctttaaatttaaaacacccttttctctcagagagttggattttgtaatggaaacaatggctttaaggacagtagttagctatagatttacaaatgtctacttaaaatccaggagccaatgaattgtgtgtctcatccccaggcccaagagcaggctgcatagacagctctttctggcgcttgaacggtggaggtgtggagccagaggctgtggggagaagatggaaaaagccccaagctcagtgtcaaaacacacaccctgcccgtagctctctcctggggctaggtgggattgtggggtgtcacatgcttccctgtgaagagactacccaaacaggctttgtgtgaacaataaagctttttaatcacctgggtgcaggtgggctgagtccaaaaagagtcaagcaaagggtggtgggattatcattagttcttataggtttgtgataggcggtggagttgggagcagtttttttgtgggcagggggaggatcttacaaagtaccttctcaagggtggagcgggtgtatcgtacaaagtacattcacaaggacgggggaatatcataaagtacataagcgcaagggctgggagggggtgtattgtcacaaagtcaattgatcagtcagggtggggcaggaacaaatcacaannnnnnnnnnnnnnnnnnnnnnnnnnnnnnnnnnnnnnnnnnnnnnnnnnnnnnnnnnnnnnnnnnnnnnnnnnnnnnnnnnnnnnnnnnnnnnnnnnnnnnnnnnnnnnnnnnnnnnnnnnnnnnnnnnnnnnnngtgcacacggatgtcctggctgacattctcaagagcatcaacaatgccgaaaagaggcaaacgctaggtgctttttaagctgtgctccaaggtcattgcccgtttctcactgtgatgatgcagcacggattatgcggggtggagttggggggacttcctgggccgggggacttttgcaagagaccccggtgactcaggattttgagttcttaaccagtcgagtgaaggattcaaaattaaccactccaagggc

SEQ ID NO: 104057 - DNA, 343 bp, Homo sapiens
taattcttatattttttagtagagacggagtttcaccatgttgaccaggctggtctcgaactcctgactttgtgatccgcctgcctcggtctcccaaaggagaccatttattaatgctggggtttttttagttttttgtttgtttgtttgttttctaatcggtatttttgtgaccccttcttctgtgttccagtctggtttcttgcaaacaagtccttcccccttcctcttctcgatgcttcccaggtcctccaggtctgacccagctgggtgacttctgagaacatccataagtactatagctgtgcttcttggtgtaaactaaggcaggaagaagggagtt

SEQ ID NO: 104058 - DNA, 328 bp, Homo sapiens
gggaggctgaggcacgagaattgctgggacccgggaggcagaggctgcagtgagctgagatcgcaccactgcattctagcctgggtgacagactgagactccatctcaaaaaaaaaaatgaaaaaggttgggccccgaaaattcccttcacaaatggttttcaaaatttgacaaaaaattttcaaaattggtccccataactataggaattttcttttgaaagtttggggcccaactgggggggtttattgaaaacgggacagccatttcccatttttgaacccaaaaaacattttgggatttttaacctcgggggggcggaatttgg

SEQ ID NO: 104059 - DNA, 330 bp, Homo sapiens
  misc_feature (1)...(330): n = a,t,c or g
ttgtaataataccactatggaaaattatcaaaccacaaaggatgacagcaacagaggaagagagaaacaaagggtctacaaattaactagaaaacaattaacaaaatggcaatagtaagacctcacctatgnnnnnnnnnnnnnnnnnnnnnnnnnnnnnnnnnnnnnnnnnnnnnnnnnnnnnnnnntgaacgaataaaaaaacaagacttatctatatgttgcctacaagtgactcacttcacctttaaggactcacaaagactgaaagtaaagggatggaaaaaagatatttcacacaaataaaaaccaaaagagaatatggacaaa

SEQ ID NO: 104060 - DNA, 306 bp, Homo sapiens
ggagaatcacttgaaccagggagtcggaggttgcggcgagctgagatcatgccactgcactgcggcctggagacaagagcaagactccgtctcaaaaaaaaaaaaaaaaaaaaaaaaagcccttcccttattggcggggggggccctttttgggcctttaattcaaccttttaaccccaaatggggaaccccccgggcctttgggggcctaaaagaattggcctgtggtttaagggggcccggggttttggaaacccccccaaaagggttggaaaaaaaaggggggccggaatttggttcaaaaac

SEQ ID NO: 104061 - DNA, 302 bp, Homo sapiens
cttgacaagtatcattacatgtggagcttgcagtgagccgagatcacaccactgtactccaacttgggcaacagagtaagactccacctcagaaaaaaaaaaagaaaaagccccatgattaattcgattaaaaggttgggggctgccctcaaaaggcccctttgaaaaaacccagggttattggccccttcctttttatagcaaacccccattttttttaggggttacaaaagttctagcgttaaaatttttttgaccctaaaaagcccatccaggtaaaagggggggtgtgaaaaaggctc

SEQ ID NO: 104062 - DNA, 297 bp, Homo sapiens
gtactctcctgtgtagtttactgagtactctcctgtgtagtttactgagtactctcctgtgtagtttgctgagtactctcctgtgtagtttgctgagtactctcctgtgtagtttgctgagtactctcctgaggcaggagaatcgcttgaacccgggaggcggagtttgcagcgagccgagttcgtgccatcgcactccagcctgggcaacaagagtgaaactccgtctcaaaaaataataataatgataaaaaataaaaatacaaaaaattagctgggcatggcagtgcacgcctg

SEQ ID NO: 104063 - DNA, 380 bp, Homo sapiens
gcggttaccggacgggctgggtctatggtcgctccgcgggccgctccgacggctggtgcttttttatcagggcaagctgcgttccatggcagggaacttttggcagagctcccactatttgcaacggatcttggataaacacgatctgttgaacgagcgccaaaaggatttaaaggttctctcagaggaagaatattgtaagttacaaagattctttacaaaagttatccaggcattatgtgaacatcttaaattaagacaaccaggtattgccactgctacggcatatttcaagagattctatgccaggcattctctgaaaagtatagatcctgtattaatggctcctacatgtgtgtgtttggcatccacagcaaacg

SEQ ID NO: 104064 - DNA, 343 bp, Homo sapiens
gctagctactcggggggctgaggtggtaagagagctggagcccggaaattggaggttgcagtgagccgagattgcgccactgcactccagcctgggcaacagagccagacgccatctcaaaaaagaaaatgaaaaaaaccccatctttatttttaaaatccttaaccccatagtggaaaactgggcctttaaacccttttacccgaaatagcttgtcggaaaaaaacgggattttttgcttgggatatagggcataaaaactgttgtttattggggggaaaccctgggtctaaaaagggggccgctgataactccaaggaagtctaaggggggacttaaagcc

SEQ ID NO: 104065 - DNA, 403 bp, Homo sapiens
ggcacgagagactgcatagggctcggcgtggggcgcttgtaattgcagctactcgggaggctggggcagagagttgcttgaatctgggaggtggattcaagccaagatcgtgagccaagattgcgccactgcactccagcctgggtgacagagcgagactccgtctcaaaaaacgaaaaagagaaggaaaaaccaatgtttgttaaccctcccgaaaggtaaccccttttcagggggaaaggtttaggaggggcccggcccgttatttaaaaccatttgggtggggaagatttcccaaaattattgggctatggaatccccaatttaaggggttaaaaccggaccattttattcaaacctatggttacatagtaccctaaactatggggaaagacccggattg

SEQ ID NO: 104066 - DNA, 337 bp, Homo sapiens
ggcacgagagaccaatgacacaacacaaacaagattgcttccagctaacaacacaatgacaagatcagatccatacatatcaatactgaccttgaatgtaaatgggctaaatactccaattaaaagaaacaagagtggcaagctggataaataagcaaggtctaatgggatgctgtcttcaagagacccatctctcatcccatgagacccataatgacacccataagctcaaaataaagacatggagaaaaatctaccaagcaaatggaaaacagaaaaaagcaagggttgtaatctcatttcagacaaaacagactttaaaccaacaaagaccaag

SEQ ID NO: 104067 - DNA, 341 bp, Homo sapiens
  misc_feature (1)...(341): n = a,t,c or g
ggcacgagactttggaagatgtgtttggaaaaaaattctaggttaaatgaagaaaggttagtcttttcaaaaaatggtgctggaatactctattcatatgcaaaaaagttgagccttgacacttacagatttgcaaaaattaactttgaatggatcacagacttaaatgtaagagaaaaaactaaaaacttctaaaaggaaacataaaagaaaatatttgtgatcttgggttaggcaaagattttttttagctgggcgtggtggctcacacctgtgatctcagcactttgggaggccaaggcaggtggatcacaaggtcaggagattgagaccatcttgan

SEQ ID NO: 104068 - DNA, 348 bp, Homo sapiens
ggcacgaggcttgaacctgggaggtggaggttgcagtgagctgagattggaccactgcactctagcctgggtgacagagtgagactccatctcaaaaaaaaaaaaaaaaaaaaaccgttcagaaaaattttttttaaaaaataatttggaaaaatttggaaaaacccaaaaccaccctgttttgaaaaaaccggaaagggctttccttgtaaaaccctaccaaattttccaaagggggtcccatccaggaattttggccactaattggtttgggaaaggagtgccattaaaggcccaactaaatatcaggcactgtcctggggggggaaaaatcctttggccaacaaa

SEQ ID NO: 104069 - DNA, 350 bp, Homo sapiens
ggcacgagcaggagaatggcatgaacccgggaggcagagcttgcagtgagctgagagcgcaccattgcactctagcctgggggacaagagcaagatttcatctcaaaaaaaaaaattaaaaaaaaaaaaaaatatatatatatatatatggaatactttacaagacagttcacatttccatctgtggaaaactaaaattttaaaaacccagccgggcacggtggaaaaggggattttaggggctgcatgggtggaccttggcatgaggctcctttttaggccaaagtgatggatctagaatggaaacattcttagaaatagagccgttgagcacaggaaggataaaagcc

SEQ ID NO: 104070 - DNA, 769 bp, Homo sapiens
tcgactttttttttttttgagactgattcttgctcttgttgcccaggctggagagcagtggtgcgatttggacttcacgcaaacccccgctttctgggttcaagcgattctcctgccccagccttcccaagtagctgggaggacaggtgttgagctgcgcatcccagcctgtttctctttttccactcttcttttttctcatctcttttctgggttgcctgttggctttcttatctgcctgttttgcaagcaccttctcctgtgtccttgggagccctgagacttctttctctccttgcctccacccacctccaaaggtgctgagctcacatccacaccccttgcagccgtccatgccacagccccccaaggggccccattgccaaagcatgcctgcccaccctcgctgtgccttagtcagtgtgtacggtgtgtgtgtgtgtgtgtctgggggctggggggtgggtagctggggattgggccctctttctcccagtggaggaaggtgtgcagtgtacttcccctttaaattaaaaagacatatataatatatatatttggaggtcagtaatttccaatgggcgggaggcattaagcaccgaccctgggtccctaggccccgcctggcactcagccttgccagagattggctccagaatttttgccaggcttacagaacacccactgcctagaggccatcttaaaggaagcaggggctggatgcctttcatcccaactattctctgtggtatcaaaaagaaaaaaaaaa

SEQ ID NO: 104071 - DNA, 335 bp, Homo sapiens
ggcacgagggtcggtggaggggttattaaaaggagaggtggggtgcccagctattagaggttagatcgaggagacacggagaggtgggatgtgacagtgtagggtgcagttgaggagttaggtgaatggtggtggggcaacgttactgtgtgatgtgttttgttatttgtgttatgtctgttcttgttggtttggttgtgtggtttttgtggtttctgtttatattgtttattggtatggttatgctgttgttctttttatttttttttttttttttttctcgcttttatgttttgcagtatgtttgttcgtatggttattggataggttttgag

SEQ ID NO: 104072 - DNA, 333 bp, Homo sapiens
ggcacgaggacagggtcttgctctgtcacccaggttggagtgcagtggcttgatctcggctcactgcaacctccacctcccaggcccaagtgatcctcccacctcagtacaccccctcaacagtatctgggaccacagacacacgccaccaccaattctttccctcaccctgccataacttgggttgctgccactcaagcccctaacagaagtcccaagccccatattcttttctgtagctcaggatgctatataagcttcaattatctgacccttctttgagcctcatattttgtaggattcctgtgtacaactatgtaattaattattttt

SEQ ID NO: 104073 - DNA, 343 bp, Homo sapiens
ggcacgagctggagaatcacttgaacctgggaggcagaggttgcagtgagctgagatcgtgccacagcactccagcctgggcgacagagtgagactcagtctcaaaaaaaaaactgaaaatgtaggagggtctattttatccctataacttaatccaagtaatatttggaggcattgagatacctttttgttttttttcagaattctttctcctggatatggccctgtgtttcatgagatttgtgtttggagcatgatgagctctgcgtttattgtagctttaaatggacagtcattattaactgtcaacttagtctttaaaatccataatcacattgtgctt

SEQ ID NO: 104074 - DNA, 329 bp, Homo sapiens
  misc_feature (1)...(329): n = a,t,c or g
ggcacgagcggcacgaggcaggaaattgcttgaacctgggagacggaggttgcagtgagctgagatcgtgccactgcactccaatcagggcgacagagcgagactctgtctcaaaataaataaataaataaaaatgtctgcatgacccatatggtttgaagtttttttcctagcaaatgattgcagattatttatgggggctagaagatattttgctatcaatgtaaggatttttttccccttaggtcagtctattcactgtttagatctggtaaattacttgcatgaattgaataacttctctgtatcattgtactgggtaatagtcn

SEQ ID NO: 104075 - DNA, 347 bp, Homo sapiens
  misc_feature (1)...(347): n = a,t,c or g
aaagaaatgggagtaagtgtgtgtctcctgccactcttctttgttaataggtcagagacatttattcaaggtgtccagtaggcaggaacatagcagttgagatttgctttcgaggcatatgcatcatctctacagataatcgtttgttaactccattcatgtagcttggagaagtcattctttcacttttaaattttattttctttccttttatttatatatttttttgagacagagtcttgctctgttgcccaggctggagtacagtggcatgatcatggctcactgaggtctcgagctcctggactcatacaatgctcctgccctagattcccagggcactgaan

SEQ ID NO: 104076 - DNA, 357 bp, Homo sapiens
ggcacgagcccagctacttgggaggctgaggcgggagaatggcgtgaacccgggaggcggagcttgcagcgagccgctatctcgccactgcacttcagactgcacgacagccccttactactacctatggcctgccccgggctcctgacctgccttctccttgatctcacccatcagcacctatccccacgggctccatactcactcagtctgtaggtttgctattgttgtcctcccaaaactatacgggtctttgtctgcatagaagcacagatacttagttccagggtcatgtggggaagcattagggggcgtatccaatcagccttggtttgtggagctctggataagaatgac

SEQ ID NO: 104077 - DNA, 352 bp, Homo sapiens
ggcacgagattcttcactttaattgtctgtcttaaagcgtgggcctctactggcagggaagaggccacaaaaacaaacaaaaaagtgtgggactcattttttttaatacaggctcttgctctgtagcccaggctggagtgcatgcaatggtgcaatcttggctcactgcagtctccggctatcgggctgaggtgatcctcctgcctcagccttccaagtagctgagacacttaggcatggaccaccctgtcttggctgcctacggcacaccatcgagtaccggggttcactgcgttcagtagaccgtcttatctatgcggccttgtcgtcgacttctgcagctggcctctcc

SEQ ID NO: 104078 - DNA, 346 bp, Homo sapiens
ggcacgaggacagggtctgtcgcccaggctgaggtgcagtggcgtgaccttggctcactggagctactcgggaggctgacgcaggagaatcacttgaacccgggaggcggaagttgcagtgagctgagattgcaccactggaggccagcctgggtggaaagaacgagactctggaaaaaaaaaataaagtctgtcactggggcctcataataaaacgacactccatttcctatctggcccctgctccttaatgttagccccctcctgttgggaggagggggtgactttcagcgcatgttcaaacattcccagggctggctctgatctcactaaagcccatcgtcat

SEQ ID NO: 104079 - DNA, 286 bp, Homo sapiens
ggcacgagttttgtttgcacttttttgtctgaagatttatcctttcctgctgctttctcagcttcgtttccacttttgcaggagcaggttcagctgataagcgtgccgatctcctcttgggctcttcctctgtggcccattcagtggagctgaccttcctcttgggcatcctggctgcagggaaggcgtgtgccaagcgcctgcgaggcatagtgcatctagagcctcagcaaagccgggctgcctggctgctgccacgcctctcccaaactctttaattgttaaa

SEQ ID NO: 104080 - DNA, 379 bp, Homo sapiens
ggcacgagggctagtattctttgtatatttagtagagatgacattgtgccatgttgcccaggctgctgtgaaacccctgacctcaagtgagccgcctgcttggcctcccaaagtgctgggattacaggcgtgagccaccacgccccacctagagtagaattttacacttgcttatctttacatctcccatgctggcactgacaatgtgcacattcattcattgcacaatacaggttcaggcactatttcatctgtaaacagaccatatggtgatagttaacacagagaatgtagtactcattggcatgtggatttatacttgcaaggtccatctggatttgtttgatatggtcgatatgtaatgaccaataaagatgcg

SEQ ID NO: 104081 - DNA, 380 bp, Homo sapiens
aaaaagctagaccctgtctcaaacaagcaaataaatgagaggtataagtcctcctttataagtataggaagagatttttctttccttttgtctcttagaacattcaattagaaaatttgtaaactcattatctctgtcttctgaggtttttttttttagacagaggctttctcttgttacccaggcttgactgcaagccccaatctcccctaacctcaacctccgtctcccggcttcaagcgattctcctgcctcagcttcccgcgtaactggaataacagtggtgaaccactatgcccggttaactttgttgtttatctttcaaaatgaaacccttttttgagtttaatgaccccggggcttattttctaaggacgcgg

SEQ ID NO: 104082 - DNA, 381 bp, Homo sapiens
ctgtttctactaaaaaatacaaagatcagccaggcgttgatgcgcatgcttgtagtcccagctacttgagaggctgaggcaggaaaatcacttgaactactccagcatgggcaacagagcaagactccatctcaaaaaaaaaaaaaaaaagggggaaaagggaaaagtttttaaatggccacccagggatttataaaaaaaaaaaaaattttaaagggaaaaatagccagccaaaaaaggccaaaccttaaaagatttttcccaaaaaacctggggttgccaaaacccaaaaaagctaaccaaaaaagcattaatccccctaaaaaaattttaaatttaccaaaaaaaaatgggcctttaaaaacaaaccaaactttttcc

SEQ ID NO: 104083 - DNA, 1157 bp, Homo sapiens
tttttttttgttgttgttgttttcccaaacatacaggtttcaggatggggaagagcttatcttcatacacggcaggtaggagtagaaattgtctcaaacatcctgggttacaacttgacatatatccaaatccttagaaatttgcatttctttggacctagcatttttatttctgggaatgactcctaaggcaatacttacacgtgcaaagagatatgtttaagaactttattgcagccttatttatgatatccaaaattagaagcaacccaaatttctactaaaacattcttggttaaatacgttactgctgatgggaatattgtacgttaatttaaaaggatgttataggaaagatatttcataacatgaaaagttcaattgaaagtttatttatttttttttttaagactgagtcttgctctattacccaggctggagtgcagtggcaccatcttggctcactgcaacctaccaccttccaggttcgagcaattctcctgcctcagcctcccgagtagctggaattacaggcgcccacccccacaccatgcccggctaatttttgtactttagtagagacggggtttcaccatgtgggccaggctggtctcgaactcctgacctcaggtgacccgcctgcatcagcctcccaaagtgctgggattaccggcatgagccaccacgcccggcctataaattattgactaatatttatcagaacaaaaagacaaagtcagaaaaaaagaagttgggggctgggcacagtggctggaactcctgacctcaggtgatacaccagcctcagcctcccaaagtgctgggattataggcgtgagcccctgcgcccggcctacggctcactttttgaacctctacagctattcagtttccaaagtgtaaccattttatctgcttgctaatggaaaggagttcagaaataaattacagatttgaggagggagaaatcaaacaaaaagagaggcaatctgtgagcactaacttagtgtaaaatctgttgaaaagcatattgccatttgctctcaagttagtttcttgaaaatacaagggcatgaacaccttcttctctaagtctaaaggtaaaatcaatttttattcctgaaagctagcttgcagttataaaattgctataatca

SEQ ID NO: 104084 - DNA, 336 bp, Homo sapiens
ctttgaagagagtagtggttctcccagcacacagcttgagatctgagaacgggcagactgcctcctgaagtgggtccctgagccccgagtagcctaactgggaggcaccccccagtaggggcggactgacacctcacacggccgggtactcctctgagagaaaacttccagaggaacgatcaggcagcagcatttgcagttcaccaatatctgctgttctgtaggcactgctgctgataccaaggtaaacagggtctggagtggacctccagtaaactctaacagacctgctgctgagggtcctgtctgttagaaggaaaactaacaaacagaaag

SEQ ID NO: 104085 - DNA, 154 bp, Homo sapiens
gcaacctctgcctcctggggttcaagcaattctcctgcctcagtctcagatgtcctccaccacatacctaatttttgtatttttagtagagatggagtttcactatgttggccaggctggtctcgatctcctaacctcgtggtcgacgcggccg

SEQ ID NO: 104086 - DNA, 337 bp, Homo sapiens
cgaattaataacatcagcttccaaattaaacactggacaaagaagaattaaacctaaggtaagcaaaataaatgaaacacagtgagtatcagagtgaaaatcagtggaacagaaaacaggaaaccaatacagaaaaccaatacagaaaatcagtgaatccaaagctggtttaatatcctgaagtcaatccatgtaattcatcatagtaacagactgaaaaagtaaaccatatcgtatcaacagatgcagaaaaagcagctgacaaaatccaacatcccttcctgattaaaaaacagtaaaaaactcagcacataatagaacaaaaacttccgcagcc

SEQ ID NO: 104087 - DNA, 290 bp, Homo sapiens
  misc_feature (1)...(290): n = a,t,c or g
gccttgttaagaaaatgcttacaggcagtacgcttggtaaaagttatcgccattctccattctcgataaaccaggggcacaatgcactgcggaaagccgcagggacctctgcccaggaaagccgggtaccatccaaggtttctccccactgagatatggccttgtgggatgggaaagacctgaccatccaccagcccgacacccgtgaaggatctgtgctgagtaggattagtaaaagaggaaggcctctgtctcctgccttcccctgggaacggaatgtctcagtatan

SEQ ID NO: 104088 - DNA, 328 bp, Homo sapiens
ggcacgaggaggcaggagaattgcttgaatttgggaggcggaggctgcagtgaggggagatcatgccactgcactccagcctgggcaacatagcacgactccatctctaaaagtaaataaatcaaaccataccatcagacctggtgcaacctgttagcaggccatatggcagaagcgaggagtgccactccagctgcaccgtagctgcactctgtcttggtgtggggttctggcaagtctgggatcttacacgactgcttggcagcaaagcagaatttgaaacacggcacgtctttctggcatgtaagtcctgatatttccccattat

SEQ ID NO: 104089 - DNA, 328 bp, Homo sapiens
ggcacgaggaggcaggagaattgcttgaatttgggaggcggaggctgcagtgagccgagatcatgccactgcactccagcctgggcaacagagcaagactccatctctaaaagtaaataaatcaaaccctcccatcagacctggcgcagcctgttagcagtccatgtggcagaggcgaggagtgccactccagctgcaccgtagctgcactctgtcttggtgtggggttctggcaggtctgggagcttaccgcactggttggcagcagagcagaattggaaacagggcacgtctttctgggatgtaagtcctgatgtttccccattaa

SEQ ID NO: 104090 - DNA, 343 bp, Homo sapiens
ggcacgagctaaggtgcagctgaattctgctgataataataaaatgtgataggtcatcaatggcttagctaataactcaggtgtcggtctttttccggactccagtgttatgaagggaaggaattttcttgtcacttgacaaagataaacttcatgaacatattgcaaaaatacatacacagtcatttgtagttagtgacttgaggcccacagtttcctttctttctttatttttattattattttttttgacacaaagtctcactctgtcacccaggttggagtgcagtgccgcgatctcagctcactgcagcctcctccttccaggttcaagcaattcttt

SEQ ID NO: 104091 - DNA, 340 bp, Homo sapiens
  misc_feature (1)...(340): n = a,t,c or g
ggcacgagatcatttattcatagaagatcctctcttatggagaattaactgaagcttagaggaagagacttttttttgagacggagtttnactcttgttgcccatgctggagtgcaatggcgcgatctcggctcactgcatcctctgcctcccgggctcacgtgatcctcctgcctcagtcttccgcgtaactgtgatttgtagtgttctccacccgtctcttgcttctgcttgtctctcctcttgccatctctgggctaccttttgaccctcttactctgtatcttctatgccttctccttgtgccctcttcttctctcccgtctctcccttgctccgc

SEQ ID NO: 104092 - DNA, 363 bp, Homo sapiens
gcgattttgtttatccggtatctgttgatgatttgggttgtttccttcttttggctattgtgaataatgcttcagggagacatttgtgtacaaatatttggttgaatacctgttttcaatttttttgggtgtacacctaggaatggaattgctgcgtttgttgttgtgttgttgttgttgtcgttgttttttgagatggaggttacactctgttgcccaggtgttagtgtatgcgtcttaacttatttcttacatttttgttggatccatctccatatggttctcgtttgttttgagtcctctggcgatttcctatatgtcgttgctgctttgatactgtcgcctcattgtagtttatatttg

SEQ ID NO: 104093 - DNA, 321 bp, Homo sapiens
  misc_feature (1)...(321): n = a,t,c or g
aaagctttaagtatttaagagctctgtattatatttgatactcttacagttaataacttttcagaattaatacattgttaattattgaccagttttgaagtttgggtttaactgtagttgaaatggaaggactcttgttttacacttgtattaaagataaatttattaaaataagttatttagcaccatggaactgaacaataaaaaaacaaaagaatacgggcggactaatcttcaactcctacatacttcccccattattcctagaaccaggcgacctgctgcttccttgacgttgacaatcgagtaaaactcccgatn

SEQ ID NO: 104094 - DNA, 357 bp, Homo sapiens
aacttgaccgacggaacacgtgaccctagggatatccttgcaatcctattctatactacatgtcaacagtagggtttactacctcactgttggatttcgacattccattggagcatccgatattaaaggtatgcccgacccacactagagcactacgtgatctgagttcagaccggagtaatccaggtcggattctatctacttcaaattcctccctgtacgaaaggacccgagaaataaggcctacttcacaaagcgccttcccccgtaaatgatatcatctcaacttagtattatacccacacccacccaagaacagggtttgttagaaaaaacatattggaaaaaacaacccaa

SEQ ID NO: 104095 - DNA, 376 bp, Homo sapiens
cggacgcgtgggcggacgcgtgggcggacgcgtgggattaaacaaacaaaaaaaaaaaaaaaaaaaaaaaaaaaaaaaaaaaaaaaaaaaaaaaaaaaaaaaaaaaaaaagggggggggccctttttaaaaaatcccttggggggccccatttttacggggggggaaaaaaaaattttttttttttttagggggggttttttaaaaccccctgggaattttttgaaaaaaactttttttttggggggggactttttgggccaccccctcccaaaaaaattaaccctttttggaaaaaaaaaattttttaaggggaaaggggggaaaaaaatttttttttttttttttttgaaaaattttttttataaaaaaaaaaa

SEQ ID NO: 104096 - DNA, 154 bp, Homo sapiens
gcaacctctgcctcctggggttcaagcggttctcctgcctcagtctcagaggtcctccgccacatacctaatttttgtatttttagtagagatggagtttcactatgttggccaggctggtctcgatctcctaacctcgtggtcgacgcggccg

SEQ ID NO: 104097 - DNA, 361 bp, Homo sapiens
ggcacgaggactggtcagggtaatgattgctgaatgttgggttgtctgtggcagttctttaaaataagacaatgaagtttgccacattggtcgactcttcccttcatgtaagatttctctagcatacaatgcagtttgatagaattttagccacagtagaactactttcaaaatttgaatcaattctctcaaaccctgctgctgctttatctactaagtttctgtaatactctaaatcttttgttgtcatttcaacaatgttcacagcatcttcaccaagagtagattcctcctccagaagccacttactttgttagccataagaagcaactgctcatccgttcaagttttatcatgacat

SEQ ID NO: 104098 - DNA, 371 bp, Homo sapiens
atttttttgaatagtttgagtataagtggtgttttatatctttggtagaattcagcagtgaagccctcagatcctgagtttttctttgatgggagactttattactgtttcagtctcattactcattattggttcgttcaggttttctatttcttcatggttgagtcttggtagattgtgtgtgtccaagaatttatccattgcttccaggttttccattttgttatagtgttcataacagtctctaatgattctttgtgtttctgtggcatcaatcgcaatgttcctttttgtctctgcattcatttcttttgcacattcttagtagctgctttcttatctttataatcatttagttctggcctcgatcg

SEQ ID NO: 104099 - DNA, 337 bp, Homo sapiens
gatggggtttcaccatgttggacatgctggtcttgaactcctgacctcaggtgatctgcctgcctcaggttcccaagtactgggattataggcttgagccattgcacctggccagaagaatcttaatgtacaaaaatgaataggtttttaatacatcagactatcccaattccatgaaagaagaaaatacacccattaaaacagaaactatggtgcctagaattaaactgcacaaaaaactacatgacccatataatttttttatgttgaaataattctaaacatgcaaaactagcaaagattcatataaatcctcaaccagcctatcctgatgtta

SEQ ID NO: 104100 - DNA, 770 bp, Homo sapiens
ctacccaacctacgactctctaagcgacctgaaccgccgggtgcccggccgttgcgcgggctgatgacgtacggaagctgccggcgttgccctctcccaagatggcggccaggtcgcctgctcgggcctcccaggcgactttgccccactgcgcccgcgctctcttctcctttccatttctggaccaaggggctgccataaggagtctgtgactagagatgggaggtggtggccacggcctctcgctgtatgctgtgtggaaggtcgaatcatcatcatcataaaacttaatattgcccttatgtgccaggaactactatctcagcaatggagatgtggtgcttggccgcaatcgtgaatcggccctggaggggacacaggaaggggctgcctgcgactcatgacctcctgcgtgcctgcctgctgacctatgacccttcaagttcccacccctcagccacgcctgtgatggagggtctttgttttgtcgcctacgcctggagtgcagtggtgtgatcacaagctcactgcaagcctcaacttcctggactcaaagcgattttcctgcctcaacctcccaagaactaggaccccaggtgcatgccactacaccaggctaatttgttgtagagaggaggtcttgctatgttgcccaggctggtctcgaactcctgtgcccaaaagatcctcccacctcagcctcccaacatgccagggattacaggcatgagccaccctgcccagctcaataacctaagttctatgaatga

SEQ ID NO: 104101 - DNA, 413 bp, Homo sapiens
ctatactcaattgatccaataacttgaccaacggaacaagttaccctagggataacagcgcaatcctattctagagtccatatcaacaatagggtttacgacctcgatgttggatcaggacatcccgatggtgcagccgctattaaaggttcgtttgttcaacgattaaagtcctacgtgatctgagttcagaccggagtaatccaggtcggtttctatctacttcaaattcctccctgtacgaaaggacaagagaaataaggcctacttcacaaagcgccttcccccgtaaatgagaaaaaaaaaaaaaaaaaaaaaaaaaaaaaaaaaaaaaaaaaagggggggcctttttaaaagatccctgggggggcccaaatttaccggggggggggaaaatttttttttttttttt

SEQ ID NO: 104102 - DNA, 466 bp, Homo sapiens
aaacccttatctgaatgcacggtggggagaactatcgacaaaagcttcttttttcacaagggaaattgacggacagacgggaggagcattaaagaccatttctggcgtgtgcaggtcactctcagcagctcaactgcccaacgtgaccagcggccacctctgcagtgtcttccacaacctggtcttgactcgtctgctgaacaaatcctctgacctcaggccggctgagaacgtagatcctgagagatagcaaacatgcccaacagggagccctgcatctctgctggagctgttcaacagcatcgccacacaatgggagctcgtaaggtccctcatagcgggaaatgcgctgaaggatgaaaatgatctctgcagtaaagatgttggcgtcattaataatgagctacaaagctgccgcggcggaggattacaaggctgactgtcctccacggaacccaggacctag

SEQ ID NO: 104103 - DNA, 542 bp, Homo sapiens
gcgtgacctatgacacgatcgcatcgactatcgtttggtcgacccacgcgtccgactaaaggcagcagaatcctctgcagacttaaatgttcctgtctaacagctttgaagagagtagtggttctcccagcatgcaggtggagatgtgagaatggacagactgcctcctcaagtgggtacctaacccccgagtagcctaactgggaagcaccccccagtaggagcagactgacacttcacacggctgggtactcctctgagacaaaacttccggaggaacgatcaggcagcaacatttgctgttcaccaatatccactgtactgcagcctccactgctgatactcaggcaaacagggtctggtatggacctctagcaaactccaacagacctgcagctgagggtcctgactgttagaaggaaaactaacatacagaaagaacatccccaccaaaaccccatctgtatgtcaccatcatcacagaccataggtagataagagcacacagattgcgaaaacactgaacagatatccttggaacc

SEQ ID NO: 104104 - DNA, 429 bp, Homo sapiens
acatcccgatggtgcagccgctattaaaggttcgtttgttcaacgattaaagtcctacgtgatctgagttcagaccggagtaatccaggtcggtttctatctacttcaaattcctccctgtacgaaaggacaagagaaataaggcctacttcacaaagcgccttcccccgtaaatgatatcatctcaacttagtattatacccacacccacccaagaacagggtttaaaaaaaaaaaaaaaaaaaaaaaaaaaaaaaaaaaaaaaaaaaaaaaaaaaaaaaaaaaaaaaaaaaaaagggggggccccttttaaaaaacccccgggggggccccatttttagggggggggggaaaaaaaattttttccccttaagggggggtttttaaaaccccgggggggttttttggaaaagcacctttttttggggg

SEQ ID NO: 104105 - DNA, 434 bp, Homo sapiens
aattatttgaacctgggaggcagaggttgcagtgagccaagatcatgccactgcactctagcctagacaacagagcaagactgtctcaaaaaaaagaaaaaaatgatgatttttagttgctgccttagtccatttggactgctataacaaaaataacaaactgagtggctcgtaagcaacagaaatgaattcctcacagtttgagaggctgggaagtccaagatcagggcaccagcagattcactgtctgctggcttcttgattcatagctggctgtcttttccctatgtcctcacatggcagaagggataagggtgatctctcaggcttcttttataagggtactaataaaagagggctccaccctcatgacctaatcatcttccaaagaccccatctcctaatacaatcatgttagggggttgcgatttcat

SEQ ID NO: 104106 - DNA, 415 bp, Homo sapiens
  misc_feature (1)...(415): n = a,t,c or g
cccacgcgtccgtgaaaatgttgtctttgtctaaaatgttaaaatcccatcctactactgacctgctactcttttttctggggtgattttacccccaacaaattctataaatgccttctctggctctgattcaaaaagtgctcacaaatggaaatgctggggacagaaaatttcaacttcttcacctgtcatactcatatcatagctgaacactctaatagcacacacacacacacacacacacacacacagacacacacacacacacacacacctctattattttatgagtaggggaagggaaaggcgcttgaacaacacacacaagagctggtctaataatacatgtcacaccttctgtctccttcgctgaaattttactctgagggtgactcacattcaattaaattggtgn

SEQ ID NO: 104107 - DNA, 439 bp, Homo sapiens
aaaatcacttgaacctggaaggcagaggctgcagtgatacaagattgtgccactgcacttcagcctggtcaacagagtgagaatctgtctcaaaaaaaaaaaaaaaaagggcagttatccaccatacaaggtttttccccttctccaagggaaaaaaaatttttttacccctttaagcttaaatctttttccccccttgcttaaattccccccacagccttccccaggaagggtaataaaagggcccgggggcggcccaaattccccatgggcaaattccctgaagggccctacttggggcaggatctacttcctttaaccccggaataattttggctaattcttggctctagggaaaaaatatatggtggaaggtatcaaaaaaaacttgcggttccttttgggggaacattgttaaaaaagggaaaacaattttatt

SEQ ID NO: 104108 - DNA, 368 bp, Homo sapiens
  misc_feature (1)...(368): n = a,t,c or g
gttttttcaagaacagaattgtttaaagcagaggttcttaaattttggttgaaactttttagcttgcggtttgtgtcactggagaacttagtaaaaatgagatttctaaaactaaaaaaaaaaaaaaaaaaaaaaaaaaaaaaaaaaaaaaaaaaaaaaaaaaaaaaaaaaaaaagaaaaaaaaaaaaaatataattnnccggcggccgggtaaaaggggggccctttaaccccagggaatagcctctttggggccctttattacccccccctttgattccagccccctccccggtttttttttttttttttaggggagcgcccccccgggtttttttaaaaaagaagaaaaaacgacaacagctgct

SEQ ID NO: 104109 - DNA, 424 bp, Homo sapiens
gcggtgagccgagatcgcaccattgcactccagcctgggcaacaagagtgaaacactgtctcaaaaaaaaaaaaaaaaaaggggaaaaatttaattggccaccttttcgcaaatatttagggcttaaaaatttttaaaaagggaaaaagggattgaaaccaaaaaaaagggaaagaggaaggggccttttttttaacttaagggccagggcccccggccccattggaaaagctcccaaaattttacaaaggaaaactgtccctccttatggagtaatagggacgggatttgtcttcccaaatgaaaaaccaccccaacccagacaaaatttttggagggcagagttttaaaaaccgtgttgtggcccattgaggaacagcaacgtgtggaacttggaaaccaagatacccttcaactggccaca

SEQ ID NO: 104110 - DNA, 375 bp, Homo sapiens
  misc_feature (1)...(375): n = a,t,c or g
ctttgatgatagtgatgtacagatggggttttggtgtggatgtcctttctgtttgttagttttccttctaacagtcaggaccctcagctgcaggtctgttggagtttgctggaggtccactccagatcctgtttgcctgggtatcagctgcagaggctgcagaacagcaaatattgctgaacagcaaatgttgctgtctgatcgttcctctggaagcttcatctcagtggggtacccggccatgtgaggtgtcagtctgcccttactggagggtgcctcccagttaagctactcgggggtcacggacacacttgaggaggcagtctgtccattctcagatctcaaactccgtgctgggagaaccactactctctn

SEQ ID NO: 104111 - DNA, 402 bp, Homo sapiens
  misc_feature (1)...(402): n = a,t,c or g
gaggaggtttacacgtcactcccaggctgaggctaagacctaccccatggcctggcctcagacatcatcctaaaatcaggctgctctggctactagcccagtctcagctatggaggccactatggccattcccagggtgaccagtgctggctccaagtctctgtaaccatgcgcatgtagttagttgtatgtagggagattggtaggtgtcattctaattggggnnnngnnnnnnancannnnacngnctanntnnnctaaaactgntntccccaaaatattttatgtgacaaaaaaggcttggaactattatccctacacaattacagaatacacatgttcctttttcggaaattcttcattcatatagaaaccaagtatgaggacaacaaaggaagcaat

SEQ ID NO: 104112 - DNA, 440 bp, Homo sapiens
  misc_feature (1)...(440): n = a,t,c or g
ctcagtcataattttgcaaaggcagtttcaataggcatgggatttctttttgggggtgatgaaatgttctggaattagagagtggtgatggtttcacaactttgtggatatactaaaaaccaactaaattgcacactttaaaatgattaattttatatgttaattatatctcaagaaaaagtacagtatatgatagtaggcacccatgtacatactacctaattccagaaaaaaactgttacaaataccattgcaatttcctatgtactgttcttccatcccattccccaccccctctaccccctctagagccnnnnnaaaaaaaaaaaaaaaaaaaaaaaaaaaaaaaaaaaaaaaaaaaaaaaaaaaaaaaaaaaaaannnggggggggggcttttttaaaaattttttgggggggccatttttttttgtttttttaa

SEQ ID NO: 104113 - DNA, 416 bp, Homo sapiens
tattaaaggttcgtttgttcaacgattaaagtcctacgtgatctgagttcagaccggagtaatccaggtcggtttctatctacttcaaattcctccctgtacgaaaggacaagagaaataaggcctacttcacaaagcgccttcccccgtaaatgatatcatctcaacttagtaaaaaaaaaaaaaaaaaaaaaaaaagggggggggccgttttaaagaatcctttggggggcccaattttacccgggctggcaaagaaaaagttttttcctttaaggggggggaataaaaacctacctgggaatttttggaaaggaccctttttttgggggggggactaattggcccaacctccttccaaaaatttaagcctttagggaaaaaataaaattttaaagggtataaggggtaaacct

SEQ ID NO: 104114 - DNA, 442 bp, Homo sapiens
cttaattatattaactgaccaaaaaaaaactagtaaaatgatgaagctaaattactcttactagaatcctaacttttaattaaggaaccctatattatttaagcatttaattgtggatttgcctcttcctgtgaagtattagacaatatagctgggttttaggaaactctatatttataactttttgaatttcccttgttaaataacacactgtgggatttgttatacagcactgactacagaaaactacaccttaagattctgtctcctggggggcgggggttattttctattttacagtctccaagacaatcttctaaacctcattttcttttctttttttttttctgaaacggagtttcactctgtcgcccaggctggagtgcaggggcaccattttggttcactgcaacctctgcctcccgggttcaagcaattctcc

SEQ ID NO: 104115 - DNA, 477 bp, Homo sapiens
attgaacgccgtgggaccgatcgaacgcctgcggtacagccacgcaattcgcggacgcagcccggcttgtgcattcatcacgtagttcttgtgcctcagctttcagctccatcaggtcctttaaggacttctttgcattggttattctagttatccattcatctaattctttttcaaagtttttaacttctttgccattggttcgaatttcctccttagcttggagtagattgatcctctgaagccttcctctctcaacttgtcaaagtccttctctgtccagctttgttccattgctggtgaggagctgcgttcctttggaggaggagaggcgctctgatttttagagtttccggtttttctgctctgttttttgcccatctttgtggttttatctacctttggtctttgatgatggcgacatacagatgggtttttggtgtggatgtcctttctgtttggtagttttccttctat

SEQ ID NO: 104116 - DNA, 412 bp, Homo sapiens
caaacccacaggtcctaaactaccaaacctgcattaaaaatttcgggtggggcgacctcggagcagaacccagcctccgagcagtacatgctaagacttcaccagtcaaagcgaactactatactcaatggatccaataacttgaccaacggaacaagttaccctagggataacagcgcaatcctattctagagtccatatcaacaatagggtttacgacctcgatgttggatcaagacatcccaatggtgcagccgctattaaaggttcgtttgttcaacgattaaagtcctacgtgatctgagttcagaccggagtaatccaggtcggtgtctatctacttcaaactcctgcctgtacgaaaggacaaaagaaataaggcctacttcacaaagcgccttccccgcgaaat

SEQ ID NO: 104117 - DNA, 391 bp, Homo sapiens
cggacgcgtgggcggacgcgtgggcggacgcgtgggctcgatgtttgatcaagacatcccaatggcgcagccgctattaaaggttcgtttgttcaacgattaaagtcctacgtgatctgagttcagaccggagtaatccaggtcgggttctatctacttcaaattcctccctgtacgaaaggacaagagaaataaggcctacttcacaaagcgccttcccccgtaaatgatatcatctcagcttaatattatacccacacccacccaagaacagggtttaattttcgggtttgtttttaaaaaaatttttcccccgggcctttggggggggggcccttttaaaaaatcccttggggggccaaattttaccgggggtggagaagtttttttt

SEQ ID NO: 104118 - DNA, 406 bp, Homo sapiens
ctagagtgggatttcaagtcagagcaaggataacatattaataatcttagcctgggccacacagtaagacctaaaaaaaaatagtggaatgtggtggtatgcgcttgtagtcctagctgctctggaggctgaggcaggaggatcacctgagcccaggaggtggaggctgcagtgagctgtgattgtgcggctgtccttcagcccgggcaagaccctgtctcaaaaaagaatgaaaataaaataaaaatattcttcatgagtgagctatgaggttcaaggtcttacaaagaaatgcttctaggtatctcagacctttcacaaaatcaaacaggctttgtggtacttatctcactataacctgttataagttggactaaaaatgtagtttaattaaaaaaaaaaaaga

SEQ ID NO: 104119 - DNA, 399 bp, Homo sapiens
cgctattaaaggttcgtttgttcaacgattaaagtcctacttgatctgagttcaaaccggagtaatccaggtcggtttctatctacttcaaattcctccctgtacgaaaggacaagagaaataaggcctacttcacaaagcgccttcccccgaaaaaaaaaaaaaaaaaaaaggggcgcccgcttaaaagaaaccccaggggggccaaagtttacccgggcttgcaacttaataattttttccttataggggcccgcattataacctgtttgggaatttttggaaaggacccttactttgggggggggccaaactgggccaaccatcctacagaatttaaacgttttagggctaactaaaaattttgacgggaaaaatggggccaactacccgcatccg

SEQ ID NO: 104120 - DNA, 424 bp, Homo sapiens
  misc_feature (1)...(424): n = a,t,c or g
accacgcgtncgaccacgcgtacagaaacccacaggtcctaaactaccttacctgcattaaaaatttcgaggggggcgacctcggagcataacccaacctccgagcagtacatgctaagacttcgccagtcaaagcgaactactatactcaattgatccagtaacttgaccaacggagcaagtaaccctagggataacagcgcaatcctattctagaggccatatcaacaatagggtttacgacctcgatgttggatcaggacatcccaatggtgcagccgctattaaaggttcgtttgttcaacgagtaaagtcctacgtgatctgagttcagaccggagtagtccaggtcggtttctatctacttcaaattcctccctgcacgaaaggacaagagaaataaggcctactttacagagcgccg

SEQ ID NO: 104121 - DNA, 401 bp, Homo sapiens
  misc_feature (1)...(401): n = a,t,c or g
gtgatctacccacctcggcctcccaaaatgctgggattacaggggtgagccaccgtgcccaacctcacttgcttcttatccttacactcccccagccccagagaaactgccacatacaccacaaaaaccaaacatcccccaatgaccttagccccattgctccattcactcccaggtgagaattcaggcaaacgtccacaaaggtcacaggcagcgtacatacggttctgttataccccatatattaccccttcatgtcctaaagaagacattttctcttagagattttcattttagtgtatctttaaaaaaaaatcttgtgttaacttgcctccatctttttcttgggtgaggacacccaggaatgacccttttgtgtctatgatgttgctgttcacagn

SEQ ID NO: 104122 - DNA, 516 bp, Homo sapiens
aagagaaattcttttattttctacttctcttcagatttgtcttatgcattttccaactatgtatgcatcacagctattctttttctgagttatagctacagttttcttactgttgtcttcatgccatttcatttcacatggtactttgtagattttgatgaggaagttggtatttttagtgcacacaaaaattggttttaactgtagagtttgcttatcagaacagttaaaaggcagccaggtgtggctcacgcctgtaatcccagcactgagataggtcaaggagggtggatcacttgaggtcaggagtttgagaccagcctgaccaacatggtgaaaccctgtgtctactaaaaatacaaatttagccacgcgtggtgacgcacgcctgtaatcccagctactcggaaggccgagggagcagaatcgcttgaacctgggaggtagaggttgcggtgagccgagactgggccactgcacttcagcctgggcaacaagagcgaaattctgtctaaa

SEQ ID NO: 104123 - DNA, 566 bp, Homo sapiens
  misc_feature (1)...(566): n = a,t,c or g
gattgaaaanccgcactgagtaggctgnagtacggngcncacgcgnncgtgactcagcctggggacaaacgagactcctttanagaaaacaaaaaactacttattcggaagacgggaggtgtagaggggaaaacatcttataagaacaaaggcaaatgtttgagcaattagttttcagggatttttttcatcagccttttctagttaattaagtataagtataagagacctatctgctatttactgagtgccctggagaaattgcaaaaagtgtctctggaaaatgctgactattgcctctggggcatcctgatatggctgcagtgggaggccggcagaagtaacaaccctcccatcgtgcctcagtgtatttgtgtgtgtatgcgcgtgcatgcaaatgcatacacacgtacatgtatataattattaaacagaattttcttgaggaaaaacattttattaatatgacctactaaaaatacaaaaattagccgggagtggtggtgtgtgcctgtaattgggaggctgaggcaagagaatcacttgaacctgggaagcagaggttg

SEQ ID NO: 104124 - DNA, 493 bp, Homo sapiens
  misc_feature (1)...(493): n = a,t,c or g
cattgcacttgagtagctatcggaaccgcnnccggaaacccgggncgacccacgcgtccggtttgttacagcattgccaacagcatgctggataacattgtaacttccagttttgccatggtaatatttgtgggcattcctttttgaacagtagccattttctttttctttctttcttttttttttttttttttaggaaagggggttttttttcccccccccgggtgggggggaaggggcaaaatttggtttattggaacttttgctttccagggtaaagggattttttttccttttgaaaaactggaataaaagggggggccccccccccccggtaaattttttggtttttaaaaaaaagggggttttacctttgggggaggggggggcccaaatttttgaccttaaaaatttctttgctaaaaatccaaaagggttgggaataaaggggggaccccccccccccggtttatttttttttttttttagaaac

SEQ ID NO: 104125 - DNA, 410 bp, Homo sapiens
  misc_feature (1)...(410): n = a,t,c or g
attatttttgtagtacaaccgatatgttcattagaattctttgcatttaatgttgatactgtaagggtgtttcgttccctttaaatgaatcaacactgccaccttctgtacgagnnggnnntttttttttttttttttttttggggggggaaaaaccctaaaaagggggggaagggggggttttaaaattgggttttttaaaaaaaaaaaaaaaaagggttactttttaaaaaaaaaaaaaaaaaaaaaaaaaaaaaaaaaaaaaaaaaaaaaaaaggggggggggcttttttaaaatttttttgggggggccaaaatttgggggggggggaaaaaatttttttttttttttttggggggggaaaaaaaaaccccttgggtttttttggaaaaaaccttttttttggggt

SEQ ID NO: 104126 - DNA, 436 bp, Homo sapiens
cacagggcaggaagtcacgagggaactcaaaggatgggtcaataggtgcagcaaaccaccatggcacatgtatacctatgtaacaaacctgcacattctgcacgtgtatcccagagcttaaagtataataaaaattaaaaaaaaaaaaaaaaacttaaaacagggggagcatgttcacacttttggagtttttccagccctgaacctcaggcagcctgtataaactgctggggatgggggacctgggcttggggaaaaccaccatcttcaaacagggagggcaccaaaactcctcctggctggcaccctgaagccaccactgggggaactgggcattcaaggggctacactgggacccaaaggccttggcacacctacagttgtggaacattgcattgaggaaagattgggaaaatgacaaaagcctgttatctga

SEQ ID NO: 104127 - DNA, 383 bp, Homo sapiens
ttttacttttttaagttgaaatgatatcatttacgggggaaggcgctttgggaagaaggccttatttctctggccctttcgaacagggaggaatttgaagtaaataaaaaccgacctggattactccggtctgaactcaaatcacgtaggactttaatcgttgaacaaacaaacctttaatagcggctgccccatcgggatgtcctgatccaacatcgaggtcgtaaaccctattgttgatatggactctaaaataggatggcgctgttatccctagggtaacttgttccgtgggccaagttattggatcaattgagtatagaagttcgctttgactggggaagtcttaccatgtactgctcggaggttgggttctgctccgg

SEQ ID NO: 104128 - DNA, 409 bp, Homo sapiens
ttctggattttcagttgcatattaatgtaacgggccatggggtatgtacatgtaggggctgaggttggaggcttactaatttccctgtagggaagactcccagcacttctggaactgggcttctctttatttttctacttctcaatttgatgggtcgattaaagccttctagtatctcaatgaaaagggagtttcgtaagcaaaatagaggacagaaatgcagttcatgaaaaaaaaaaaaaaaaaaaaaaaaaaaaaaaaaaaaaaaaaaaaaaaaaaaaaaaaaaaaaaaattggggggggggcctttttaaaaattttccgggggggcccaaattttccggggggggagaaaatattttttttttttttaggggggggtataaaaagccggggggggggttttggg

SEQ ID NO: 104129 - DNA, 1323 bp, Homo sapiens
  misc_feature (1)...(1323): n = a,t,c or g
ttcgcggctacgcatggcctaatggcgccctgcctgcctccacggtcccctgtggttttgcagcctgccctggagagttcctctgttctgtgaatggacgccaagccccggctggctcctctggcttcctcccacctgtcccctctctgtgtccccacacagtttgcagagccacattccagtgcaaagaggacagcacatgcatctcactgcgaaggtttccttggggctcagagacccaccttctgtgccctgcccccatcccctctgtcccaggggtgccatgtgggacattcaccttccagtgtgaggaccggagctgcgtgaagactctgtctgcttctccccttcccctcctcctctgtccaccccaccacctgcccccatccccagactgtggcctccagggcccctccagccgcattgttggtggagctgtgtcctccgagggtgagtggccatggcaggccagcctccaggttcggggtcgacacatctgtgggggggccctcatcgctgaccgctgggtgataacagctgcccactgcttccaggaggacagcatggcctccacggtgctgtggaccgtgttcctgggcaaggtgtggcagaactcgcgctggcctggagaggtgtccttcaaggtgagccgcctgctcctgcacccgtaccacgaagaggacagccatgactacgacgtggcgctgctgcagctcgaccacccggtggtgcgctcggccgccgtgcgccccgtctgcctgcccgcgcgctggagaatagagaacaggggctccaggctcctggattacgggctggggcgccttgcgcgagggcggccccatcagcaacgctctgcagaaagtggatgtgcagttgatcccacaggacctgtgcagcgaggcctatcgctatcaggtgacgccacgcatgctgtgtgccggctaccgcaagggcaagaaggatgcctgtcaggtgagtcccccgggcatgggagggagagaggagggagaaaggatgctgcccacatcaccagggtctggccctttgctcacatcagcctgctgaagcctcccatcctcccagcaaggtggtgatggccacccctacnnnnnnnnnnnnnnnnnnnnnnnnnnnnnnnnnnnnnnnnnnnnnnnnnnnntgcagagccacagatcagaagagatgctgtgatgggcaggtgttaggctcaaacccagttctgctccttgcccaccacaaggcactaggcccagggtcccacagtgaggtggatgcatggaagaagaaaggggtgtcagccacagaagggaggcggaggcagag

SEQ ID NO: 104130 - DNA, 379 bp, Homo sapiens
cgcggccgcgtcgacggaaggctgaggcaagagaattgcctgaacagggacccggaagtggaggttgcagtgagccaagactgcgccactgcactccagcctgggctagagtgagactccatctcaaaaaaaaaaaaaaaaaattgcccaccccttaaaaccacctcaagggcccttcagttgtggacgggttccccaaagcgggatccttccttccaggggagggtttttcccccccaaaagggagggaggtcctgatcccccctccaccttgatttttaaaaccttatttttaaaaaacccaaaacccaaggcccccattttattggatccctttcccggggaattcccaaaataaccaaaggcccaaagacaaaaa

SEQ ID NO: 104131 - DNA, 406 bp, Homo sapiens
cactcatggtcctgtggacagctcacctaccggcactggctccaggctcccggacgtccctgctcctggcttttagccctgctctgcctgccctggcttcaagagagctggagccgtccaaaccgtaccgttatccaggctttttgaccacgctatgctccaagcccatcacgcgcaccagctggccattgacacctaccaggagtttgaagaaacctatatcccaaaggaccagaagtattcattcctgcatgactcccatacctccttctgcttctcagactctattccgacaccctccaacatggaggaaacgcaacagaaatgcaatctagagctgctccgcatctccctgctgctcatcaagtcgcggctggagcccgtgcaggtcctcacgagtatgttc

SEQ ID NO: 104132 - DNA, 415 bp, Homo sapiens
cccactcatccgcccacgcgtacgggacttatgaaagttcaggaaaaagaaaatacctacagaggccctcaaggacagccgagctaaagaaagctttaaaagaaaaaaaaaacagattattattgcaacaaaggtctaagagtgtaaccagttccagtagcagtagcagagacagttctgccagggattcttcatcagagagggaagaaacatctacctcttcctcctcagaggacagcgacactgatgaaagctcctctagttcctcatcctcagcctactccacaaactcttcctcctcctttgattcagactcagattccagctctttcaagaggaagaagcaccagcacagatagcagttctgccgatgacccaccaacgaagaagaaagtgaactagagttgctccattg

SEQ ID NO: 104133 - DNA, 510 bp, Homo sapiens
  misc_feature (1)...(510): n = a,t,c or g
ggcacgagaggctgatgaagagatgtatttgaccttgtctcctccttgtgatgcctgacttccacacttggaggtgtctttagaaatgcaagggcataagaatttaaagactattataggggtagatatttaagagcagtgacaggaaaatctgaagaccatttgtttaatgattgtactttaatttcagtaactttccggggtaattagactaattattcaagtactgagaagtttaaacattcacaagttttataataggaacgccaaaccttggtgaattttgcaaatgtaacaactttggcatagaaaatttaggatgaaagtagcctgccagattgaaacattggggattctctcttttttttttgagacggagtctcgctctgtcaccaggctaaagtgcagnggtgcgatcctggctcactgcaagctccgcttctaggttcaacggtttcctgcctagcctcccctgcacacccagctaattttttgactttcagaaaagac

SEQ ID NO: 104134 - DNA, 411 bp, Homo sapiens
tgtatatatatatgtatcacacatacacatatatgtgtatatatatatatacacatatatgtgtgtgtgtgtatatatatatgtgtcacagggtttttaatccactcattgattgatgggcatttgggctggatccacatttttgcaactgggaaatgtgctgctataaacatgcatgtgcacgtattttatttttttcaaataataacttcttttcctcggggtagggacccatcaatgggattgctgtatcaaatgggcgggaacatccttatttctgaagatacagggatgcacaaaaatctgaactattaaaaaaaaaaaaaaaggggggccgttttaaaggatccctgggggggcccaattttacccgtgaagggaaggatataattctttccttattgggagcgg

SEQ ID NO: 104135 - DNA, 389 bp, Homo sapiens
gggcacctgtagttctttctacttttgaggctgaggcgggaaaagtggttgagccaggagttgtggttgcagtgagctatgatgacaccactgcactctaggctgggtgacagagggagactctgtttcaaaaaataaaataaaattggagtttcttgaatacaagagtatttgtttttcagttctgtgaaggcagtttggggtagcactgactggattgccatccaactccatcacttaaacaagtgtgaccttgcgccccaatttttgtaaatggtcgctggtggtattggcactttgaatcacctgcagggataggtatttgacatacaggtggcgttcaataaaggttggtaagtaatttggtttataattacagtagattattg

SEQ ID NO: 104136 - DNA, 421 bp, Homo sapiens
  misc_feature (1)...(421): n = a,t,c or g
tcgtctgcaggcgtactgtattcttaaaagattgtgggccgggcgcggtggctcacgcctggaatcccagctctcagggaggcaagaggcgggaggatagcttgagcccaggagttcgagacctgcctgggcaatatagcgagaccccgttctccagaaaatggagaaaaaaaaaaagcttaataaattggcttttgggacgggggcccaaatgtttttgaaaaatctggggaagaaacgctcccaactgtagatgggtgggttcccttttgaaggaggaagggggttgaaatcaggcaaaaaccccccaggacctttgggaaatgcgggcggggttctcctttgtaacatggggggtgttttgagaaacgcctttgtatccctctttaaacacccccccctattgggaattttctttttn

SEQ ID NO: 104137 - DNA, 188 bp, Homo sapiens
ccgcagttcccagccaccggagaggccaaagcgggaggattgcctgagcccaagatttggaggaggctgcagtgagctatgactgtgccactgcaatccagcctgtgcaacagagggagactccgtctcaaaaacaaaaacaaaaaacaaacgaaaacacacacacgcaaagaatgtcgacgcggccg

SEQ ID NO: 104138 - DNA, 396 bp, Homo sapiens
  misc_feature (1)...(396): n = a,t,c or g
cttgacgcgaggaggcagaggctgcattgagttgaggatcacaccactgcaccccagcctgggcgatagagtgagactgtctcaaaaaaaacaccaataaaaaaaaaaaaaaaccccccccgatttccaaaaaatatttttccccccgggcctaaaaaaaagctgcccccaaatctttaaaaagcttattttgcccttggcccccaaaacgtggttaatacttgccaaaaaaaaattttttttgggccccccaaagccaaaggtgtttttaaaacaatttttttttggatattttttggggggcatagctctcaaggaaagaaatcttaattttttcttaaaaaaaagaaaacccttgggaaaaggcctgtcttgtcttttgttttcagttcacan

SEQ ID NO: 104139 - DNA, 393 bp, Homo sapiens
acacgcgtgcggacctcggagcacaacccattctttgtgcaacacatgctaagacttcaccagactaagcgaactactatactcaattgatccaatagctcgaccaacggtacaagttaccctacggataacagcgcaatcctattttagagttcatatcaacaatagggtttacgacctcgatgttggatcaggacatcccgatggtgcaggcgctattaaaggttcgtttgttcaacgattaaagtgctacgtgatctgagttcagaccggaggaatccatgtaggtttctatctactttgaactactggctgtgcgaaaggacgagagatataaggcctactttacaaagcgcctgaccccgtatatgatatcatctcaacttagtaaaa

SEQ ID NO: 104140 - DNA, 1403 bp, Homo sapiens
taaaaatacaaaaattagccgggcgtggaggtgggcgcctgtcagctactcgtgaggctgaggcagagagttgcttgaactcaggaggtggaggttttggtgagctgagatggcgccactgcactccaacccgagcgacagagcaagattccgtcccaaaaagaaaaagcagtttttgccatcagcaaggatatctcctccactttaatggacaggcctcatttttggcagctatgctgtttgagatgtagactgaatatccaaggttcctccctagctcaagtttttacttgtgattacacacaccacattgaattccatcttcagaggcaaagatttgggcttcatatctcaacagcaaaagggcctgttcagcaattcccttcattttagactcatatgacctcagcgattgcatgatagtagtaaactagtctcctggaaataatggatggtagggcttctagaatatgttacagaatttcagacttaacctattaatagataaatggatcttgacttaaggtgacaaaatgaaacttttattattgcttaaaaatgctgtgccaatattgtataactagctcctctaatacttttggtattttggatttaataataagaccttaagcattttaaatgtgaacatgttcagggaagtatgctttgatgtaaatgtctcagatctaagttgtaacacaattgaatacttgtggcttattcttggtttaacttaggaaaactggttaaacaatcccccatttgggcctgtcatcattttaatagtgacgatgttctttctgaaatcttcagggtcggagtcaggctgaatttttttaaaaattaaatattatgttcaaattctttcctttttgccattgtgaaaaagcaaaattttaaatgatttctcctgttagaatttttaaaaatacccacaggttggaccatctttcttatgggttgcacaatgaatttatattttaaattagattaagtagaatgtgaagtacatttcagatttactagttttctttccattgttcattttgggttgcctcagattcagtgtatattttaaaatattggttacataataggtactcaatgaaatggtttatagtagaatatctaagctagcactttattttaaaaagtaacttattaattaatcacacattgatggtacaccttgtatttagcaaatgtttgcatgttgataaaatctcctatgtcttctttcttaaatccagttgctgattttgtaaaatacagttgtgataaagcagcattacgggggggaaaaagctatattccaactggtgttaaatgtattcaacaaaatcttacatcatacagtatttatttcttaattaatagaacttcagtgatatacttggtagata

SEQ ID NO: 104141 - DNA, 419 bp, Homo sapiens
  misc_feature (1)...(419): n = a,t,c or g
gcaatttctcaaaacgacaagaacgaagtttgccacatctgttgactcttcctttcacaatatttttctgtagcatgtgatgctgtttgacagcattttactcacagtagaacttctttcagaaattggtatcagtcctctcaaaccctgctgatactttatcaactaagtttatgtaatattctaaatggtttttgtcatttcatcagtgttcacagtatcttcaccaggtatagatgccatgtcaaaaaaaccattttcttttctcttccatacaaagcaactcctcgtctgttcaagttttatcatgaggttgcagcaattccatcacatcttcaggctctgtttcttattctacttctcttgctggtttcaccacatctgcagtcccttccttcacttgagtcttgaactgttan

SEQ ID NO: 104142 - DNA, 507 bp, Homo sapiens
aaaaacggcgcaccacgagattatatcccgcacctggcttggagggtcctaccccacggagtctcgctgactgctagcacagcagtctgagatcaaactgcaaggcggcagcgaggtttgggggaggggtgcccaccattgcccacgcttgcttaggtaaacacagcagcctggaagctcgaactgggtggagcccaccacagctcaaggaggcctgcgtgcctctgtaggctccacctctgggggcagggcacagacaaacaaaaagacagcagtaacctctgcagacttaaatgtccctgtctgacagctttgaagagagcagtggttctcccagtacgcagctggagatctgggaacgggcagactgcctcctcaagagggtccctgacccctgacccccgagcagcctaactgggaggcaccctccagcaggggcacactgacacctcacactgcagggtactccaacagacctgcagctgagggtcctgtctgttaaaaggg

SEQ ID NO: 104143 - DNA, 454 bp, Homo sapiens
cttgactttagtttacaaagtcacaaatttgtaactttacaaatttgtaaaggttttattaattttaattaggttttataattttaattagttttaattaatttgaccagcaccttgactttagtttacaaagtcacaaaaggatcacaaatttagtttataaagccttccctggaattcttggtttctcttatattggagacttatatgataatgtgagaatatatctaggaagtaattcttggggttggggatatgtgagggtggggtatcctgactgccaaccttttggtctttggtggaggtagtttgagtatttcagagagaatttttttttctcctttagcgacagggttttgctctgtcgcccaggctggagtgcaatggcatgatcatagctcattgtagtcttgaattcctgggctcaagtgatctttactccaggagacaaaat

SEQ ID NO: 104144 - DNA, 372 bp, Homo sapiens
aaggagaatcgctcaaacctgagaagcagaggttgcagtgagccaagactgtgccactgcactccagcctggatgatcaagggagacaccatctataaaaaaaaaaaataaaaaaaaaaaggggggggccccccctttttttttttttttattttttttttgatcagacaaagaaaagctaaattggtcgttttggctttcaacagacggggtttgaggaaacctgatttttttactatgctggggtgggtaaaattgttaaaaaaaaatacagtggcttttttattgaactggtcacaacatgcggaaaaaactacttaatgtgcgcgctggctgtcattgatccacgcgactctaacatcattagaagct

SEQ ID NO: 104145 - DNA, 359 bp, Homo sapiens
acgacctcgatgttggatcaggacatcccaatggtgcagccgctattaaaggttcgtttgttcaacgattaaagtcctacgtgatctgagttcagaccggagtaatccaggtcggtttctatctacttcaaattcctccctgtacgaaaggacaagagaaataaggcctacttcacaaagcgccttcccccgtaaatgatatcatctcaacttagtattatacccacacccacccaagaacagggtttgttaaaaaaaaaaaaaaagggggggccgttttaaaggatccctgggggggcccaagtttacccgggcatgcagaagaaaagttttttccttatagggggccgaattataac

SEQ ID NO: 104146 - DNA, 350 bp, Homo sapiens
ctggaaaatgtgtctttattaaaattacatttaaaaacgagtgatattcagggtcatgactttctgaacccatcagagagctgaattgcagggcaattaaatagtttaaaatgaaggaaagagaggtgcctcctacaataacagagatgggctgcaaacattggatgacctgtggcagagcacggaaagaaggcaaggatgacagctacatgcagacaaggtctccagatttgccacccatgctgagtgccgtggtgtgatcatggcttatttcaacctcaacctcccccactcaagcgatcctcctgcctcagcctctggagtagctgggactacaggcacgcaccacg

SEQ ID NO: 104147 - DNA, 388 bp, Homo sapiens
acatagtcaaggtgtaatgagtattcagttacttacgtattctaggtaacaaacacttgacagataatagcacatttaagttaaccctcacaacgagactatgagacaagtaccattctttttggtgggtgctttctttctttctttctttctttcttttctttctttctttctctgtttctctatctctctctccctctctccctctctctctgggggactatctttctctcttgctctctttttatctctatatctatataccccccttatcagatctgtgtcttgtattcattaggtctttattactcagtctctacagatacaatgcttttgtgaaaacttgtggcctttctgctctatgtatgggtaatagtggtggttcttg

SEQ ID NO: 104148 - DNA, 386 bp, Homo sapiens
gcctcccgaagaaatacacattttgcccaatgccttctgtttggggctttgaaaagtgagccctgactgggtgtggtggttgacacctgttatcacagcactttgggaggccaaggtgggaggactgcttgagcccaggagttggaggctgcagtgagccatgatcttgcccctgcgctctcgcctgggtgacagagcaagactctatctcaaaaatgtttttaaaaaatacttcctagggaaacacacattttgccctatttggaactttgaaaagtgagccctcctctgcccatgggccgtgctgctcagcctgccatactcgcttgctttgctgtttgggatttgcctccagaataaaggtcctttttgttgttgaaaaaaaa

SEQ ID NO: 104149 - DNA, 360 bp, Homo sapiens
cacacactcatacacacgaggacaaagagataatgaaggctgaagtgcggtggcccagtcatagcttactgcaaacttgaaatcctgggctcaagcaatactcctacttcaacctcctgggtagctgggactactcatgccaccatgcccagaacatttactggtgatgagagactctaaagaagtcacagcttgcttcctttctgaagaacgttgtgattttggctcacgtgcagtgcacgacaactcttctccaacagcatgacatagtccactgtctcaggatcccatttttccaccagctgcagagcaggaagggacaaatcaaagtgtgagcattcggatcaccaacgctgtgag

SEQ ID NO: 104150 - DNA, 463 bp, Homo sapiens
ggattgcttgagcccagaaggtcaaggctgcagtgagctgtgattgtgccactgcacttcagcctgtgggacagagtgagaccctatctcaaaaaaaaccaaaaaaaaaaaaaaaaaaaaagaaaccccctggaattttttccccccccagggcaagaaaaaaggcctttaaaataattttggaaacccttaaaaagggaaaattcaaaattaggcccttaattcccccaaaatggggtttttggaaaaggggggggggaagggatacattttatttttttttcctcaaagggagaacaacccggcctaatattggttggaaataaaatttttggccccattcggaagggccacctttgcattatgccccaatagaacatagtgaaatgtgtgggggatattttccttggtccaattaggggggcggttttggggccaaaataaagtggcttgaatttatata

SEQ ID NO: 104151 - DNA, 388 bp, Homo sapiens
ctccccgaaccactcatggtcctgaggacagctaacctagtggcaatggctccaggctcccggacgaccctgctccatggcttttgccctgctctgcctgccctggctacaagaggctgatgccgtccaaaccgagccgttatccatgctatatgaccacgctatgctccaagcccatcgcgcgcaccaactggacattgacacctaccatgagttagaagaaacctatattccagaggaccagaagcattcattgctgcatgactcccagacctccttctgcttgtcagactctattgcgacaccctccaacatggaggaaacgcatcagaaatccaatctagagatggtccgcatctccctgctgctcatcgagacgtggctggag

SEQ ID NO: 104152 - DNA, 393 bp, Homo sapiens
cccacgcgtccgggtttgacttcctttttaccgattgggggtcctttatttctttctcttgtctgattgctgtggccaggacttccagtactatgttgaataaatgaaagtgggcatccttgtcttgttgcagttctcaggggaaaccattttaaaatgggatctacacatcaacaaaagtttgtttctggggctatcccattctgcaggacaggagagatgacccaccattttcattaacaggaaacttcagtaagatcaaatctagacactttattgtaattgtttggaagacagaatgagaactattttgttttttcttaaattttcctctagctctctgtgacctttgattttcttgcataagatatttgaaaaagatctagtgggttg

SEQ ID NO: 104153 - DNA, 350 bp, Homo sapiens
cagctacttgggaggctgaggcaggagaattgcttgaacctgggaggcagaggttgcagtgagtcgagatggtgccattgctctcgtttgggcaacaagagtgaaactcttgtctcaaaaaaaaaaaaaagggggttaaaaacagttttgccattctggggggaatcgggccccccaaaatacctttaaccgtgactgggcccataaattgggtaaaaaaatttggttttttatttccgtagggtaaaaccccaccaacccttttttgcaaaatgggaaggttttttcaatttcaaatttataaaccttgtaaagaccctctgtttataaaagtggttttaaacccttgg

SEQ ID NO: 104154 - DNA, 325 bp, Homo sapiens
atctcagtcacccaggctggagtgtgcagtggtgcgatcttggctcactgcaacctctgcctcccgggttcaggtgatttttgtgcctcagcctcctgagtagcaggattttgcagagaatgactcggtattttgttccatatccaggggctcatgagcgtgaacccacccctttgggaaacccattcgggcgaattacccgagacccggagtttcatatctacctgaccaagaaggcataaacgtgactatactacaaataaataaattatccgtgcatgtgaacgcaggcctataaaaccagctactcgaggggctgtaatgt

SEQ ID NO: 104155 - DNA, 368 bp, Homo sapiens
ggcacgagctcctttggtcaactattaaagtcctaccctatctgaggtcagaccggagtaatccaggtggggttatatctacttcaaactcctccctgtgcgaaaggacaagaaaaataaggcctacttcacaaagggccttcccccgtaaatgatatgatctcaacttactattatacccacacccacccaagaacagggtttgttaccataatgaaggcctggatcacctgaaatgacctcacgggcacctttttttttttgagggggccgcactgttaccttcttgacgggggatcctgataacttggggctcctggccaactttcagaactggggggtgggaagaacttttgggaggacacaaa

SEQ ID NO: 104156 - DNA, 392 bp, Homo sapiens
  misc_feature (1)...(392): n = a,t,c or g
gcatgatattcgcttgtacccgggtagcagagattgcannnnccccnnacgtgccactgcactccagcctggtgacagagtgagactccgtctcaaaaaaaaaaaaaaaaaacctcacctttttcaaaaaaataaattggggggaggaccccaggcccacatcccaggttttggaacaggggccctcatcctttttggaatggaaaaccttccaggtttgttttcccccctgttggggcccatataccccctcacatgtttcccctcaggctatgggccggggggacttccccggggggtttatggatagccttaaaaagggtttgggaccccccaaaatttggggggaaaactgattttgtgtttttttttccaggaaaggctccagggtt

SEQ ID NO: 104157 - DNA, 485 bp, Homo sapiens
  misc_feature (1)...(485): n = a,t,c or g
tggcctgataccctatgancctcgaacaccntncttggcaccaggcctttgttctttgatgacggtgacgtacaggtagggctttggagtggatgtcctttctgtttgttggttttctttctaacaggaccctcaggtgcaggtctgttggagtttgctggaggtccactccagaccctgtttgcctgggaatcagcagtggaggctgcagaacagcgaatattgctgaacagcaaatgttgctgcctgatcgttcctctggaggtttcctctcaaaggggtacctggccatgtgaggtgtcagtctgcccctactggggggtgcctcccagttaggctactcaggggtcagggacccactcgaggacgcggtctgtctgttgtcagatctcaaactctgtgctgggagaaccactgctctcttcaaagctgtcagacagggacatttaagtctgcagaggtttctgctgcctttgttcagctat

SEQ ID NO: 104158 - DNA, 426 bp, Homo sapiens
  misc_feature (1)...(426): n = a,t,c or g
gagaattgcttgagcctgggaggcagaggttgcagtgagctgagatatcgcaccactgcactctagcctgggtgacagagcgagactccatctcanaaaaaaaaaaaaaaaagggttttccttcttttttttttaaaaaaggccccatttttttcaaaatgggtggaacaaattaaagtcccaacatttggggtaaaaaattccccattttttaatgttttggtaaaggtccaaattttttattttttaaaaggttggcaaaccgggggaaaaaaaacggaaaaccaatgggaatttttttccttttcaacctttttaagaaaaaaaaaatccacctttttctggaggggaaaagtttggaaaaccccttttggccctggaaattatttaaaaaaataccaacctttgggtacctttttattaaaa

SEQ ID NO: 104159 - DNA, 387 bp, Homo sapiens
ttttatttttttaagttgaaatgatatcatttacgggggaaggccctttgtgaagaaggccttatttcttttgtcctttcgtacagggaggaatttgaagtaaataaaaaccgacctggattactccggtctgaactcaaatcacgtaggactttaatcgttgaacaaacaaacctttaatagcggttgccccatcgggatgtcctgatccaacatcgaggtcgtaaaccctattgttgatatggactctaaaataggattgcgctgttatccctagggtaacttgttccgttggtcaagttattggatcaattgagtatagaagttcgctttgactggtgaagtcttaccatgtactgcctcgaggttgggttctgctccgaggcg

SEQ ID NO: 104160 - DNA, 490 bp, Homo sapiens
  misc_feature (1)...(490): n = a,t,c or g
agcgggaatcganaccatcgagatccctaggaagtgtgctgtactgtcctccagccacctctagactacagccacaccctcctctgtgactgcatgctgccctggtctccgtgctccctgaaagagctcctgaagcctcttcttcctcccctcgcccagggataggtggtctctgacccagtccacggagatgcccccttcttggaagtttccgggaagagaaattcggtcgcctttgctggcgatgttgcatagcctcctcttacaaccgacagccttcctgtgtccgtcctccacacttctgctttctctgaagcctgattccttaagaactggctctctctttctttctttcttttcttttctttattttgaggcttgctctgttgcccagcctgaagcccagtggcacaatctctgctcactgcaacctctgcctcccaggntcaagtgattctcctgcctcggcctacatagtaagtgggggtgg

SEQ ID NO: 104161 - DNA, 471 bp, Homo sapiens
ggccagagtcgtggaattcccctcttgctcacccttgacttggaaaaaccagtttctcttttattgtctgttactaatctctattctaaaaattcagctcaattctcaaccatactccaaactctctcttttccagctacctttactccctctccttcaattccactttcctctgcttactttttttttttttctgacagggtctcactttgtcgcccaggcaggagtgcagtgggctcaatcttggggctcactgcaggcctcaacctcccaggttcaagcgattctcctgcctcagcccctcaagtaggctggggacttacaaggcggcacaccaccacgcctggactaattttttgtatttttttgtagaggcggggtttcaccatgttgcccagactggtcttgaactcctgagcttaagcaatccacctgcctcggcctcccaaagtgttgggatcacaggcgtga

SEQ ID NO: 104162 - DNA, 410 bp, Homo sapiens
ttttttttttttatagttgaaattcactttaatgatacttttgaaacccaatatatctaaaatattatttcaacacataatcaatataaaaattaaggtatttaaagttgttgtcctcttccatgcttcatacctggtgtttcagagtcatgacacacttggtttggctacatctcagtagccacacatggctgggtggctgctgctgtggacagcatggacctaaagtccactcttgtaggtgatgttaagaatgcaaatatatttttctctacataatcctattttttttttttttgagacagggtctcactttattgcctagactggagtgcagtggcatgatcccggcccactgcaacctctgcttcccaggttcaagcaatgctcccgcctcagcctcccaagta

SEQ ID NO: 104163 - DNA, 343 bp, Homo sapiens
gtgtgtgtgtgtgtgtgtgtgtgtgtgtgtgtgtgtgcgcatatatatatgtgtgtgtatgctcatggatgcgcatgcgcatgcatgaatgcataatatttcacacacacgctcagagagtgagtctctgtcaagaagtacacttggacaccatgttgctcgatgccacaatacccctgttattgcattgtccccacaggatgcctttaaaatatgtatgaagaatgtgcgtgctcattaatttggctctcttcagagaacattacccgtggggaaaagatacagtatatctctgagaagagatgggagatgagagagacacctgtcttttgaagaaagatct

SEQ ID NO: 104164 - DNA, 250 bp, Homo sapiens
actaaaccgaagtaattcttaccagtatctctagttagtgtttccagcctggtcaattatcagccactgaaggaagagatttaggctcatccctataatcccagcactttgggatgatgacgtgggaggatcgcttgagcccaggagttccagcccaggctgagcaacatagtttaagtccaggctgagcaacagaccttgtctctacaaaaaaattaaaaataaataaataagaactcctctacaaatc

SEQ ID NO: 104165 - DNA, 347 bp, Homo sapiens
gccagactggtctcgaactcctgacctcaggtgatctgaccgccttggcctccgaaagtgctgagattacagttgcgagccactgtgcatggccagaactttataataattaaaagagacttgaagctgggtgtgacggtgcacacctctagtcccagctactcgggaggccaaggcagaaggatcaccttgaggccaggagtttaaggccagcctgggcaacatagcaaaacctagtccctaaaattaaaaaaaaaaaaagggaaaataagggagacttgaaatttttgaactaaataggggggagggctatacattgggaatgtaattaacaccactgagttaaa

SEQ ID NO: 104166 - DNA, 1626 bp, Homo sapiens
  misc_feature (1)...(1626): n = a,t,c or g
gaattcccgggtcgacgatttcgtggcctgaggagggtggcgagaggtggggtggggcccaggtgagtagcggttgaaggcggggcctgaggaggactgagctggggcgggacccaggtgagtagcggaagggatcggggcctgaggagggtggtggaggtgcggcggggcccagaagtgtatcaggaggtggttggggctgaggaaagtggtggaggtggggcggggcccagatgtgtagcgggaggtggtggggcctgaggagggtggcgagaggtggggtggggcccaggtgagtagcgggcgaaggcggggcctgaggaggactgagctggggcgggacccagcagctgctccaagcttttctgccatttgaagcttcttctgggagccagctgtgaccagaggaatagctccagccatccggttaaaagtttaacaaccnnnnnnnnnnnnnnnnnnnnnnnnnnnnnnnnnnnnnnnnnnnnnnnnnnnnnnnnnnnnnnnnnnnnnnnnnntacagtcccaccatttgttgatcctctgtttcaaagacagcatgaggtggatgaagagaggagaactggtcttcagtgtgagacaggaccacgacattccataaaagaacttgaagaaatagctaaagaagatactgaggcagctattcaatcaatattatacaaagaaaattctgtaattaagggaaatgcatttatagaacattatgatccaaaagagtatgatcccttttatatgagcaagaaggaccccaattttctgaaggttaccatcccaccatttcatgaccctttgaaaaaagcacaatatgacaaggataatgaaaaaagaactcttcttcagtgtgagactggcaaaatatattcaataaaggaattcaaagaagttgagaaggttcagctgcattccagattcccacaaatttctaattcaaggcactttataactccaaacgagtggctgaaactgcctacaagatacaaagaaagtgaattttgtagaaggagaaggttaaaggtgaaagtgaattttaatgactgtagttttgatttgaaacccttggcaagagctccttatcttttggaatcccaggaagaagaaaaaacagttatttacaaaaacaaagggtcatcctttctagaaagagaaccgctgtgctatcaggagggaaataatccaagtgccaaagaggccatctctgaagggtatttttcttccttgagcctcagccaggaacgggaggaagaccaggatgggtctccctccccgcgtttgggactgctgaagctggagctataagaaagaagagggaggtttcagcaaccaaggagcacacaccctgatccttgattggtgaaaggatacacaaaatcaggctgcttcagaggaagtcatctgctcacaggaatcagggtgaaggccaaggacggcactcaagaattgtcctgtctctaaaaaaaaagcatctgcaacgaacttcctttaatttttgagttcagtgtctgtgataattaagaaatggcaataccatgtattttccccagaagttaagaaatattgctgaacgaaccaataaaaataattacagatccctcaaaaaaaaaaaaa

SEQ ID NO: 104167 - DNA, 326 bp, Homo sapiens
  misc_feature (1)...(326): n = a,t,c or g
gtccaggcctggggtcaagaaggaaaatgtgtgtgagcatgtgtgtgagtgaggcgtgtgtgtgagcgtgtgtgtgagtgaggcgtgtgtgtgtgtctttcctaggacccaccataccctgtgtatgtatgcatgtttttgtaaaaaggaagaaaatgaaaaaaaatctgaacaataaatgttttatttgctttaaaaaaaaaaaaaaaaaaaaaaaaaaaaaaaaaaaaaaaaaaanggggcccttttttttttaggggcccctttaaaccccgttaaaccccctgggggggttttttttttgccccccctttgtttgttccccc

SEQ ID NO: 104168 - DNA, 320 bp, Homo sapiens
gtaactatgtggtattatgaatatatttattttcttcactatatagtaactaatactttactttctgtatgtatcttagaacatcatattgcatatcttaaatatagacaataaatgtatttttaaaagttaacgtgatgaagctatcttatctcagatttaacactagaaattgctcatttttttttttggctggagtacagggttgcgatcatggctcactgcagcttcaacctcctggggctcctgtgatcctcccagctcagcttcccgagtagctgggaccacaggtgcatatcaacacacccagttaatttttt

SEQ ID NO: 104169 - DNA, 288 bp, Homo sapiens
gcacgaggagagagagagagagagagagagagagagagagagagagagagagagagagagagagagagagagagagagagagagagagggtctctctttttttttttctcgctctcgggggggggggaaattatggtgtgtgtgtgcccgagcgcccgccccagagagagagagagacacgcggttttctctgcccccccctctctccaaaaaaaaaaaaaagtgtttggggggagagagggaacacactctctgttctatcccccgtgtgggaactctctgaggagg

SEQ ID NO: 104170 - DNA, 477 bp, Homo sapiens
cagatatggtttaaatgttttattatccataatgatctaaactaataagattcaccaaaaagtaaaaattcaattttacaatatacatttttttttttttaactatttggctttacctttttaccttggttctccttactgaaggcctcttgctttcactttgatctggtttttgaagtctcttaattattgggctgggcatggtgactcatgcctgtaatcccggcactttggggaggccaagggaggtgatcacttgagcccaggagtaaagaccagcctggggcaacatagtgaggactccgtctctacaaaaaataaatttaggctggggcatggtggtgcacatctgtagtccttccaacttgggagtctgaggcaggagaatcgcttgagccccaggcttccgaggctgcagtgagctatgattacgacactgcactccagcctaggcgacagagcaagaccccattctct

SEQ ID NO: 104171 - DNA, 347 bp, Homo sapiens
gcacgagtctgcctcccgggttcaagcttgtccaggttgatcttgaactcctgacctcgtgatctacccacctcggcctcccaaaatgctgggattacaggggtgagccaccgtgcccaacctcacttgcttcttatccttacactcccccagccccagagaaactgccacatacaccacaaaaaccaaacatcccccaatgaccttagccccattgctccattcactcccaggtgagaattcaggcaaacgtccacaaaggtcacaggcagcgtacatacgggtctgttataccccatatattaccccttcatgtcctaaagaagacatttctcttagagatttca

SEQ ID NO: 104172 - DNA, 461 bp, Homo sapiens
  misc_feature (1)...(461): n = a,t,c or g
gtgggtnnnnnnnattgaaaccgtcttactgattgaaacattcctactcgctatcgggaatttgcccctcctggccgagaattcggcacgaggtcttgaagggtctgtgtctgggtgcctgtctgtgtggctccctgggtgtggctgcagatctgtctgcacctgtgttacttgagtgagaggttcttaaacctgcaacataccacagtcacctgggcaggggttaaacacgagagtggccaccttcctctccagggaacttcctaatcacctctctgtgtgctaggccctgggtctagaagtctatgtgattagctccccaatatcctgggggttgttttgttttttgtttctgagacagggttttgctctgtcacccatgctggagtgcagtggtgtgatgaacatggctcactgcagtctcaaacttttgggctcaagcgatcttcccacctcagact

SEQ ID NO: 104173 - DNA, 384 bp, Homo sapiens
  misc_feature (1)...(384): n = a,t,c or g
ggcacgagtgaagttcagtttatcaatttttttattggatggatagggctttttgtgtcattatctaagaattctttgcctaacccaaggtcaggaatattttctcctgcaacatttgttttctagaagttttatagttttagctattacatttagatctatgatccattttgagttaatttttatgtatgatgtgagataaaggtccaaattcnnnnnnnnnnnnnnnnnnnggcattggaaaataaaagggccggcccttaccccggggaataccaaaggggaaaagaaaaaaaaatccccttccctttttgggggaaaaatatttggcctttaaggggggggattttttttggaatccccaattttatggcctggacctaa

SEQ ID NO: 104174 - DNA, 374 bp, Homo sapiens
ggcacgagctgtgatctaagaaacttttttttcaaccaagttgctttttaagtatagcattagtttaaatccccaatgcataggagaagccgtaaaactttaccagcctctgcttaagaaatttcctttccatggacactggggagcttcagtgtactaaaatgggggccatcaaatagcttgattaccatcctcccatatctggcaagccgctgatgtgcacagagctgatgtgcaaaatactgcaagggccaaacaaaaatgacacataagggccaggcacagaggctcatacccgtaatcccagcactttgggaggccgaggtggggcgatcactaggtcaggagttcaagaccagcctggccaagatggg

SEQ ID NO: 104175 - DNA, 359 bp, Homo sapiens
ggcacgagggtgggtggggacaggggctgaaaaactacctagtgggtactgtgttcactacctgggtgacaagatcaaccccaaacctcagcatcacgcaatatacctgtgtcacaaacctgcacgtgtaccctctgaatctaaaataaaagttgaaatgcaaaattattataaaattaggaataaaaataagttttgctgttattgttgttgttgagataggatttcatttttgttacctaggctgggtgcagtggcacaatcaggactcacccaggctcaagtgatcctcctgcctcagcctcccaaagtgctgggattacaagcatgagccaccacacctagccgaaaataaattt

SEQ ID NO: 104176 - DNA, 403 bp, Homo sapiens
  misc_feature (1)...(403): n = a,t,c or g
ggcacgagcctcgtgatccacctgcctcggcctcccaaagtgttgggattacaggcatgagccaccgtgcctggccagaaagctttttcttaatgccagttataataccctttgctttacaatttgcgtatacctcacagcttgctttgtgccgtgtgtgtttaatatgccctaagtgtactcgtatataggaaaagctttaaaatggtatccaataaatgtccattttgcaaatctcaggataatgtcattttcaagtatctagatgccctcaaaccaaattaactggaaaattcagatttcagttaaggcctttaacttaacttaggactttgattacagagatgtattttgctttgacaaaagttaaggttaatgtcttaaatttccagagatgataacn

SEQ ID NO: 104177 - DNA, 398 bp, Homo sapiens
ggcacgagaaaaggcagcagaaacttctgcagacttaaacgtccctgtctgacagctctgaagagagcagtggttctcccagcacagcgtttgagttctgagattggacagactgcctcctcaagtgggtccctgacccccagtgtagcctaactgcaagacacctcccagtaagggctgattgacacctcatacaggtgggtgctcctctgggtcaaagcttccagaggaaggatcaggcagcaatatttgctgttctgcaatatttgctgttctgcagcctctgctggtgatacccaggcaaacagggtctggagtggacctccagcaaactccaacagacctgcagctgagggacctgactgttagaaggaaacagaaaagaatagcagcaacat

SEQ ID NO: 104178 - DNA, 394 bp, Homo sapiens
cagtgagccgagatcacaccactgcactccagcctggcaacagagcgagactccatctcaaaaaaaaaaaaaaaggtaaaaaaaaaagggacccccttaaagggggaaaaaaaaatcataaattttgggccggagcccggtatataaaaataaagcgtttctcaaaagcggcccaaggttgggcggaaatttaacccttaatcctctccctttagggggaaaaccaaagccccatttggaggggattttttttatttcgcctttgggttccggccagaaaaaataaccatatgggctacccaaatttcggaaaaaaaggtttccagggttacaattatatcaaactatacccccccccatagtttgaaagagtacccggaagggccattttggg

SEQ ID NO: 104179 - DNA, 434 bp, Homo sapiens
  misc_feature (1)...(434): n = a,t,c or g
ctttgataccctcctgcagcaccgttgaggacttcccgggnccacccacgcgtccggttcttagtttccttgcagggggttagaatgtgctcctttagctcggaggagttacccaccttccgaagcctacttctgtcaattcgtcaaactcattttccatccagttttgtttccttgctggcgaggagttatgatcccttggaggagaagaggggttctggtttttggaattttcagccttcttgtgctggtttttcctcatctccctggatttatctgcctttggtctttgatgttggcgacctttggatggggtttttgtgtggacatcgtttttgttgatgttgatgctattcctttctgttttttagtttttctcctaacaggcaggcttctctcctgcaggcctgctggagtttgctggaggtccactc

SEQ ID NO: 104180 - DNA, 399 bp, Homo sapiens
gaacaagttaccctagggataacagcgcaatcctattctaaagtccatatcaacaatagggtttactaccttgatgttggatcaggacatcccgatggtgcaaccgttattaaaggttcgtttgttcaacgattaaagtcctacgtgatctgagttcaaaccggagtaatccaggtcggtttctatctacttcaaattcctccctgtgcgaaaggacaagagaaataaggcctacttcacaaagcgccttcccccgtaaatgatatcatctcaacttagtattatacccacacccacccaagaacagggtttgaaaaaaaaaaaaaaaaaaaaaaagggggggcctttttaaagaatccttagggggcccaaattttaccggggagggcaacgttttat

SEQ ID NO: 104181 - DNA, 413 bp, Homo sapiens
  misc_feature (1)...(413): n = a,t,c or g
attgacatttggaaggcccccacagataaggctggttcaccaagacatgataaaactttgaaaccaagatcaacaagtacacacatacacacacacacacacacacacacacacaccacaaataaaggatttaaatgggcatggaaggaacacccaaatttaaagaaaacttccaacatgaaagaaaaacaaaacaaaaatactagggagagagttaatgcggggaataaaaaaaaaaaaaaaaaacctcaaaattctacggttggttttattttaaagaggggataacccccctacagtccatctttcccaggggagagcattttttatcttgggccntaaaatgaattttttttttataaaaggaaaaaaaaaaaaaaaactntnntgtggggggggggcgttcttttaat

SEQ ID NO: 104182 - DNA, 288 bp, Homo sapiens
cggacgcgtgggttactgacaatgcaacaacaataatgaaaaatgcactggtcatttttattaatttttcccactgtatgtatgtagcttttataaaataatggcttattttctcccttgtcacctcttcattatatagtgcagtattataccttagcaatctgtttttcagcagaaaaacagcaagaactaggatgaatactatataattcacttgaaaaaaatacacatatatataacatagtagatataaatacagccccacatttaatgtgataaaaccaatac

SEQ ID NO: 104183 - DNA, 379 bp, Homo sapiens
acgcgcggaggttggggtcatggcgcccttataccttctcctgctgctctcaggggccctgggcctgaccgatacttgggcaggctcccactccttgaggtatttcagcaccgctgtgtcgcggcccggtcgcggggagccccgctacatcgccgtggagtacgtagacgacacgcacttcctgcggttcgacagcgacaccgcgattccgaggatggagccgcggaagccgtgggtggagcaagaggggccgcagaattgggagttggaccacagggtacgccaaggccaacgcacagactgaccgagtggccctgaggaacctgctccgccgctacaaccagagcgaggctggtgagtgaccccggccggtggcgca

SEQ ID NO: 104184 - DNA, 404 bp, Homo sapiens
cggacgcgtgggcttgaacccaagaggctgaggtttcagtgagccaagatcgcaccactgcactccagcctgggcaacaagagcaaaactctgtctcaaaataaaaaaataacaatgctatgcagccatcatcactatctaattccagaccatttcattacaccaaaaggaaatgatgcattcattaaatagttgatagacttttaaagcttaattcaataatttttaagtagggcataattccgatatttggagattgataggtaataaaagacaggtttattaaatccttcatagaattccataataataaaaattatatccataaaactgaaatccaaatattaaattgtgttttcgattttgaaaaggtaaaaaaaggcatatgctagtgtatacagtgt

SEQ ID NO: 104185 - DNA, 406 bp, Homo sapiens
gaaacaggaagagaactagaactggaagtaaagcattgaagatgtgactgaattgctgcaatctcatgatcaaatttgaatggatgaggagttgctttttagggatgagcaaagaaagtggtttctcgagatggaatctactggtgaagttgctgtgaacattgttaaatgccaataaaggatttaggaattacagaaacctggttgataaagcagtgccagggtgtgagagagttgacttcaattttgaaataagttccactggctgggtgtggtggctcacacctgcaatcccagtactttaggaggccgagactggtagatcatttgaggtcaggagttcaagaccagccttgccaacatggtgaaaccccacctctaccaaattagccaggttgctccttgg

SEQ ID NO: 104186 - DNA, 390 bp, Homo sapiens
gcttaaaaagcccttccccatcctggctttggatatctgcgcagatgcattttcttctaattgttttgcaattcattttgcaaattcaactttttatcaggttttctcattttgctataaaatatgatcggaatttaactttttcttaataggcatttaattcttccatttgcgtttagtgaatgatctttctgtcctccctgatttgaaatgctacctctcatacattaaattctttgttgggttttttgttgttgttgttgttgttgttttgagacggagtttcttgtcatccaggctggagtgcattggtgcgatcttgactcactgcaactccacctcccggatcaagtgattctcctgcctcggcctcctgataacaataaaatg

SEQ ID NO: 104187 - DNA, 462 bp, Homo sapiens
  misc_feature (1)...(462): n = a,t,c or g
cgggggatactgatcccctgagaccctccaggaacnccgggagacccacgcgtccggaactaactgtgtgcttttctgataacccattaagtggaagcccagtatgttgtcttttctttgcaacttggatcttgatggcctgggtagtcctcagcaaatgtgttttgttttttttttttttaaattttttaaaagggagccccccttttccccccaggctggaaaggaggggggaatttttggttcactgaaccctccccctcccgggttaaggcaattctcctgcctcacttccttggaggctgaggcaggaggattttttgaccccaggaggccagggttccaggaacctttttggccctgccctgaaccctgggggacaaactaaaaccttgtttcaggaaaaaaaatatataaaatgggtgaaaaaaaaggggaaaccttggttttccctggcccatg

SEQ ID NO: 104188 - DNA, 397 bp, Homo sapiens
cggacgcgtggcgatggtaaattttgtgttttactacaataaaaacttttttgaaagtccaggagaatcacttgaacccgggaggcggaagctgcagtgagccgagatcccaccactgcactccaacctgggcaagagagcgagactctgtctcaaaaaaaaaaaaaaaagggggggccgttttaaagaatccttgggggggcccaagttaaccggggcttgcaaggaattagttttttccctatagggggccgatttaaacccaacctggggattttggggagggacccttactttgggggggggacatagtgggcccacctccctccaagggttaaaggctttggggaaaataaaaatttttaaggggtataaggtggcaaactacccgcatacg

SEQ ID NO: 104189 - DNA, 367 bp, Homo sapiens
actttaaacgttcctgcctgctgactctgaagagagcagcagatcctgacaaggagggctctcccagcacagcgcttgagctctgctaagggacaaactgcctcctcaactgggtccctgacctccatacctcctgatggggagagacctcccaacagcgattgtcagacacctcatgcaggagagctctggctggcatcagcctggtgcccctctgggacaaagcttccagaagaaggagcaacagcaatctttgctgttctgcagcctacactagtaatacccaggcacataaagtctggaatggacctccagcaaactgcagcagacctgcagaagacgggcatgactgttagaagaaaaagta

SEQ ID NO: 104190 - DNA, 428 bp, Homo sapiens
agtccatatcaacaatagggtttacgacctcgatgttggatcatgacatcccgatggtgcagccgctattaaagggtcgtttgttcaacgattaaagtcctacgtgatctgagttcagaccggagtaatccagggcggtttctatctacttcaaattcctccctgtacgaaaggacaagagaaataaggcctacttcacaaagcgccttcccccggaaatgatatcatctcaacttagtattatacccacacccacccaagaacagggtttaaaaaaaaataaaaggcacctttgccacactgaaaaaaaataaaatataaaaaaattgaggggggggccctttttttaaaatcccttggggggccccctttttcggggggtgggacatttttttttttttttttttaggggagctattttagctgcg

SEQ ID NO: 104191 - DNA, 402 bp, Homo sapiens
attagtttgctattaatccttcccaaaagtttatgctttatgcataattaaggctataaaaatatgttattttcccctcatcttttattccaaggaaacatattttactataccatacactatcctatacttgctttccacagtatttattttggagatttgtgtgtgtgtgtgtgtgtgtgtgtgttttgaggcgaagtctcactcttgtcccccaggctggagtgcaatggtgtgatctcggctcactgcaacttccgcctcccgggttcaagcgtttctcttttttttttttggaaaaaaaattaatggaacttaacgttcaagggaacatgtgcacaaaatgcaggttgtgcacataagaaaactggcgccgggtgggggggctgcacccataaactg

SEQ ID NO: 104192 - DNA, 396 bp, Homo sapiens
cccacgcgttcgctttatttgtcaaagcgaactactttactcaattgatccgagaacttgaccaacggaacaagttaccctatggataacagcgcaatcctattctagagtccatatcaacattagggtttacgacctcgatgttggatcaggacatcccgatggggcagccgctattaaaggttcgtttgttcaacgattaaagtcctacgtgatctgagttcagaccggagtaatccagggcggtttctatctacttcaaattcctccctgtacgaaaggacaagagaaataaggcctacttcacaaagcgccttcccccgtaaatgatatcatctcaacttattattatacccacacccacccaagaacagggtttaaaaaaaaaaaaaaaag

SEQ ID NO: 104193 - DNA, 397 bp, Homo sapiens
  misc_feature (1)...(397): n = a,t,c or g
gttctcactatgttgtccagggtggtctcgaactcctgggcccaagtgatcctcctggggcaggagagttgcttgggcctgggaggcagaggttacagggaactgagatagcgccactgcactccagcctggatgacagagtgagactccatcttaaaaaaaagaaaaaacgaaaaaaaacctgcctgtttacagccccacgtgatgccacttgctggcttcagcctatagtggctgcaggacaagctgttactccatgggacagcttccatggggtcaccactgagggtttgatcactggatctcaggccagagtacctcctatctgtcaccaaactgtcccccagacagtgcacacactcaccccccggtcgacgcggncgcgaattccagatct

SEQ ID NO: 104194 - DNA, 380 bp, Homo sapiens
ctaaattgagatgatatcatttacgggggatggcgctttgtgaagtcagccttatttctcttgtcctttcgcacagggaggaatttgaagtagataaaaaccgacctggattactccggtctgaactcagatcacgtaggactttaatcgttgaacaaacgaacctttaatggcggctgctccattgggatgacctgatccaacatcgaggtcgaaaaccctatatgttgatatggactctacaatacgattgcagtgttatccctaaggtaacttggtccgtgtggtcaagctattggatcaattgagtatagtagttcgctttgactggtgaagtcttaccatgtactgctcggaggttgggttctgatccgacgtcc

SEQ ID NO: 104195 - DNA, 171 bp, Homo sapiens
cagactcacagagaacccgccatggtgctgtctcctgccgacaagaccaacgtcaaggccgactgtgggtaatgtcgacgcgcacgctggcgagtatggtgcggaggccctggagaggatgttcctgtccttccccaccaccaagacctacttcccgcgttgacgtcgtcg

SEQ ID NO: 104196 - DNA, 368 bp, Homo sapiens
gcaacctcaaacagacaccatggtgcacctgactcctgaagagaaggctgccgctactgtcctgtggggcaaggggaacgtggatgaagttggtggtgaggccctggtcaagctgataggggcctacccttggacccagaggttctttgagtcctttggcgatctgtccactcctgatgctgttatgggcaaccctaacgggaaagctcatggcgcgaaagtgctcggtgcctttagtgatggcctggctcacctggacaacctcaagggcacctttgccacactgagtgagctgcactgtgacaagctgcacgtggatgctgagaacttatgctcctgggcaacgtgctcgtctgtgagctggcccc

SEQ ID NO: 104197 - DNA, 347 bp, Homo sapiens
tctcgactaaaaatagaaaaattagctgggtgtgatggcaggcacctatagtcccatccaggcaggagaatcgcttgaatgcgagaggcggaggttgcagtaagctgagatcgcaccactcactccaacctgggcgacaaagcgaattaagaaaaaaaaaaaagttagtatttgcatgatacttttttccccccttccttttactttttgcatgcctacatcattatttttgaagggagtttcttggggacaacgtataattaggccatgtttctgaatttactccatcaatctctggcttttaattaactaaatgacttttagaccatttacatataatacagttt

SEQ ID NO: 104198 - DNA, 327 bp, Homo sapiens
  misc_feature (1)...(327): n = a,t,c or g
ctcagacatggtattaaggaaattacaaatctactgactgtgacagaaagcaaatcagtggctgcttgggatgggggggatggggtgggaggggcagtanggagggattccaaagaatcacaaggaagctttgggagtcatgatgctcctggtcatggttttgcgggtgcgtacgtgtgtcaacattgatcaaaaaaaaaaattttttttttgagatggagtttcgctcttgtcgcccaggctggagtgcaggggcgtgatttcgggatactgaaacctccgcctcccgggctcaagtgattctcctgcctcagcctccagagtacg

SEQ ID NO: 104199 - DNA, 337 bp, Homo sapiens
  misc_feature (1)...(337): n = a,t,c or g
ttatcataatgttctccagttccatccatgttttcccaaacgacataatttcttcctttgttaaggctgaacagtattcttttgtatacatacacacactctctcatcccattcatctgttgatggacacttatgntgannnnnnngnnnngggtccnncnnggggggggacttgagcaccaaaacccttttgttttaaacacctgcccttggtaattggcacggcgaagaggctaatagttggtccggcctttatgactgagcccataaatccccatattttgtgaacttcttttgccccaatccacctgggccttgtatgtgacacccgcctggg

SEQ ID NO: 104200 - DNA, 334 bp, Homo sapiens
gttcctcctgcccgctgggcctcccaacgggccctcctcccctccttgcaccggcccttcctggtctttgaataaagtctgagtgggcgggaaaaaaaggagtttgctggaggtccactccagaccctgtttgtctgggtatcaggcagcagtggctgcagaacagcggatattggtgaaccgcaaatgctgctgtctaatcgttcttctggaggttttgtctcagaggagtacccagccgtgtgaagtgtcagtgcgcccctactggggggtgcctcccagttaggctactcgggggtcagggacccacttgaggaggcagtctgcccgttct

SEQ ID NO: 104201 - DNA, 335 bp, Homo sapiens
caggagaatggcgcgagcctgggaggcggaacttgcagtgagccgatattgtgccactgcactccagcctgggtgacagagcaagactcagtctcaaaaaaaaaaaaaaaaggaaccctcttcaaacccttttttaaaggggttttttagctttgccctgggcaaacccttttaaagggctggggagaaaaaaactcttaatgaaccggccttggcttttttttaaaaatttggaaaaaaagccctttttggcttaacctggggtttttaaaaaaggcccaaaaaaatcctcttttttttgtggggggggggacctacgggttatatttgggccg

SEQ ID NO: 104202 - DNA, 342 bp, Homo sapiens
tgcgaacagccctcaacatgaagacatggtttgtttggggctttttttctttttttcctttttaacacagacaggcttttaatttttattttttatttttggtagagacaaagtcttgctatgttgcccaggctggtctcaaactcctgagctcaagcaactcatctgccttgaccttccaaagtactgggatcacaggtatgaaccactatgcctggcctatccttttgcactaggacaaaatctaacaaaaatttaagttttctgactctggatggcagtgctagagttgatcttttcctttatcttttgctttttagaactatttttcaaaattttttg

SEQ ID NO: 104203 - DNA, 338 bp, Homo sapiens
ccgggaggcagaggttgcagtgggctgagatcacgccactgcattccatcctggaggatagagtgagactgtgtctcaaaagaaagaaaagaaaagaaaagaaaagatttgctaacatactcagtacaccatcagaaaccatcaatacacctcagaaactgaggcacagacaagttaaacagttttccttaagttatatggctagtaagtggcagggctagaatttaaatctgaacctacatctgtttgaaagttgattcttgctctctacactgtgctgtctttaagtactttctcttgccactcacattcaagtcaatttgctaagccttgcccag

SEQ ID NO: 104204 - DNA, 346 bp, Homo sapiens
gttctattcttcaaagatgaaaatggaagcacaatagcacaatcctgtaatcccagatacctggaaggctggaggagaacagcttgagcccaggagttcaaggccgcaatgaactatgattgtgcctttaaatagccactgacaacacagtgagacccccatctcaaaaaaaaaaaaaggaaaaaaaaggggaaaaaaaaggggggtttttaaaattaaaaaaatttttttaaaaaggcggttccaaaagctttttttaaaacaacttatttccccattttatttttcaaatacaatttttaaacagcctttatttttaaaaaattggttttaaataaccaaatcc

SEQ ID NO: 104205 - DNA, 397 bp, Homo sapiens
gagaatcgcttgaagccgggaggcagaggttgcagtgagctgagattgcaccactgcactccagcctgggcaagaagagtgaaattttggctcaaaaaaaaaaaaaagggtgattttaacccagtaatcccggatggttaatattcaagtttttttaactacccaaattatggcctctaataggggttttggtttaaaaccggttttcaaacaaaaatcaccccctgttttaagttcccaagttttttttttttttttttttttaaaaattgggaaaagcccccggggcttccccttttttttttttggggcttttaaaaccccccccggtttaaaaaaccccggccctttttgcaaaaggaccccaaattttggggggccaaggggtttttttttt

SEQ ID NO: 104206 - DNA, 379 bp, Homo sapiens
  misc_feature (1)...(379): n = a,t,c or g
ctctactatgaataccaaaattagctgggcatgatggcaggagcctgtaatcccagctacttgggaagctgaggcaggagaatcgcttgaacctgggaggtggaggttgcagtgagtatagatcatgcccccacgtgacagagcgagactctgtctctgacgaaaaatactgcccatattttcctgaggacgaaaaccagaaattatttcagaaggcctcattaaaatatattctttctctgttagtgagggaattagagaatgaaagagaaaagtcagaggggggcatgatgggggagattattccaggagccatcttccagtgggacccactgtccaatcatggccaaaccaaataaagcaagagccatagattccn

SEQ ID NO: 104207 - DNA, 378 bp, Homo sapiens
acaagggaaggagaatcacttgaacccgggaggtggaggttgcagtgagctgagatcgtgccactgcactccagcctgggcgacagagcgaaactccgtctcaaaaaaaaaaaaaaaactttatggggacgggggtaaaaagggaaaggccgggtggtttaccccttgaaaagcgagctacaggggttgggtttttcccaaaaatcaaccttgggtaaaaatccttttaaaaaaaaaatttacggggcccctataaatcctgaattttgttaagggaaattttggcattcatccttggttcctgcccatactgttgggcctcgtttttgcagtttgtttgaaacagggccaaacccccacatgaaattgtcagcagga

SEQ ID NO: 104208 - DNA, 436 bp, Homo sapiens
ggccagcacagagtgtgagatctgagaatggacagactgcctcctcaagggggtgccagaaccctgagtagcctaactgggagacacctcccagtaggggccgaatgacacctcatacagccgggggcccctctgagacgaagcttccagtggaaggatcaggcagcaacatctgccgttctgcaatatttgcttttctgcagcctccgctggtgatacccaggcaaacagggtctggagtgaacctccagcaaactcccacagacctgcagctgagggtcctgactgttagaaggaaaactaacaaacagaaaggacatccacaccaaaaccccatctgtatgtcaccatcatcaaagaccaaaggtagataaaaccacaaagatggggataaaccagagcagaaaagctgaaaattctaaaaatcagagcgcct

SEQ ID NO: 104209 - DNA, 420 bp, Homo sapiens
ggattggtttttcatatatgtttggtatttaaatgactgtggttataaataaaattgtatgtgagacacttttaaaacctttaccatgttttagcagatttctttctttcttttttttaaatggagtctcactctgttgcccaggttggtgtgcagtgagccgagatcgcgccactgcactccagcctgggcaacagagcgagactccgtctcaaaaaaaaaaaaggtttaaaaagggggtactaccaccgggaaaagaggtgttcttctttcccgggctcttatagggaagaccttaccgtattcccggtaggggttctaacgggagccggtttttgccaataaagggcggcttttcacttggtgggggaacctgggagaccaaaaggggcccccttcagtgttggccgccccctgatg

SEQ ID NO: 104210 - DNA, 460 bp, Homo sapiens
  misc_feature (1)...(460): n = a,t,c or g
gagggggccncccatgaaaccatagtgactctctgaagccccactaggcccaacttggaacgaggctaagacaggaattcccagaagtactactggattttattgaattccattttgcatctgaaataaaaggaataatgggatagttatataatgaaatactataaaacaatgaaaaatgacatactctagctataagcaacaacaatgatgagtctcaaaaatataatggggaattaaagaaaccagaccaaatggaatgattctgtttatttaaagttttgagacaggaaaagtaatccataaagttagaaacctggattatggagaggtaccaggagtcagaaacaggttcttttttttgagccagagtctcactctgttgcccaagctggagtgcggtggcacaatctcggctcactgcaacttctgtctgccacggtcgagtgatttttctgcg

SEQ ID NO: 104211 - DNA, 505 bp, Homo sapiens
  misc_feature (1)...(505): n = a,t,c or g
gcactgtttcaaactgtaagtctaaataaaaagttaaaacacagaaaaacaagataaaaaccgggctgggttgcagatggcaactttccctgtgtctcggtttcctcgtctgtaaaatggacgtcctgttgctctgcgcctgccagaagattctggaggggctgaaatgagcaggtcatctgtgcaagaagccccctccggtggagcacaggccaggcccgcctcgctgtcatggttggtgaccgacgggatgccccaagcaagaacaggtccaggcgatgctgaggcctgtggtttttttttttgtttttgagacgcagttcaactcttgcccagggtggagtgcagtggcacaatctcggcccactgcaacctccgcttcccaggttcaagggattctcctgccttagcctcccgagtagctgggatttgcaggtgntcgccancacggcccagttaatttttgtatttttagtagaaacggggttttgccatttggtagggt

SEQ ID NO: 104212 - DNA, 430 bp, Homo sapiens
ggcagcaattcccatttctgacactagttgtgccagagttccccaagaccaccccaggtttgatgattggctaggagaacttggaagaatcagcatagttccacgcatggctgtgacttattttttttttttttttttttttttttttttttaataaaaaagggggttttttttttcccccctgagggggggcatgggcatagatttttttttattaacatcaaatttttgaattataaaagattttttttttgtcttttcgaggatgttttgatgatatcagtggggccccccctcgcctttttttttttttttttttggagaggggggttttcatacttattgctaaggtgtgttcaacctttttagctttaggggcccccctctttgccccgatgttttttttatttttgtttggagaggaattaag

SEQ ID NO: 104213 - DNA, 402 bp, Homo sapiens
ggccgggcggccagctgggctcggagtgcagcggggttaggatggacgaggacgtgttgcaccctgaagagcctcatcatcggtgagagtggggtgggcaagtccagcctgctcttgaggttcacacatgatacctttgatccagaacttgcagcaacaatagatccatcttcggttgtgaatccggcccggaatgcagccaccccttagagcaaccccccttgctgctcgtgccctgctgtgctactgcctcagtcacttcctgcttggtcaagaccacagctgctgatgtcacagctgaggcacatcagaaaggctgcctgattcaaagaaagctgccggataaatcatagagcacagacacttctacctcatgctcttatgggactttaggaaccaaac

SEQ ID NO: 104214 - DNA, 418 bp, Homo sapiens
ggatttatagggcaggtcatgggcaactgacccacatgaaaaaccaattgaattttaaattcctcggccagaggttaaatcaagttatatttcactcataaaatttcttaacttgggcagagatactgtcctttaatcaatcttcaatgctgcttaaataataagtgttaagagatggatggagcctggccaacatggcaaaacaccacctccactaaaaatacaaagattggctgggcattccaggtgcttagggggctgagacataagaattgcttgaacccgggagatggaggttgcagtgaaccgagagtgttccactgcactccagcctgggtgacagaggaagaccctgtctccctgtctaaaaaaagagagatggatgggaataatactaccttcacaccaagccagttga

SEQ ID NO: 104215 - DNA, 380 bp, Homo sapiens
gattagtaaacagcgggacctgaaaatgaacccaggtaggtggcttcagagtccatgttcttaaccacaatgcaagcaagactgcctctgaggatgtgcccagatgctaacactgttctattagtggtgaggtgatagatgagtttttaaaaaatgctttttggtcaggtgcagtggctcacacctataatcccagcactttgggaggccgaggcaggaggatcgcttgagcctaaggagttcaagaccagccctgaaacgtagtgagacgtcatccccaccctcactcccctgccaaaaaaaaaaaaaaaaaaaaaaattcccccgggctggggggcaaatgcttgaagtcccatttcccgggagggttggggcgggaa

SEQ ID NO: 104216 - DNA, 356 bp, Homo sapiens
ggctgaagtgggaggatcacttgagcctgggaaatcaaggctgcagtgaactatgattgtaccactacactccagtctgggtgacagagtgagattctgtctcaaaaaaaaaaaaaaaaaaagaccccccttttttttttttatttttaccaaaccctttgatttgggaacttttttgtttccaaaaaccttttacctggcaaaaattttaataaaaatttttttatttttaaaaaaaaaaacctgccttacttaaaccctttgggtttttttttttgggaccaccggacctttaaaaaaatttttggaacaaaaaaccttggttttaattaatttttggcccaaaagcggggggg

SEQ ID NO: 104217 - DNA, 333 bp, Homo sapiens
gcaggagaatggcgtgaacccgggaggcagagcttgcagtgagtagagatcgcgccactgcagtccagcctgggcaatagagagagactccgtctcaccaaaaaaaaaaataattaaaaataaagggccaaaagtatttgtcttgttcgtcaatataataaaagtaggatttactccattaacctcagtatatacatctatataaggggaacaactagccccacttaagaaacagagttagaagtcagagcctcctgacttctgatttctagggcattgccctatttctacttcattcaataatgggttggttttctaattgggatgggggtt

SEQ ID NO: 104218 - DNA, 353 bp, Homo sapiens
cgtggacccctttccatccaggactatatatccaaagcattgttttttttgttgttgtttgggtttttgttactgttgttgttttttgaggttaggtcttgctctttgacccaggctggagtacagtggtgcaatcatagtcatatctcatcacttcagtctccaactcctgggctgaagcccgagtgatcctcctgcctcagcctcctggctagtttaaaaaaaaaaatttgtagagatgggatctcgctgtgtctctaacttctgggccttctcgctcggcctcccaaagtgctgggattacaggcgtgagccaccgcgcctggccggatctctcttttttatgccattgg

SEQ ID NO: 104219 - DNA, 201 bp, Homo sapiens
gccaaaagtgcagaaattggctggggcgggagagtcgcttgaatctgggaggcggaggttgtggtgagctgagatcgcgccactgcactccggcttgggtgacggagctagacttcgtctcagaaaaaaagaggaaattctttggttttattgcttatatatctttctgttaattagactacccctcagtcgacgcggccg

SEQ ID NO: 104220 - DNA, 376 bp, Homo sapiens
  misc_feature (1)...(376): n = a,t,c or g
ctttgcctttgatgatggtgatgtacagatggggttttggtgtggatgtcctttctgtttgtttagttttccttctgacagttaggaccctcagctgcaggtctgttggagtttgctggaggtccactccagaccttgtttgcctgagtatcagcagcagtggctgcagaacagcgggtattggtgaaccgcaaatgctgctgcctgatcgttcctctggaagttttgtctcaaaggagtacccggctgtgtgaggtgtcagtctgcccctactatggggtgcctcccggttaggctacttgggggtcagggacccactttatgaggcagtctgcccattctcagatctcaagctgtgtgctgggagaaccactan

SEQ ID NO: 104221 - DNA, 419 bp, Homo sapiens
gctgaggcatgataattgcttgaaccccagaggcagaggttgcagtgagctgtgattgcaccactgcacgtgcaacctaggcgacaaagcgagactctgtctccaaaaaaaaaaaaaggaaaaaaaaaaaaaatccggcctaaaacccatccggccaaattgaaacccaacctttgccttaatggaaaaaaaggccctgaaaaaagaaataaacccttttggggcctaagttttttcttttacaaaaggaaaaggaaaatagccccgccctcaaggggttgggaagaataaaacagccatgtggctaaaaatggggttgggcccgaacaaacccctaaaaaaaagctccttgagtttaatagcacataaaaggccaggccggggcagttaaaaaaaaccttggaagggaaaaaaaaaag

SEQ ID NO: 104222 - DNA, 522 bp, Homo sapiens
  misc_feature (1)...(522): n = a,t,c or g
aggggagccggnctanccctctatactctctgaccaaacggcataccccgcgcgaagcgaagacaacctgaagtccacgcagttgctgagtgtgatcgatgccatcagcgaagggccgattgaaggtccggtggatggcttaaaaagcgtgctgctgaacagtacgccggtgctggacactgaggggaataccaacatatccggtgtcacggtggtgttccgggctggtgagcaggagcagactccgccggagggatttgaatcctccggctccgagacggtgctgggtacggaagtgaaatatgacacgccgatcacccgcaccattacgtctgcaaacatcgaccgtctgcgctttaccttcggtgtacaggcgctggtggaaaccacctcaaagggtgacaggaatccgtcggaagtccgcctgctggttcagatacaacgtaacggtggctgggtgacggaaaaagacatcaccattaagggcaaaaccacctcgcagtatctggcctcggtggtgac

SEQ ID NO: 104223 - DNA, 412 bp, Homo sapiens
tttcgtaggagaatggcgtgaacctgggaggtggagtttgcagtgagccgagatcgctccactgcactccagcctgggtgacagagcgagaccccgtctcaaaaaaaaaaaaaaggggggacaaattttaggggataataccaaatagtataggaggggaatgggcccatgggggatcattttgtcccttattattgacatttacatacagagacgtgcacatctttattatttttggctgggggtcgagcccagtttttttaaaacatgacatggcaaactttgggagctggatggccttaggaactgaagcataccaaagttcttgtgtgagccatacaaaggtctactgtgaacgagtgtgaattttgagctgaacatggcccagtttcccacatacctgttagatgcc

SEQ ID NO: 104224 - DNA, 453 bp, Homo sapiens
tcgcgccgggcattcccggagtccacgatttactatcctccctcgataaacatactcggaaccccatatcacatactcttttcaggcctaagagacccactttctgagagaaccccctttttatagattactactctgaaactatccataatatctgatccaagagaaaactatcaatgacttctgacactagcaggcgaataatttgtgagaagcacactatttatatcctctccaggtggaccataaaatcatggcttgcctctatttctacagtgctttccctctgcccacagtgcagaacccaaacttcataacgtgggtgcctttcctagcgtatctttttttttctttttgagacagaggctctctctgttgccccagctgtagcgcagtggttcgatctcggatcactgcaatctccgcctcccgtgttcaagcgaatctcctgct

SEQ ID NO: 104225 - DNA, 452 bp, Homo sapiens
tgcgcacgatgcgtggatcctccagagcggccgcaatacatttcgggtggctgaggcaagagaatgtcgtgaacccgggaggtggagcttgcagtgaggggaaatcgcgccactgcactccagcctaggtgacagaacgagactctgtctcaaaaaaaaaaaaaaaaaggaaaagaaaaaaggggaaacggactttttttgaactggggggaaggataaaggagatgaattaaaaggaaaaaaaatccgggttccttaaaaaagggatcattgggctaaacaaaaagggcactaaattggcgggggggcataggatttaaaagcttaaaaggaccatttaattcagggcttttttttaaaataaagttttcaatttccttggggctttctttcttccacttttttttttgctatcttgggggggggcctccaaatagaaaaaaaaggggttt

SEQ ID NO: 104226 - DNA, 413 bp, Homo sapiens
accaaagctctgtgccaggcagctggggacccaaggacactaggaggaataaatcagggtgggcgctggccctcagggagcttctgtcttgctgaggagacaacaccagccagcactcagccatcttaattaattattttatttttttctttacttttctgttttttagacagggtctcactctgttgcccaggctgtcaggctggagtacagtagtgtgatcacagctcactgcaacttccgtctccggggctcaagcaatcctccaaaaaaaaaaaaaaaagggggggccgttttaaaggatccttgggggggccaaagtttacccgggcttgcaacgtattacttttttccttataggggggcgaataaaaacctacttggggatttttgggagggacctttatttgtgg

SEQ ID NO: 104227 - DNA, 473 bp, Homo sapiens
gtgcggggggatttaccttgacgccctgcggatcgacccctatttcccgggccgacccacgcgtccgcggacgcgtgggcgacaaatggcaacagaggccggtatttgggggcatgggaaaccgggcagcacatatgccatctagagggatgcctgactgctttggtccagtgcactgatgctacatgggaaggaaggcctggctggtgttgtcaaatcttctcaccctaaaaaaaaaaaaaaaaaaaaaaaaaaaaaaaaaaaaaaaaaagaaaaaaaaaaaaaaaaaaaaaaagggatgcccgtcaagcaaaaaaacagggggcgggcgctttataaaaaaaaaaagggggggcgcccttttccaatcttttggcccttttttttttttttttttttaggggggggaaaaaaacaccctgggggtttttttagaaaaaaatttttttttggggggggaaaaaaaaaaaaag

SEQ ID NO: 104228 - DNA, 481 bp, Homo sapiens
  misc_feature (1)...(481): n = a,t,c or g
nattgaccccctnttnnaanannnnnaaggtccccgcgctgcaggaattcggcacgaggtccattcatctctcagttaactaaatagaagtgatgcaagggaggactccaaggaagccctagggatcatgaagctacagaatgggagaattgctgtcaccacagttctggaagaagaattgttcaggagaacagccattggactatggcatgccaaagaaatctctgttgtgaaaccacaattaaaagttgttcttcctgcctctgcttcttgaccaacccctgagtggccctgtatagtgttctccctaggaaactgtggattctacttctggtgaagatgacgtgaacattgctgaaatggcaacaaaggattcagaagattacatcaacttagtttggcaaagcagtggcagagtttgagaggactgactccaattttgaaagtgggtaaaatgatgtcaaagagcatcacatggtgg

SEQ ID NO: 104229 - DNA, 516 bp, Homo sapiens
aatgaaacccttagaaaacctgagccagaccgccagcttggcacgaggggcgactctgctgcgccctgtcctccgtcggctctgcgggctcccgggcctacagcggcctgcggcagaaatgcccctccgggctaggagcgacggcgccggcccgctatactcgcaccacctccccacctccccgctgcaaaaagcgctgttggccgccggctccgcggcgatggcgctctataacccctaccgccacgggagcgtccccggatttcaacatccaccctcgacctgggcaagctccagagcctgccggaaggctccctcggtcgcgagtatctccgtttcctggatgtgaacagggtctccccagacacccgagcacccacccgcttcgtggatgatgaggagctagcgtatgtgattcagcggtaccgggaggtgcacgacatgcttcacaccctgctggggatgcccaccaacatcctgggggagatcgtggtgaaatggtttgaggctgtccag

SEQ ID NO: 104230 - DNA, 456 bp, Homo sapiens
  misc_feature (1)...(456): n = a,t,c or g
natcgagtacattagcccangcggggaattccaaaaacctgtactcttctggaacttggatttaaatggatattgatggtatctgaaggtatttcattacagggataataatcttcacattctccataggcacacacacacacacacacgtttgtacatagacacacacaaatatacatagggacactaatgaggtgaacaaatacccagtagaagacaatacagaaaacggtgataaaaatagaaagtaagtgaataaaatgctgacataaataggagtaaatggaataaagttgagaaaaataaccaaatagtttgcttaggggtattgtgtgaaccaacgaaatttgatttgaattaaatttagaatgataaataaattgtatatatgaacagagtggttaacatgtaaggctagcagtaagttagattaagtagaatacaattttattgaan

SEQ ID NO: 104231 - DNA, 465 bp, Homo sapiens
  misc_feature (1)...(465): n = a,t,c or g
attgtgcccatnagnnnattgacgaccattagaccgtgtggtggaattcggctggggcaggagaatcacttgaacccaggaggtggagttgcaggtagccaagattgtgccagtgcactccagcctgggcaacagaatgagactccgtgtcaaaaaaaaaaaaaaaaaaaaaaggggggttaatttttaagggaccaaaaaaatcacttggaaatctgcccccggttaaaaaatatttggccgggcccaaaaaaaggaaccacctcccctaggttccttttaaaatttttaatggttttttaaggggggcgggggatttatttgaaaaatttttttgaggcggggggggaagaaaaagggggggggtttttaattttttaaaaaaaccctgggtttcttttttgggggggggacctcggcctttgggtcaattggttttttttggcaaaaaaaccatcttatttg

SEQ ID NO: 104232 - DNA, 430 bp, Homo sapiens
  misc_feature (1)...(430): n = a,t,c or g
ctaaggcaggagaatagcctgaacccgggaggtggaggttgcaggttgcagtgagccgagatcatgccactgcactccagcctggcaacagagcgagactctgtctcanaaaaaaaaaaaaaaaaaaaaaaagggtnctttgggggtacccctaggggaagggcccttcggggggttttaaagggggatttccctgggaagaaattaaaggggtgggctcttaaaattgggaaaaaaaattttttttcatttttaaaaaaccttttcaaaaaattccccattcaaaattgggggttttttaccggggggttttattttggggaaatgggaaaaaaaagttttggtcccggcccccccaaattttttttttttccccttttaaaccggaagggggaaaaactggtttgggtcctcacccccaccttaaatt

SEQ ID NO: 104233 - DNA, 467 bp, Homo sapiens
  misc_feature (1)...(467): n = a,t,c or g
gctagcgctcgatccctattgagngtggaggaactttaggtaaacacaggggcggggaagctcgaactgggtggaccccactgcagctcaaggaggcctgcctgcctctgtagactccacctctggggacagggcatagctgaacaaaaggcagcagaaacctctgcagacttaaatgtccctgtctgacagttttgaagagagtattggttctcctagcacagagtttgagatctgagaacggacagactgcctcctcaagtgtgtccctcacccctgagtagcctaactgggaggtaggccccagtaggggcagactgacacctcacacggctgggtacctctctgagacgaaacttcaagaggaatcatcaggcagcaacatttgctgttcagcagtattcgctgttctgcagcctctgctgctgaaacccaggcatacagggtctggagtggacctccagcaa

SEQ ID NO: 104234 - DNA, 461 bp, Homo sapiens
  misc_feature (1)...(461): n = a,t,c or g
cgcgtgccccnnnnntttaaactgataacctatgcangttcgagaaccctctgaacctgcgaggtggaggtggcagtgagtatcgatcgtgccactgtaccccagcctgggcaacaaagcaagactctgtctcaaaaaagaagaaagaataatacggcagtctccctttatctatggtttctctttctgcatgtggtttcaactacctgttgtcaaccatagtctgaaaatattaaatggaaaattccagaagtaaacaactcataaatttaaaattgcatgctgttctgagtagtgtgatgaaatctcatgtcatcctgctcactcctgcccgggatgtgaatcatccctttgtccagcatatccacactgtagatgctcccagaaccttggcccattagtcactagcagccatcttggttatcctatcaactgttgcagtatcattgtgcttgtgccca

SEQ ID NO: 104235 - DNA, 504 bp, Homo sapiens
  misc_feature (1)...(504): n = a,t,c or g
aaggggnnnnnnttttatcgacatcactagtcagngtcgtggaattcaattttcagaattggttgcagtgacccccatcgttttcctcctattttctctagattcattattcagactattaacttatagtctccaatactttgtccttacatctcaataataaatgtattttgatctatttctttctttagattttgagggctttattattacagggtaatagtcctagatttcttaatattttgggaattctatcgtgaaattactgagtgatttggggaaagctatttttttgggaagaattgctttgcatttggtgtttagttctgtgtttttagtcctaaaccctatactcatgacaaattggacatatttgtgcttatgttgaaaaaactgaattgagattaatctttttctttctttttttcttttttagacaatcttgctctgtcacccaggctggaatgcagtggcacaatcttggctcactgcaacctttgcctc

SEQ ID NO: 104236 - DNA, 480 bp, Homo sapiens
  misc_feature (1)...(480): n = a,t,c or g
cgcggccccncccatcgagccctnnntttgtagactctagnccatgcggtggaattccaggagaatcccttgaacctgggggacagaggttgcagtgagtggagatcgcactactacactccagctcaggtgaaagagtaagactccatctcaaaaaataaaaataaaaataaaataataaaataataatctctctttaaaatatggcatggggctactctggggacctccacctcccatcagatcagccatggcatttgattctcataggagctggaaccctattgtgaaacgcgcatcccagggatctaggttgtgtgctccttacaagaagaatctaatgcctgatccgaggtggaacggtttcatcctgaaactgctccatgctctgcctatggagtagccgntctttattcctttactttcttaataaacttgctttcacgaanaaaaaaaaaggaaggaaaggaaggcttgatc

SEQ ID NO: 104237 - DNA, 463 bp, Homo sapiens
  misc_feature (1)...(463): n = a,t,c or g
cgaagggcccggttgnnnaaactatgctccccaaacgttcgggaaanccnanannanngnnngnactttctggntttcctgtgggaatatcaggaaaaagctcatatattgtggagtttattttctaaattgattttatctaggagtaggttcactgtaaaagaaaaggtgagacagaaacctggaattttatttatttatttatttatttttgagatggagtcttgctctgttgcccaggctggagtgcagtggcgcgatcttggctctctgtccccgcaaaaaaaaaaagattccaccaaagcaaagcaattacctttgttgagggaataaatagcaaaaggggtggatggactggcccacattttcttgctctttaaagatgatattcctaataataatggcctagagttattttgggtgggggatttgaaagtcaagtttagtgtcttataagtgtttt

SEQ ID NO: 104238 - DNA, 359 bp, Homo sapiens
cacagactcagagagaacccaccatggagctgactcctgccgacaagaccaacgtcaaggccgcctggggtaaggtcggcgcgcacgctggcgagtatggagcggaggccctggagaggatgttcctgtccttccccaccaccaagacctacttcccgcacttcgacctgagccacggctctgcccaggttaaaggccacggcaagaaggtggccgactcgctgaccaacgccgaggcgcacgaggactacatgctcaacgcgctgaccgccctgaacgacctgcacgcgcacaagctatgggtggaccaggtcaacttcaagctctctaagccactgcctgctggtgaccctggccgc

SEQ ID NO: 104239 - DNA, 436 bp, Homo sapiens
gcaggagaaccccttgaaccggggaggcgaaggttgcagtgagtcgaggtcgcgccactgcactccagcctgagcgacagagcaagactccacctcaaaaaaaaaaaaaaaaaaaaaagattttggggggggggcccaccccaccctttgaaaaaaaaaaaatttggtttttttaaaaaaaaaaaaattggggggccaaattttttttggataaccgggaaaaggggcccccaaacccccaatttttttttttttttccggggtttaaaagggggaaaaacccaagggggggggttttttccccttttttaaaaaaaaaaatcctttttttttaaaaaaaaaatttttttttggaaaaaaaaattattggcttgaaaagggaatcaaaaccttgggggggaaaacaaccgtttttaaaggaaaaaagtttttttaa

SEQ ID NO: 104240 - DNA, 462 bp, Homo sapiens
  misc_feature (1)...(462): n = a,t,c or g
agcggcttttnnnaaagactgcgcgcatatgacgnggcattccaactactcgagaggctgaggtgagagaatcgcttgaacccgggaggcggagattgcagtgagcggagatcccgccactgctgtccagcctgggcaacaaagcaagaccctgtgtcaaaaaaaaaaccacaaataatttttttttaaaatatgcttgtaacaaaattgcatttggcaaattataggatgtgaaatgtataatattaactgacacgactcccatcccaggcagacaagcaaccctcattatgaaaattacattttgtttaaaaaaattccctcaacaggcatccccaaagctttctgggcatcagcagagcagacgtccagttcgggggtccacgccagtatgcggcagtggcgcggggccgaggctgctcacaggctgggtgccgacagcccagctctcctttgaaataa

SEQ ID NO: 104241 - DNA, 456 bp, Homo sapiens
  misc_feature (1)...(456): n = a,t,c or g
nacctgagntccgtagacnctcgngnaancnnanaggaatacataatggtaatacatttgaggaataatcctaacacatcaagttaaagtaagctgtttttgatcccccttttgaaaaggatgccagtttagttgttacataccaagtgccagaggctgagtttttttttttcctggggaaaatattgcattcgttgaaaacaaaaccacactgagttaccatttcatgttcactaggatgactgcggccaaaaagatggaaaattacaagggctgttggggatgggaaacaattggaagcttcatgccctgctggttggaaagtaaaagggtgcagtcactttgggaaagtttggcagttcttcaaatggttaaacgtaaagctactatatggcctagcaattccccttacgggcatatgcccaaaaaaattgaaaaaatatgttcagggctacc

SEQ ID NO: 104242 - DNA, 487 bp, Homo sapiens
  misc_feature (1)...(487): n = a,t,c or g
agagccnaggggnncnggcctggaaacccactgagaccctaggacangcggnggaattccaggagaatggcatgaacctgggacgcggagcttgcagtgagccaatattgcaccactgcattccagcctcggcgacaaagcaagactccgtcaaaaaaaagatttttattagagatacacatatgcttcccaaaatattattttggtcaacaccattgaaaccatcaaggacaaatttttgtctatgcctcctctgtaagagtaccctaattgtgattggaaagctgaatgttttatatgccagaatgacaggtttcaaagaaaacacaaagaacaaaatcagagagagagaaaaaaaatacatataccatgtagtatgaccatggttgaaacaaggtcaaaggtgatgtcaatcccatgttgtaacatctacgggggcaggagtcacaaacgttggatcagatatcacctgtgagttgcaagtaca

SEQ ID NO: 104243 - DNA, 470 bp, Homo sapiens
  misc_feature (1)...(470): n = a,t,c or g
ntcgaagaccattcgaagtgcggtggaattcatggatgttgatagaagacatgagactcctggatcaaagataaaaatagtttattacccacagcaatagcagtatctacagtgtctgaattttttgagccagctccccgagtcccactccccacaagataatgtaaatagggccagttaacacctgtacaaggaactctgagcttcgggaatctgaatcttttttttttccccaaagtttttatggttttatttaacacaactaaaacttacacatgaggtgtgagaaagaacaaaatttcaacaaattgagtttcaaagatctttttgggttgggttggctttggtttttcattttttgtttttggagacggattctcactctgtcgcccaggctggagtgtaagggagatttttgctcactgcaacctctgcctcccgggttcaggccattctcctgcctcagcctn

SEQ ID NO: 104244 - DNA, 1402 bp, Homo sapiens
aagttttgttcttttgctctttgcaaaagctcttgctactgctcattctttgggttcatactgcctttatgagcagtaacactgatcacgaaggtctgtagcttcactgctgaagccagcaagaccacaaacccactgggaggaatgaacaactccagacctgctgccttaggagttctaatgctcaccgtggaggtttgcagcttcactcctgaggccagcaagaccacgaacccaccagaaggaagaaactctgaacacatctgaacatcagaaggaacaaactctgaacacgctgcctttaagaactgtaacactcaccgcgagggtccaaggcttcattgttgaagaaagaaacataattacgtgtggaaaagcaggaactcaggtggggtaagaaaccaatcgtgatgaatgaggggcttgaactctcattgtctgagacgggatttcaccgtgttagccgggatggtctcgatctcctgacctcgtgatccacccgcctcggcctcccaaagtgctgggattacaggcgtgagccactgcgcgcgcgcccggccccttaccgttcttggaatagtgaggaaatcaagagatggagaaattggcccaccaaccactttggtggtaaaagaggagagtttcctttgtgattggcccgcgctcctaaatttgcccaagtaaaatctacatgagtgtttcccacgacttggaggtggattgcgtatgaggcatttagggcataccccataactccaattgcctcactagtagacatttcccagtcaaataagatatggcctgaggaaacggcccaacagtctcactctgtcacccagactggagtgcagtggcgcaatctcggctcacatgcaacgtccgcctcccgggttcacgccattctcctgcctcagcctcccgagtagctggcactacaggcgcccgccaccacgcccggctatttgtgtgtgtgtgtgtgtgtgtgtgtgtgtgtgtttagtagagacggggtttcaccgtgttaaccaggatggtctcgatctcctgacctcgtgatccgcctgcctcggcctcccaaagtgctgggattacaggcgtgagccactgcgcccagcccaaaaaggatgataataaaaaacaaacttcagttccttcattagggacctggccccagtcattcagtggcgagggcaaaaggcagtggtgtaccatcttcctacatcatcccctggatctcctcaaagttcatcaggttgttggccgtgtcagaccaggcagcatgctgggctccatccatttcagaagcaagctggttgcttctttccagagtatgatttgtgccaccaatcacttccttacagtcaggacacgtgcccctctccatggctcccccacaatcgcc

SEQ ID NO: 104245 - DNA, 455 bp, Homo sapiens
  misc_feature (1)...(455): n = a,t,c or g
cattgatttcatagcactngcagngacanttggggaggctgacgcagaggaatcatttgaactcgggaggcggactttgcagcgagctgagatctcgccattgcactccagcctgggcgagagggtgacactccgtctcataaaaatacaaaaaatagataagtgggagctaaatgaggagaactcatgaacacaaagaagggagcaagagacacctctacttgatggtggagggtgggaggagggagaggggcagaaaagataactattggtactgggcttaatacctgggtgatggaatcatctgtacaacaaactgcggtgacacaaattgacctacaacaaacctgcacgtgtacccccaaacctaagataaaagtttaagggaaagaatgaagcaagctaaactttagacaacaataacagcaacaagaaaaagaagtgacaggtgttat

SEQ ID NO: 104246 - DNA, 477 bp, Homo sapiens
  misc_feature (1)...(477): n = a,t,c or g
gatggtagggaaatgagaccactagtccagactgaggacattacngagtgcggcggaagtttaatccagatacccccaggctgaagcaggagaatcctcggagcctggcaggcagaggctgcacagagccaagatcgcaccactgcagtgcagcctgggcgacagagcaagactccatctcaaagaaataaaacttacttaaaaataattatgattaaaattttaaaaaaatagagagaagggacactctgagatgctcattgcaggaaccctcaaggggcaagttgtaatgcccgaaggctgcagatggggtgccacagtgttggaatggtgaggtggagggaatatcttccttgggaaagagggagactggcggtgttccaaagccctgatggagtgagaagaggacacctggtggggaaggactgtgtgtgtgtagggggtgttgagtgccaggtgcaagttgcctggcctgag

SEQ ID NO: 104247 - DNA, 473 bp, Homo sapiens
  misc_feature (1)...(473): n = a,t,c or g
aggggagaagnntttgagaccctnnnatcgtatgatcattagtccgtgcggtggaattcctgggcttagctccctagtagctgggattacagatgtgtgccaatgcacctggctttcacacttttaattagtgtgtttttgctgttctgtattagactatgagcaacttaagagcaagaccaagagtctggcattgtacctgctgtatttggcagtcatcaagcatctgttgactgtgtgttaatggtattatagaaggtgctctgaagtgagagtcagaagctgtatggctttgggctaggaccagttgggaagtggagttggtagaggtaaggcaggaggtcctgatttgcacatccatgtttagggcttcattgatcacactaggagggagcgacctgaatgtccatcacagatgaatggataaagaaaatgtggcatatccatacaacagaatattattcagccttana

SEQ ID NO: 104248 - DNA, 371 bp, Homo sapiens
tgcagtggcgcgatctcggttctctgcaagctccacctgccaggagaatcgcttgaacccaggaggcggagattgcaatgagcagagattgtgccattgcactccagcccgggcaatagtgtgagactctgtctcaaaaaaaaaaaaaaaaaaagaattggggtttgggtttgggggttgtttaaactcgggaatttttttattttttgaaataaaaactgggccacgggctttcccgggggggggggttttaaccaaagccaaaaaagtttccctccccctgttaaaaaagggggtcaatttccctccttcaaagccaggggctgaaccacaaaaacaaaaaacggctaaaatttaataaaaccccccag

SEQ ID NO: 104249 - DNA, 425 bp, Homo sapiens
  misc_feature (1)...(425): n = a,t,c or g
aaaacgcgatctgatcagacattacccaaaggaagacatatacatggccaataagtatattcttaaaatgctcaacattaactatgcatacagaaacgctaatcagaaccacaatgagatatcatctcatcctaattaaggtgactattttcaaaaagactgacaatatgacagccgtgggggttcatatctgcaatcctaacactttgacaggccatggcaggggaattgcttgagttcacatgtttgagatctgcgcaacatattgagactctgtctctaaaaagcatatcgagactctgtctctacaaaaaaattttaaaaagttgaaattatctgggcgtggtggcacatgccactaggtagtcccagctactcgaggttgctgcacctcatgcgttcaaggctacagagagccatgattn

SEQ ID NO: 104250 - DNA, 539 bp, Homo sapiens
  misc_feature (1)...(539): n = a,t,c or g
aggattgatgcgtgaccgtccggattcccagtcgacccacgcgtccgctgagttcagaccggagtaatccaggtcggtttctatctacttcaaattcctccctgtacgaaaggacaagagaaataaggcctacttcacaaagcgccttcccccgtaaatgatatcatctcaacttagtattatacccacacccacccaagaacagggtttaaaaaaaaaaaaaaaaaaaaaggggggggccgttttaaaggatccctgggggggccaaagtttacccgggcttgcaaagaaaaacttttttccttatagggggccgaataaaaagctacctgggaatttttggaaagaacccttattttgggggggggacatattgggccaacctccctacagaaattaaaggctttagggaaaaaataaaattttaaagggtataaggggtaaaacaacctgcatatgctggcgggtggaaaaaaaaaattggggnnnnnnnccccccccccccnnnncccccccnnnccccccaccccccccccaac

SEQ ID NO: 104251 - DNA, 485 bp, Homo sapiens
  misc_feature (1)...(485): n = a,t,c or g
catcgaacgccttcggaatagacccgcctgcgganatccgccgagaacaaagcggccgggaagctcgaactgggtggagcccactgcagctcaaggaggcctgcctgcctctgtagactccacctctggcggcagggcatagctgaacaaaaggtagcaggaacttctgcagacttaaacgtccctgtctgacagctttgaagagagtagtggttctcccagcacgcggtttgagatctgagaacggacagactgcctcctcaagtgggtccctgacccccgagtagcctaattgggagacacctcccagtaggggctgactgacatcttatacagccgggtgcccctctgagatgaagcttccagagaaaggatcaggcagcaacatttgccgttctgcaatatttgctgttctgcagcctccactggtgatacccaagcaaacaggggctggagtggacctccagcaaactccaacagacctg

SEQ ID NO: 104252 - DNA, 464 bp, Homo sapiens
  misc_feature (1)...(464): n = a,t,c or g
attgagnccattgagnactactcggacagngcggnggaantntanaacagaaataaataaacattagctgggcttggtggcgcgctcctatggtccctattctcgggaggctgaggtgggagaagggcttgagtctgggaggttgaagctgcagtgagaggtgattgcgccactgcactccattttgggcgatgaagttgagactgtttccaacaacaaaagatgaaatgcgctgatggtcagtgaggacagagggatgagagctcataagctgtcaggccctggggctccagaggataactgaacagtagatcaacagggtccctgccctccaggagctcatactatgctgaaggagacaaaaaaaaaaagaagctatgacccgttagttttttgtctatgctgtggggggtctcagccaagggagtttgcagcccaggggaagaagtaactgattcacggat

SEQ ID NO: 104253 - DNA, 451 bp, Homo sapiens
  misc_feature (1)...(451): n = a,t,c or g
cttgacnccatgagatctcgcccangcggggaattccaaaagtaagcctacaatagcctgtaattttcaagtgaaaggaagagtcacatgtctcttactttaaatcaaaaactagaaatgattaggcttagtgaggaaggcttgtcaaaagccaaggtaggccaaaagctagtccgcttgcatcaaacagttagccaagttgtggatgcaaaggaaaagttattgaagctaattaaaagtgcgactccagtgaacataggaatgataaagcaacacaaccttattgctgatatagagaaatttggaatgatctggacagattgtcaaacaagccaccgcactgtcttgtgtcaaaggttaatccagagcaaaccctaactctcttcaattctatgaaggctgagagaggtaaggaagctgcagatgaaaagttggaagttcgcagaggctt

SEQ ID NO: 104254 - DNA, 474 bp, Homo sapiens
gaggggaatcgatgacctagaacacgtcggggaattcaaagaataggtcactcaataattggctatccatgtaaaaaatataggtagattgatgctcatgccacatggaaaaataaccttgaggtagattaataagcaatgccattgttatttatttatcctgggctatactaccactaccactgttattttcattagacaggacagagtgaatgtacactgagaaagccagcatactgtaaatacagacttggtgtttattccaagctccgactttttgacctttatttattcatttttatctctctgtcccacagtttccttaaaataggatgaacagattgaatttaatgaattttattttattttattttttttgagacagagtcttgctctgtcgcccaggctggagtgcagtggcgcgatctcggctcgctgcaggctccgcctcccgggttcgcgcgattctcctgg

SEQ ID NO: 104255 - DNA, 481 bp, Homo sapiens
  misc_feature (1)...(481): n = a,t,c or g
tggggnnanagtgaggaattgagacatagacagcgtggtggaattcgaccaagattgcgcagaccctagaggggttcccaggagagggagactacacaacactaactccagtagggtggatggagtgaggcccagaggcctgaagtccagctggagcctggaggaggggagagtaacggacttgggcattcagggaacgtttccctgggcatttcgacagctggggatggaaaggaagactgttacaggcaggggaacagcacaaccaaggtgtggaagcaggaccgggcaacattctggacccaaccaatcataaggtcatacgtgtccatggcaaacattttttttttttctttttagagacagggtcttgctccatcacccaggctggagtgcagtgacacagtcatggctcactgcagccttgacctctcgggcccaagagatcctcctgcctcaatctcctgaatgactgggactg

SEQ ID NO: 104256 - DNA, 496 bp, Homo sapiens
  misc_feature (1)...(496): n = a,t,c or g
cggcgagtnnnnnnaatttgagaccatcgagagccntcnggaannncaganaanaagtcaagaatacacaatggggaaaggatagtctcttcaataaaagagtcttgtaaaaactgggcatccatatacagaagaattaaattggactcttacatcatatgcaaaaatcaactcaaaatggattaaagacttaaatgtaagactcgaaattgtaaaagtactgcaggttgagtatccctcattcaaaatacttgggaatggaagtgttttggattttgtttttttttattctggaatatttgcattacatttaatgggtgagcatccctaacccaaacatccaaaatccaaaatactccaatgagaatttcctttgagcgccacaccaaaactaaaaacgtttcagattttggagcatttcaaatttcagattttcagattagggatactaatttttttgtttgtttttgagacggagtcttgctctgtcgccagg

SEQ ID NO: 104257 - DNA, 469 bp, Homo sapiens
  misc_feature (1)...(469): n = a,t,c or g
agcgacgnnnnnaaactgacttagagcatagngaagngcggnggaattnattactagaatttagggacgagaccacaactaactgccaagaaggctaggaaagtggcatgtattatgggcactggataccagctaaactgtgtagagagtatggatgggcctgggcacaatggctcattcctataatcccagcactttgggaagccaaaggcaggatgatcgcttgagcccaggaggtcgaggctgcagtgagcaatgatcaccactgcacttcaacctgggcaacagagtgagacccagtctcgagaaaaaaaaaaagtatggggggatactgggaaacagcaagaagtttttgccacccattaaggggattttatagttttcttacctgatacagactaagagcattaaaataacattttgcctaatggctttaacagccatggatgattatttttcagatctattn

SEQ ID NO: 104258 - DNA, 478 bp, Homo sapiens
  misc_feature (1)...(478): n = a,t,c or g
nttgagaccctancttgtgtggncgaattccgggaggcggaggctgcagtgagctgagatcgcaccaccgcactccagcctgggtgacaagagcgagactgtctcaacaacaacaaaaaaagaatctgcaacaggggaagggtgtgtggttgaccctgaagaacagcccccaacgacacccccatccccgtgctcagagcttgtgcatgtgttgctgtatatggcagcagggactttgcagatgtgactacctcaaggaccttgagatggggaggttaacctggatgatccaggcggaatcacgagggtccttacaggaaagagggaagggggtcattgagagagagggctgtagtgtgaccacagaggcagactggagggacgcagccgggagcccaggaatgctgctgtctagaggctcaggaggccggagattgactcttcctggagattccagaagggaccagccctacagacn

SEQ ID NO: 104259 - DNA, 322 bp, Homo sapiens
gctgaggcaggagaatcgcttgaacccgggaggtggagggtgcagtgagccaagattgtgccactgcactccagcctgcgcgacagagcgagaatctgtctccataataaaaaaaaaagaaattaccctgtgttggccccaatgtgtaggatccaaaaaacctgatttgagacctatattacacagtttcctaggcctgccgtatcaaattaccatgaaggggaaggcttaacccacataaatgattctcacacttctggaggctgggagtccaaaatcaaggtgtctcgagggtttgttttaggggaggtctctctccttg

SEQ ID NO: 104260 - DNA, 356 bp, Homo sapiens
ctaagttgagatgatatcatttacgggggaaggcgctttgtgaagcaggccttatttttcttgtcctttcgtacagggaggaatttgaagtagatacaaaccgacctggattactccggcctgaactcacatcacctgggactttaatcgttgaacaaacagaacctttaatagcgggtgcaccattgggatgtcctgattcaacatctaggtcgtacaccctattgtggacatggactctacaataagattgcgctgatattcctatggtaacttgatccgttggtctagttattggatcaattgagtatagtagttcgctttggctggtgaagccttaggtactgcttgtatta

SEQ ID NO: 104261 - DNA, 381 bp, Homo sapiens
gaataaactaaactacttaccatgcatgacccataaaaatctaactgctcctccctgatctttccagcttcgccttactcctgtctcctctttacttactaccctgcatctaagatggcttccctttgagtttctacaatacaccaaaatctcctacctcagagattttgttccctctatctgaaatactcttctctggaccctttggctggctggctgctccttcatgttttgggttcagttgtcacttccttaaaaaagggtttcttgggccgggcacagtggctcacagctgtaatcccagcactttgggaggccgaggtgggtggatcataaggtcaggagatcaagaccatcctggccaacacggtgaaaccttgg

SEQ ID NO: 104262 - DNA, 360 bp, Homo sapiens
  misc_feature (1)...(360): n = a,t,c or g
ttttatgagcatagatattaatgatnnnnangtcttcttgtataactgacttctttatctttatgaaatctcttcatcccctgtatctttccttgacctaaaacctgatttatctaaatttaaaatagctagcccatatttcttttgattagggctagaatggcatatattcctccatacctttatatttaatgtatttgcatctttcagtttaaaatggttttcatgtacacattgctgggccttgttttatttgttggtttttttttttttgaaacaaatttttgctttgttgcccaggctaaaaagagggggcccaatttgggttcactgaagcctccgcttcccggtaaaagtaat

SEQ ID NO: 104263 - DNA, 341 bp, Homo sapiens
gcttgaacccaggagggcagaggttgcagtgagctgagatagcgccactgcattccagcctgggcaacagagtgagaccctctctcacaaaaaaaaaaaaaaaaaaaaaaaaagggaaaaaaaaaaaatttttccgcctggacccccaaaaaaggggaaaaaaaccggggttgggggcccttaggaaaaaaaacaaaggggccaacctttattgttttaaagccccaaaaagagaccaaaaatttttgggtaaaaaaaatttttaggggaaaaggggggaaaactttccaaatttgggggaagaaacctggcccagttcaaaaaccctaggggaatcccac

SEQ ID NO: 104264 - DNA, 495 bp, Homo sapiens
  misc_feature (1)...(495): n = a,t,c or g
agggcgcnngnagnngccccaatcggagaccntnatagagngccgtggaattcttattcttttttaaaaaaggcttaaacaattatggagactgataactcccaaaatgtgcagacccaggaaagccaatgtgtatagtccaagtttaaaggcctgagaatgaagagagcagatgctgtcagttctagtccaaaagcaggaaagctcagtcctccaaaagagctgatgtttcagtctgagaccacaggccggaaaagaccaaaagctcaacatgtcaggcaggagaagttcccttacttgggctttttgttccattcaggtcttccactgattgggtaaggcccgcctttattaggaagggcaatctgccctactcagtctaccaattcaaacatcaatcccgtttggaaacaccctcacagacatacccaagataatgtttggcctaatgcctggtcaccccatggcccagtcaagttgatgcataaattaatt

SEQ ID NO: 104265 - DNA, 485 bp, Homo sapiens
  misc_feature (1)...(485): n = a,t,c or g
cccgccgccccccccatcgannnccntnnatagtagaccactagtccagagcggaggaattcgctgaggtaggagggtcagtagggtccaagagattgaggctgcattgagccatgatcgtgccactgcactccagtctgggtgacagagcaagactctgtctcaaaaaaagaaaaaaaaaaggatttaattctgcatgtctgccctgctgggtttcaaatttacatggggcttatttttttttttttttggcccaattcccccttttgggaggggaaaggcctcccaaatttttgccccccctttttttttggaaagaaaaaacctggtttttttttttatagcctcatacctaaaagaaactggcctgagctttcaagaaaacgggttttggaactttaaagttagggcggggacaagtaaaaatttttgaaactcctgaaaaaaaaggacttttggaaaaaaaatataagtggggggggagg

SEQ ID NO: 104266 - DNA, 420 bp, Homo sapiens
ataggagtcttcactggagagtaggctggaatttcgcagatagtggagacaaagactgataattacgggctgggacaattttggaggtattttgggtcaggcttagagatctaggttttaagcaaaccggtctttggtgtgtgcgtgtatatgtgtgtgtgtgtgtgtgtgtatgtgtgtgtgtgtgtgtgtgtgtgtgtgtttccaacactccttggtaggtgtttgtgtttggagcttccagcgcaaggtgctgcctttgagagcttctgcttacttttccaatgaccggaaccaggaagaggtgaagcttggtcattacacaatgcattgtgactcagtgacctcactacttcctgttttcatttgaaaagggggccaatggaagggaccatttcagtacaaggccatgaataggga

SEQ ID NO: 104267 - DNA, 540 bp, Homo sapiens
  misc_feature (1)...(540): n = a,t,c or g
agcccgtgcnnnaatcgaacactactcgagagngctgtaattcctgctgaggaggctgaggcgggagagtcgattaaacccaggaggcggagaggcggaggtgcggtgagctgagatgacaccactgcactccagcctgggcgatagcgtgagactcctcaaaaacgatgaaaaaaaaaaaaaaaaactacaaccagggtttccttgccattattccaagcccgggccctttctttccaaaaaaaaacactgttaaaaattgataatatatccttccagccctttttttatgtatttacatgaaaaaatatatgggactttttttttttttaaaagggtctccttttttccccaaaagggggggggggggggggaattttcctttatggaacctttggcttccaaaaaaagaaaaccccccccttttgccccccaaaaaaggggggaaaacgggccattccccccccccggggaaaattattgtattttttttggggaaaaaaattttgcccattctccccggctttattttaattccgg

SEQ ID NO: 104268 - DNA, 854 bp, Homo sapiens
  misc_feature (1)...(854): n = a,t,c or g
aaaaaataaataaataaaaccaccagcaccacaaacaacaacaaaaagttattttgtacttgttttgagcacaggactcctgagggtatctttgcatttaatattacataggggtgccagtgggaagtaatgtgtatgcttggcctcatgagctaaaaccctgtgttaattatgacagaaggaaagtgtgtgagagagatcttaactacctagcagctctagctgccatcttgaaccatgaagatacgggccacacgtaggggtagctgggtagtgagcagcaagaagccttgttggatgagggcacgaaggagcagaatcactggaatcactgtgtcagccctaattacctacctctggacttttatgtgaggggaaaaaaaattgacagtttatatttatctcaacctagttaacccaagtgatgcattgttatgagattaaaatgtttggaggccgggtgcggtggctcacgcctataatcccagccctttgggaggccaaggcgggcggatcccaaggtcaggagatcaagcccatcctggctaacatggtgaaaccccgtctctactaaaaatacaaaaaaaattagccgggcgtggtggcgggcgctgtagtcccagctactcgggaggctgaggcaggagaatggagtgaacccgggagcagagcttgcagtgagctgagattgtgccactgcacttccagcctggggtgacaaagactccatcttcaaaaaaaaaagaggtcccgggggatatccttattattgaaaacaaaattgaaccatgccagcctgagttgttaattgggangaaccaagggggcacgtcttatttttggttctttnttgg

SEQ ID NO: 104269 - DNA, 446 bp, Homo sapiens
  misc_feature (1)...(446): n = a,t,c or g
catcgattgaggactattagtccagngcggtggaattcgggaggctgaagctggagaattgcttgaactcagaagacagaggctgcactgagccgagatggtgccattgcactccagcctgggcaacaagagtgaaactccatctcaaaaaaaaaaaaacccccccccacccaccaggttttccccaggtccccgttgggggggcagggggaaacatgtatgcacaggggggcactcacccccaggctggcttaggttatggggaccccacatcttcaaacacacaaatcaccttcccattgacctttgcacagagtggtgggggaacacggggggttttacaaacccccatggccgggacacaaaactccccattaggacaattccggtgggtttttaaaaaaagcccttttttccttgaaaccagccggtggtccagccattag

SEQ ID NO: 104270 - DNA, 383 bp, Homo sapiens
gcgcctgtaatcccagctactccggaggctgagttaggagaatcgcttgaatctgggagtgtcggaggttgcagtgagtcaagatcgccacggcactgcagcctggcaacagaacgagaccccgtctcaaaaaaaaaaaaaaaagggggggccgtttttaaagaatcccggggggggccaagttttcccggggctggaaagttttagcttctccccttatggggggcggttttaaaaccatcgtggggatttttgagagggacctttttttggggggggggagataagggaccaacttccctccaaatattaaggggcgtagggaaaaaaaaaaattttaaggggcatgggggtgaaacaaagcggtctggcgggggggttgg

SEQ ID NO: 104271 - DNA, 398 bp, Homo sapiens
  misc_feature (1)...(398): n = a,t,c or g
caagtcttcccccaacacccagctttactgaggtataaatgacaaataaaacttgtatacaggaggctgaggcaggagaattgcttgaacccagagacagaggttgtagtgagccgagatcgagccattgcactccagcctgggcgaaagagtgagactgtcttaaaacaaaacttgtatatatttttggtgtacaacatgattcaataaacatctacactgtgaaatgataccncacacaaaaacaaaaggatgaaaagaaacaaaaaaaagggggggggggccttttaaaaaaaacctggggggggcccaatttaacgggggttggaaaaatttttttttttttttttgggggggggaatatataccctgtgggggggtttgggggagagaacttt

SEQ ID NO: 104272 - DNA, 389 bp, Homo sapiens
  misc_feature (1)...(389): n = a,t,c or g
gagatgattgtatatgtgttggtttcgtccagggttcctagctcataactcacatgaccatggttacagtcttacgttgtcatgttggggtgcctcaggcctcaaaaaacagcctttcgtctctctgaaaaaaaaaaaaaaaaaaaaaaaaaaaaaaaaaaaaaaaaaaaaaaaaaaaaaaaaaaaaaaaaaaaaaaaaaaaannnngggggggggcgcttaaaaaaaaaccttggggggggcccatatatcccggtggaaaaaaaattttttttttttttttaagggggggctaataaaaaaacccgcgtggtttttaaaaaaaaatactttttttggggggggggttataggccaccccccccccacacaaaatattagctttaagg

SEQ ID NO: 104273 - DNA, 463 bp, Homo sapiens
gactgtaccctatgcagggatggattacataagaaaagatggagggcattaatgaaaacattgtacaagcaggttaagtgcagatgttagtccaatgtgtttcttgtactggcttcaccaaggctctgtgattggaaggggtggaaaacatttcacctggaacacagaaggtgcccagttaatatttgttgggtggttgaatttactgggaggacatagttcaaggaatagttgcagacagactgacatctcgtaaacacaattctaaatttctaggagagtgtctcatgtttgggcaaggttttttgttttttgagatggattctcactctgctgcccgggctggagtgcagtggcgcagtcttggctcgctgcggcctctgcctcctgggttcaagtgattctgctgccttcaagtgattctcctgctttagcctcccgagtagatgagattgcaggcgtg

SEQ ID NO: 104274 - DNA, 410 bp, Homo sapiens
  misc_feature (1)...(410): n = a,t,c or g
ggaggatcacttgagcctgggaggctcgttctgtattgagctgtgactgcgccactgtantccagcctgggcgacagagggagaccctgtctcaaaaaaaaaaaaaaaggggggggcccctttttgggttttccggtttttttccggttagggggcccacccacccaattgaccggcgtttcttttgaaaaccgctttttgggaaaatatttgaaaaaaaaggggggctgcccccatagagggggtcctttttttttttgggggggccccccccccctaccagaaaggttttttaccggtttttcttttggggcccctccaaaaaaccttttttcccttgttttttatttccaaggcccagggataatgggagcgttaaaaaagccttaggagggggggggacaggtttt

SEQ ID NO: 104275 - DNA, 410 bp, Homo sapiens
gcgaaaaattagctgggcatggtggtgtacacctgtggtctcagctacacgggaggctagaaccatgttcacgacactgcactccagcctgggcgacagaacgagactccgtctccataaaaaaaaaaaaaaaatttgaaattatgtcttctacaaatacacattatttttttaattgctggcattttgtaaaccgcacaagaaaaacagattttgcctcaaatggtaaaagtattaaaaatatctgatgtccctgcttttgggctgaagcaggtgttcgagggacaaaaatcattcttccttgtaatactcaaagatacccagggaaaatgattggggcttgggttttattattataaacccttaatattttctttttttatagccttattttccttattaatagactt

SEQ ID NO: 104276 - DNA, 385 bp, Homo sapiens
tctcaaactcctgacctcgtgatctgccagcctcagcttcccaaagtgctgggattacagtcgtgagccaccacacccagcctatttcagtattttaaagtgtctttcatcagcgttttatggttttcaatatacaaatcttttacataatttgataggtttatacttgagtattcatgatttttagtgctattgtaaattgtaaataatactgttttaaagtttttaatattcagttcattgctgttatatgaaactgactgatttttctatatttccttttgtatcctgtgatcttcctaaactcacttacttgttctagtagcttttttttttttttttggcaaatttcggggaattttcggcaaaaacatttatgtggccc

SEQ ID NO: 104277 - DNA, 366 bp, Homo sapiens
ttttgatcatactacgggacacttattttacgagcatggacttaaccaaacaaagcgaactactattctcgatggagacaatatcgtgaccaacggaacaagccaccctagggataacggcgcagccctatgctagagaccataccagcaatagggataacgacctccatgttggatcaggacatcccgatggtgctggcgctattataggttcgatggctcgacgattaaagtcctacgtgatctgagttcagaccggagtaatccagggcgggttctatctacttcaaattcctccctgtacgaaaggacaagagaaataaggcctacttcacaaagcgccttcccccgtaaatgatatcatcg

SEQ ID NO: 104278 - DNA, 700 bp, Homo sapiens
gttcctctgtcacacagcaggacaagccactgctcagactcccactttattcttagcatctgtgggggcaggaaggacacaagagacgctggggcctcaccagctcctccagcttgaagatcagagagaagatcaagatgaagaggacagctgaggatttggtcattgtgtacctggaagcaaaattacccacaatgcactgctggagctcagggctcagacccatccccgagaaaggagcaggagcacaaatcactgagcgaaatgaccaaacagagctgggctgtcatctgagtgataagcgacctttaatcagaaggaatctctgactaagaggcctctggttatcaccagagagaagaggttacaggtctgacgttgagctccctgagtcctgttctttacctaaccctcggcagagcccaggagcgggaaggaaggatgagaagtaggaggacaagaaggcaggaacagtgctctctgaagcaaaacatcagagggaagaagaaactcttgtgtagcccccaggccacatagggctctgctgcggctgcgtgtaccacccaccagtggccacctgtctgtggccttgcagcctgccttcccctgctctgatgatggggttctgggagagctccctggcttccccacgctgcctggcaggtgggcacagcatctcctctgcgctgggcttacggaa

SEQ ID NO: 104279 - DNA, 403 bp, Homo sapiens
ggagcctgaggcgggagaatcgcttgagcccggtaggcagaggttgcagtgggccgagattgtgctactgcactccagcctgggtgacaaagcgagactccgtctcaaaaaaaaaaaaaaagcctggagggaaaacgtgcttgcggggccaccatgccggggtgtcactttatccacccttttgctcctccccatgactggaaaaggaccccctttttatagcaaatcccccctccttgtttacaagctgggggacctggggcaagaaacttgaactttctgggcctttcgctgaaaaagggaaatattaacataatagtccttccctgctaggggagctgagtgcttgaaaggacacctcaggcgtgggacaattttttagcccagggcccgggggggaaaa

SEQ ID NO: 104280 - DNA, 406 bp, Homo sapiens
tgcagaattatccatgggctcaagcaagagatgaaaaatcatattctccccaaaatgggaaaatcagtgctaccaggggcccaaagggatgttcaggttacatctgtcaggattaataccataacagaggaccatctttggagcacagtggggctcacctccgattctggtgagtcatgtggatgacatcagagacaagcattacccaaaatgagcatcccaataagactttcatgtgagatggtattagaagactttctttcttttttttttttttttttgaaacaaagtttggttttgttgccaaggttggagggcaggggcacaatttgggttaatgtgaacctccacctcccaggttccagggattctcccgcctcggcctcccaagtagctgggataacag

SEQ ID NO: 104281 - DNA, 420 bp, Homo sapiens
  misc_feature (1)...(420): n = a,t,c or g
gcacaagaatcacttgaacctgggtggtggaggttgcagtgaggcggaggttgcagtgagccgagaccatgccactgcactccagtctgggagacagagtgagactgtttcaaaaagaaaaaaaaagaaaagaaaaacagaaaaataaagtagggtaagaaggataaagaatactggtgaagggaattatgatatattgatgtcttataaaaggagggaaagcctgtctgataaggtgatatttgagcaaagaactgaaggaattgagaaagtgagccatttatacatccagggaagagcatgccaagcttcaagtgcagtgacaaattcaaaggaacttgtcatgtttaaggaatagtaaggaaattagtaaggttacactagagtgaaggaaggggcatatgataagaaaagagctcn

SEQ ID NO: 104282 - DNA, 397 bp, Homo sapiens
cttgttctcagttctttttggtgtacacttagaaatggaattgctggatcatatggtaattttgtgtttaacttcttgaggacctccgaacaattttccacctcggctgaaccattttacattcccaccaacaaaacaaaacaaaagggtatacagttggaaagtggagtgttttttttgtatggccagcatcatactatataccatgaaagacagagtaatactctgtagttttttgctttcactaagcttaagttatattaggaaaacaaggttcagacacgtgaaataaaggaagaacagttaaattagccaaatattaatataatttattggtataagatagaatattgttatagatagaaatttctatcatacatggtaggggaattaatgg

SEQ ID NO: 104283 - DNA, 392 bp, Homo sapiens
actagccaccagtccagactaattttgtatttttagtagagacgggtttctccagttggtcaggcttgtcttgaactcccaacctcgggtgatcctcccgcctcggcctcccaaagtgagccaccgcacctggctgataatcagtttttcaatcaagttgctgaattactacattcaattctttttgccagatcttgttttacttactggtatctacattgaaaataatttcatcttggttatgccacttttccttcagtgcgcctgttttctcttttgtaaaactggaaattttactaggtcccctgtaaggctcttttagttctgaaatttaataattatatagacaaaaatgagaagaaaatgctttctgtttaactaaaatgatgtta

SEQ ID NO: 104284 - DNA, 390 bp, Homo sapiens
  misc_feature (1)...(390): n = a,t,c or g
ggaggctgaagcaggacaatcgctcgtacccggtatgcggaggttgcagtgagcggagggcgcgccattgcactccaacctgggcaacagagcgagactctgtctcaaaaaaaaaaaacaaaacttttcccccggttttttaaaataggggattggaatttggtaaacaaaaaaatttctaaccccccaatcttacaaaaatgggtcataaaaaaaaactttttggctaaggggaggcccctattgataaaaggactggtctatgtaaaaaggggttgggcttttgggctgaaaaaaggcctttataagtaccaatgcacgccagcctttgaatagctgaaatattaaaacacctgacctctaaacggtaaagggggctgaataaaacan

SEQ ID NO: 104285 - DNA, 403 bp, Homo sapiens
  misc_feature (1)...(403): n = a,t,c or g
tgttagataaataacttgcaaatactttcttccattctgtagattttctgttcactctgctgattatttcttttgcagggcagaaactttttaatttaattaagtccaatatttttgtcattgcttttgaggtcttactcatgttttttgtgtagaccaatgtccaggacagttttctttatgttttctcctagtatttttatagttttgggtctttaatccactttgggttgatttttgtgtatggcgagagatgggagtctagtttcattgttatgcatgtgactatccaactttcccagcaccacttgtttaagagggtgtcctttccccagtgtaaattcttattatccttgctggagatcattttagctttatttggtggntctctattctgttccat

SEQ ID NO: 104286 - DNA, 431 bp, Homo sapiens
  misc_feature (1)...(431): n = a,t,c or g
tttcgtgtggagatggggtttttcgccgngttgttcaggctgttctcgaactcccgacctcaggtgatccgcccgcctcggcctcccagagtgctgggattaccgctgagccaccacgcctggcctgtatgtgtttttaaaatcacaatgagaaattaaaaaataaaatgaaaataagaaatgcttagcatataagaaagtgaagcatcgaagcccacgaagatacagcgagtttgcttactcccagcttgtctggcactgtccagatcttactgccgatagccctgcaccctgagtataacctcagtcccaggcacaccaggtgttcggatattctatatgaaaaccagagcatttaaagaaatggtgtaaacagaataaaggtattttgttgaaagtaaagnataatgctatccttacttggtaatccc

SEQ ID NO: 104287 - DNA, 469 bp, Homo sapiens
  misc_feature (1)...(469): n = a,t,c or g
catagattagctgtgcgcangcaccnaccggnccggaattcccgnnncaaccacttcgtaaagaagatagatatagatgatagattagacagatgatatataaatagatgatagataaattgatggatgatagatagatagatagatagatagatagatagatagatagatagatgagacatagatagtctcaagtacccattacttaccacccttgaggggatttaaaagaagtaagaggattagacttttctttttactaaaaagataatgatgacagccatgtggaaaatagatgataaagctgcgtacactcaggaaaagctggtgaggaggggcttgacctatatggttgtgacagtgggagaggaatggacaaattcaggaagtggaagagacaaggcctggagattgagtgtatgcaggggatgaagagaagtgggagtccaggctgagcaggtgggaaatt

SEQ ID NO: 104288 - DNA, 394 bp, Homo sapiens
  misc_feature (1)...(394): n = a,t,c or g
tttcgtctcagnnnaggtctgttggagtactgggccctgtgaggtgtcagtgtgcccctgctggggggtgactcccagttaggctgctcaggggtcaggggtcagggacccacttgaggaggcagtctgccggttcccatatctccagctgtgtactgggagaaccactgctctcttcaaagctgtcagacagggacatttaagtctgcagaggttactgctgtctttttgtttggctgtgccctgcccccataggtggagcctacagaggcaggcaggcctcctggagctgtggtgggctccacccagttcgagctttatgctgctttgtttacctaaggaagcctgggcaatggngggcgcccctcccccagcctcgctgccgcctttgagt

SEQ ID NO: 104289 - DNA, 406 bp, Homo sapiens
  misc_feature (1)...(406): n = a,t,c or g
tttcgtctcctgacctcatgatccacccgcctcggcctcccaaagtgctgggattgcgggcgtgagccaccgcgcccggccacttctaagggttttaaataaatgagacaaatagggcatgagactggatggcttgaagttatataagaaggtggtgaagtttgtggtccagtcctaggtcttcatactaaaactccggggtgcattccactgtaaactaatgatgtttatgaattctctcgagttctgttaggtgctttatatgcattatcgttgatgctcatgacaacttttccagggaggtattgtctttcttttactaaagaaacaatgggctgagggtgtaaacggggcactacccacatctgggggcaaaaatttgatccaggcctgcctgaaacagctn

SEQ ID NO: 104290 - DNA, 497 bp, Homo sapiens
  misc_feature (1)...(497): n = a,t,c or g
gagagnntnagnnngccatcgagnnccntncgngttattgatgtcgttccgctgcagcccggacccaagcttccggctaacgccaccctgccgaagcttcacaaagctcttgcgctatatttttcacttccatcagaccatgtccgttcttctctaaactggttattctagttagcactttgcctaacctgttttcaaggttcttagcttccttgcattgggttagaacatgctcctttataaagctcggaggagtttgttattacccaccttctgaagcctacttctatcagttcgtcagactcattcttcatccagttttgttcccttggtgttgaggagttgtgatcctttggagaagaggcattctggtttttgggattttcaccctttttgcattggtttctccccatcttcttgagtgtttctacgtttggtctttgaagttggtgaccttcagatggagtgtctgagtggatgtcctttttgttgaagtn

SEQ ID NO: 104291 - DNA, 424 bp, Homo sapiens
ctcgtgtctgcatttgtcagagctctgccctgaggagtagtttaccatattgagttacctagcaattttccttgaatcctgatctacagagtagagttggaaggggagtaggaataactgggattactgtcagaaaaaaatcacatcctttcatctcaaatatattgggctttcaaagaaaatttgtctctttttccgggctcctcaatttttaggtaattatgattggctaaatctttttttttttttttttttttttttaaaaaaaggggcctttgttcacccccccggggggggggggggggcccaaaaaaaacccccgggccccttgaaccccggggggcaaagggattcctcctttttcccccccccgggggggggaaataccggcgaaaccccccctggcgggtaatttttttttttt

SEQ ID NO: 104292 - DNA, 419 bp, Homo sapiens
cagggtttcgccatgttgcctaggctggtctcgactcctgatctcgggtgatctgcctgcctccgcctcccaaagtgctgggattacaggcatgagccactcacctggcctttattacccctattttaaaaggtagtgactcaacagaagatgtctctgaatttctagtgagtttatatgggcaaaattttgtcctacctttattctctcctatcctttagaagattctcccatgcttacatttgcagagactgggaaaataataaccattcctgtttctctcctcaccaaccatcttttctttcattcattcatttatctattcatctagtcagcaaatattttttggattgccttaatccttatcatttattcaaaattaatgggagaagattctgaaagggttctgtttttctctg

SEQ ID NO: 104293 - DNA, 406 bp, Homo sapiens
cggacgcgtgggcgggaagcagaggttgctgtgggctgagattgcgccactgcactccagcctgggcgacagagtgagattgtgtctgggggaaaaaaagaaagaaagaaaagaaaaatggcctcttgggccaggtcctgggagctcgagggaggtgacggcatggagccaggacccggagacgtcacttctgatggaagtccgcacgcccagagacaggccaggccctcagtgtgcaagtcaccagccttctctcctttccagacaggctttgccctgtggccccggccctgcctggtgcacctcccgtttgcctcactggtcaactcctgggggctgttttgcgctcccccagtgcagggtcccagactgcacgcctcacagtgccacacgtctgcacgcctct

SEQ ID NO: 104294 - DNA, 406 bp, Homo sapiens
cgtacagatggggttttggtgtggatgtcctttctgtttgttagttttccttctaacagtcaggaccctcagctgcaggtctgttggaatttgctggaggtccactccagaccctgtttgcctgggtatcagcagtggaggctgcataacagtggatattggtgaacagcaaatgttgctacctgattattcctctggaagttttgtctcagaggagtacccggccatgtgaggtgtcagtctgcccttactggggggtgcctcccagttaggctcctcgggggtcagggacccacttgaggaggcagtctgtctgttctcagatctccagctgcgtgctgggagaaccactactctcttcaaagctgtcagacagggacatttacgtctgcagaggattctgctg

SEQ ID NO: 104295 - DNA, 411 bp, Homo sapiens
  misc_feature (1)...(411): n = a,t,c or g
ctataatctgcaaaagaagaaatcaaacgtcactctagccttgtgtgtacacatggatttgcccacacttactgctctactaaatttcctacagaatgagaaatcagaatctaccgtggacagcaaggaggcatcccttgcattgagttgaaagagtgcctttctcagctcaatgaaagaccccttgagctctgtctccatttcaggtttgtgtaaggaggctagaaaattagaaaagataatgaaattaaacaatgacaaactttgcctcagggcctctctccagtctatcctgttaaaatagtgtttcccaaacttgcctcgtaagattcagctaggtgtgggggcgtgtgcctgtagtcccagctgctcangagactgaggcaggaggatggcttgaggccattatga

SEQ ID NO: 104296 - DNA, 390 bp, Homo sapiens
ttcctcctctcttggcagggcatctctgaaagaaaggcagaagccccagtcaggggcttatagataaaactcccatctgcctgggacagagcacctgagggaaggggcagctgtggatgcatcttcagcagacttaaatgttcctgcctgctggctctgaagagagcagcagatctcccaacacagcgctcgagctctgctaagggaaagactgcctcttcaagtgggtccctgattccggtgcctcctgactgggagacacctcccagcaggggccgacagacacctcatacaggacagctctggcttgcatctggcaggtgcccctctggaacgaagcttccagaggaaggaacaggcagcaatctttgctgttctgcagtctttgct

SEQ ID NO: 104297 - DNA, 392 bp, Homo sapiens
aaaaccaccataactattacgaagttatttacctgaagccatggggcaaagcggagctaactgaaacctctgagggaattgggaatccaactcctttattcataaagagcagagtcaaaaggaaaggcacatcccatggaagacaaaggagatattaataaagaaaaaagtcaaaatactaggattatctgaatgtgtgacttatagtcagtaatcaaactgtactgatattcctggtggaggcaaatgcactccgttgctcacgctggggtgcagtggtgtgatcagtctcactgcagcctcagcctcctgggttcaagtgatcctcctgcctcagcctctttagcagctagaaccacaggcgcaggccaccacaaccagctaattttctt

SEQ ID NO: 104298 - DNA, 379 bp, Homo sapiens
gtggtagcatgcacctgtggtcccggctgcttgggaggcggagatgggagggttacttgagtgaatcaaggctgcagtgagccataattgtgccactgcactccagcctgagtgacagggtgagactccatctcaaaaataataataataataataataataggatcacgtgatcctggtaacacaaatatctttattagagtgttcaaatttgttaagcatcacttagcaagttgagaagactaatggaatccataaatatacacaccgttggtgagcctgaaactaaaatgtgtatctcaaccagttcacccactgctacaacgttgctaatatcagaggataggatagagaggaaatgcaaagctaagcaagcttt

SEQ ID NO: 104299 - DNA, 391 bp, Homo sapiens
  misc_feature (1)...(391): n = a,t,c or g
aaaannnnnacgagataaccatatgttttggtgcttgcctgtagtcccagctactctggaggctaaggggggaggatcacttgagcctgagaggcgaaggttgcaatgacctgagatcatgccacactgcactacagtctgggaaacagagaccttgtctcaaaaaaaaataataactacacctaagcacttacaccattattttaagtcctgattactttaaggccataccacatgagtgctgaagatctgagtttaaaattggaaaaggtgttcctataattgcctggagaaaaaccaataattgcccagagaaaaaccacttgcagaagctatgaaaaaccaagttagattcctactaatcagccacgtcagtagctgatttcaaaac

SEQ ID NO: 104300 - DNA, 409 bp, Homo sapiens
  misc_feature (1)...(409): n = a,t,c or g
aatcacttgaactctggaggtggatgttgcagtgagctgagattgtgccactgcactccagactgggcgacagagcacaactctgtctcaaaaaaaaaaatattttgataaaaattgggttgaatctgtagatgaatttggggaaatagtataactttaagcattataagtttcatttaaagaaagtttggaagtttgtaaagtgaaaaagagtttaatgttgggggttttttaattaggtaagcatataggtctcacttggtcttccaaatctgtcaaaggaatgggggcaggctctcctaaagccagaggcagccgcggtagaggaactaggaagctggtgcaccactgaacaaagatagagtgtttctcagggctgcataagacactcactgtggccaactcaggn

SEQ ID NO: 104301 - DNA, 470 bp, Homo sapiens
  misc_feature (1)...(470): n = a,t,c or g
agagtcccnnnattgannccattgtagacatctggaagngcggnggaattcctgggagagagagaagcttaatgttgatattcatcagagatgagccccttggcatnnnagcctgagacttatcagaaaagcttggccgttgcacacgcattgcctcaaggagctgtgacacagccaagtcctccagagataccaaaaggtgatgaatttggatgaatatgcattgcgggaggtctcagcctggaaagttgataggaaatccctgggctccaaggaagaggaatgcttgcacagacgtgatgaaaatttagacagggcctcactgtgttacccaggctggagtgcagtggtgcaatcacagctcactgcagcctcgacttcgcaggcttaagcacatctcccacctcagtttcccaagtatctgggaccacagggacatggatgaagctggaaaccatcatcctcagcaa

SEQ ID NO: 104302 - DNA, 393 bp, Homo sapiens
  misc_feature (1)...(393): n = a,t,c or g
taggggggctctttccactgtaccatgtgactatttgcagcttattttaaatttaatatttgaccaaaaatggtcattcgtatctctagtgaaacttctctatatgccagtcttcctcttcagatgaaaggtcaaaggcagaaatggagccacagcccaaaaaaaaaaaaaaaaaaaaaaaaaaaaaaaaaaaaaaaaaaaaaaaaaaaaaaaaaaaaaaaannngggggggccccctttaaaaaaaaaaataattctgcccccgggggggaaaaattttttttttttttttgggccccaaaaaaacctccccgggggggggtttttaacccggggggggggggaaacccccccccccccccaaaatgagcggtgtggggggncaaggtgtaa

SEQ ID NO: 104303 - DNA, 428 bp, Homo sapiens
agttagattgtcattagtttaaaataatgggttataaggtgttatttgcaagcctcatggtaacctcaggtcagaaaaatacaataaatacgcaacatgtataaagcaagaaattaaaacgtaccaccagagaaaaacactgacatgagaaggaagagaagaccataaaacaaccagaaaacaaataacaaaatggtgggagtaagtttttacctatcaataataatattgaatgtaaatgagctaaatgctccaatccaaagacatagagtggctgaatggattaaaaaggaaaaaaaaaaaaaaaaagcccagggatttgtggcctacaacaaacactttttttttatgaagacccccagacccacttagactgaaaatagggggatggaaaagtattacccttccagggggacccaaattaaagg

SEQ ID NO: 104304 - DNA, 410 bp, Homo sapiens
cgtctggcagaatttcacagtgtttaaaaggaatgatttttaatgaggcaacagagacacagggttcacacagacaaggcagagagagataacagaccttggccagcacctgctccccccaggctctgttgcgtgtgcgcaggagggtcacacggagacgctggctcacacgtgagctcggtcttcctgggggctacacacggctgtgccagttgcctttttctctttacggtttctcttggagatttttctagatcgggacacaaggtgctctcctcccgctgcttttttttttgaaacagggtcttgctgtgtcgctcaggctggagggcaggggggccatcacagctcaatgcagcctcaatctcctgggctcaagcaatcctcccacctcagcctcccgagtagct

SEQ ID NO: 104305 - DNA, 390 bp, Homo sapiens
ccaagagccatccagcgtcagtcctctctgggtagcccaagtaaagcaggagcataccccagagagaaagttcgcagggctgttcacctgcagtgctgtggacttcaaccttcttgttccttcttcagtaagtgaaaataacagtcattgaccatgactattatcgaccgcttttgaaaatgtaaacatagtgactttattgctgtaaaaatcatacgtgtttatcatcttaaaattcaggaaacatggacaggtacaaagatgtgcaaaatatcatccaaaatcccatttgctggccaggcacggtggctcacgcctgtaatcccagcacattgggaggccgaggcgggcaaatccttgaggtcaggagtttgagaccagcctggccaa

SEQ ID NO: 104306 - DNA, 283 bp, Homo sapiens
ctgacatggagaattgcttgggccctggaggcagtggttgtagtgagctgagatcacaccactgtactccagcctgggcgacagagagactccgtctcaaaaaaaaaaaaaaaaaaaaagttggggggggaatggtatttggaacaaaaaaaccccttaaaaaaccccccgggtggggtggaaaggggccttaaacaaattttggggtttaaaccccccaccccaggggtccgggcccccgggggtttttcccaaaaaattttggccttccaacaaatttttg

SEQ ID NO: 104307 - DNA, 412 bp, Homo sapiens
gatgacttgggcctgggaggttgaggctgcagtgagctgagatggtgccactgcactctatcctgggtgacagagtgagaccctgtcaaaaaaaaaaaaattttttttttttttgcttgggcccccacccagggggaggggcccatatgggggaaccttttaaaaaaaaaaaacattttgggtaaaaataatggccactaaaaaaaaggcccatttggaaccaaattttcggccggccttaaaaaaaaaggaaggggggggggggccaaaaaaaaagggaaagggcccggcccttggttttggaatgggaataaaagggaaccaaaaagggttaattttttattttggagcttaaaattcctttacccattcccaacaaaggtgaaccaagggagggaaaactatttttgtt

SEQ ID NO: 104308 - DNA, 419 bp, Homo sapiens
tactttatgaacaggcttaaatttcttttgttacagaatgggttatgaataaggagaggctccggcctattatttttaaaaactacattattactttgttgagagagacacactataggggctcgtcacagacgcatcacacctatagttctaacgctttgggagacccatagaggcctactgcttgagcctaggaataccacaccagcctggtcacctgtggcaacccttgtgtctacagaagcaataataaacttaaccaaaccagcagaagaaaagtaataacaaagatcagagcagaacttaatgaaatcgaaacagaaaaatacaagggagtggtgaaacaaaaatctggttctttgaaaagataaacaagactggtctcgaacttctgggctcaagcgatcctcccgtctggg

SEQ ID NO: 104309 - DNA, 408 bp, Homo sapiens
ctaaagcattgtccccaaaagctttttgtataagcatcaataatttcacaattcttccatccatgcttcaccaccaatttgatgtttgttcttgcttcaattttagcagaattcatattactctgagaggggctcttttttcttttcttttcttttctttttttttttttgaaagcgaggtttttttttccctaaaatgggggggcagggggcaatttatccttcattgggcctttttttcccgggcttaaggagacccccctccctcgccccccagaggggtgggactttgagaccccccccacaaatcgggtttattttttgttttttttggggggatagaggatttccccgtgtggcccgcttggtcttctactccggggcctaaagaaaaagccccccctcccc

SEQ ID NO: 104310 - DNA, 409 bp, Homo sapiens
cggacgcgtgggagtttgaggatatttgcttttcagttgtctaagtctgagacggatattaatctgtggtgctatgtagtgctttcagttaaagaaatatgtagaggttatataacattctaatttcccacatctgcatactcactttcagtaccaaggtaccatgctgacttgttcagttgatgatgtgacaggatggggtgatctgtgatatctttccctctctgtgagggacacaattgcatttaggtggcttctttttctcagagaaagaactctccttttgtttttggtttattttgctttatttgagatggaggcttgctctgtcacccaggatggagtgcagtggcacagtcttggctcactgcaacctccgcctcccaggtacaagcaattcttcagcctt

SEQ ID NO: 104311 - DNA, 401 bp, Homo sapiens
tgcagtttccactgtctccacctttccaacatcatctgaccactctgcccctctgagagctctggaaacacacttatggcatccagtgacccctcaacccctgccgttcccccgccaaacacaacccaccctcctctctgcctctcaaagtcccatcttcccctgaggcccaagcagggccttccttcaggcaaccttctccaactacccctcaccctcctgatcccccttttgggggctcctgtggcctgttggcagctgccacaacagtgtaccctaagtacttttttttttgagacaaagtctcaccctgtcgcccaggctggagtgcagtggtgctgtctcggctcactgcaacctctgtctcccgggttcaagagattctcctgactcggcctgcc

SEQ ID NO: 104312 - DNA, 414 bp, Homo sapiens
  misc_feature (1)...(414): n = a,t,c or g
agaaaaaaaannnaatggcttgagcctggtatgcagagtttgtagtgagctgagatcatgccactgcactcgagcctgggtgacagagccagaccttgtctcaaaaaaagaaaaaaaccaaaaaaaccccagacaccaaaaaccagccaaccaaccaaagttatttactgttaatttatttaaaaatagcaataataaacccattacatgctaacataaatgacatttttaatgaaaataactatctttcggaacaagaagagtatgagaagagtggcatttgttatagttttgcaaatatctttaatgtctagcttaatagaaaatagctggattctcatatctgctactgcattcagtgttgtgatatgttgttttgcttgaagcatatggagaaaatctggcctcacccaa

SEQ ID NO: 104313 - DNA, 462 bp, Homo sapiens
  misc_feature (1)...(462): n = a,t,c or g
attgaacctcgaaccgtcggaannggnncngaantcccgggtcgacgcacgcgtccgcggacgcgtgggaaaaaacaaacccgtaccctagttgctgccaaagccgtcaagtggcgttgagagaaactagcccaagaactttcagagaagagcaaaatcaagataatttctgaggaaggagccagagccctcacctgagagctgccctcctctggatttctcatttagtcgggccataaactccccttgtattatttgaactttttaagtggagtttctattactcacaataaaagcttcccagctgatacaaatggcttccagatgaacatggaaaaaagtctaaactttctttttcttcttttttgagacaaagtctcgctgtgacatacaggctggagtgcagtggtgcgatctctgctcactgccaccttcatcttcctgattcaagcgattgtcccn

SEQ ID NO: 104314 - DNA, 387 bp, Homo sapiens
cggacgcgtgggcggacgcgtgggggaggatcgcttgagcctagcacgttgaggctgcaataagccatgtttgcatcactgcactccagcttagatgagagagtgagaccctgtctcaaaataaatagatagataatatatgtcgtagttttaaaaatatattattaagataaaaagcaagccaagacaattaagtgggggaagaatagtttttccaacaaatggtgctggaacaactgcatagccacaggaaaaagaatgaagttagatcccctacctcacaccatataaaaaaataactcaaaatggattaaagacctaagtataagctgagacaagaagattacttgaggcttggagttcaagaccagcctgggcaacatattg

SEQ ID NO: 104315 - DNA, 256 bp, Homo sapiens
ggaaagaaggccttaaggtctggggcttttggaagaaggtagaacttgagctaagtttgaagatgagttggatttaggtaggtgaagagcctggcggggttgctgatgcctgtaatcccagcactttggggaggctgaggtgggaagatcccttgagcccaggagtttgaggttatagtgagctgtgactgtgccattgcactctagcctgggtgacagagtaagaccttgtctcttaaaaaaaaaaaaaaggggg

SEQ ID NO: 104316 - DNA, 401 bp, Homo sapiens
aaataattatgacagagctgagactcagatatatcagtacatgtgcttgaacccaaccttctattgccttcaagagacccatctcacatgtaatgacatctatagactcaaagtaaagggaaggagagagatcatgcaaatagaaaacaaaagagtaggagttgctattcttgtatcagataaaacagactttaaaccaacaacagtaaaaaaaaaattgcattatataataaagggttcaattcaaccagaagatttaattattctatgtacatactcacccaacatcagagcatccagatttataaaacgaataccagacctaagaaaagagatagcgatacagtaaaagtaggggatttcagtatctcattaaacagactatcaaggcagaatactaa

SEQ ID NO: 104317 - DNA, 389 bp, Homo sapiens
ggagaatcgcttgagcccgggaggtggaggttgcagtgagccgagatcccgccactgcactccagcctgggctacagagcaaaactctgcctcaaaaaaaaaaaaaaaaattatcccaccctttgataggcccagcagggaacacatcggttaagctttgttaaccccatacttattggattatggaaaccttttacggggggggtttactttaatcctttcatagaaaaaaaccggcagaaaaaaattaattatctttccgggatcctaaggtaccaaattaaaaaatatactggggggaaaaaggattcccaattcacaacaaaatccagggcccatgaaggaataaccctcacaaaaaatgcgcaaaccctgtatgaaaagaaatg

SEQ ID NO: 104318 - DNA, 402 bp, Homo sapiens
  misc_feature (1)...(402): n = a,t,c or g
gaccggtaggggtgctgttgccattatgtttgaccccgacccccggtaccctcgctcctggatcgaggacgacttcaactatggcggcagcgtggcctccgccaccgtgcacattcgaatgggttcattggtggaaaacaacaaatcatgaagctactaaaaaattatgtgagaaggcccgtcgggcaagtgaggaacgcctctgccggccgccgccctgtctgggaagtgaggagttcctctgcccggccgtccaactgactgggatgtgaggagcgcctctgacccgccgctgcccggtctgggaagtgagcagcgcctctgcccggccgccaccctgtctgcgaagtgagcagagcctatgcccgccccaccccctcaccggntgggatgttaggagcc

SEQ ID NO: 104319 - DNA, 409 bp, Homo sapiens
agttttccttctaacagtcaggaccctcatctgcaggtctgttggagtttggtggaggtccactccagaccttgtttgcctgggtatcagcagcggaggctgcagaacagccaatattggtttataccaaatgttgctgcctgatcattcctctggaagtttttgtctcagaggagtacctggccatgtgaggtgtcagtctgcccctactggggggtccctcccagttaggctactcgagggtcagggacccacttgaggaggcagtgtgtccgttctcagatctccagctgcatgctgggagaaccactactctcttcaaagctgtcagacaggtacatttaattctgcagagatttctgctgcgttttgtttggttatgccctgcccccagaggtgagtctacaga

SEQ ID NO: 104320 - DNA, 405 bp, Homo sapiens
ccaggaggcttgctccctggcagagctgctgagtcctctgtcttctatttattcactttttgaagaaccctgaattaaaggcctgtctaaccactgcactccagcctggcgacagagtgaggctctgtctcaaaaaaaaaaaataaataaataaaataccctatgcttatgcaattttaaacacaacttgcaaagcttcgggtactcgcttcctgaggctgccataacaaaggactacaaactggggggttaaaaacaatgggaatgttctctcacagggccaaagagaaaccaaagtctggaatcaaggtgtcctcagggctgggggggaaaatccaccctctcccaggaattccttgggtgggggccacatcactccactgggcttccatcttcacgtagcct

SEQ ID NO: 104321 - DNA, 408 bp, Homo sapiens
aggagagtctcttgagcccgggaggtggaggttgcagtgagctgagatggcaccacagcaccccagcctgggtgacagagcaggactccgtttccaaaaaaaaaaaattgtttttgagagagacagaactagacagagaagaaggagaaaaggggtcttctttatacactattttgtaacttgctttatcgagtaggttatgaaaaatcttcctatgtgaaaaacatttctgcatcatttgaaatgtctatataatatcccattgggtttagatacaataatatttagccaatctctttatgtgtatatatttaatacagtcattctataaatattgactgagtagctgctgtgggctactgtccgcagtgctgaacaagacaagcatgaatccatgaaactgatttt

SEQ ID NO: 104322 - DNA, 397 bp, Homo sapiens
  misc_feature (1)...(397): n = a,t,c or g
ttgggcccggaaggtggaggttgcagtgagcagagatcgtgcccttgcactccatcctgggcaacagagcgagactctttctcaaaaaaaaaaaaaaaaaccggccctaaaaaaaaatttggtttcctccctaccaaagatgggaaggaaaaagggaattcccctataaacttgaaaatctggagttctaagcccggccaaacactaacaagttttttaactttaaaaaggcatggtttcctaatggacccccactttctttctttaaaaaagcctaatatttcggcgaggggtggctttaattttgggtggggaaaaaccaggggggaaaaggggggggaaccccttacccagaggggggggaaaggggcctaatccctccctccaacaaaaaaan

SEQ ID NO: 104323 - DNA, 398 bp, Homo sapiens
tccagaccttgtttgcctgggtatcagcagcagaggctgcagaacagcgaatattgctaaacagaaaatgttgctgcctgatcgttcctctggaagcttcgtctcagaggggtacccagccatgtgaggtgtcagtctgcccctactggggggtgcctcccagttaggctacttgggggtcagggacccacttgaggaggcagtctgtccgttctcagatctccagctgcctgctgggagaaccactactctcttcaaagctgtcagacagggacatttaaatctgcagaggtttctgctgccttttgttcagctatgccctgcctccagaggtggagtctacagaggcaggcaggcatccttgagctgtggtgggctccacccagttcgagcttccc

SEQ ID NO: 104324 - DNA, 411 bp, Homo sapiens
  misc_feature (1)...(411): n = a,t,c or g
aacgttctgtgctatctcttggcttgagtcgggggtggaggacggacctcggtcacggatttcttaccgaatttctactttctttttttttttcaaaggggcccctgaacccaaggaagtcaggggccgcccgaaaccaggattggcccccacttccttgcccggggcacatggaacaacagggctaagtgggtggacaacccccagcattggagggtggcagccaccgccccccccaagggaaaacccaaaaggggagcaccctcctgctccggtggcgggggatacctttcaggccaaaaaagcccccaccgatcctcaaggttttttttccaaaataaaagccttttaggaaaaaacgaccatagnacctgctctaaccggggtggaattatactgaatcaccacaan

SEQ ID NO: 104325 - DNA, 412 bp, Homo sapiens
acacacctgtagtcccagctactctataggctgaggcaggaggatcatttgagcccagaagtttgagactgtattgagctatgatcacaccactgcactccagcctgggagacaaagggcgaccctgtgtctacaaataaagcaaaagctaacaaataaaaaacccttcaattttctgttcataagttacctacaaagaatacaaaaaaaattattgtccagtcatgtatcaacagaactgacattgttctgttgatacatgactggacaatgtcagttctgtgtgtgtggtttttgtttttttaactgtttttaaaactcagcatttatttactgagccctaaatacagacataaccaggctaggtcaggtatatttttcttcagatggtaaaacaaagcactattacttt

SEQ ID NO: 104326 - DNA, 388 bp, Homo sapiens
gagaattgcttgaacctgggaggtggaggttgcagtgagccgagatcgagcattgcactccagcctaggtgacagagcaagacttggtttcaaaaaataaaaataaaaaaataataattctaagcatgttgcttccagagtctgccatttcttccatttttggtatttttctaacagtggttttgtgctctcacctgtgaggattaagagcctgggataaaactcattttcagtctaaagatttaaactcatttgaattgagtagatgcttttgtgatgtctgcatctctcctgacttaatagttcccttcttcacattacttaatctgtccttttggttagaagatcatgctcttacctaaagatagaaggaagcaaaatgaacatg

SEQ ID NO: 104327 - DNA, 414 bp, Homo sapiens
accacgttggtcaggctggtctggaactcctgatccactcccctcggcctcccagagtgataggattataggcgtgagccactgcatccagccaggagcacttcttcaaatgtgcttttgttaaatgaaccttataagaaaaattctgtaagccaagtaaaccttaggattgcctggacactaatggattctatggttaggcattggggtaaaggtcgggcactaagaactccttggaatttatactaggagtgtatggtccaacccatttaagaacctctgtacttgttagcatagcttttttactagcttcttattatacttttgttaactttggtattttcaggctatacatcatcttaacacctcatttttacattacatataccataatgttaaactttagcattaagg

SEQ ID NO: 104328 - DNA, 423 bp, Homo sapiens
caggaccccgagctgctgtcggtgatccgacataaggagaaggatctggtgatggcggcccggctggatgaggctctgcttgggaggaaccaggacatgagccggcagtacgagcagatgcataaggagctgtcagacttgctcgagcacttagagcaggagaattgcttgaacccagggggcagaggttgcagtgagccacaatcgtgccactgcactccagcctgggtgacagagactcaaaaaaaatagcatttagcagctgtggttgggtcatccccttatattcagcagtagtaacctccccagagagttgtaccctattgtgaactgcacacaaaaggggccatggagaatgcagtggggtagaaggggtgaacatcagcatggagagagaaggaaaagacactgtccacatttctg

SEQ ID NO: 104329 - DNA, 404 bp, Homo sapiens
  misc_feature (1)...(404): n = a,t,c or g
caccacgcctggactataaaacttttaaattcagatcaggaaaaaaaaatgtcttgagtccaacatcccagagaaaaccacatggtgattggtcctgctgccatctcactgatgacgatcatagctcactacagcttcaaacccctgaactcaagtgatcctcccgcctcagcctcttgagtagctaggattaccagtgcacaccatgaagtccaactaccattatcatctttgtcaccatcaccatcatcttcagcatcatcaccatcatcatcactgtcattgtcattatcactctcacaccacaattcccagcatcctcctcctcctcctcctcctcctcctcctcatnatnatcatcatcatcatcaccacctacctgggggaactgggatggctctctt

SEQ ID NO: 104330 - DNA, 426 bp, Homo sapiens
cttttaagtgctattatggactctttcatctacataatgcacgagttctggatgtctaacatgaagctgaaaggaagactaaggatatgctataactatcttatgggatattttataaataaaattccatttgcatagcatggaacgcacacatctgtttctatggaattgttgggctcataaacaacgcaattgttttaaggcggattttgttattactgatgacattaaacaactatgtccccctcaaagttggtggacaagggctggaaaactaccccttggagccggacgtggtggctcacatatgttatcccatcacttttggaggccgaggcacgcggatatcttgtatttaggagttctagaccaacctggccaacagggtgaaaccccatctctactaaaaatacaaaaagtagctgg

SEQ ID NO: 104331 - DNA, 418 bp, Homo sapiens
aggagatttgcttgaacctgggaggtggaggttgtggtgagctgagatcgcaccactgcactccagcctgggcgacagagctagaccctgtctcaaaaaaaaaggtttctccctaccccatagtgacaacttaattaaacataaaagtcactgtgcatgtaggaacattaaaaaagaaaataaaagataaaagaaaaaacataaaagggtttgaagtcaatgtggcagaataaattggtatgtcaatacaacaggctattacacagaagtatacaaactattgatacacatgactatggatagttttcaacggtattaaggctgagtgattaaaaccaagttcaacagtgaaacacccgctctactaataatacaaaaaaaaaaaaaaggggcggccgtttaaagggatccagcctta

SEQ ID NO: 104332 - DNA, 415 bp, Homo sapiens
  misc_feature (1)...(415): n = a,t,c or g
aaaacaaaaattagccaggcgtggttgcacacgtccgtagtcctggctacttggtaggctgaggtgggatgatggcttgagcctggaaggcaacagttgcagtgagctgtgcactccagcctgggtggcagaaccagatcctgtcttgaaaaaaaaaaaaaaaaaaaaaaaaaaaagggggggcggctaaaaaaaaaaaaattttaatggcgggggggggggggaaaaacttttttttttggggcccccatattttattaaggggggggggttttaaaaccccggggggggaaaaaaccggggggggcccaaattaaagggttggggggaaaaccccttttttcccggggggggaaaaaaaaaaaaagccgtnnnnnnnnnnnnnnnnnnnnnnnnnnnnntccccccnnnnnat

SEQ ID NO: 104333 - DNA, 409 bp, Homo sapiens
gaaggagaatcacttgaacccgggaggtggaggttgcagggagctgagatcgtgccactgcactccagcctgggcgacagagcgaaactccgtctcaaaaaaaaaaaaaaaaaactttattgggatgggtaaaaaaagtaaatgtgaggggtttttattcttggaataaagactctaaggggtttgttttttccaaaaattaaagcttggggaggcctcctttaaaaaaaaaatccctgggggtcccaaaaatccctgaaatagggaaaggaaaactgggtggttcacccggggacccccccaatacgggtgggttgcgttattgcggtaggatggaaagaggccacgacccctatatgagtatgataaacgtagggggaatccttctttttatttataaaaggaacca

SEQ ID NO: 104334 - DNA, 431 bp, Homo sapiens
gaaggagaatcacttgaacccgggaggtggaggttgcagtgagctgagatcgtgccactgcactccagcctgggcgacagagcgaaactccgtctcaaaaaaaaaaaaaaaaaactttatggggcgggggttaaaagggaaagggccgggttttttaccccctgaaaaaaaacctccaggggctgggtttttcccaaaaacaaaccttgggtaaaattcctttaaaaaaaaaattctccggggcccctaaaacccttgtatttggttaggggaaatttggccactcttcctgggtcccggccaattctgttgggtctcttttttgcagttggttggaaacaggccccacccccctcttaaatttgccaccgggagggaggagcccctttccttattcttaagagggcccccaaaacagaattcgggttgtt

SEQ ID NO: 104335 - DNA, 397 bp, Homo sapiens
gaaggagaatcacttgaacccgggaggtggaggttgctgtgagctgagatcgtgccactgcactccagcctgggcgacagagcgaaactccgtctcaaaaaaaaaaaaaaaaaatttaatggggagggggttaaaagggaaagggtggggtggttaaccattggaaaagaagcctcaaggggttggttttttccaaaaagtaaacctggagtaaaatttttttaagaaaaaaattttgctgggccctacaaaccctttttttttatgaaggaaaatttgggccctattcttgggtcccccccaaaagggtggggccctttttttgaatttggttggaaaagggcccaaccccccattttaattggcacccggagggggggggcgccgcccttttttc

SEQ ID NO: 104336 - DNA, 410 bp, Homo sapiens
gaaggagaatcacttgaacccgggaggtggaggttgcagtgagctgagatcgtgccactgcactccagcctgggcgacagagcgaaactccgtctcaaaaaaaaaaaaaaaaaactttagggggggggggttaaaagggaaagggcggggtgtttaacccctggaaaaaaaactaacaggggttgggtttttccaaaaaataaacctggggaaaaattcctttaaaaaaaaaattttccggggccctaaaaaacctggaatttggttagggaaaatttggcccttaaccctgggtcccgcccaaaatggtggggcttgttttttgcatttggttggaaaagggcccaaaccccccaataaaattgccaccgggggggggggggcccaccctttattcttaagagggaacg

SEQ ID NO: 104337 - DNA, 416 bp, Homo sapiens
gaaggagaatcacttgaacccgggaggtggaggttgcagtgagctgagatcgtgccactgcgctccagcctgggcgacagagcgaaactccgtctcaaaaaaaaaaaaaaaaaactttatggggtgggggttaaaagggaaagggcggggtgtttaaccctttaaaaaaaaagctccaggggttggttttttccaaaaaataaacctggggaaaaattcttttaaaaaaaaaatttgtgggggccctaaaaattcttttttttggttagggaaaatttggcccttatcccggggtcccgcccaaaatgggggggcccgttttttgcttttggttggaaaagggcccaaccccccatttaaatttgccaccgggggggggggcccccatcctttttttttaagggggaaccaaaaaa

SEQ ID NO: 104338 - DNA, 414 bp, Homo sapiens
gaaggagaatcacttgaacccgggaggtggaggttgcagtgagctgagatcgtgccactgcactccagcctgggcgacagagcgaaactccgtctcaaaaaaaaaaaaaaaaaacctaaggggggcgggtgtaacaacagaaagggggggtggttaagtcctggaaaaaaaacttccaggggttgggtttttccaaaaaaccaaccgggggagaaactacttttaaaaaaaaattctacggggcccctataaacccggaaattggttaagggaaattttgcccctcttccttgtttccggccaatactgttgggtctttttcttgcttttggtttgaaacaggcccaaacccccacatgatattgccaccaggagtgaggagcgccagtcctttcttctcaggaggaaccacag

SEQ ID NO: 104339 - DNA, 419 bp, Homo sapiens
tgaggagaatcacttgaacccgggaggtggaggttgcagtgagctgagatcgtgccactgcactccagcctgggcgacagagcgaaactccgtctcaaaaaaaaaaaaaaaaaattttagggggcgggggaaaaaaaggaaaggggggggtggttaacccctgaaaaaaaaacttacaggggttggttttttccaaaaaataaacccggggtaaaattcctttaaaaaaaaaatttcccggggcccttagaaaccttgtatttggttaggggaaatttggcccctcacccggggtcccgcccaaaagggtggggcctctttttggcgtttggttggaaaagggcccaaacccccacataaaattggcagaggggggggggagcccacctccttattcttaggggggcccaagccaagtt

SEQ ID NO: 104340 - DNA, 406 bp, Homo sapiens
gaaggagaatcacttgaacccgggaggtggaggttgcagagagctgaaatcgtgccactgcactccagcctgggcgacagagcgaaactccgtctcaaaaaaaaaaaaaaaaaattttggggtcaggggtgtaaaaaagaatgggaaggtgttctaatgctttgattaaaagatctggggggttgggttttgccaaaaaataaaccttgtgtaaaatgcctttaaaaaaaaaactatcctgggcccttgaaacccgagaatttcagtaaggggaaacttgtgctcctttccgtggccccgcccaagatggttggattaaattttgaaatttggttggaaacgggcccaaccccccacataaattttccaccggggggggggggccctaccccttattcttaaaggg

SEQ ID NO: 104341 - DNA, 406 bp, Homo sapiens
  misc_feature (1)...(406): n = a,t,c or g
ccactccagaccctgtttgcctgggtatcaccagtggaagctgcagaacagcaaatattgcagaatggcaaatgttgctgcctgatccttcctctggaagcttcatctcagaagggcacctggctgtatgaggtgtcggttggcccctcctgggaggtgtctcccaattagactactcaggtgtcagggacccacttgaggaggcagtctgtccattctcaggtcccaaactacatgctgggagaaccactactctcttcaaagctgtcagacagggacatttaagtctgcagaagtttctgctgccgtttgttcaactatgccctgcccccagtactggagtccaggaaggcaggcaggcctccttgagctttggtgggctccacccagttcagtcttcccggcn

SEQ ID NO: 104342 - DNA, 469 bp, Homo sapiens
  misc_feature (1)...(469): n = a,t,c or g
agagtgccgnnnnntttgaaaactgagtacatcgcccanngcgnggaattcggacaaatgaggcacttgaggaccagagacattagataacttgcccaaactcacacagctagtacttgctcaagccaggacaaagaagaaatcacttctgtcctctaaactactcggggaagtcatcatgtaagtggaccatttgaatgcccagcatcttataaaactcattccatgctatttgcaatgttatgacatctttaagtatttccttttgatgaagaagaaactgaggcacacccatgccctggcttccattactcgcatcaccttcctatggccaatgtagcctctcccttttcctcctgctgaggtcagttcctccatagcctggacagcattggaagaaatctgaggacttctgctttctctggttcccacacagcgagaacgtcagtgccatccaccaggaccacac

SEQ ID NO: 104343 - DNA, 491 bp, Homo sapiens
  misc_feature (1)...(491): n = a,t,c or g
cgtgtcacnnnagggggnaatggaaaccnctnnanaatgatgatcgttaggaccancacnacgccaagcttggccgaggcggctactcgggaggctgaggcgggagaatcatttggatttgggaggcggaggttgcagtgagctgagagcacgccgctgcattccagtctgggtgacagagccaggttccgtctcaaaaaaaaaaaaaaaaaaaaagacccggggtttttttttttttttttccccttaaaaaaaaaaaattttttttttttttggggggaagggggaaaaatttttgtttttggggaaaactgggaaaatccaaaaaagcccaaaaaaaaaggggttttttgcccccccccaccccattttaaaaaaaattgggggggaaatttttccactttttttttttttttttttttaacaaaaaaacgggccttaaaaaaaataggggtttaaacaaaataaaaagaatcttataagggttttta

SEQ ID NO: 104344 - DNA, 446 bp, Homo sapiens
  misc_feature (1)...(446): n = a,t,c or g
ncttgattaccgttacgaccatgantannnaagcttggcacgaggccggaaatgctgctgcctgatcgttcctctggaagttttgtctcaaaggagtacctgggtgtgtgaggtgtcagtccgcccctactggggggtgcctcccaattaggctactcgggggtcaggtacccacttgaggagacagtctgcccgttctcagatctcaagctgcgtgcagggagaaccactactctcttcaaagctgtcagacggggacatttaagtctgcagaggttactgccgccttctgtttgtctgtgccctgcccccagaggtgaagcctacagaggcaggcaggcctccttgagctgtggtgggctccacccagttcgagcttcccggccgctttgtttacctactcaagccttggcaatggtgggcgcccctcccccaggctcactgcc

SEQ ID NO: 104345 - DNA, 482 bp, Homo sapiens
  misc_feature (1)...(482): n = a,t,c or g
ngatgcgtggaaactgaaagctgncgtacttgaacctntcgaanangacaaagggaggcgactgtgccacccacttgcgagcctcaatcccttccaatctgcactggtcattgggaattgtgtaaacacctgtggggataagctgaggtgactaaatgatatatttatattgnaagattaaactgactttcttggccttaacaaggtccttatataaaatttccaccccgcccctccatagttcaggatagaggctcccacggcagccggtaaggaagtgggtggcaggtgtgaggggatgctgtgtttggggggttgtttccaagtccctgcaaagaagcaccactctagactggcaagggcctccacagcgtggaggtcccattttattattttttttttttgagacactttgtcacccaggctggagggcaatggtgaaatctcggctcactgcgacctctgcctcccaggttcaaacn

SEQ ID NO: 104346 - DNA, 488 bp, Homo sapiens
  misc_feature (1)...(488): n = a,t,c or g
aggcttttcaaggggccnagggnatcgtagaccatcgtagaccactaggcagtgcggtggaattcataagttatatgcaaatatacaccattttatatctgggacttgagcatccctggattttggtatccatcgggatcctggaccctatccctggtgaatactgaggaacaactgtactctttccttgttgcttctctgtaaccacttgaatctctcagatccccattggggcccttgtcttggaggacagcctcttcagtgtccccagttatatgtatatattatatatatatatatatatatatatatacacacacacactatatatacacacacacacacacacacacacacacacacacacacaatatatatttgtgtgtgttgtgtttttaaaagacagagtcttactctgtcacccacgccagagtgcaggggcgcgatcttggcccactagaacttccgcctcccaaagacaagagatg

SEQ ID NO: 104347 - DNA, 471 bp, Homo sapiens
  misc_feature (1)...(471): n = a,t,c or g
agtgaggggncnnnncctagtaccatgcnatctgngaaancgagnnanatgcnnggngagatctgatggtttaaaaaaacaagaggtcccctgcacaatctctctctttgcctgctgccattcatgcaagatgtgacttgctcctttttgccttctgccatgattgtgaggcctccccagccacgtggaactgtgagtccagttaaaccttttcttttataaattgcccagtcttgggtatgtctttatcagcagtgtgaaaatggactaatacagctatgttttattttttattttcttagggatagagtcttgctcagtccattctcagctggagtacagtggcacaatcatagctcactgcagcttcaaactcctggactgaagcaatcctcccacctcagcctcccacctcagcctccccagtagctgggactacaggcatgcgttatcatgccaggctgatttttn

SEQ ID NO: 104348 - DNA, 342 bp, Homo sapiens
tcaaggtgttggctagggcacgctgtcatctggagctcaggtcctcattggtagaattgaatccattgtggttgtgggactgaaaccctgggctcttggaggctgcccctccccacgggcagttcattggctgcttgcttcttcagattggagaccatctcttcaggacggtgcggagggatggaaaaagggagaggcaaatggaaatcacaaaagagcatagcggttatatcagaccaaatagatttcaagaccaaaactataaaaggagaccaaaaaaagtcattatgtaatgataaaggggccaattcagcaagaggctataactattataaatatatg

SEQ ID NO: 104349 - DNA, 499 bp, Homo sapiens
  misc_feature (1)...(499): n = a,t,c or g
cccccccctttgaaaatttgatgtccttagncagngcggnggaattcagagagagagggagagagaaagagagagagaaagaaaggaagacagaggaaagaatggaagacagagagaggaaggcagagagagagagggagaaagaaagacaggaaggcagagagagagagagagagaaaggaagacagagagagagagagaggaagagagagagagagaggaagagagagagagagctcatgagccaggatccctggggaatttgaagtcagtgtgaccagggttctgtgtctctggggtcagagctgggacacaggacccagcaggagggccaccaccccttttttttggaaacagctgtggttccaagcagctatcatgtaagaggatcggcgctttgtctgatgatgcacacacaatatgctgatggtgtacggtgagatattgtgaacgcaacatctggatctgttattggcgtgtgtgagtgtgtacctgccgt

SEQ ID NO: 104350 - DNA, 305 bp, Homo sapiens
gcttcgtgggatgaccctgcccataataataatttccatatccccggcggagtagtagcacacttttttttttgccgcctccttgactgtccgccatgggctccccggccaccggcgccacggggctcctcctcctgctgctgctgctgctgctgctgccgccgcgtctcggccggaaaaaaaaagggctgaggaaaacgtgggggcgatacccccgcggaaaaggccaccccggtgggaggagaggagggggccccgaaaaggctctgccccccccggcagaggtgccggtcgacgcgcccgca

SEQ ID NO: 104351 - DNA, 364 bp, Homo sapiens
gtggtggcacatgcatgtacctgtggtcctagctatttgggaggctgaggtggaaggattgcttgggcccacgaggtcaaggctgcagtgaaccctgatcatgcccactgcactccagcatgggcaacagagctagacttacctgcctccaaaaaaaaaaaaaaaaaaaatagcccatggacccccggtatatactggtaccccatatttggcaaaaaggggggaaacctaattccctacccctttttttttttttttttccaaaataatttaaaaaaaaacccaacctggtctttcccttcccacaaagtccagtaggcttcggaaataggggcaaatattggccattttgcttttgaggaaa

SEQ ID NO: 104352 - DNA, 485 bp, Homo sapiens
  misc_feature (1)...(485): n = a,t,c or g
ggaggtcnnacactgatcgctttgagaacntccacgaggaacaagttaccctatggataacagcgcaatcctattctagagtccatatcaacaatagggtttacgacctcgatgttggatcaggacatcccgatggtgcagccgctattaaaggttcgtttgttcaacgattaaagtcctacgtgatctgagttcagaccggagtaatccaggtcggtttctatctacttcaaattcctccctgtacgaaaggacaagagaaataaggcctacttcacaaagcgccttcccccgtaaatgatatcatctcaacttagtattatacccacacccacccaagaacagggtttgttaaaaaaaaaaaaaaaagaattttgggggggggcgcgggccccaattcgccttatagggagccgtgtaaaatttctgtggccgccgtttaaaaccgttgtgaatgggaaaaaanctttgaaactcttaagtcn

SEQ ID NO: 104353 - DNA, 420 bp, Homo sapiens
ggcctttgttctttgatgacggtgacgtacaggtagggttttgtagtggatgtcctttctgtttgttggttttctttctaacaggaccctcagctgcaggtctgttggagtttgctggaggtccactccagaccctgtttgcctgggaatcagcagtggaggctgcagaacagcgaatattgctgaacagcaaatgttgctgcctgatcgttcctctggaggtttcctctcagaggggtacctggccatgtgaggtgtcagtctgcccctactggggggtgcctcccagttaggctactcaggggtcagggacccactcgaggacgcggtctgtctgttgtcagatctcaaactctgtgctgggagaaccactgctctcttcaaagctgtcagacagggacatttaagtctgcagaggtt

SEQ ID NO: 104354 - DNA, 429 bp, Homo sapiens
  misc_feature (1)...(429): n = a,t,c or g
aaaaaacgctgaggctggatgctgtggcttatgcctgtaatcccagcactttgataggccagggcgagcggagcatttgagtcaggagttagagaccagcaaaaaaattggctgggtgtgtttgcgggcacctgtaatccctcagggaggctgaggcaggagaatctcttgaacctggaggatggaggttgcagagagccgaaatcgtgccacctcactccactctgggtgatatagggagactctgtctcaccaaaaaaaaacattataccttggaattttgaaccaaagcaccggttgttatttaacaacttaccgtnggagccctctactgctccctttgaaaaacaatcaagaattttttgataaaggaaccggggacaatacggaaaaaaaggcccttgatttttttctttttttatgttgggg

SEQ ID NO: 104355 - DNA, 424 bp, Homo sapiens
acaagggaaggagaatcacttgaacccgggaggtggaggttgcagagagctgagatcgtgccactgcactccagcctgggcgacagagcgaaactccgtctcaaaaaaaaaaaaaaacttttagggggaggggggtaaaagggaaaaggtcgggttgtttaccccttgaatacgggcctccgggggttgggtttttcccaaaaatcaccccggggaaaaattccttttaaaaaaaaaatttccggggcccctaaaaacctggaatttggttaggggaaattttgcccctcaccccgggttccgccccatccggtggggcctcttttttccattttgttggaaacgggcccaaacccccccttgaattttccaccggggggggggggccccatcccttattcttttggggggccccaccccagtt

SEQ ID NO: 104356 - DNA, 402 bp, Homo sapiens
cacaaataaattaaggaattccagaatttcttcatctacttctgcagtcttaactctgaattaatgactgtatatatcaaacttcagatcttagaaaacatcagctcgcaagaggctgaggcaggagaatgacatgaacctgggaggcggagcttgcagtaagccgagactgagccactgcactccagcctgggcaatagagcaagactccatctcaaaaaaaaaaaaagggggggccctttaaagagttcccttgggggggccaactttacccggggtttgaagggcaaaagttttccctttatggggggtggattaacaccctcctggggatttttgggaaggaaccttttcttggggggggggactacttggcacacccccctaccggagattcaaccg

SEQ ID NO: 104357 - DNA, 416 bp, Homo sapiens
  misc_feature (1)...(416): n = a,t,c or g
cacaaataaattaaggaattccagaatttcttcatctacttctgcagtcttaactctgaattaatgactgggtatatcaaacttcagatcttaggaaacatcagctcgcaagaggctgaggcaggagaatgacatgaacctgggaggcggagcttgcagtaagccgagactgagccactgcactccagcctgggcaatagagcaagactccatctcaaaaaaaaaaaaagggggggccctttaaagagaacccttgggggggccaaatttacccggtgctggaaaggtattatttttctccttatagggggcggaaaaacacccacctggggattttttgggaggaaccttttttttggggggggcacattattgcacaacccccctccaaagataaaaccgtttggggaaaaaan

SEQ ID NO: 104358 - DNA, 410 bp, Homo sapiens
  misc_feature (1)...(410): n = a,t,c or g
gtgaggagcgtctctgcccggccgccccgtctgagaagtgaagagcccctccgcccggcagccgccccgtctgggaagtgaggagcatctccgcccggcagccgccccgtcagggagggaggtgggggggcagcccccgcccggccagccgccctgtccgggaggtgaggggcacctccgcccggcagccccgactgggaagtgaggagcccctctgcccggcagccaccccgtctgggaggtgaacccaacagctcattgagaaccggccatgatgacgatggcggttttgtctaataaaaagggggaaatgtggggaaaagatagagaaatcanattgttgctgtgtctgtgtagagggaagtagacaggggagactccattttgttctgtactaagaaaaattcttn

SEQ ID NO: 104359 - DNA, 484 bp, Homo sapiens
  misc_feature (1)...(484): n = a,t,c or g
agcntttgaaaccgtctcgagagctatcggaccgcacantccgggtcgacccaccgcggccgatccacgcgttcgggtcttagtgtctacattaacaggagtttttaagaagttgatttcaaccctgatggatgactttaaggggttcaagccttcagtgtaggaagtaactacacatatggtggaaatagcccgagaactagaattagaagtgcagcctgaagatgtaactggattgctgcaatctcataaaacttgaatggatgaggagttgcttttaatgaatgaacaaagaacgtggtttcttgaggtagaatctagtcctggagaagatgctgtgagcattattcaactggcaacgagggatttagaatatgacttaaacttagttgaaaaaggagcagcgggtctgaaaggaaacactacagttttgaaagaagttctactgtggataaaatactatcacacaacactgcttgctaca

SEQ ID NO: 104360 - DNA, 394 bp, Homo sapiens
tggagacagggttttattttgttggccatgtttggtctccaactcctgacctcgggtggtccgcccacctcgggctcccagtgtgctgggattgcaggcgtgagctacggtgcctggccagttaatcagttttttaccctcctgtgtttaggccccaacatcctgttcttgatctttttttggcaaaaatttggccaaagattgaaattttgcctcctggaccatatattttgctccagttgcaaagtatgacttttatcctttggtcagcagttcccatggtgtttggggcctgaatttgacattcttttttttttttttttttgagagggagtttatctcttttgcccaggctggagggcaggggccctatcttgtcttgccgcaacctctg

SEQ ID NO: 104361 - DNA, 408 bp, Homo sapiens
caaaaagacagcagtaacctctgcagacttaaatgtccctgtctgacagctttgaagagagcagaggttctcccagcgcgcagctggagatctgaggatgggcagactgcctcctcaagtgggtctctgacccctgacccctgagcagcctaactgggaggcaccccccagtaggggcagactgacacctcacacggccgggtactcctctgagacaaaacttccagaggaacgatcagacagcagcattcgcggttcacgaaaaaccactgttctgcagccactgctgctgatacccaggcaaacagggtctggagtggacctctagcaaactccaacagacctgcagctgagggtcctgtctgttagaaggaaaactaacaaacagaaaggacatccacaccaaaa

SEQ ID NO: 104362 - DNA, 455 bp, Homo sapiens
  misc_feature (1)...(455): n = a,t,c or g
gtacccaatttgggcctttgnncatcntnnnnntggaannangcacgagcattctttcaattgctccgttttttaactgctgtttttactccccaacacacagcagtggaaaggagcgtgcattttaaaagagaggggggccggctttctgcaanccctctttttcaccctttgtccatccctactccaacatattgcagtcatgttagagctagggctaaaaggccctaaaagcattcagcctatattctgggtgtttctccaaggaacagagcctcctttcttgtaactcctgtcagatctgcctcccactcctaaagcttttttgtttgcttgtttttgggatggagtctccctctgtcccccacgctggagagtgcagcggcgtgatctctgctcactgcaacctctgccttctgggatctactgattcttctgcttcaccctcccgagta

SEQ ID NO: 104363 - DNA, 405 bp, Homo sapiens
aggagaatcgcttgaacctgggaggcataggttgcaatgagccaagatcacgccactgcactccagcctggtgttagagcaagactccatctcaaaaaaaaaaaaaaaaaaaaaaaaggggggtgggcaacccccaaaaagaaaaaaccctggtaaactttttaaaaaaaaacttttttgggggaaccccttttttgggggggggccaaaaaaaaaaaaccgggaaaaaaaaacccggggttttttccccggggccaattggaaaaagggccccaaacgggtttggtcaacccaaaccggaaaaccctttcccaaaaaaaaaatttttccaggggggacccgggactttattcttgaaccccccacctttggggaaaacaaaagggggggactccttgcccccca

SEQ ID NO: 104364 - DNA, 444 bp, Homo sapiens
  misc_feature (1)...(444): n = a,t,c or g
ggaggcaggagactggcgtgaacccgggaagcggagcttgcagtgagccgagattgcgccactgcagtccgcaggccggcctgggcgacagagcgagactccgtctcanaaaaaaaaaaaaaggaaccttttctgggaaaaaaggcaatattcttgatttgggccttccctaacagggctttacgaaaataaaaaaagcaaagccttcacaaacaaaatctgaaaaatccacaaatattaaaaagggaaaacccctttattaacctgccgtttcaaccaaaaaaaaaaaggatttggaatttttaaaaagggcatttaccaaaaattatttcattttttttatgtaaaaatttgcacttgacaaaattctggacccaacctttcaaatccacttgaaacttttaccctcttaacccttgtccattataacaaaaaacaaattct

SEQ ID NO: 104365 - DNA, 462 bp, Homo sapiens
  misc_feature (1)...(462): n = a,t,c or g
nttgaagccctgaangcctacgagnnnccaactcccgtgtcgcgagaggccggcgagcggcgtgaacccgggaggcggagctttcagtgaacctagatcgcgccactgcactccagcctgggcgagagagcgagactccgtctcaaaaaaaagaagaaaaaaatttaagcatggaaactctttccggaatatctattaagatcctggaaacagatccaaagatcctgtaagttcctgggaacagatttggggaacttggttataaacctttctgtttgcagcagagaaacccaaagctcagagaagttatttgattggcctaagttatattgcttgtcttctaaatagactatctgtcatattcatgggcagatgtcaccatattttcttggtatgacagatttatacctagagagctccaaagatagagtattagccatggtactttttttaagtcaactg

SEQ ID NO: 104366 - DNA, 491 bp, Homo sapiens
gcgcgccattgaaatcgtacgcctgtactaccggcccggaattcccgaatcgacgggaggcaggagggtgagtcacctgagcccgggaggccggtgttgcattgagccgagatcgtgccattgcactccagcctgggcaacaagagcaaaactccatctcaaaaaaaaaaaaaatcatataaaccttagccatttgtaacaaaaaaaaacctggttttcatttttacaaccggcaaagggaaaaccaccagacttccccagggcagtaaaatgtgttgtttcaaaacccacccaaccaaaaaaaaccctcatctccattaggttttttgaggttcctgggggctgaaattgagtaatgtccttaaaaaatccatttccccacagtaggccaactttttgaatcaattctaacccacgatgttggaacagacggccctattttacctcattcttttgcaaggtttccattagggaacggatcccttcatatt

SEQ ID NO: 104367 - DNA, 420 bp, Homo sapiens
ggaggcaggaggccggagaatcgcttgagcccaggaggcataggttgtggtgaacggagaccacaccattgcactccagcttgggtaacagagcaagacttggtctcaaaaaaaaaaaaaaaaaagggggaaagggggctctggttttttgggaaacccagggccggaaccacccttggggttggtttttgggccaaaaaagcggtggaaaaaccctcacctgggggggggcgggggaaaaaaaacaaggctaaaaactttttccgtttgtttccaaaaaagggaaccttctttacccccaaaagagtggaccttggtttccccaccggcacttttaactaacggaaatattttttttttttaaacagggaaaacaaaaacccccttgaattcccaaaaaaccccagggttggggatgat

SEQ ID NO: 104368 - DNA, 404 bp, Homo sapiens
cttgaacccgggaggcattggttgcagtgtgccaagatcgtgttactacactgtagccttggtgacagagtgagactctgtctcaaaaaaaaaaaaaggccacaaattttttccctttttgtcccacagggccggcccctttttgggtccccccctgtggggagaaggggcccacccgcctttgttcccggttttttttgttgccgttgttttgtttttaaaaaagggggtctcattttttggcccgggggggggaaaaactcttgagctaaagggatcccccccacttgggcctccaaaagggttggcttacaggggggacccgctcccctgccgttgtttttatggtctttgcccaaaccctgtgtttttgtgtgtttttccaccccttggccaattccttg

SEQ ID NO: 104369 - DNA, 422 bp, Homo sapiens
  misc_feature (1)...(422): n = a,t,c or g
cctttttataagggcattaatttcattcacgagggcagagcactcatgacttaatcaccaccttgaaggcctcacttcttaacaccatcacattaggtcttaggttataacttgaattttggaggacacaaacattcaaaccatagaaacattattagccatcagggaagtgcaaatccaaaccacattaagaaaccacttcacactcacaggaatggctataataaaaagacagataataacaagtgttggagagaatgtggaaaaattgaaacactcatatgttgctggagggaatgtaaaatgctttgcaatgaagttggaactgctttggaaatagtctggcagttcctccaaagtttaaacatagagttatcatatgacctggcaatgccaggcttcatcatattcccaagggaaan

SEQ ID NO: 104370 - DNA, 418 bp, Homo sapiens
tttcgtaccagtcccattgtgagcactctggaaatagctcagcgtgttcaaggaccaggctgatctgccagtgctgctgttgtcttactgcttctcaattcccacccaagccagggtgaacccagaccacaggagcccctcagctccacctggcctcccggtggctgtcaagatcgggaggactgacctccagcccccaggagatcccaaagctgttctggagcatagaatcacctctgggctcctcaaaacacctgtcactccaggtttttgtttgtttgtttgtttgttcgtttgtttttgagatggagtcttgctctgtcgccaggctggagtgcagcatcgtgatctcggctcacttgcacccttcacctctggggttcaagccattttcatgcttcagcttcccgagtagctg

SEQ ID NO: 104371 - DNA, 426 bp, Homo sapiens
  misc_feature (1)...(426): n = a,t,c or g
gcgcctgtggtcccagctactggggaggctgaggggcttgagccctggaggtggagggttgcagtgagctgaggtcatgccactgcactccaaagcaggactctgtctgacaaagaaaaaaaaaggaggaanggggggggtatgggttttttttaaaaaaccccaacttttaaaaacccccgggggaaatttttcaaaaaaaaaagaaccagggggggggtttttattagggggtccccagggggaaaaaaatttcccccacaaaaaaaacctttttcctttgggaaaaaaaaaaaaatttttttggggggaaaattttcttaaaaaaaaacccctttaatttggggggtatttttgggccaaacctccaaaaagggaccccaagggtttccctcaactcttttgggagggggatcttttaaaaaa

SEQ ID NO: 104372 - DNA, 436 bp, Homo sapiens
  misc_feature (1)...(436): n = a,t,c or g
atgcagtcacagaggtgacagctcatcatattcacagctttctggaattagggcgggggaccttggtggtggtgggaaggacattttcagacttctgcctaccacactgaatatttttgcaggtaaagaaagttatgatgtagtatgtgttacacatgagcgtatgtgtctatgtagtgcctgtttatatatatgtgtctttgcatgtgtgtgcatgtgcttacatacatgaagcgtgtgtcttcatgtgtttgtgtttatacataaaactataggcagcaattacataatagaatgagcatgagcagtggattcagagtccaaacacaactgtggtctagttcacactttgctgtttattagttgtatgactttgggcaattcgtgtagcctcttggagcctcagtttcctcatctgtgtgtgggataagccctn

SEQ ID NO: 104373 - DNA, 431 bp, Homo sapiens
atttgttacataggtaaacttgtgtcatggggctttgttgtacagattgtttcatcacccaggtattattttattttcattttagttttttaaatttctttttagaggcggggtctcactgtgttttgcccaggctggtctcgaactcctcctggtctcaagcaatcctctcgcctctgcctccccaagtgttgggattataggcatgagctactgcactcagcccaccatttgttttaaaaagggtggatcctatttgtataaaaagccatgtgcattttctgtgtacttgtctacacattaatttccaggctgggcgtggtggctcacgcttgtaatcccagcactttgggaggccaaggggaggcagatcatgagggtaggagatcgaaaccatcctggctaaccggtgaaaccccgctctactaaaa

SEQ ID NO: 104374 - DNA, 443 bp, Homo sapiens
  misc_feature (1)...(443): n = a,t,c or g
ttgacctnnnnnnatttatttaccgggtcgacccacgcgtccgcttcagtagacactgtatgttgnattttgttttttggtctttcccaggctcctgatacatgggatgatgctctcttgtgatgttgggcagtggcagtgagccatagttcccattcagtatactgtgttgccaagtggttttccccgactgtaggctaatctaactgatctgagcatgtttaaggtaggctaggtaagctatgatgttcagtaggttaggtgcatgaaatgttcgtttgagactaggtcttgctctgtcacctacactggagtgcaggggtacaatcatggctcactgcaggcttgactttcctgggcttatgcagtcttctcacctgagccacagagtggctggaactacaggcagtgccaccatgcctggctaatttttaaatttttat

SEQ ID NO: 104375 - DNA, 425 bp, Homo sapiens
atgagaactaactaatacagttacccaggctggagtgcagtggtgcactcatagctcgctgcaacttcacatactcctgggctcaggggatcctcccacctcagcctcccaagactcaaaactacaggtgtgtgccatcatgcccagttaaaggccttaattataatccagaagcattgtataatccagtggaaaggaaacaacaacaatatttctgcaatatctagaatattcagttaatcagaaccaaaaatgcccccttcctggataggagactaatttttgtttgcttatttcaaatcatttagatgataaacatttgaaattcttaggcactgcttccttaaaggaggaaagtagtgtctaatactggcaaatatattttctgtcccagtttcccagaaattacaagttaaaaaagaaaa

SEQ ID NO: 104376 - DNA, 407 bp, Homo sapiens
actgagagagccgctgggctgttttgaaggaaggtaagcagagagcatttgtgtgtgtgtgtgtgtgtgcgcgcgcgcatatgtgtatgtgtgtctgtgcctgtgtggagagtgtgtgtgcgcatgtgtgtggcttctgtaatgctacaaagacctgaaactgagctgtgtgcctgctgagatttaccaacttgccaagacttccagaggaaaagagctggtactagccaggaggagagggcgttatggagtggaataatcaccagaacggatgctttaaccgcgcaagaaagaatgtcgctcaagacttgtccaggaatgcctttattggtttgcacgctggaggagtcttaacttactgacttctttttggggaagagacagtgatggtctgacatgctgtttgc

SEQ ID NO: 104377 - DNA, 401 bp, Homo sapiens
tagctgagcatggtggcaggcacctgcaattccatttacttgggaggctgagacaggagaatcgcttgaacccagtaagcacagaggttgcagtgagccaagatcacaccattgcactcaagcctatttctgatacacaaagcaaaaaaagcatgttataaacattataaatagaatgactcaattatttaaaaaatacatgcataagcacatgtgggtgatataagagcagacttacattacctgttaagggagctgagctggaagcttcctgggctatgcctccaggctgtgggctttgaatataatacctttaaattttttttaggctcaaattattataggcatactatataggcgtgaccactgtcacccatgtgtctctgtgagaccaacaccat

SEQ ID NO: 104378 - DNA, 402 bp, Homo sapiens
ctcttggccctgccagactcaccattggctgacattttaccctttggcacgtggtgcctcttgccccacccccagtgaactgtgtgtgtgtgtgtgtgtgtgtgtgtgtgtgtgtgtgtgtgtgtataaatacaccctctctctgtcccccacgcggaggttgcagtgagctgagatcgcgcctctactctccagcctgggccacacagagagactttttttcataaaaaaattaaaagctaaaaaatcccaaaatcaaaacaaaaaaaaaaaaaaaattgggaggggggctctcctataaaaaaccaaacttccccccctcgcactctgggtttttttttttttttttttgtgccaacataaaatatagccgcccgctctttaataaacactggagaaggg

SEQ ID NO: 104379 - DNA, 405 bp, Homo sapiens
ggcctttgcacgacataaatcagaccgactatctctagagtggagagggggataaactcacttgtagcaagtgaaggccagaggctgccctgggatggcattgcctgttcccaggggcttgtggtggtgcagcagacatggggacccctgggccccttcccctccttgctggggatgccacacagacccacgttcagggacctgaattcagagcctgccccaggggtggcgaatgtatctgggacactgagcacccccctaccgggtgcatctcatggccttttggtctttttttttgagacggagtctcactttgttgcccaggctggagtgtcatggggcgatctccgctcactaccacctccgcctcccgggttcaagcaattctcctgtctcagcctccgg

SEQ ID NO: 104380 - DNA, 398 bp, Homo sapiens
gaaggagaatcacttgaacccgggaggtggaggttgcagtgagctgagatcgtgccactgcactccagcctgggcgacagagcgaaactccgtctcaaaaaaaaaaaaaaaaatcttaagggggccggggtaaaaagggaaagggccgggtttttaacccttaaaaaaaggggtggcgggggttggtttttcccaaaaataaaccctggagtaaaatacttttaaaaaaaaaaatcactggggcccttagaatccgggcatttgtgaaaggaaaatgtggcccttcttcctggttcccggccaaacttgtggggccttgtttttggattcgtgtggaaccggctcctcaccccccttaggattgaccaccagtagagggcgccccgcgccctttttcc

SEQ ID NO: 104381 - DNA, 407 bp, Homo sapiens
gaaggagaatcacttgaacccgggaggtggaggttgcagtgagctgagatcgtgccactgcactccagcctgggcgacagagcgaaactccgtctcaaaaaaaaaaaaaaaaaactttggggggcgggggttaaaagggaaagggcggggttgttaacccctggaaaagaggcctacaggggttggtttttcccaaaaaaccacccgggggaaaaattcttttaaaaaaaaaattccccggggccctaagaaccctggaatttggttagggggaatttggcccctcacccggggtcccgcccaaaccggtggggcctgtttttgccttttggttggaaccgggcccaaacccccaattaaattgtcaaccgggaggggggaccccaatcccttattcttaagggggc

SEQ ID NO: 104382 - DNA, 388 bp, Homo sapiens
  misc_feature (1)...(388): n = a,t,c or g
aactggatggagcctatggcagctcaacagggcctgctgcctctgtagactccacctctgggagcagggcatagctgaacaaaaggcagcagaaacttctgcagacttaaacatccctgtctgacagcactgaagacagcagtggttctcccagcatggtgtttgagctctgagaacggacaaactgcctcctcaagtaggtccctaaaccccgtatagcctaactgggagacacctcccagtaggggccaactgacacctcatacaggcaggtgcccctccgggatgaagcttccagaggaaggatcaggcagcaatatttgctgttctgcagcctctgctggtgatacctaggcaaacagggtctggagtcgacctccagcaaacn

SEQ ID NO: 104383 - DNA, 420 bp, Homo sapiens
acccagaagagggatttctgggacatatggtagtttccattttaaaatttttgaggtatctccatactgttttccataatggctgtggcaatgtacatttgcaccaaggggagtgaacaaattccttccagagagacactggaaacagagttttatccctgaaacaagccagtggggcaggtggagagaaagagccggaatggccatatactccctttcaggctcctggagtcttgtttacttctccctttcactcccagatgcaggctgtttagaagcccaacccttatgagacagccagaaatgggagattttgcctgttctctctgtattgagccaaggggtggtgggggcgggtagccactggcattgctcaaaggcctatttaaaaccacctctgtgttcactgtggtctaggga

SEQ ID NO: 104384 - DNA, 384 bp, Homo sapiens
  misc_feature (1)...(384): n = a,t,c or g
tcacagatgagggcagcccacaggtggtgagagcctggtgctggtgtaggatgcaggaggctgtgaagcaagtaggaaaagccttctctgggctgggtgcagtggcttacacctgtaatcccagcactttgggaggctgaggtgggcggatcgcgaggtcgagggatcgagactattctggccaaccaacatggtgaaaccccgtctctactaaaaaaaaaaaaaaaaaaaatttttatttagggggccgcaggtttattcctttaagggggggtaaatttaacttgggcccgggccgggttttaaaaagggggggagggggggagaaaannnnnnnnnnnnnnnnnnnnntnnnntttttntnntnttttntgntttttnttc

SEQ ID NO: 104385 - DNA, 776 bp, Homo sapiens
ttttttttttttgagagagaggatcttgcttgccctgtcacctaggctggagtgcagtgatgcaaacatgtctcactgcagcctcaacctcccaggctcagtcagtcattctgcctcagccatcctaagtagatgggaccacaggcacatgccaccatacccggttaaattttttggaatttttgtaggagacagagtcttggccctgtttcccaagctaatatcctacattatatgatacatgcagaaaaaaactttcttcccctttaccccgagtgccctttttagctactttttatcctttacccatacttggagtagtttatattatatacaagtgctttttacaaattagtgaaataaggctctttattataagtgaaaaatgttagccttagttctaggtcattcagttagtttcccctcctttccctaggaggactcaattaacattgtaggacttttaacagttttacaaaatggcatgattaaacattttaacccaggcctttggcggttccggatgggtctttcatttcctttctcaccatagctgtgagggtagaaagggctggtaaacgagctgcatctcctcacttgtgattgaatacttgttctagcagaccatctgccactctaggacaattaactgggatattacttagatatagcaatagtagtggtcttgctgttgcttctatgataaatactcactgaattctagatatttgcatcattcatcgttgtttctgaaaaccgagctacctgccagtaaa

SEQ ID NO: 104386 - DNA, 353 bp, Homo sapiens
aagagatgcatgcagttggcttttggggtattggtgggctacctgccccgcccatgacctgctgaaggtgacaggagggttgggtatgggacggttgggaaaggagaggtgggctgcacctcctcacaagcagaggagtcagtgctctggccaggccatttcttggcagagtgactctcatttaagctacacctggctgggcgtggtggcttacacctgtggttccagcacttggggagactgaggtgggaggattgcttgagcccaggagttcgaggctgcagcgagctatgatggcgccactgcactccaaccggggtgaacagaagaagaccctgtctcaaaaacaaaca

SEQ ID NO: 104387 - DNA, 377 bp, Homo sapiens
ctggagaattgcttgaacccgggaggtggaggttgcagtgagccgagatcatgccattgcactccagcctgggcaacagagcaaaacttggtctcaaaaaaaaaagatttagggcacactaacctgggtatggggtcatgtgccagtagttccagccaggggactacatatatacattcagggttgagaattactgccaagacactgcactaaaatgatttcactttccagaaaaggttgattatgctttcaactactcagggtatatggataattagggaggaaagttactgtaagtccaagtgtacttcttaaaaggacccttccttaatataaaggtgaaatttttacttaaatattgccggggcccgggtcac

SEQ ID NO: 104388 - DNA, 376 bp, Homo sapiens
agactgcatagggctcggcgtggctgaagctggagaatcacttgaacctgggaggcggaggtggcagtgagccaagatcgctccactgtactccaggcctggcaacagagcgagactccatctcaaaaaaaaaaaaaaaaatttaaatttaaaaataaggtggcttcaggcaaaaagcactccggaacccgtctcgttgtttaagggttatgtaccaaaggcccttgttttataaaactccaaaccaaaattggggggaaaaaacatctcacctcttaaaaaatttccttaagggaagaaccgccgggttcctcctggggttccattcctcctccgggaacaatccatgggtcggggcaccggctgctactcaccg

SEQ ID NO: 104389 - DNA, 401 bp, Homo sapiens
gtagaaatctgaaatgcatagaagtgcatcctgacaacttgtgggtatttttttcccagttaatgataattaaagtatttctaatcagtgaggtgtggtggtgtgcacctgtagctacttggaaggctgaggcaggaggattacttgagcccaggagtttggggctgcagtgagctatgatgtgccactgcactctagcctgagtgacagagcaagatctggactcctttaaaaagaaacaacaacatgtatttctaataatgataggtaatatttaataatgataggtaactccaacctcatggacttgtattttaaatattgagaagttgggaaaataatggagaaaactgtcttggtagaagtaaactgtgcttttagtactaaatggattctaatag

SEQ ID NO: 104390 - DNA, 365 bp, Homo sapiens
ttagcttttaactacaccactataagacagtcagcggaatctataaatgtttatgtgttctgaatggaccaccgaccagatttttccctgattttcttcctccccttgggcttccgtattctctgagacacaacaatattgaaattagtccaattaataatcctccaatagcctctaagtattcaagggaaaggatgagttgtatatctctcactttaaatcaaacgctagtaatgattaagcttaatgaggaaagcctgttgaaagccaattcagaccataaactatgcctcttgagatagtttaccaagttgtgaatgcatatgaaaagttcttattacaagagcttctccagagaagacaca

SEQ ID NO: 104391 - DNA, 394 bp, Homo sapiens
ttgagactgcatagggctcggctggtgggagaatcacttgaacttgggaggcagaggttgcagtgagctgagatcgtgcccccagctgggcgacagagtaagactccatctcaaaaaaaagaaaaaggaaaagaaagctccttggcccaccttctctggtatcccagctgggatactggggtgctctcattacagcccaatgaggggggaagtccaggtcttcacttggcctgtgctagcatgcatagggacaagtcataggtttttcatgatgtttacctagagtagagcagttaccatctaagagttttctgcctttctaggctgccccttccttggtccttggttaaagagagcaggctttggtagagctttttgtcagcacatgttactg

SEQ ID NO: 104392 - DNA, 427 bp, Homo sapiens
  misc_feature (1)...(427): n = a,t,c or g
aatacagggtgtcgagggtgagggtgcgcttcaccacgctgatgaagcgctggatctccagcagcactgcgttggtgtagggccattgcacgtggtcgtccgggcttgggacaggcctctgccctaccacagggtccagctcctgccccttggctggggcggagggaggctgtgcacttccgggaccctccagccatctccaaaccgcagcctcccattctgggtctctctggctcgcagacctgccacctctgggtacttaagcagaatgaggagcccatatggagcacagggtggtgctcgtggtttctgtgccaccaaaaaaaaaaaaaaaaaagggggtttggttttaccaacctcccccccgggaaagggcctttgtggttttggtttttttggggccaaaaaaaaaggctccccccccccn

SEQ ID NO: 104393 - DNA, 407 bp, Homo sapiens
aatacagggctggacaaacatggtaattgcaaggtacctacctgagcttggagaagccagagccttctgggcttccacatgagcaactccaaaaagtgctctagaggcaggcggggcaagcttagaagtgtgtgtgtgtgtgtgtgtgtgtgtgtgtgtgtgcgtgtgccttccagtgagagaaaattgtgctcttgtgcgtgcagtatcacccataaccactctgtctcacagtggggggtgggggtgttgtacactctgtgccaaccacatttgtgtgggtacacgggagagatccatgctctgtacttttgatcacaaaatcctctatactgttttctaacgcacacgttacacacatctatctaggggaacccacgggggccaattttgtggtttctccccct

SEQ ID NO: 104394 - DNA, 405 bp, Homo sapiens
aatacatgtggtgacacaattcaatgtacaattttttaaaaaatcacattcactagtatcatcatcaatctctatatgggtctttattggtctatctagccgggcacggtggcaggcctacagtcacagtcactcgggtggctgaggcgggaggatcacccgagcctggggcacagaggtcgcagtgagccaagatagtgtcaccgcactccagcctgggtgacagagtgagatcctgtcttggaaaaaaaaaaaagggaagtttggaccttgggggggctccaaaaaaaaactttgaaaatccttacaacccccaagccacattttgaaacctgtggggttaaataaccccctacccggaattttaacaaccttggactttcttcagaaaattcagggggacag

SEQ ID NO: 104395 - DNA, 369 bp, Homo sapiens
  misc_feature (1)...(369): n = a,t,c or g
agattgtctatttttccttttgttgcctttaagttcggngccatatagatcaattgattttttttttttaaaggagatagggcccaaaacaattcaggggagaacgatgtcttttaaacaaagggtattgggatatttggatatctacatgcaaaaaaatgaaatcgaccccctacctcacattacatacaaaaattagctcaaaagggctcaaagacctaattataagagctaaaagaatacaccttttaaaaaaatatatagggatcaatcttcatgaccttggattaaaatgattttttaaatatgacaccaaaaaccctggcaacgaaagaaaaaatagatacattggacttcatcaaaataaag

SEQ ID NO: 104396 - DNA, 376 bp, Homo sapiens
caggaaaatcacttgaaccctgttggttgatgttgcagagagctgagattgcaccgctgcactccagcctgggcgacagagcaagactccgtctcaaaaaaaaaaaaaaaaaagggttccttttaaggggggctgggggggctcccccccttggccctttagggtttttttttttaccccgcgcctttttttttgagtctttttgcccctgggggggcggcttcgggttccccaataaatttgggggtttttttttcaggggagaaaaaattttttcttttttggggttttaacccttgtggggggggggagaacgttttttttttggcgctcggggggggaaaaatttggaatttttccccagaaaatttgggag

SEQ ID NO: 104397 - DNA, 415 bp, Homo sapiens
  misc_feature (1)...(415): n = a,t,c or g
gaatatccgggtcgagnnnngagttcgcccacgcgtccgatgaagtaaataccttagagaaaaaataattcctgccatttgaggaaagccatactcttgagtattcattattggctcattgctatctttgatggagattttaaaatagtttgcagatgttacttttagctacaagaggaaaagcagctaaagccacattttagcacctaggatttgattcgttaacaacttgcattagcttgagtgatggtctgaaatacaaagcaacagtttttttggtttttttttttgaaagggagtctaactgttgccgtttgggctgagtgcaatggcccaatttcggttaactgcaacctccgcctcccaggttctggcagttctcctgcctcaccctcccgaggggttgaaattaccg

SEQ ID NO: 104398 - DNA, 387 bp, Homo sapiens
cacgtacctgtagtcccagctacccaggaggctgaggtgggagggttgcttgagcctgggaggtcaaggctgcagtgagctgtgatcacgccactgcactccagcttgggcaacatagtgagaccctgtctcaaaaaaaaaaaaaaaaaagggcctttttgaaattttttaacggggggaaaacctttggggaccccttttttttttaaggaacccgcccaaaaaaaaaaaaccggggttattccggggggggggcccacttgggggacccccggggacaaaaaaaaaaagggttgtccccaaggccccaaaagggggaaaggggcccctttttttaaaaaagaaaaaagttttttttttgaaaaaaaaaaatatttttaagggggg

SEQ ID NO: 104399 - DNA, 390 bp, Homo sapiens
tcttttgctgttactattattgttttggttgccacaaactgtacccatataagaaggtgaagttaataaatgtgtgtgttctgactgttcttctgactggctgtttccccatctctctctctctctctctctctctctctctctctctcttaccttggacttccctattccctgagacgcagcaatattgaaattacgccaattaatacccctgcagagggttctgtgtgttcaagtgagaggaagggtcacatgtctctctctttcaatgaaaagatagaagtgattactcttagtgcgcaagatatgtcaaacaccaaaataggcaaaagctagacctcttgtgccacacagccaagttgtgaacgcagaggaaaagttcttaaagga

SEQ ID NO: 104400 - DNA, 416 bp, Homo sapiens
ctattctgctgttgaattaatgactggaatacattgcgcggaggtatttgggagtagtatggctttttttttttttttttttaaaccgccaaggggaaaaatcccggggcccattcaaattttttttcccccgggggtttttttcaacaagaaatggggcccccccggggggcccttggggaccccttccttggggggggggcccccctgttgggtttcaaaaacaagggaaggggggggccccaacccccaaaaaaaaaccggtttccaaaaggggggcccctaactcaacccaacttgcccaaaaccccgattgaaaacccaaagggacccccaacccggggtttttttccctctggcccccccccaaaaaagggggcgggcccccccccaatttttagggtggggccgggaca

SEQ ID NO: 104401 - DNA, 436 bp, Homo sapiens
  misc_feature (1)...(436): n = a,t,c or g
acggaccgcgccggaatnnnnnagggacccacgcgtccgggcagcctaagccttcttgttgcattgatccctttaccattatgtaatgccctttgtcttttttgatctttgttgggttaaagtcttttttatcagagactaggattgcaacccccgcgntntttttttttttttttttttggggcaccaagggggggggaaaatttttcccccccctttttttaggccccttgggggtttttttaaggaaaagggggcctcgaaaaaacaaacactgggggggtttgattttttacccaaagggggggggttttaaaccattttagggggtaaaaataaggggaaatttttttttgggggaaattttttctttttttttaaggggcccttaaatatttcccctgggggggaaaaaaataaaaaaaggggggaaaaa

SEQ ID NO: 104402 - DNA, 1520 bp, Homo sapiens
agcccttccttctttaactcggtgtctgaggggttttgtctacggctcgtcctgctacatttcttggttccctgactgggaagcgaggtgattaacggacagttgaggcagcctgttaggcggcttacgcctgccctgtggagcatccctgcgggggactccggccagcttgagcgatgcggatcctgagagcgctcccgggtaagcaaattccctggtggaacgcctcaccagagcagcgtgtggcagcccccgcggaggatcaatgcagtggctgaacaccgggaaggaactggcacttggagtctggacatctgaaacttggtaagactagtctttggaacttgcccactccatttgagtggaagcgtggcctgatcacccacggcgtgcctgtacaggcactttggttttggttttgacttggtttgaattgcttgacaggactggtcttgggaacttgcccactccatttgagtggaagggtggcctgatcacccacagtgtgcctgtaccagcactttggtttttgtttttgacttgacttaaattgcttgatactttggttttggttttgacctggcttggatttctggatactctgattttggttttgattttggtttggtgtaaactgcaaaagtgtatgtgtgccctttttacctgttctttgttttgtggtgtgcgtgtggtgtgagcgtggtgttttgtctcaaagaagcatgggtcaggcacaaagtaagcccacttcactaggaactatgttgaaacatttcaagaaaggatttaagggagattacagtgttactatgacaccaggaaaacttagaactttgtgtgaaatagactggccagcattagaggtgggttggccatcagaaggaagcatggacaggtcccttgtttcaaaggtatggcacaaggtaacctgtaagccagggtgcccagaccagttcccgtacatagacacttggttacagctggttttagaccccctccctacccccacggtggttgagagaacagcagcataagcagctggcagaggcaaggaaagaccagcaaagagacagagaagaaagagacaggaaaagaggcaaagagagaggaaaagacacagaggaagagacagagagacaaagaaggagtcaagaaaagagagagagacagagaaagatagaggcagaaagagaggaagagacaaaggcaaaaggaaagtcagagagagagacagaaagtcaaagagagaaagaacaagagagagaaatatacaagtagttaagaaaaatacaatatacctgattcctttaaaagccaaggcatatttaaaacctataattgataattaaaggtattctcagtaaccctgtaacactgtaataccactttgttgtcagtgtaaacaagggcgtatcccgaaagcattgaggccttcctatcaaaagtccttaacccagtaacccgtggatggcccagccgctgctttgctaacagaaaaaaaagtaaaaaaaaaagtcgac

SEQ ID NO: 104403 - DNA, 361 bp, Homo sapiens
tgggcatagtgttatgttccagcttctcgagagactgaggtgggaggagcgcttgggcccaggaggttgaggctgcagtgagctatgattgtgccactgtactctagcctgggcgacagagcaagtccttgtctcaaaaaaaaaaaaaaaaaaaggggttttaagccttttgacctttcaaaccccattgggaaacccccctttacttaaaggggctttgaacccttaatttaacctaaagggggggaaaggccttaaaccaaaacgcttttttatacaaaaaggggggggttcttaatgaaataattaaaaccgtaccgaaaaccaacacccaaatgggttgtgggggcccccaaaaaaa

SEQ ID NO: 104404 - DNA, 423 bp, Homo sapiens
ttcctgggtcgacccacgcgtccgcacacccagcctcgtgtattttggagatagggtgtggtggctcaggcctgtaatcccaacacgttaagatgctgaggcaggctgcctggtctctactaaaaatagaaaaaaattggccaggcgtggtggcaggttcctgtaatcccagctacttgggaggctgaggttgcagtgagctgagattgcaccattgcacttgtccagtctgggcaacgagcgaaactccatctggaataaaaaagcaaagaatttataaataaatacaattatctgaagaagaaaaaaaaaaaaaaaaaaaaaaaaaaaaaaaaggggggggccttttaaaaaaaaacaattttatctcccggcggggggcagaaaacccttatcttttaggttaagcacagagaaaacacg

SEQ ID NO: 104405 - DNA, 441 bp, Homo sapiens
  misc_feature (1)...(441): n = a,t,c or g
tttgagancgatgannnnccggagnnnnnggagcgacccacgcgtccgatttctctaagaatcatcagataatagcacttatctgtcctatatattataggttatatttaacagtgtagttttgagctgggtgtggtggcacaaacctgtagtcctaaagctatatggggagctgaaatgggaggattgcttgagctcaagagtttgagatcacagtgagctgtggtcatgctactgcactccagcctgggcaacagagagagaccctgtctctaaaaactaataaataaacaaattgttaaaaagagtagagttttgtaaataagtatagaatttattccatccaaaattgtttgctatgtctttaccttaggagatgaataaaatttgcatttttgtattactaaaaaaaaaaaaaaggggcggcctttttaaagaaac

SEQ ID NO: 104406 - DNA, 443 bp, Homo sapiens
  misc_feature (1)...(443): n = a,t,c or g
ctagtccagcgtggtggaattcaaaaagacctgtgtctgagatgccctgagtctttgaaagtgaccggaatacctcacactacccatcttgctcataaccaatgggtgcggccttcctcggaccatctatagatggaggattctgggaatgctgtttccttacccttgacatcattcttctaggcaagtaaaacccagccacaaactcagagaccacagctttaacaaacactgacacctctgccctaactctggggcctctgatggctgccactggctgaatgtggcctgcacgtgggtttggtctggctcaacaaagnttttatttttattttttatttttttgagacacggtctcacgctgttgcccaggctggagtgcagtggcgcgatctcgccttactgcagcctccgcctcccaggttcaagcgattctcctgcct

SEQ ID NO: 104407 - DNA, 277 bp, Homo sapiens
  misc_feature (1)...(277): n = a,t,c or g
gngacagaaacgcttgaacctgggaggcataggttgcagtgagctgagattgtgccactgcactccagcctgggcaacagagtgagattccgtcccctccaaaaaaaaaaaaaaaggtaaatgggctttttttcataaaacccctagctaagggggttgggaaaaatttccaggggcccaagggggggaaaacttaaaagggggtttattttgttaaaaaaggggagaagcccccctcctttctttttttttaaaaacaggttatttttatttatcg

SEQ ID NO: 104408 - DNA, 458 bp, Homo sapiens
  misc_feature (1)...(458): n = a,t,c or g
cgtaggcatgacgaaccggncctnnnnnattctctcgacccacgcgtccgactgaatgaaaaaaagtnggattgatttcttttaagaaaaggaacaagacaaggaggcccactttcatcatcctattcaacatagtacgggacgtcctagccagagcaatcaggctagataaaaaaaataaaagacatccaaattggaaaagaggaagctgaattatccctgtttgctgatatgattattttttaagagatggagtctcgctctgttgccccaactggagtgcagtggcacagacatagttcactgcatcctcaaactcctgggttccagctatcctgctgccccaaccttccaagtagctggtactgcaggtgcatgccaccatatccaactagatggtatgatcttatatctagaaatgaattcaagatgtaagatcaacatacaaaaatcagtac

SEQ ID NO: 104409 - DNA, 441 bp, Homo sapiens
  misc_feature (1)...(441): n = a,t,c or g
cgctccggaattcccnnnccgacgatttcgtggagaatcgcttgaacccaggaggcggaggttgtattgagccgagatctccccactgcactccagcctgggtgacagagcgagactgcgtctcaaaaaaaaaaccccaaaaaaccaaaaaaccccattgtattttcatttttaaaatggcagtttttcaaaaaccaactagtttaaaatgggcatttgggttaaaaggtaattttttgaatttggagctttaaaaaaatggaagtctatgacccacaaaaaggttgaaaggggcaaaaggaccactttaaatggcgggggtattaaggctgcaaaaactgcaagcctgaaaaaacacctgcaaggatggggaaaagtgatgctgatggctaataaactcctccgaggagaaagagcctggttccacctcgcataagggga

SEQ ID NO: 104410 - DNA, 403 bp, Homo sapiens
tttcgtcttgaacctgagaggcggaggttgcagtgagcttagattacaccactgcacttcaccctgggcgacagagtgaggctccgtctccaaaaaaaaaaaagggttcctttatgttaagggggaaaaaaattttttttaaaaaaaaaaaaaaagggggggggcctgccaaggttcaattaatttttaaaaattcttgaggaattgggccgggggggaatctgggttataaaacctttaaaaacccagggacctccccccacggtttttccaattggggggggggcccctttttggaaaatattttttaaaaacatgtcttctttttttaacccccgggggggggaaaagggccaaacaaaatacaaaggtttttttttttccaaaaaaaaagaaaaaaacg

SEQ ID NO: 104411 - DNA, 397 bp, Homo sapiens
caaaaattacccaggcatggtggtgggagtctgtgatcccagctactcgggaggctgaggcaggagaatcacttgaacccgggaggcagaggctgcagtgagctgagatctgtggccattcttttcataatccccaaagaggagtcagagaggcccctcaaaggtcattaggtcggacgtccagggccagacctgccgtgggtctggttccatcccatcctctcaactcccagcccctgctctgccctggaggtccctggggcagaggaggagaggggcaagccgggtgcagtgggagcctggggggaccgttcccttcccttccactgctgctgaacagccaccaggatgcatcccagcccctgcagagggcaggcaaggaaggaagagagggcct

SEQ ID NO: 104412 - DNA, 406 bp, Homo sapiens
  misc_feature (1)...(406): n = a,t,c or g
gacctcaggcaatctgcccacctcggccacccaaatttctgttattacaggcgtgagccaccacccccagccaagatgtattttattgttttttagacagaatctttctctgtcactgaggcaggagaatcgcttgaaccgaaactgggaggcggagaaggttgcagtgagccgagattgcgccactgcactccagcctggcgacagagcaagactccatctcaaaaaaaaaagttaaacctacacctattatatgatttagccattccactccaagccaagggaaattaaagcatatgttcacacaaagctattcagaattcgtacagaatgtactattctgggtaggtgagaattttacccataaaatgaaaatcttaaatacaaagaactttttttttgttgn

SEQ ID NO: 104413 - DNA, 466 bp, Homo sapiens
  misc_feature (1)...(466): n = a,t,c or g
taccggctcgagagctgggattacaggcgcctgccactgcgcccagctaatttttgtattttttagtagagatggcgtttcatcatgttggccaggctggtctcgaactgctaacctcaagtgatcctccgccttggccatttctgaagttttaatgctaccaaactgatagtgcctggttcttagaaggttatcaagtaagtttcactcactcaagctctgctctatagaagaaaacacagaatttgtggaatcttggctttaatactacagaaaattgtctgttgttcttcaaacctagctttatacctttcgttgattttgttgtgtgaacttaataatgctttcccaacccttctattctgtcagtaagccttttgttttgccctttcactggataattaatttgagggtttgctctcttgaagtgaagtttaccactagaggactcacagaatgattctgn

SEQ ID NO: 104414 - DNA, 404 bp, Homo sapiens
ggggggcatgcactgggggtcccagttacttgtaaggctgggaaggaaggattgcttgagctaaggaggttgaggctgcattgagcctggttcgtgccactgcactgaagccagggcaacaaagggaaaccctgtttcaaaaaaaaaaaaaaaaaaaagggccccccccggggccccgccaatttgggtttttttttaaaaaagaaggggggggttttttaaaaaaggggggtaaaaaccgggggggggggccttttttaacccaaaaaaaatgtaagtccccggggccccccttttgggaagtggtttttttcccccgttttttcccccccaaatgcaaaaaaccttttgggggcccccccccccaaaagggaccactttttgaaaaaagccctctctttggg

SEQ ID NO: 104415 - DNA, 381 bp, Homo sapiens
ctcttagaagacataaggagagagaattatcttggtttaaaatagcagtgaaaaccacaaagttcttaggaatgatcttgataaacgatggaaaacctaaggggaaaagcttccaaatgctttccaaaggctcccaggtggacttgaccagctgaaaagcagttcttgatcttcggcaggaagcatgctatcataaagttgtcaaattctagcagagctaacagacaaatttaacactaatccagttctaaggccagcaagaatttttttttccttgctctgtaccccaggctggagggcagtggtgcaatctcagctcactgcaagctccgcctcctgggttcacaccattctcctgcctcagcctcccgagtagctggg

SEQ ID NO: 104416 - DNA, 427 bp, Homo sapiens
  misc_feature (1)...(427): n = a,t,c or g
gttacgggacaccccagagcggnncgaatacatgccttggnngagtcgcttttttttctgtgtccccaagccttgaattccccaggtccactgtcccatgtctcctcctgtccccatggcctgtattccccgtgtctccagtttcacatcctgggttttccataatctgctgccaccctctgagtgtcccctgggcccccttgtccctgcatcctcacatccccgtccctgcgtgtgctgcagaccttgtacgtcatggtctgtgtcctctgtggccacggcccccatgttctaactccccagtcactgtgtcccgtgtctcccatgtctgtgtatctccgagatcccatcctgtgtcccatggccatgacatattcgagcctctgtcccatgtcacatgtccctgactccccatgtcccttgcctc

SEQ ID NO: 104417 - DNA, 411 bp, Homo sapiens
  misc_feature (1)...(411): n = a,t,c or g
atacacgcgctggcttctggcatgggcactgtcttttccttaaggtgaagctcagagagtggtcgtgggcgagggccgacaggcatctctggctcctcctcatcctcttctcctgtagattctggggtggggtaggggctcttatcctcattttcattgggctggagggcatccatgttgatcttggaggcgggtggagactctccgtcagccgtgatggatttcagctcaatcttctcctccttggattcccccactgccggctcatccaccaaactcttgcttcttctctgggctggcagtcccgggcagcttctttctctcattctcctcttcctcctccctttgggcacaagcgaggctctccacattagaccaggtgtccacacgcaatggccctcaatccactcn

SEQ ID NO: 104418 - DNA, 518 bp, Homo sapiens
tttcgtggaagagccctagagctttgctttttctctcctgcagcacttaaccgaaaccagttttgcaatcaattcctgttcagaggccaccctactcttcctatccgtctttctccagcccagacactcacagccccctgccagaccaggggacctcggagaggcaaggacagaggttcaggatcttcctctccctcgggacccaaggccacaaaggagagctccgtggagagaagaaaatcatttgactcctggggacacagatttgctgccacagaggctgatggacaaccaggcggagagagaaagtgaggctggtgttggtttgcaaagggatgaggatgacgctcctctgtgtgaagacgtggagctacaagacggagatctgtcccccgaagaaaaaatatttttgagagaatttcccagattgaaagaagatctgaaagggaacattgacaagctccgtgccctcgcagacgatattgacaaaacccacaagaaattcaccaaggctgtat

SEQ ID NO: 104419 - DNA, 375 bp, Homo sapiens
aatacatggtgtgtgtgtgtgtgtgtgtgtgtgtgcgcgtgtgcgcgtgtataagggttgagagatcaaagtggcaggtgcaaaggccctaaggcaggaacaagagcaggggctggaggaacaaaagcggctactgaggttggcacacgtgaatgcagggagggtggacaagatgtggtcagagaggagggatgggccagagctggcagcacttctcagccgtgggcgggtttggatttcatcctgatgcagaggaaaggccccgtgggttctgctgtggcgctgcatggacgccctcatgagccacacttttatattttgccggtgttgcaagaatggggagaagtggagttaggatcgactctccgctacctg

SEQ ID NO: 104420 - DNA, 377 bp, Homo sapiens
aatacagatcagttcttggttctgtagcttccaaatagcttctaaaagacaggacacgatgagctctacccatgctccctagaagaggaaccgctgccccatctcagggggaggggcccctgcacagcacttcccagctggagcctggaggaggtacccgggaggtcaccagcagaggcccaagaacacatgccatgttcctgcaaccgaggaccccacccccagggaaaggcaggctcctcggtgttacctctgcttttggtccgatgaagaggtccccctccagggctccagccataacccgcatgtgcttcggtcgcccgacactgttatgacggagaacgtcagcaaggtgcgccggcagcatgccctatccg

SEQ ID NO: 104421 - DNA, 567 bp, Homo sapiens
  misc_feature (1)...(567): n = a,t,c or g
tttcgtggcactttcattatgtggtactagtttaatcatttccagagcgtatatttgtcactgtaaatgatctggaccacaggattggggccaacattctgcagcactagatctatatcagcccattctgctctgtcgctgtacaggacgtaggagggtgagtccaggctcagaaacccgtcgtccatgggggcaccacggcttgcctggcctcggccgccatctcttcctcgtgctgctgctggggcggtggtgggtatggctggggtggggctgctctggctgtctgggctcgccaccttgtgcagcctccccgaccccctcagtggccaccccagnnnnnnnnnnnnnnnnnnnnnnnnnnnnnnnncagagagagagacatagtagataatctttctaactatcgaggagataaattcatcagcctgcacacacattttcctcattagatagttttctttctttgttatttacatagatggaggactgtttatgttctcagaatgaacaacagcattaatcatatatttccaggaatgtatgcggccgctctgaggatcaagc

SEQ ID NO: 104422 - DNA, 370 bp, Homo sapiens
aatacatggtggcacacgtagtctcagctacttgggaagctgaagcaggaggatcgtttgggtctgggaggttaaggctgcagcttgctgtgattatgccactgcactctaacctgagtgacagtgagaccctgtttccaaaaaaaaaaaaaaaaaaattccggcaataaaaaaaagtcctgggggaaagggaaaaaaataggtttacttaccctttgcccaaaatttaaacccccacttaataaaaatatgtttctcagggacccaaaataatgaaacagctcagcttattttatatactacaatgcacccaatcctaattaggaaaattaatttgccctctatacggagtctaccattttgggcaaaa

SEQ ID NO: 104423 - DNA, 376 bp, Homo sapiens
aatacatgtcctgctctcctcttcttccacctgaagttgttatatgaaaatatagtacttggagttgcagaaactatccagcaatcacgaggagaatcattaccaacatacagaaagatggaaggtacctaggactactaaccgtggtgaaagattctgtagcatcactggagcagtttatctttgagattaatttcacgtttcaacccacaggttactctttaaagaataagtcaggctataatttctttttatttttattttctttttgagacagagtctcgctctgttgcccaggccggagcgcagtggagcgatctcagctcactgcaacctccatctcccggggttaagcgattctcctgccttaccctcg

SEQ ID NO: 104424 - DNA, 991 bp, Homo sapiens
tacgaagaccagcctggccaacgtggtgaaaccccgtctctactaaaaatacagaagttagccggggtgtggtagcgggcacctgtaatcccagctacctccggagggcagagacaggagaatcgcttgaaccaggggaggtggaggttgcagtgagctgtgatcatgccactgcaccccagcctgggtgacaagagcaagactctgtctcaaaaaaaaaaaattttttttttttcaaattactcttgtttggaaaacttgtaatagaattctgatgattatgaccttctgataatgaacactttttcctttagagtgatttaaaaatttctgtatttttgaaatcagtactaattgtcatttttttctctcacagcttcatattctccaattcagcctcattctctaataaaacatcagcagattcctcttcattcaccaccttccaaagtttcccatcatcagctgatattacaacagcagcaacagcaaattcagccaatcacacttcagaattcaactcaagacccacccccatcccagcactgtataccactccagaaccatggccttcctccagctcccagtaatgcccagtcacagcattgttcaccgattcagagtcatccctctcctttaacagtgtctcctaatcagtcacagtcagcacagcagtctgtagtggtgtctcctccaccacctcattcaccaagtcagtctcctactataattattcatccacaagcacttattcagccacaccctcttgtgtcatcagctctccagccagggccaaatttgcagcagtccactgctaatcaggtgcaagctacagcacagttgaatcttccatcccatcttccacttccagcttcccctgttgtacacattggcccagttcagcagtctgccttggtatccccaggccagcagattgtctctccatcacaccagcaatattcatccctgcagtcctcttcaattcccattg

SEQ ID NO: 104425 - DNA, 447 bp, Homo sapiens
aatacactgttggcatctaattataaaagtggcaggtctgcagcactctgaaagcaacagctatgtgtgaggttgttcattcattcattcacaggcatcggaggacgggtacagcaagaacaaaggatgggacaagccaagctagggcctcttctctgaagtttacagtcatatgtgaggggcagacattatccagatgacagcaaacataacagaacattataacggtaggaagtgatgtgagtgctcacatcagggaggtctggtaggagaaagaaatagatgacagaggtaggcagaaaggctagcacattctcagtcatctcccactcacacacacgctcaattaaagagaaaacttgtggctcacgcctgtaatcccagctcttcgggaggccaaggcagggatcacttgaacccaggagttcgagaccggcctgggcaacg

SEQ ID NO: 104426 - DNA, 473 bp, Homo sapiens
  misc_feature (1)...(473): n = a,t,c or g
aatacactttctcttcttctttgtcctggntaatttggaaataacgtaattcataactctctttactgttagcaactatgcacaaccaatcacatagattattgttcttcaaatattttttggtgagatatttcaaataccttctggaaaaaggcacttccggtgttacggtaagcttgctcttgctcctttcgatggtcaccactcctccaagattcacagcttttctgttcactttgatcctctcttgcaaaaactgctcataattggtagaatggcggcatccatgattccatcttctatggngtggatgcaatcaagagtgaacttcagaacctgcttcttttttgccccctttcaccacaagctttttcacgggcgccatgggggcagtggaagcagaanaaccctttgcccatttttaaaaatgggctatttgttccactggtattgagatgaagaagtcccttaac

SEQ ID NO: 104427 - DNA, 383 bp, Homo sapiens
atacagcgttcctcacggtgccatttatgatcttcactttgagaattcatctgtgatctctccttacctgctccagctattaaaaaatgaggaacagaataaacttgcttattactgccctcatctttcctgagatatctggccttggcaatcacattcgttgctttggtattctgtggagacattgtcttaacagaacacaacctctgctggttcctgacgccacagcggcctgccacaaacagcgacacataagagtgccctgggcctaccccaaggtatgggctcttccaaagctccggaaagcttcgaataccatacaaataaaaggccattatgcagcgagatcacccccagatagcgtgagcaatgctgaacatccc

SEQ ID NO: 104428 - DNA, 618 bp, Homo sapiens
gcctactactactaaattcgcggccgcgtcgactagggatagcattaggagatatacctaatggtaaatgacgagttaatgggtgcagcacaccaacacggcacatgtaaacatacgtaacaaacctgcacattgtgcacatgtaccctagaacttaaagtataataaaaaaaagaaaaaaaaaggaaagaagaaaaaaacttaccaatgtacgaaagtaacagtgttgatacaagccacaattacacttcttgaaactctctctctttctcttgcaacatactgaaaaacaataagaaaaaatgcttatttgctcttggtcagagattctgaggtacaccatgatctcggcattgtaaaaggcagcttttctgtaaatatagtagcagaagattgcaaaattgaatggggagcctaccttcttattactatagggaagagggaagacttcatttgtcttaaggtagtctttccaagtagttaaaacatttctttctctgtatatgcatatacacataccaagcatgcctatatgcatttcatatgtgtctgtgtatacatacaggcatgacatgagagaaggcaacgtccacgcggccgcgaatttagtagtagtag

SEQ ID NO: 104429 - DNA, 512 bp, Homo sapiens
  misc_feature (1)...(512): n = a,t,c or g
gacacgacctagctagaattctctacagcggncgcatacattgggcctgtgtctacagagccatccctttcaggcatactgcagtctgggcacccatcctgttgggagctcacagggccagcttggggctgacagaggcactggactccctgacctccaggctttggcgttgacctccaagcccagagtggaggtagctggatgggccgtgtcctgcaggccaggaatgggtccggagcagtttccacatctttcccacagtccgggctggcaggacagagcagaacaagatccagctggaatcctgatgggagcagggaagctgggaacatgttttgcaggctccctgcagtctcatagccccgaggatcacacatgcatacacacacacacacacacacacacaccgttacacccacacacacctgtatccccatggccaacaagcattcttggtttaccaccccctaacataagcccgcttggggctaatgaatggtcacagcctctct

SEQ ID NO: 104430 - DNA, 451 bp, Homo sapiens
aatacatgtctgtagtcccagctacttgggaggctgatgcatgagaattgcttgaacctagaaggctgaagcaggagaatcacttgaacctaggagatcgcgccactgcactccagcctgagcaacaagagcaagactccatttcaaaaaaaaaaaaaattcttttttgaggggccaaggggtttaagcccggttttctagggtaattcagccttttgggaaaccgaaaaaggggggatcctgggtgcccgggggtcaaaaccctccttagccaatataggggaacccctttttttaccctttggcaaaaaaaagggcttttttttatctgtgccagggcccttttaaaaagggatcttttccctttatgggggggacaacccttaaaaaaaaagggttttcctggcgggggggattattaccccattcctgtaaaaaaagccccccgggg

SEQ ID NO: 104431 - DNA, 426 bp, Homo sapiens
aatacatggggccacatgcagcttgttgtagaaggtgtggtgccagatcttctccatgttgtcccacctcattggtgatgatgtcatgcttgatggggtacttcagggtcaggatgctgtgcttggtctgggcctcatcgcccacataggaatccttctggctcatgcccaccatgacaccatggtgccaggggcacctgacaatggaagggaacatggctcgggaagcgtcaccccagcaaagccagctttgtacatgctggagccaatgtcaatgaaaagcatggtgatttcttcttccattgtgaccagcagaggaggggggtggcagagtggtgggagaacagagtccatgggctggtggcagtgactgagaccctttcttctgtctctccgtgttccattttctcccctctccagtcagca

SEQ ID NO: 104432 - DNA, 430 bp, Homo sapiens
ttcgtattcccatgcctgaaacatggctgccttccagaatagtcactgtctctattccccctgtactcccagtcctgcttcttggggtcccagtagcctgatgagctggtggcgccccttgtccttggctcccagggtttccaggccatgccctccaccggccaaggcttctgccacccaccccacctgcaagtccccacgttctcaggagaaggtggagagtccagggtgagggtcccttccagacccagcagctccaccttggaaagggacagggacccagggagggactgcaccagcaggcaggccagggacacacccagagaaggacaggttcccgctacacaggccccagaacaaaggaccgaggggccccctggttaccttagtgacatcctcagcaaggtcagaggcccaagaatgctcccct

SEQ ID NO: 104433 - DNA, 388 bp, Homo sapiens
atacacgtccctctcacacatttaaggcatcagccgggttctctaggaaagtagcaaagatggccaggaacactgctcggagtgcagcccggggcccgcctgattctacctctgcttctggctctggtggagccaggggtgggcctgtgccaacactggagggtgggaacacagggagcaggaagtgggaagatccttgctggggaagtcagaacagtccaagctctgatggttcaaaaccacccccagggcctctgaccagcaaggtgtgcgatgactcccggctttctgagtgagtgggtaactgggaatcttccatgccccggaacagccccagccagctgtgcccgccggagtgagcatgatttgcctccccaggcagcaccag

SEQ ID NO: 104434 - DNA, 428 bp, Homo sapiens
  misc_feature (1)...(428): n = a,t,c or g
aatacatcccgtctttgtggttttatctacttttggtctttgatgatggtgatgtacagatgggtttttggtgtggatgtcctttctgtttgttagttttccttctaacagacaggaccctcagctgcaggtctgttggagtttgctagaggtccactccagaccctgtttgcctgggtaccagcagcggtggctgcagaacagcagattttcgtgaaccgcgaatgctgctgtctgatcgttcctctggaattttgtctcagaggagtaccctgctgtgtgaggtgtcagtctgcccctactggggggtgcctcccagttaggctgctcgggggtcaggggtcagggacccacttgagggaggcagctgcccattctcagatctccagctgcatgctgngagaaccactgctctcttcanagcatgg

SEQ ID NO: 104435 - DNA, 416 bp, Homo sapiens
aatacatgctgcctgatcattcctctggaagttttgtctcagagaagtacccggccgtgcgaggtgtctgtctgcccctactggggggtgcctcccagttaggctactcgggggtcagggacccacttgaggaggcagtctgtccattctcagatctccagctgcgtgctgggagaaccactactctcttcaaagctgtcagacagggacatttaagtctgcagaggattctgctgccttttgtttggcaatgccctgcccccataggtggagtctacagagacaggcaggcctccttgagctgcagtgggctgcacccaattcgagcttccgggccgctgtacctactcaagcctcagcaatggcgggtgcccctcccccagactcgctgccaccttgcagtttgagctcaaacg

SEQ ID NO: 104436 - DNA, 429 bp, Homo sapiens
tgagacagagatacttcctccaggagaatgaataagaggagaacatctctaaagatttatttcttgtttttgagtgaacagtaaccctaaaaacttgacatttatggtaaattttcaagggaaggggatgaaaatagggcttgctttggagcgaatttgcatctgtggatgctccttagtatttccagaagcgatcctcgagacatcgtgtcaaaatctcttctgtacttatgcttgtgctggtgttttatcatctgtctatgattatctggcgcttcttgctgtctcttttctcttcctatagttcttttcgctcttcttcttctttctgtactatctttttctttttgcgcttggtgcgtcccttcctggtctttatctcctactttatttcttacttttgtgctgcatttcttattctcttttttc

SEQ ID NO: 104437 - DNA, 462 bp, Homo sapiens
aaaaattataacaaaccctggggaccaaaatgaacgaggggctgttcgctacattcattgcccccacaatcctaggcctacccgacgcattactgatcattctatttccccctctattgatccccacctcctaatatctcatcaacaaccgactaatcatcacccaacactgactagtcaaactaacctcaaaacaaatgataaccatacacaacactaaaggacgaacctgatctcttatactaatatccttaatcattattattgtcacaactaacctcctcggactcctgccttactcatttacaccaaccacccaactatctataaacctagccatggccatccccttatgagcgggcgcagaggtaataggctttcgctctaagattaaaaatgccctagcccacttcttaccacaaggcacacctacaccccttatccccatactagttattatcg

SEQ ID NO: 104438 - DNA, 462 bp, Homo sapiens
gacaaccctacacgcctttggcacaatgaagagggaagcctttattacccttctttgtctctttacctcggctaattccaggggtgtgtatgctcgagatgcacacaagagtgaggctgctcatcggattaaagatttggcagaaaaagatttcctggccttggtgctgattgcctatgctcagtatcttcagcagtgtccatttgaagatcatgtaaaattatagaatgaagtaactgaatttgcaaaaacatgtgttgctgatgagtcagctgaaacttgtgacaaatcacttcataccctttttggagactcattatgcacagttgcaactcttcgtgaaacctatggtgaaatggttgactgctgtgcaaaacacgaacctgttagatatgaatgcttcttgcaacactgggatgactgcccaaacctaccctgagttgtgagaccagaggttgatgg

SEQ ID NO: 104439 - DNA, 416 bp, Homo sapiens
ctttctttctttctttctcgctctcgctctctccctgcctcacgggatttctctctctctcgctcttgccctatcgctctctccctcgctagttttcactctctctctctctatctctctgtctctcggccagaattctattcgcctctgacctgaaagccacgctatcctttcttccttaagcaacaaacagacatgaatttaatggacatttagaccagctattcactgacgtacagggctcctgaaacaatcaaagcgctcattaaacatcacagagtatgactaaagttctaggaaatacatggcccagtcgttcaggaagataattttcgaagttcacaagttgaaagcatctcagatctagcccaaccccctccttatagtattatcagagaatataataattctggaag

SEQ ID NO: 104440 - DNA, 975 bp, Homo sapiens
tagaaaagaccttggaaaatcaatttctctagttgacatcttttttttatacaaagaaactgaagcaatatgtatcattagcagcaagaatattgctcaatagctatttttatctaatattccctggaatctagtgtttgatgcactccactgctatgactttcaatactgatgattgtgatggtggtggtggtagtgatggtagtgactgagaggaaaaaggatttcaggaatcaaatcccaagaaaatagtgtgtttcccaagaagtactctaagcagtttaatacctttgactttgacctgaaaatggctgcattcagaacagggaagaagagtgaactcctctgcttggtacatggaatagtctgtgcttgcgaccacaatctggtctccaggtttccaactactaacatcatctagcaaatttagcttcactccatctacaacctctacccggaatcctgaaagagaaacgccttcaatccattcactataagctgtcacagagaacttctggccatccacagtataaaattctctttgggcaagagccttcccgccactgctatgattttcatagtttctcacggattcattgcaagaagtgcttccaccatcaatgacaccaactaaagcccaaagcttgcctgtacccaagtccttggatcagttcgcttcccaaccgttcctgggatcatctggatggttccttgtaagagacttttagcggctgaatccccgacagctatggcaacaatccgacctgggatcctgggaatctcagaaactcctgaagccgcctgctcttcattgcggtattcatgggtatcaaatctctcactttccaaaattttgggccgtgtcttgggtcaatgacccttacattgagggccccggggaaaagttcctttttcaaaggtataggacccaaagggcaagcttgaggaattcagggtccttgccaacaacgtcca

SEQ ID NO: 104441 - DNA, 1066 bp, Homo sapiens
gtcgaggaacctactccatgtggtggaattcgtgatactgatggggaagggtcggctgattgctgccagaaatggagagctcgttttaaggaaatgcggcgtctcctgggagtgaagaggcttttgggccaccttgaggcatgacgggtgccgcttcgtttccctgcgaccgctgcctgtttcgactgagccccttacaggaggacgtggcgggggcagacgggcgcagcctcccgccctctccgtgactcagggaaacggcctcgccgcagagcgctccctcggcagctggctgcagcactcctcccccgccgggcttcagagtgggtggtttcctacagcctagggagggggcctgaaacggggtttaaaatcttccctgccctcacacaagcccttctgactgttggagaacctgacgcgcggattctaactagaactggcactctcttcgggtgttagataattaactcaaaggacagcgaaggccttttatgatgtctttcaagctggccttatgacagcttttcttaacgtttctgcggacattttggcggacttgtgtcggcctagctcagtgatcagtttcgttaaagaatttgagtatccgaacattaaaggattggacctaaattctagcaggaggatttttagccacatcaaataatttacgtctcaaagatttagataattagggtaaggatgcttagtaaaacctgaaggttcccatcgcgccactgcactccaacctgggcgacagaggccggctccgtctcaaaaaaaaaaacaaacaaaaaaaaacctgaaggttcctggaggaaagagatgaactattagccgtgtatttcggtgggaccacctcaacataggttcctgtaggttagcaatgtagaaatgtagcgcttcaaagccggagcatcctgtcttcaaagagcatgaaggtatcaacggcattcattgtcgattaataataaccttcctggtactttcttgctaaagtataagccataataatatttcataatcgcaccaatacaataaaggatgaaagacgttaaaaaaaaaa

SEQ ID NO: 104442 - DNA, 373 bp, Homo sapiens
ctacagcagaagggaatgcgtaagcgggctggccagtctgagatggctcctgccggtgtgagcctgagggccaccatcctctgcctcctggcctgggctggcctggctgcacgtgaccggatgtacttacaccccttccacctcgtcatccacaatgagagtacctgagagcagctgacaaaggccaatgccgggaagcccaaagaccccaccttcatacctgctccaattcaggccatgacatcccctgtggatgaagaggccctacaggaccagctggtgctagtcgctgccaaacttgacaccgttgacaagttgatggccgcaatggtcactatgctggccatcttcttgggctttcgtatatatggcg

SEQ ID NO: 104443 - DNA, 432 bp, Homo sapiens
gtttcttgtagcttcctcaaacttaaaaccatgaaacatggattattgctactattgtgtggttttctacttaagtcccaaggtgtgaactacactgaggagggtttcttcagggcccgtggtcatcgaccccttgacaagaagagagaagaggctcccagcctgaggcctgccccaccgcccatcactggaggtggctatcgtgctcgtccagccaaagcagctgccactcaaaagaaagtagagcgataagcccctgatgctggaggctgtcttcacgctgacccagacctgtgggtgtagagtcctacaggatgccagttgcaagaggctttgctacaacttgaaaggccgatcacaaatactgttgatgagctaaataacaatgtggaagctgattcccagacctcctcttctttcttgtagtcatgg

SEQ ID NO: 104444 - DNA, 446 bp, Homo sapiens
tattattgatgatgactattgattggtagtattggttagggttcattgtccggacagtatattgttgaaaaggatagctattacaaggattatggatgcggttgcttgcgtgaggaaatacttgatggcagcttctgtggaacgagggtttatttttttggttagaactggaataaaagctagcatgtttatttctaggcctactcaggtaaaaaatcagtgcgagcttatcgctgtgatgagtgtgcctgcaaagatggtacagtacatgacgggttgggccaaggctgagccggcgggtccttctgagcgcggcaaagggtgagcctcacagcccctctatggaggcctttctaggggatgtgtttttataagccagatgtttttaaaagcatatgggaggttcccctcatggtgacctggggcctaaacagggcgtttacctg

SEQ ID NO: 104445 - DNA, 396 bp, Homo sapiens
caccatgttggccaggctggggtcgaactccgggccttaagtgatccgtctgcctcagcctcccaaagtgatgggattacaggagtgagccactgcacctagaaacatggactttggactcacacattgtccggtgggagttctggtttaaaaagccgattgcagtgaagtaagccgaggtacgaaaccctctatgccacagttccctcatctaaatgagtgccgccatagtcccaggcattaaaggcacgtgtgttggatgttgatgagagcactgcatctgacgcaaagaaggtctcacagacgttagccactactggggttggttgtacctgggagcttatagaaagactcttttccaaattaccgtgcgttaaatacccattctataaaaag

SEQ ID NO: 104446 - DNA, 418 bp, Homo sapiens
ccacagactcagagagaaccgaccatggggctgtctgctgccgactagaccaacgtttaggccggctggggtaaggtcggcgcgcacgctggcgagtatggtgcggaggccctggagaggatgttcctgtcctttcccaccaccaagacctactttccgcacttcgacctgagccacggctatgcccaggataagggccacggcatgaaggtggccgacgcgctgaccaacgccgtggcgcacgtggacgacatgcccaacgcgctgtacgccctgagcgacctgcacgcgcacaagctttaggtggacccggtcaacttcaagctcctaaaccactgcctggtggtgaccctggcctgccacctactcgccgaggtcacccctggggtgcacgccttcctggacaaatttcctggcg

SEQ ID NO: 104447 - DNA, 423 bp, Homo sapiens
gcggcggcggcggcggcggacatggaacgccaagaggagtctctgtccgcgcggccggccctggagaccgaggggctgcgcttcctgcacaccacggagggctccctgctggccacctatggctggaacatcgtcttcagctgcatccttctctacgtggtctttcagaagctttccgcccggctaagagccttgaggcataggcagctggaccgagctgcggctgctgtggaacctgatgttgatgttaaactacaagaagctttagcagctgctcgactgaaaatgcaagaagaactaaatgcgcaagttgaaaagcataaggaaaaactgaaacaacttgaataagaaaaaaggagacagacgattgaaatgtgggacagcatgcaagatggaaaaagttactaaggaaatgcacagaag

SEQ ID NO: 104448 - DNA, 422 bp, Homo sapiens
caggggtgccttccttgaagaattaatggcagaaagatgggggagctgaaagttaagctgaacaagaggtatcattggaacatttcaagatcatcaaatcaaattccacagggattggtgaccaaccagaaggctcagacatctgattgctgacctgtccagacatcatctggtctccctgaacctgaaatcacaccatggatgattttgagcgtcgcagagaacttataaggcataagagggaggagatgcgactcgaagcagaaagaatcgcctaccagaggaatgacgatgatgaagaggaggcagcccggtaacggcgccgccgagcccgacaggaacggctgcggcagaagcaggaggaagaatccttgggacaggtgaccgaccaggtggaggtgaatgcccataacagtgtgcct

SEQ ID NO: 104449 - DNA, 427 bp, Homo sapiens
cggcacgagaggaaactgtttaaccggatcccattgtacccagagtgcagagccgcctttccagcatgcaggggctgctcagcgtttagtcacatcaagaaatagaacagaattcagccatggccccaagaaagagaggtggacgaggaatatcattcatgttttactgcctccgaaataatgatcagcgctatatgacctagaggctgtgaagtggtatcggctggatgctactatctagtggccgaatgggatatgcgctgcctgggtaatgttgcatgctttaggactactcattttgggccttaactacctaggtttctaaaggatggaatgctcctgagggcagccttgtgcaagtattctgctatgggtgtcagttttcttaatggagcgtggtcttgctcttgttttgtttttcctctcg

SEQ ID NO: 104450 - DNA, 411 bp, Homo sapiens
cctcactgccgaatcccaggttaagcgccgtgcgcaaagccgtgcggagattggaggtcgcgcgggtccctggtctgggccatgtctggctgtaatgctcgtaagggagactgttgttcccggagatgcggatcgcatctctgaaattaaatccctactgactggcccttgaactgattttttctaacatcagctaaagtcaaggagtgtttccctaaaaaagaaagcatttactcacaaaccgtatattgaagtccaggctgaaaaatgtaaacatgagacaaggagcatccaagatacctgatcccataactttgcatacagttttaccatttatgctgggtcactgggactggaggaggaattatcttgaagcatggcgatgaaatctacattgctccttcaggagtg

SEQ ID NO: 104451 - DNA, 302 bp, Homo sapiens
catatgaatgcggctgataagacctgcaataatccagaagggctactctgatctatgttgatatggaaaatggagaaccaggcacccgtgtggttgctaaggatgggctgaagctggggtctggaccttcaatgctagccttaaatggcagatctcaagtttcagcaccacgttttggcagaacgttcaatgccccaccatccttacctatagctactataagggctttgggaactgtcaacagagctacagaaaagtttgtaaagaccaatggacccctcagacaataacagccaagatct

SEQ ID NO: 104452 - DNA, 1521 bp, Homo sapiens
  misc_feature (1)...(1521): n = a,t,c or g
tttttttttttgtaaatgatgactcaatctatctccccaagcaccaatcctgaagggaaatgctgaatctgaatgnccccccataggtggaacttcaaactcctccaatgttcaaaaacaacatcgctttttccttcacaaaatcttcattatgtatttgatggaaccaatatcctttgaaataacataaattccaagctttaggtacctttgacgtataggggataaaagaaagggaacagtcaatcagatgctaagttctcttagttttacttttcttgtttctctccagtgcaaatagcaaggcaatacacatagcaagtgctgaataagtgcttttggaatgtgtattctaatttctgaacctttccttatgcttccaaaaatgctgagagacgttcaagcttttggtagagagaagagatgaactgttgacttggatgtggggggacatttgaggactccacccctatttccaagcactgaggcaagccaaactattctaatataaagttatggctggcaagctatattaagtttattcactcaataaatccagtgcttctaccaataaaagaaaggaagaaacacttggaacactcaaaggttagagggggggaaattactgaccagtttcatgtaccctctttgggcaaggggtccagttatggggatttgaggggcctcaagaaaataggtctgtgtactggaagtcataaaacgggaatcagggtttatctaagttggaggtcaggggcttctgacaccagtacccttgggcaaatcatctctctgggcttcagtgttctcattttacaaataatgcctaattctcagggctgtatctcgagaatcaaacacatttcctagagtcctgcagtaacaacgatgactaaaatttattggtatgtcttttacgcaccaagcacttttctttactcatttaatattcattattctgcaagacagttactagctcatttacagatgaggacacagagaaattacgtaatttgtccaaggacacaaggctaacaagtagtaacgtatacggaaaagccaacactgtattaatactgtcacactgggaagggggaacagcttggggaaagattttgtgagggagtctccaggaggggaccggctgaacgtgggtcagactcacaaacaccgtggccttggccgctttgcgcagccgcaggtacttcagccggtacttctcattctggctcttcttcgggagctttttcatcctggccttgctggactgcagcggagcccgcggcgaggaagcgaggccgtccagcaggctcatggtccagccccgctacgggggccccaggacgctgccggcatcggatcctaagtcggggagcgggcgggagcgctggctttgtctgttccgggctagcggaatcgggcctctaggaatctagctctccgggacgttcccagggctgaccgcagggccagagacacccgcaaccgaacgggctcccggcgcctcccagcacttccgtg

SEQ ID NO: 104453 - DNA, 418 bp, Homo sapiens
catgtctcactcatagaaccacccatggctagtggcccaggtagatgagcacatgcacccagtttcctcctgggctgtggctctgccaaccccgagggtctctggtctactgcatccagtaggtgaaaaggagaaagactgtgcagaaagcttcttaagagccctgacctggggtttctggggtccattctctgagtcagtggttatttgaaaatttgattttgattttattttttctctgtaaacttccaagctggcttttcccatttcaattcctgtgatttatgccaataaagtttgcccatgattttcaaaaaaaaaaaaaaaaaaaaaaaaaaaaaaaaaaaaaaaaaaaaaaaaaaaaaaaaaaaaaaaaaaaaaaaagtttttttttttgaggggccgggttttttttttt

SEQ ID NO: 104454 - DNA, 420 bp, Homo sapiens
  misc_feature (1)...(420): n = a,t,c or g
gagtgaggaggctgcgactggctccggctctcacagccgtggcagaacattgagctccatagagacagcgccggggcaagtgagagccggacgggcactgggcgactctgtgcctcgctgaggaaaaataactaaacatgggcaaaggagatcctaagaagccgagaggcaaaatggcatcatatgcattttttgtgcaaacttgacgggaggagcataagaagaagcacccagatgcttcagtcaacttctcagagttttctaagaagtgctcatagaggtggaagaccatgtctgctaaagagaaaggaaaatttgaagatatggcaaaagcggacaaggcccgttatgaaagagaaatgaaaacctatatccctcccaaaggggagacattctgaatgcttctaagtaaatacaatn

SEQ ID NO: 104455 - DNA, 455 bp, Homo sapiens
gaacaaataacatatacttggcgaagttgtacctgccagaattagcaagagctttctttaagaagacattagtcaaactcatcaaattgaaggttaacaccttatgagttgtagttactgaccagaaatatggacagacttcttatacttgcaggaggtatgcctggactgggccaggggccacctacagatgctcctgcagtggacacagcagaacacgtctatatctcttacctggcactgttaaaaatgttaaaacatggccgtgctggagttccaatggaagttatgggtttgatgcttggagaatttgatgatgattataccgtcagagtgattgatgtgatagctatgccacagtcatgaacaggtgtcagtgcggaggcagttgatccagtgatccaagctaaaatgtcggatatgttgaagcagacaggaaagccggagatggatgg

SEQ ID NO: 104456 - DNA, 483 bp, Homo sapiens
cacagctgcagcctgtaattcactcccactgcctgggattgggctggatccgtgagctcataacaaggtgaacgcccagctgcagccatgaagatctgaagtcttaccctgctctccttcctcctactggctgctcatgtgctcctggtggaggggaaaaaaaaagtgaagaaaggactttacatcaaagtggattcagaataaaaggacactctgggcaacacccatattaagcagaaaagcaggcccgggaacaaaggcaagtttgttaccaaagaccataccaactgcacatgggctgttactgagcaggaggagggcatctctctcaaggttgagtgcactcaattggaccatgaattttcctgggcctatgctggcaatccaaccttatgcctaaagctcacggatgagatagtctattgtaaaccagttgcacggaatctgcgcttacagaatgacatcatgatatattctccacag

SEQ ID NO: 104457 - DNA, 440 bp, Homo sapiens
gttgggtggaaaaagactttcttctctattttcctagttatatatgctatcatatgtctgttatactcctcttgaagttaccctgaaacctgggctcttgaagacgcatcactggagcagatggataatggatactggggctatatgatgactgacccagtcacattaaatgtaggtggacacttgtatacaacgattctcaccacattgacgcgttacccggattccatgcttggagctatgaatgggggggacttccccacagcttgagaccctcaaggcaattactttattgatctagatggacctcttttccgatatgtcctcaacttcttaagaacttcagaattgaccttaccgttggattttaaggaatttgatctgcttcttaaataatcagatttttaccagattgagcccttgattcagtgtatcaatga

SEQ ID NO: 104458 - DNA, 427 bp, Homo sapiens
  misc_feature (1)...(427): n = a,t,c or g
gagtagcacttttaatttcctttaagagcatttcctttgcatgcataacttggctacctacttggcaaaagcagcctagcttttggcttagctcagcttttgacatgcattccttactaagtttaattatttctcacttttgatttaaagtgaaagacatgtgactcttcccttcacttagaagccactgtaggattattaaccggcctaatttcaatattgtggtatctcagggaatagaatagggaggcccaaggaggaaagagacggggtaacagccagttggtggagcagtcggaacacacacaccaattattgattacgttaactattttatatgggaatggttcctggcatcccaaaacaactatgatagtaacattaaggatcactggataccgatcaccataaccgatgtaatattaan

SEQ ID NO: 104459 - DNA, 957 bp, Homo sapiens
  misc_feature (1)...(957): n = a,t,c or g
ggaaacctgtcagatcatgtgcaagaagtaagcgaagtggtgagaactgggtgggggagacacagccctcgacacagggagagcaccccgtgcgggaggagccttcagtacaagagacttggtctgccatcaagtggctctctgcactgttgacaattgtcagtcatttaagacagaggannnnnnnnnnnnnnnnnnnnnnnnnnnnnnnnnnnnnnnnnnnnnnnnnnnnnnnnnnnnnnnnnnnnnnnnnnnnnnnnnnnnnnnnnnnnnnnnnnnnnnntcattcacctgttgccaacaacatgagggagtttctccacagcccttgattcctgaattgtccaacaaatcaacagtcaccaatacattgacttaaggagtaaacaagcagcttttctctacacaccaccgggcaccccaggaaggcgcagctccctgctccacccccgcctcttggtgcctgtatccagcagaaggacccagcaggaggctgaatccaagcactgctctcaggccactctatcctcatccctggatcctccagggaacaagataaaaaaaaaaaaaatcctgttttcctgctttccaaaatggagggccttaacatcaaccaaagttacaaaacaaaaacaaaacacaggagctagctgggcgcggtggctcacacccgtggtcccaacattttgggagaccaaggtgggaggaatgcttgagttgtaggagttcaaaccagcctggcaaatatggcaagaccccatctctctaaagaagtaaacaaaaatcagccgagcatcatatcacatgcctgtaagtccccagctactctggaggctgagatgaagactgcttgagccagggagggcaaggctgccgtgagccaagatcacaccaccacaccctagcccagggagacagagcaagactttttttcaaaaccaacaaccaaaaaaaaaa

SEQ ID NO: 104460 - DNA, 424 bp, Homo sapiens
ggaaatgattcagaggtccaaacggtaagaccaagaaaacgggagtacgtatacaagtgtaaaccaggccaccaagtggtcgggagctctggcttgcacccagaataaatgtattatactcaagtttaaacattatgagaaagttgtgagagtcatttctcacttatggcactgaaaaaaaaaaaaggcccatcatggtatgaatgactcatatgcaaaagatgaaaaacttttcactaattggcatgtcttaggctcctttttattaaaaccctaaatgtaaataaggaatattttaggccaggtacgggggttaatgcctgaaatcccagcatttagggaggccaaggtgtgcaaatcacatgaggttaggagttcaaaaccaacttggccaacatggggaaattccatttttacttaaaag

SEQ ID NO: 104461 - DNA, 469 bp, Homo sapiens
cggagcagatccggtgactctcttccagcctgcgaccgcccttcgggggcctctgcgcttgcaacctgcgagaccatcttctcggccatctcctgcttctgggacctgccagcaccgtctttgcggttaactccttcttgccaaccaaccatgagctcccagattcgtcagaattattccaccgacacggaggcagccgtcaacagcctggacaattggtacctgcaagcctcctacacctacctctgtctgggcttctatttcgaccgcgatgatgtggctctggaaggcgtgagccagttcttccgcgaattggccgaggagaatcgcgagggctacgatcgttttctgaagatgcagaaccagcgtggcggccgcgctctcttccaggacatcatgacgccagctgaggatgattgaggtaaaacccacaacgccatgacagctgccatgggcctggagacaaagt

SEQ ID NO: 104462 - DNA, 420 bp, Homo sapiens
gtttcaccatgttggccacgctggtcggaaactccgtatctcagctgatccacctgccttggactcccaaagtgctgagattacaggtgtgagccactgtgcccagcctgttctctgtatcttaaatcaactctgtgccaaagcatttctgtcccctgactcccacccctacccaccaaaaagtggtagacatgaatggcaagtaagggaacagaaaatgtctccttgcagctatatatattttaaacgaactgtgtaataagtatgagctaatgagacctaaagacagtacatgacaaacgaagaatacctatacctatcaggggcaaaatgatggcaatccttcatttgatcatagagaactgataaaagtattatctttctaccataaagccaactgtccttttcagaataagggag

SEQ ID NO: 104463 - DNA, 427 bp, Homo sapiens
cgttgctgaggagacgcctggagagttgtggactggggcaacctttgccagtgatgagaagtgatgctcgtggcattgctgaatctctctgaatatgattcgaattgcagccttaaatgccagctccaccattgatgatgatcatgaatgaagctttacacgtcacaatacccagacaaaggaggctcaggaagcaaaggcttttgcattgtaccactaggcccttgatctgcagaaacatgaccggattgaggagtctgccaaagcctaccatgagctcttggaggcgagcctgctgcgggaggcagtttcatccggagatgagaacgaggggttgaaacaccctgggctgatactgaaatattccacttataagaacttggcccagctggcatcccagcgggaggatctggagacagccatggag

SEQ ID NO: 104464 - DNA, 412 bp, Homo sapiens
  misc_feature (1)...(412): n = a,t,c or g
ctgtgttggccaggctggtcgtgaactcctgagctcaagtgatccacccacctcagcctcccagagtgctaggattacaggccttttgactcttttatctgagttttattgacccctctaattctcttacccagaatatttatccttcaccagcaactctgactctttgacgggaggcctcagttctagtccttggtctgctggtgtcattgctgtangaatgaccacgggcctcagtttccccatttgtataatgggaagcctgtaccatgtcattcttaagatttctcctgactccagtgagctggaattctatatgctggtctaggagctgtgttcagacggatgaggatggctttgtctttttggaagggtttgattgtcttcttccttttcattgtggcattttgcg

SEQ ID NO: 104465 - DNA, 413 bp, Homo sapiens
  misc_feature (1)...(413): n = a,t,c or g
tggggttacacgcgggttcaacatgcgtatcgaaaagtgttatttctgttcggggcccatctatcctggacacggcatgatgttcgtccgtaacgattgcaaggtgttcagattttgcaaatctaaatgtcataaaaactttaaaatgaagcgcaatccttgcaaagttaggtggaccaaagcattccggaaagcagctggtaaagagcttacagtggataattcatttgaatttgaaaaacgtagaaatgaacctatcaaataccagctagagctatggaataaaactattgatgccatgaacagagttgaagaaatcaaacagaagcgccaagctaaatttataatgaaccgattgtagaaaacttaagagctaccgaaagttcaggatatccaagaagtccagctaaacn

SEQ ID NO: 104466 - DNA, 417 bp, Homo sapiens
acgcacgcaagcggctccagggtacgtccccgccacgcgcgctcgcaggatcggtgcgtggtgacgtttcgccggcgcgggcgccatcccggaagcgcgagcatggccgacagatgtgcatgccgcggaagaggagaaagagatggacctgccggacttggcctccagggtcttctgcggccgcattctgagcatggtgaacacagatgatgtcaacgccatcatcctggtccagaagaacatgctggaccgctttgagaagacccttgaaatgctgctgaacttcaacaacctggccagtgcccgccttgaacagatgagcgaacgcttactgcgccacacgaggaccctataagacatgaaaccggacctgggcagcttattccgcccgatcaggactcttgaatggaaactgga

SEQ ID NO: 104467 - DNA, 443 bp, Homo sapiens
  misc_feature (1)...(443): n = a,t,c or g
taagctcctactccagacgccatgggtcatttcacagaggaggacaaggttactatcacaggcctgtggggcaaggtgaatgtggaaaatgctggacgagaaaccctgggaaggctcctggttgactacccatggacccataggttctttgacagttttggcaacctgacctctggctctgtcatcatgggcaaccccaaagtcaaggcacatggtaagaatgtgctgacttccttgggagatgccataaagcacctggatgatctcaagggcacctttgcctagctgactgaactgcactgtgacaagctggatgtggatcctgagaacttcaagctcctgggaaatgagctggagaccgacatggctatccatttcggccaagacttcacccctgaggtgcangcttacttgcagaatatggtgactgtagtggccaatgn

SEQ ID NO: 104468 - DNA, 451 bp, Homo sapiens
aaaattaacactgagttacaaactgaagtggcaatgttgaaatccatggttctgtggttaggagaacaggtacaaagcttgcagttgcagcagcaattgcgtcatcattttaatcacattcatatttgcgtaactaactcagaatataaccaaagtgagtatccgtgggaccttgtgaaagcccatttgcaaggagctttcacatccaacatcacctttgatactggtgaattccaaaacactattattgattcaactaagtgaccgcatgatttataggcttctttagatgactgctcctgaatttaggatggcctgtccatactcgcctctgtacttatgttagctgcccctgtcctggcacttcaaactccgtcttggatgctatttatggctcttcctgtatccctctcacgtctgaaggcctactttctggtctcagtcttatccc

SEQ ID NO: 104469 - DNA, 419 bp, Homo sapiens
ggaaaacacattcggcagtaccatgaagagaaagaaactggtcagaggataaatattcacgagtactaccttgggaatatgttggccaagaaccttctatttgaaaaagaacgagaagcagaagaaaaggaaaaatcatatgagattcccactaaaaatatccaaggtcagatgacaccatactatcctgtgggaatgggaaatggtacaccttgtagttagaaacaaaaccggcccagatcaagtactgtgatgtacatatgtcatcctgaatctaaacatgaaattctttcagtagctgaagttacaacttgtgaatatgaagctgtcattttgacaccactcttgtgcagtcatcctaaatataggttcagagcatctgctgtgaatgacatattttgtcaatcactgccaggatt

SEQ ID NO: 104470 - DNA, 357 bp, Homo sapiens
ctacctgcagaggggtccatacggcgttgttctggattcccggcgtaacttaaagggaaattttcacaatgtccggagcccttgatgtcctgcaaatgaacgaggaggatgtccttaagaatcttgcagtaataacccacttatgctgcaccaagactgactctccgatggaacagatcatctatgggtcgtaaactgaatacatctatagcataaagctcaataggacctgacagaatctcatgctggcagttccttaaaattatgacatctgaaatcatgatgaggtaaccgttatgaccttcaacaatactttacaaatgtttgagccttaagcatgactataccggaacacac

SEQ ID NO: 104471 - DNA, 367 bp, Homo sapiens
ctttctttctttctttctcgctctcgctctctccctccctcgctcgttttctgtctctctcgctcttgccctctcgctctctccctcgctcgttttctctctctctctctctctctctctgtctctcggccagaattctatttgcctctgatctgaaagccatgctttcctttcttccttaaacaacaaatagacatggatttaatggacatttagaccagctattcactggtgtactgggctcctgaaacaatcgaagtgctcattaaacatcagagtgtatgactaaagttctggtaaatacatggcccagttgttcaggaagataattattgagggacaaaaactgaaaacatctcatatctaa

SEQ ID NO: 104472 - DNA, 390 bp, Homo sapiens
ctggagagctcaagtgcagcaaagagaagtgtcagagcatgagcgccaagtccagaaccatatggattattggagctcctttcttaaagggacagccacgaggaggggtggaagaaggccctacagtattgataaaggctggtctgctcgagaaacttaaagagcatgagtgtgatgtgaacgattatggggacctgccctttgctgacatccctaatgacagtgcctttcgaattgtgaagaatccgaggtctgtgggaaaagcaagcgagcagctggctggcaaggtggcagaagtcaagaggagcggttgaatcagcctggttctttgcgtgaacctcggggggggacttgaatgtctatgtggccatgcgaaggtgtactctagat

SEQ ID NO: 104473 - DNA, 375 bp, Homo sapiens
ccagcaccatgagggcctggatcttctttctcctttgccgggccgggagggccttggcagtccctcagcaggaatccctgcctgatgagacagaggtggtggaagaaactgtggcagaggtgactgatgtatctgtgggagctaatcctgtccagggggaagtaggagaatttgatgatggtgcataggaaaccgaataggacgtggtggcggaaaatccctgccagaaccaccactgtaaacacggcaaggtgtgcgagctggatgagaacaacaccctcatgtgcgtgtgccaggaccccaccagctgtccagccctcattggcgaggttgagaaagtgtgcagctatgacaccttgaccttctactcttcct

SEQ ID NO: 104474 - DNA, 379 bp, Homo sapiens
gaactcctgacctcaggtgatccacccacctcggcctccgcgagtgttgggattacaggcgtgagccaccgcactcggcccttgtgtacatttttatatgagaatttttttagctaggagttcagaatttttaaaggaccatttgaatgatcttaatttttctttcatgacaacacattccataatgaatcatgcttatgtactaagagggaaaatgtatttaagttaagggtgagagacttaagttataggtgaccttagagacctaaggtgagagacttgacacatggaaggagtaacattagggtctacctctacctcaatttagttagcgatttactacaatttcagagctttaacagcagatacaaataaatcg

SEQ ID NO: 104475 - DNA, 348 bp, Homo sapiens
atggggtttcaccatgttagccaggatggtctcgatctggtgaccttgtgaggtgcctgcttcagtctcccaaagtgttgggattacagacgtgagccaacacacctggcccactgaggtcttatgagagctcctttacagtaggaactgcatcattcaacttttatctctagtacttagcatagtgcctgtgcttatttagcgtgctttgatgaaacttaggtaactcatgtctgcaggtgaacttggtgtagggaactgcccagattaaattcccagctctacttccttcataaattggttatttgggatctataagtcttagactcctgacctatataattgagg

SEQ ID NO: 104476 - DNA, 368 bp, Homo sapiens
gaacccaccatggagctgactactgccgagaagaccaacgggaaggccgcctggcgtaaggtcggcgcgcacgctggcgagtatggtgcggaggccctggagaggatgttcctgaccttccccaccacctagacctacttcccgcacttcgacctgagccacggctctgcccatgttaagggccactgcaagaaggtggccgacgcgctgaccaacgccgtggcgcacgtggacgacatgcccaacgcgctgtccgccctgaactacctgcacgcgcacaagcttcggttggacccggtcaacttcaagctcctaagccactgactgctgtggaccctgtccgcccacctgcacgtcgagtttacccg

SEQ ID NO: 104477 - DNA, 349 bp, Homo sapiens
atccattatattggggacattgaaaccctgtgtacaaatatgctggatgttttcagtttttttttttttttttttgaaacagggttttgttttgtcccccaccagggatgggatcagggttaattgcagttttaaactccggggaacaggggatcctcccttttttgcctaagcctcccaggggtttggaaatccaaaagcttgccaccaccccgggttaattttaaaattttttgaaaaaacggggtttaattgggttgcccagtctggaagtaggaaagggatgtggtttgaaaagggaaaaaaattgccgggatgacctgacccctgaattaggaggaaaggcctc

SEQ ID NO: 104478 - DNA, 362 bp, Homo sapiens
ctgggtttctgcttgctcctctagaaatgcaggaactggggactccaatgaatcgcattctgcaactgacaatagcggagcaagaaaccttcctcacacctgctctgctgctcccaataccccaccaaacgtattctacagcctctgctgtccccctggccaaaccagatacttgaccaaaggacgtgggcatcctggccctgcaggtccacttcccagcccaatatgaggaccaaactgacctggaaaactataacaacgtgaaagcattaaagtatacagaggacttgggccaaacccttatgggcttctgctcagtccaagaggacatcaactccctgtgcctgaccgtggagcaaccg

SEQ ID NO: 104479 - DNA, 333 bp, Homo sapiens
atttcctatcgcacgtctgctgtagcattctccggtaactgctactaccttctccattcctctagaccctgcctggcaatattggaatatcatttgtagaaagagtcatggaagttctgcgaccacagcttataagaattgatggccggaattacaggaagaatccagtccaagaacagacctatcaacatgaagaagattaataggacttctatcaaggctccatggagtgtgctgatgagccctgtgatgcctactaggtggagcataccccacaaggattccggactactttgagggcccccagctagctctatacgcctatagtaggaa

SEQ ID NO: 104480 - DNA, 963 bp, Homo sapiens
  misc_feature (1)...(963): n = a,t,c or g
cactatttgttacagaggatctttatttataatgcaaaaaagaaattataaatcccattttggactgtttccgtatctgtaaaacaacttataaaaaacagccactccacctgcaagaagttcttgttggtgcttatggcaggggcatgtgtttgcacagccctgggggctgggagggtgtgtttgtccagaagagagcctctccctgggaccccaacagccaggaccatggcgctccctttcaccaggccggagtcagcaagaacctggaggtgtcagaggtccggtccactcagcggggcctgggaaacactgttctggaagtggacaggctggattcctcgctggtcctgccacgtctctctgagcggaggcccgggttcgctcagttcccatccagggtattcagcacacctgctccaggcagccacgcccccggacacctgaagccgggccgctggagcaggagccagccagccaaacccaggacacctcctcaggcttctgggtcgatttctccatcatctgggcacgaccctgtctcatccagccagactgtgctccccaagtccctcggcagcatcatgcccgtgggggtggggggcgtgatgatgatgtcgggcacgtccaggtgcttgtcgttcaggacgggggcctcgtcgtggctgctgctgctgctgctgacacacatttgaaagcctgagaagccaggcgtggagcacacacgcacgtacacacgacagagagacaggcatcagtggccgccgggaaccgcgggcgccaccctcccttcactatcacctgggtcctgacgcctcgcagcaaggagcgcagctgtccccgcatcacagatgaaaaccggcgtctttcaggcaggacatcttaagccccatgtcggcacctctgcaggccgaattccaccacgctggtctagggacatcgagntctaancctcccggtcct

SEQ ID NO: 104481 - DNA, 347 bp, Homo sapiens
cccacaaccactcagggtcctgtggacagctcacctagcggcaatggctccaagctcccggacatccctgctcctggcttttgccctgatctgcctgccctggcttcaaaaggctggtgccgtccaaaccgttccgctatgcacgcttttctaccacgctatgctccaaacgcatcgcgcgcaccaactggtcattgacacctaccaggagttggaagaaacctatatcccaaaggaccacaagtattcattcctgcatgactcccagacctgcttgtgattctcagactctattccgacaccctccaacatggaggagacgcaacagacatccaatctatagctgg

SEQ ID NO: 104482 - DNA, 334 bp, Homo sapiens
aggaccaactccccgaaccactcaaggtcctgtggacagctcacctactggcaatggctccaggctcccggacgtccctgctcccgccttatgccctgctctgactgccctggctacaagaggcaggagccgtccaaacccttccggtatccaggctttttgaccacgctatgctacaagcccatcgagcacaccagctggccattgacacctaccacgagtttgacgaaacctatatcccataggaccacaagtaatcattcctgcatgactcccagacctccttctgcttaccagactctatcccgacgccctccaacatggaggaaacgca

SEQ ID NO: 104483 - DNA, 341 bp, Homo sapiens
tgctgctaacacctggagtctccgatgccatatgttatattttggattctggatatattataatgagtgacacttttacagcgtatgtcattggttgaagatttgaagttaatggctaacatgcaacagtacgttttgctgcagtagtccctccagtggcactaccctggttaggagtataatgtgacaatcccgagagaggaacttatgatgggactcacgaatggactgtgtattttaaatgcaggcactctacaggaggattctttattcgttctaacaaggtcaatcttggaacagactttgttactgcagataagaacctctatgtgctagattat

SEQ ID NO: 104484 - DNA, 351 bp, Homo sapiens
ccgacctctaccaacatctgctgagctatgatccagaccagggatttacagggaggaagagctttcggactgttgaaggcccagcaggactagaggctggatgagatctgcacgcaattgctagacgatctcaaatatagcaacgatgaggatctgccctccagactggaaggcttcaaagagaaatacatggagtttgaccttattggaaatggccatattgatatcatgtacctgaaactaatgctgtacaagcttgcagtccctcagactgacctacagctaccgaggtcaattggagaggtgtacagtggctccggggagacgatcagctaccctgactttctcatg

SEQ ID NO: 104485 - DNA, 363 bp, Homo sapiens
aagaccagctcaagcaacttggcaaaaccccatctctaccaggaaaaaaaaaaaaaaaaaaaaaaaaaaaaaaaccccggggggggggtggggcccttgatccccatttttttgggaacttgaaagggggggattttttgaccctggggggcgggggggccatgggccccaatgtgcccctggggcccccatttggggcaaaaaaagggaccccttttttaaaaaaaagggtgggggaaaaacccccttttattggggaaaaatttggaaaattttaaaaaattccccccattttggaaaaaaggggaaaacccggggaaaggaattttttttaaaaattgggcaattttaaattgggaaaag

SEQ ID NO: 104486 - DNA, 395 bp, Homo sapiens
gggttttaccatgttggtcaggctggttttgaactgctgacctcaggtgatccgcccacttcggcctcctaaagtactgggattacaagcatgagccaccatgcctggcctctacctgtgttttaacgtggactatgtttatgccttggattagaacactggagtatctggatgtgattcttcttttttttcctttaatgtcaggtcagaataactcagtggtttgaggccctcttattttcctgatggctagcgtgtttgaatgttaggtctgttgatgttttaacactagcttgcgtgagattgtgtgagaaattcaggacctgaacactgcagtacatttgaggattcctggccctcacctcctaaatgccactagctacccttcccccatg

SEQ ID NO: 104487 - DNA, 484 bp, Homo sapiens
tggtagttctatatagaaatattagaaagagaatatgtaacatttgggtaagttaatagtcaatttataggccacgtaaatgggaaggattatttccttaaatcaagagattagacaatcattgcttgtcatgaatatttaataaaaatttgagaaagctcagtttcttttgggctgcaaacatagatctagggaaataaatactgcttaactattttgttgttgttgttgttgttgtcttttaagagacagagtctcactctgttgcccacgttagagtgcagtggtgcaatcgtgggtcactgtggcctcaaactcctggactcaaatgatcctcccacctcagcctcctgattagctgggactacaggcacacaccaccatgcccagctacttaggaggggttgaggagggaggatcctttgggcccaggagttcgagtctagcctgagcaacaggctagattctttaaaaaacagagatg

SEQ ID NO: 104488 - DNA, 374 bp, Homo sapiens
ctacttctagtattagccaaatgggtcctaagtggcagcattttgccagacattgactaaatccttacatgccacatttactgaattccaataaacatatagttcttctgtggagtagttaacagtaagtggcagctcactgaatttctcccaggttctgtctcttccaaaatcctccatcctctcttatgaagggaagctgataaaaaaaaatcctcttggtgcaagctgaagctgttaaggattccttttttcactctcaggaccaacagacgttcttttgtatttcaagataatttcacctgttgttgttgatgttgttgttgttgttgttgttgttgttgttacaaagaaacaaattttgagcagcaatg

SEQ ID NO: 104489 - DNA, 346 bp, Homo sapiens
tagacaaacatgtatttaccatcttaatcattcttaagtatactgtgtattagtgtttactatatgcacattgctgtgcaatacatctctaggactttttcatccagaattctttttttttgagacagagtcttgctgtgttgcccaagctggacttcaatggcaccattgctgatcactgcgactgctgcctcacagaatcatatgaacccatgaagtcgcaggttgcagtatccaaatcgcgccattggactccagcctgggtgacaagagcaaaactctgactcaaaaaagatgacttcttcctacccctataatactgacctccaattatttgtcctaaagg

SEQ ID NO: 104490 - DNA, 387 bp, Homo sapiens
ttccctctttcatttctgaatttagttgagtcttttctctcaatcatagttaatctagctaaaggttggtcaattttatttaaaatttcaatgaaccaactcatggtttcatttatatatattttttctattctttttctgttctctattatgagactatctgctccaatctttgttatttctttctgctagctttttcttgctgaatttcgaggtttttaaagtataaagctaggctgaggatttaagatcttggttgataagttttttttcttccttttttttttctttcggcacattaaatacaccatcccgctgccctctggcctgcagtgtttctcaggagaaatatgctgataatcttagaaggaattatcatacctggct

SEQ ID NO: 104491 - DNA, 352 bp, Homo sapiens
tggatctcctgcaagaaataattctagacgaatccatagagtacagtgaaggcaagcttattagaaaagtaaaggaataaaagaatggctactctataggcagaatacccccaagggctgctggttgcctatttttatggttatttcttgattgtatgctaaacaaagggtggattattcatgcctcccctttttagaccatatagggtaacttcctgatgttgccatggcatttgtaaaatgtcatggtgctggtgggagtgtagcagtgaggatgaccagaggtcactctcgtcgccatgttggttttggtgggttttagctggcttctttactgcaacctgttttatca

SEQ ID NO: 104492 - DNA, 352 bp, Homo sapiens
aactggatgaaaatattagtaataatactgaggggaaaggcaacgtaaacaataaatacaaactttatttcaaaatatagagacaaagaagtgaattctgataattccattagtaagacaactgcaaaacatgtaaaacacaaagtcaaattcagatattttcagagtatctacacttaagacagtggtcttaaatatgatccctatatgagcagcatcagtgtcatctatgaaatttttgtttttttgagacagggtcttgctctgtcacctaagctggagtgatcatggctcactgcagcctcgacctcccaggctcaagcaattctctgacctcagtctctgaagaact

SEQ ID NO: 104493 - DNA, 357 bp, Homo sapiens
  misc_feature (1)...(357): n = a,t,c or g
attgttattatatccattaaagttaatcagccgtaagggtgaaataggttgaaaacggtagactttcattagtattaggaagatgctaaagtaactgcagtttttgcattgatggaattcgctgttagatgttggaacacattcttaaattaatgaggatatgtcatacatcattttaatgggcatttctcactttatgttcttttgctgatgacatattacctgctgaatattttatgtttattttagaccatggaaatgatgttagacaaaaagcaaatatgagcaattttcttattttagttcaaaacgggtgataaagcagcagagacaactctgaacatcaacaacgcattn

SEQ ID NO: 104494 - DNA, 346 bp, Homo sapiens
acctgatctcttatactagtatccttaatcatttgtattgccacaactaacctcctcggactcctgccttactcatttacaccaaccacccaactatctataaacctagccatggccatccccttatgagcgggcgcagtggttataggctttcgctctaagattaaaaatgccctagtactctgtacttccacccctctccccaccagtaccatgctgcctgttcacatgatggacaccagctctgatattcaccctaagatataatccataagatgacaaacttgtattcaacaccgactcctactctggctaaaatgctgaagagaatactaagaaatagggg

SEQ ID NO: 104495 - DNA, 365 bp, Homo sapiens
  misc_feature (1)...(365): n = a,t,c or g
cgaatgcaaggaatgttattttttgagtcctttattccaggcacagtattataaactgtgaggacagccaaaagacaaattccccttttttgaggaatttccaatatgaccagtctttatacaataagtaggaatgaaaagaataaaagcaacattaaaaatgcatgaagaacactgaagcacccagaagatttcagtgtggccagcctgggacagggctatgcaggagaacttttgagcggtgagattggagccagtttttgtagttagaaatggagaccaggtgtggtggctcacacctataatcccagcattttgggaagccgaggtgggtggatcacttgaggtcaggagttcaagaccan

SEQ ID NO: 104496 - DNA, 358 bp, Homo sapiens
tgaaaacatgggtaaagataaaatcataaagttttagaatccttaaaagaatcagccaaactagaatctctacgctaccacactcacattagatgataaggaaactaaggaccccaagaagttaattgtcatgattgaggtacaagctaacaaatccaaaactcactctcttgacttgtggcctgattttccttaagggtaatattgtaaatataggccagtgcaatggtgtacacatgtaataccagcattttgggaggccagggcaggattgcttaagcccaggaattcaaggacagcatgggcaacataaggagtccctatctctataaaaaagtttaaaaattagctggagtgg

SEQ ID NO: 104497 - DNA, 355 bp, Homo sapiens
ggaatacagagaacatagagcatatggcaggatagtcagaattgcagcaagagtatgatgtgcacaaggcatatctagattttgaattaggaagatggtgacatgaattaagaatgaaggcatgggtcaggtgcggtggctcatgcctgtaatcccagcactttgggaggcctaggtggggggaacacctgaggtctcccactcctggctttaaatgttggtttcatgtcagcctcccatagtgctcggattataggcaagagccactgcactttgtatttttttttattattgtattttttattgttttttaaaaaatattttcaatccatggttggttgaatccctggatgag

SEQ ID NO: 104498 - DNA, 383 bp, Homo sapiens
gagtccagggaaagacttgcttgtaactttatgaattctggatttttttttttttggctttttctaacctttccctaggggttacggtagccggaggggcccttcccagggccccaaattttgacaagcggcccttttttttggctcaaggatttcggctttaacccaaaaaccggcctataattcccctaaaaaggtcttcaatttcaaatccgggggatttccaaaagtctttaaggcccggacttacccctatggggcctcattttaaaagggggaattactcctatgatgaaaatctggaaaacctttgccccgtggggggaaataaagggccggggtcccattagggcctcctcacctgtgaaacctgcaggggattt

SEQ ID NO: 104499 - DNA, 393 bp, Homo sapiens
acttttttcctgacaaatgaaaatcaactttggggatttagaagcctacaaacaggtttataaagaaatgtatctgtaacactaacagcattattatagtatttattatccagagtaaggcggttataggttttatgttaaagataccttttgaaagtaaggcttctggcccttaactttgtttataatactaaaacctttagccgggcatggtggtgcatgcctgtggtcctggcgactcatgaggctgaagtaggaggatcacttgagtctgggaggtcgaggctgcagtgagctgtggctctgcactctagcctaggcaacagagtgagatcctgtctcataaaaatatatgtatatattaaaacctagtatatgtaactactttcatga

SEQ ID NO: 104500 - DNA, 378 bp, Homo sapiens
cggcacgagggtctcgccatgttggccaggctggtctcgaattcctggcctcaagtgacccacccgcctcagtctcccaaagtgtagggattacaggcatgagccaccatacctggccataagttacattttaatggaatctgagcaatagtctctgaccttaaggtcttttttagcctactgtttctgggattcttcttccacgtctctccttgttcccaggtgatagggaagatatatttataaataaagggtaggaaggtatctgtagtattgtctgattaataactggctgttactgtgttggactccagctaaactgaggcttcctaaagaatggtacattcatatacctttagtttatacttcttaaggaag

SEQ ID NO: 104501 - DNA, 366 bp, Homo sapiens
  misc_feature (1)...(366): n = a,t,c or g
ccacacgcctttggcacaatgaagtgggtaacctttatgtcccttcttttttttttaagctgggctaattccaggggggggtttcgccaaaatgcccccaaaagtgaggtggctcatcggttaaaagattggggaaaaaaaaatttcaaagcctgggggtgaatggccttggctcagaaccttaagcagggcccatttgaaaaccatggaaaattagggaaggaagtaccggaatttgcaaaaccaggtgttgctgatgatgcagctgaaaatggggacaaatggcttaataccctgttgggaaactatttagccccagtggcagctgttagggaaacttatggtgaaagggcggaatgttgagcn

SEQ ID NO: 104502 - DNA, 361 bp, Homo sapiens
  misc_feature (1)...(361): n = a,t,c or g
cttatttttatcgcacatatgtgactggtacctatgggaaagcctgaaaatcccctaatattctttagtattttcaggggtcttcacagcacttgcattaagtgccagaagtagatctatacctgactcctgaataagctataaactttataataagatcaagtagcccttggggagaagaaagggacttctacgtaaatataactatttctcaactttcttaatatgatactaaacataccattctgctaattgattgtgcatcatgaagcaaaacatggccaggcacggtggctcaaacctgtaatcctagaactctgggaagccaaggcggatggatcacctgaggtcaggagtttcn

SEQ ID NO: 104503 - DNA, 388 bp, Homo sapiens
aactggagaatggtgtgaagccaggaggcggagcttgcagtgaaccgagatcgcgccactgcactgcagcctaagcgacagagtgagactccgtctcaaaaacaaaaaaaaacctagagaagcctttccaagcaaggcgactcagttgaaaaaaaacctagagaagccatttaatatattattcttatcctttgaacactaaaagcgtttttctttaaaagatgcccttgtttacatggctagaagggtaatggaatatatctgtcattgtgctcataaatcacaggtcttgaattcagtctgtaatattcaaaatgaaagaaagtgcgtttatcagaatttattagtagaacttgcatttgaaaaaaaaaaaaaaaaaaaaaaaaaa

SEQ ID NO: 104504 - DNA, 357 bp, Homo sapiens
ctggaagaatggggaccagaaagagaatttgctgaagaggagaaggaaaaaaaaaacaccaaaaaaaaaaaaataaaaaattccacccccccaaaaaaacctgcccgtaagggggaagaaaaaccagggccttttaaaagggcaatcacaacaatttttgttgccagaatccccttgttttgcctaaaaggatttctgtggccaagttgctgaattatagggaggagttcccccaccccaggatccaaggggcacaccggggcccccaattgtccgccctgtcccctggccgccttcccaaaggatgtccccaattttaacccaaaaatggtggaggccgtcaaaaaccccatttta

SEQ ID NO: 104505 - DNA, 484 bp, Homo sapiens
  misc_feature (1)...(484): n = a,t,c or g
aggtagtctcatctttcagatgtganactagataccgtaccaactagacnaccgttatgacatgactactaatttaatactactcactataaggaatttaaccctcgacgccaataattctcactagctcatacccccattatgtaaaatccagtgtcacatccacctttattatcagtctcttccccacaacaatattcatgtgcctataccaagaatttattatctccaactgacacttacccacaacccaaacaacccatctctccctaagcttcaaactagactacttcctcataatattcatccttttaacattcctcgttacatggtccatcatagaattctcactgtgatatataaactcaaacccaaacattaatcagttcttcaaatatctactcattttcctaattaccatactaatcttacttaccgctaacaacctattccaactgttcatcggctaataggtcgtaccaag

SEQ ID NO: 104506 - DNA, 374 bp, Homo sapiens
gagagaacccaccatggtgctgtctcctgccgacaagaccaacgtcaaggccgtctggggtaaggtcggcgcgcacgctggctagtatggtgcggtggtcctgtttacttggttaactcttaatgttatctcggattaatttgaagattatttttaatgcttcctctctttaaaaatagctttaatgtctttgtatacttgatgtctactttatttgtttagattcccctgttaatgattattccatatcgtatagtttttttttttatttccttatatcccttttttcggttggtatcccacttttatatatttggttatccttcttctagactttcttgaatttcttattctggcgtatgttacacatgggg

SEQ ID NO: 104507 - DNA, 393 bp, Homo sapiens
gccttcctatgttgaaagaataggaaaggagaacaaatataaaactattctttatgtgggatttaaaattgttgaccatgagccaccacgcctggccaaaaaaatatgttttaaatgtcccatttcaccattgccaggcaggcattcttccttcagggagaggatggtgagaattaattggttctttgcactgttctcctcatgtggcgatttcactttcatgacagcctttctatattaaaggctcaggatgtcacggagaatctatctaatcccactgtattaagaggggaaaccgggccaagcgcagtggctcacacctctaatcccagcactttgggaggctgaggtaagtggatcacccaaggtcaggagtttgagaccagcctggcc

SEQ ID NO: 104508 - DNA, 334 bp, Homo sapiens
aataagttattcttgaatgagtacagagtttcagggttttttgtttttgtttttttttttttttttttaaacaaagttttgttttgccccccaggttgaagtccagggccggaatttgggttaattgaacccttggtttcccaggttaaaagggttttttggcctaaccctcccaagtacctggaattccaggcataccccaccaccttaagttaatttttttggaagtttaagtaaaaagggggtttcgttggaaccccaatccgcccaggctgtttaattaattaatttttaatttttttggacctaaagttttgccttgccccccaggcgg

SEQ ID NO: 104509 - DNA, 384 bp, Homo sapiens
taaatattacatttatttggtataaacaaatacctaaaagtttgaatcttattctaaatacaaaggaagttattagagaattttaagtagaaaaaaattattctaagatctcaatgactatatttgggaactggcagtatcatccatactacagtaataatctagagattagtacagtaatttcaaacaggaacccctgggtccttaaaagtccatgtagataataattgggagtccattaattgacattaagatttcaaaatgcttcttaaaaattgtagctttcggccaggcacagtggcctgtaatcccagcactttgggaggccgaggcgggcagatcacctgaggtcgggagcccgagaccagcctgaccaacatggtg

SEQ ID NO: 104510 - DNA, 293 bp, Homo sapiens
ctcaggggtatcgtaatggatagagagcctagggcaccatgtggcttgaaatcaggcatgcagtcgaagtccagtgcgtgctggtgagtgagctggtgattcctacctctggggataaacctgaacaatgttgagatcattacttgattacttgatatctgattttaggaaagtggggaatttaataaatttctggtgctctggaaaaaaaaaaaaaaaaaaaaaaaaaaaaaaaaaaaaaaaaaaaaaaaaaaaaaaaaaaaaataaaataaaaaccgggggttttatttaa

SEQ ID NO: 104511 - DNA, 361 bp, Homo sapiens
cttggctcactgcatcctccatgtcctaagttcaagtgatcctctcacctgagcctcccaagtagctgggactacaggcacacgctaccatacacagctagtttttaagtctacatccacatatatggcggtgctatttacatgttagtatattccagtgaggtcgcatctttcatcggacgcccgggagatcttcgacttgggaagtgagcacatgagtatatcggtatactcgagctggtgtatctctcatcactataggcttggaggctgtgacgcgcgactggcagtgtcattgatagagaggcgatgcacgtacaactcgggggtgggcgcgacatactcgaagctcgtgcagggg

SEQ ID NO: 104512 - DNA, 360 bp, Homo sapiens
  misc_feature (1)...(360): n = a,t,c or g
cttggctcactgcatcctccgtgtcctaagttcaagtgatcctctcacctgagcctcccaagtagctgggactacaggcacacgctaccatacacagctagtttttaagtctacatccacatatatgttggtcctatttacatgtttgtatatacaaatgaaataaattatacataggagttctgtgattttttttatttatattttggtcatttaaaaaagaatttatagcaatagggtctcagtatgttgcctaggcttgtcttgaactcctggcctaaagggatcctgtcacctataggtctcccaaagtgttgagattacaggcatgagccactgcatcagccctgcagcattttn

SEQ ID NO: 104513 - DNA, 383 bp, Homo sapiens
gtaggaccatggtctcagctacttgggaagctgaggtgggaggatcacctgagcccaggacgtggaggttacagtgagccgtgatgacaccactgcacactagcataggctacagagaccctgtctcaaaaataaatacatagataaataaataaataaaagctctatttagctggcttttaaaaagtgatgcttagataaatattctctcagaaaacagaaactaatgtcttttacttcaggtgatctgagataatctttggtaaataaagctagttttaaaattattggtaaaaatgtttttggaattgctaacatcaattataatgcaagcatactttctttaaacctagttttactagtcaaacaggcttgttatctcc

SEQ ID NO: 104514 - DNA, 384 bp, Homo sapiens
gccaggctggtcttgaactcctgacctcaggtgatccacccgccttggcctcccaaagtgctgggattacaggcgtaagccaccatgcccggacgcccttttaaattttttaaaatgcaaacatattagaggcctaagatttcaaagcaaaagttactttggggaaaccagaaatagtaatgcatatactctgtaatcttatgacagagtgtagtctgtattcatgtcagcaaagagtatttaaataaaaactcagtcttattattagcctttatagtcctgtctgggctagttatgtcagctagttacattaaaactagtgataatgaagccaagatcaaaggtttgctttattggacagttagtttcacagcaggaaaaacg

SEQ ID NO: 104515 - DNA, 637 bp, Homo sapiens
acaaaaaaccagctcctttgccttcctagccatgtttcagatgctcagtaactgtgtgtggctgtggaactggacagctcagccgtagagtgtttccctttcttgttaatctttttttagaaatgctaacggtggagactaaggcatacaagtatgactagaattgccagctacacattagaaggtttaggttcaaaactgggagtaaagacttaactcttggagcttgggatagtgctacaactagtcctggcctgagccttttcttcattcatgttttatccttttttctttatttttggacactgataagaacctgtatgagattgtttccttttttccccccgcgttgtaggtatcttgttttgcaccaacctaataaaaatcccacccttaggcttgagttctcctgtgctcaagcaattttcttaccttggcttcctgaatagctgggactataggcatgcaccaccacgcctggctaatttttatatttttagtagagacggggtcttgctattttgcacaggctgatctctaagtcctggcctcaagtgatcttcctgtttcagtccccaaggtgttgggattatgggcatgaactgctgcacccagccctttatactcaaaaaaaaaa

SEQ ID NO: 104516 - DNA, 363 bp, Homo sapiens
gctctcctcacacaagcgcttacttgccgacaggctggagctgaggcaccgcatgccggagccaccccttctctgatgcctccttcgctgcctcagggcttccgtgactgctcgccctccgacgctgcttacactatggaaatgacgatagacaaaaagcaaaaccaagtgattatcttattcaagttcaaaatgggtcataaagcagcacagacaactcgcaacatcaacaatgcatttggcccagaaattgctaacaaaggtacagtgcaatggaggttcaagaacttttgcaaaagagacgagagccgagaagatgacgagtgatatgcccagccatcaaaagtggcaaccgaccaattg

SEQ ID NO: 104517 - DNA, 379 bp, Homo sapiens
actgcttcttcgaatttgcaattcaatatgagaatcacctaggagctggtaaactgaggccgaactcctgactttatatttactgcccaatgctttacttaaccattttacctctcccccactgatgttcgccgaccggagactattctgtacaaaccacatagacattggaacactatacctattattcggcgcatgagctgtagtcctaggcacagctctaagcctacttattcgagccgagctgtgccagccaggcaaccttctatgtaacgaccacatctacaacgttatcgtcacagcccatgcatttgtaataatcttcttcataggattacccatcataatcggaggctttggcaactgactatttccccta

SEQ ID NO: 104518 - DNA, 350 bp, Homo sapiens
gcggtagggggtacgggggctggtcccagaagatggcggaggcggtggatttctggtaggtcctactttaggacaagatgtggtaccgttgaagcgtcagtctttgattcacagacagttgagcttttcagctgggaagcctttccattttttttttttaaacggttttctgaacctaggaacccatggcaaaaggaaagacagagtcccctggccccaaaaggtgtggcccataaatttaatgggtcattagccaaagggggaccttgaggtttcgaggagcagggctattttttatgggagaatttcttcgcttaggggaaaatttacttgagatccccagaggggcg

SEQ ID NO: 104519 - DNA, 383 bp, Homo sapiens
caaattcctggccttaggtgatctgcccgccttggcctcccaaagtgctgggattacaggcatgagccactgcactcagccttgtgtgcgttttagagtcttaactagtagtttccccaataatgtaatgtgattttatctttgaaacatactgtaaggaaacttttgattttaagtaaaaaagcttaaaaatgattaatatctaaaaatgcttgtatacatatatatgtcctcagaaaaagcaagaacagcttgtggaataagcacgtctttaaggaattatcgatgtcagagtctatccatttaaagctgaagaccattacaggaaagtcatgttaaaatattcattggatatggtaaaggaggtactggtggctgggctg

SEQ ID NO: 104520 - DNA, 543 bp, Homo sapiens
  misc_feature (1)...(543): n = a,t,c or g
ccatagcacgttctgactcatcacctgccaaccgctatatactctgcaacacactcacatcgacactcatcacacaggcacgtacgaactggcgtccgcgcatcgaccgcctgtggacngcatcggaataccgggtcgacccacgcgtccgcacatgcatatcatatagtacacaccaacccatgacccctaacaggggccctctcagccctcctaatgacctccagcctagccatgggaattcacttccactccataacgctcctcatactaggcctactaaccaacacactaaccatataccactgatggcgcgatgtaacacgagaaagcacataccaaggccaccacacaccacctgtccaaaaaggccttcaatacggtataatcctatatattacctgataagtttttttcttcgcaggatttttctgagccttttaccactccatcctatcccctacccctcaattaggagggcactggtccccaacaggcatcaccccgataaatcccctaaaagacccactcctaaacacatcg

SEQ ID NO: 104521 - DNA, 345 bp, Homo sapiens
  misc_feature (1)...(345): n = a,t,c or g
cagagagtgaggtagtggcgagaaagctgactccattcatcagatccagtttatgagggttgggggtgagcaagggctgtctgcagaaacccccatcaagagctgctgaatgaagtgtcccttcccatcagtttgattcaattaaaatgcatcatttgacataaagcacttgttcacagatctccaaaaccaggaattgttctagtaaaactggaaatttgtatgagtggggggagttaaatctgttcagctgttattaaactgtcatttctcccgctaaatgaaaaaaaaaaaaaaaaaaaaaaaaaaaaaaaaaaaaaaaaaaaaaaaaaaaaaaaaaanaga

SEQ ID NO: 104522 - DNA, 409 bp, Homo sapiens
aacgctcttggtatccctgggagtgggtgtaggcatccatggcttacctgtacactgacttgagaccagaggaataaaagtgcacaccttagagcacaccttaaaaaaaaaaaaaaaaaaaaaaaaaaaaaaaaaaaaaaaaaaaaaaaaaaaaaaaaaaaaaaaaaaaaaaaaaaaaagaggggaactttaaaaaaaaatccccgggggggacccaatatgtgggggctaaaacaataaaaaactccttattaaaaggggtataaaaaaaaaaaaataaactgggccttttttttaccacttttaaaaagaaaatttgtaggagaaaattttttgaaaaaaaattttttttgggggggcaatataggggggcaaatatcctcaaaaaaatatagaggtggtggaaaaa

SEQ ID NO: 104523 - DNA, 362 bp, Homo sapiens
  misc_feature (1)...(362): n = a,t,c or g
aaataagctatcgggcccataccccgaaaaggttggttatacccttcccgtactaatgaatcccctggcccaactcgtcatctactctaccatctttgcaggcacactcatcacagcgctaagctcgcactgattttttacctgagtaggcctagaaatagacatgctagcttttattccagttctaaccaaaaaaataaaccctcgttccacagaagctgccatcaagtatttcctcacgcaagcaaccgcatccataatccttctaatagctatcctcttcaacaatatactctccggacaatgaaccataaccagcactaccagtcaatactcatcattaataatcttaagggccatgn

SEQ ID NO: 104524 - DNA, 314 bp, Homo sapiens
gtttcctaggtatagaatcatattgtcagtgaggagagatcatttgacttctaagcctatttggatgctttttatttctttctcttgcatgactgctctgacaaggactttcactactatgttgaataggagtggtgagagtgggcatccttatcttgtttacacaagacccattttctcaaaccgttaagaatgtttcataaatgtgactttaaatgacttgaaatggacataatatttttgtccgtaattgcgcattgctgccctattgtggaagagactcctagaaggggatttcctgggccaaaggcccc

SEQ ID NO: 104525 - DNA, 363 bp, Homo sapiens
ctctaccttaagttttcttggtaaattactaattcataagaatttcacagtctttgtttcaaaatgaaactcccaaagggagcagggagcctcataaaagtatcatttttcttcttcagaattgaaacttttaaagattaaaatacaaacactaaggtaaacaatgatcaacatctgacaataccatccggagtctacctaccattaagttcatttgttaaatgctaagaattcattcagctttcttagactgcttggccaggctacctctattcattcagttttctttattaagaaaccacaaagatctggctgggcgcggtggctcacgcctgtgatcccagcactttgggaggccgaggc

SEQ ID NO: 104526 - DNA, 339 bp, Homo sapiens
gggatcttccgacctcggtctcccaaactgctgggattacaggtgtgagccactgtgctggacgaatttttttaaagaaggacaaatatacttaattcggcccttcattataaaaattaaaaactctttaaaggaaacgtgggctaagctatttttctgagagactataggatttgggaagaaaaataatcatgatgaaacgttttgggaatattattggtattcagaattattgtagaaatttataaatgtggcagactttggctgggcacagtggctcacacttgtaatccaagcactttgggatgccaacgtgggcagaccacctgaggtcgggag

SEQ ID NO: 104527 - DNA, 333 bp, Homo sapiens
gctggatagtattaacgataggttagactatctactgttaattagagataagagagggtagaattactaaatttgaggacaaaacaatggaatccacccaatcagagcaatagaccaaaaatagactgaaaaaatgaacaggaccccagagatctgtgagacaatgacaaatggcccaacattcatgtcattggagtcccagaagaggataaagataatgggactgaaagagtatttgattagctgacagccagacatggtggctcatgcctgtaatctcagcattttgggaggctgaggtggccatattgcttgagctcaggagttcaagac

SEQ ID NO: 104528 - DNA, 235 bp, Homo sapiens
gggtagaagagtatgcctctgagaattttattagtttattcttgtggagaataccaagaaaatgtgtatttgcccattgctaaatatgatatatgccattttgtatttatttgtcccaagtgtctttttgtaagaggagaataaacaataaggaattactgaaaaaaaaaaaaaaaaaaaaaaaaaaaaaaaaaaaaaaaaaaaaaaaaaaaaaaaataaaacccgggggcctat

SEQ ID NO: 104529 - DNA, 474 bp, Homo sapiens
cgctttgtcacccagagtgtgagcaaggctcctcgcagcttcgacctcctgggctcaagcaatcctcccatcttagcctcccaagtagctgaggctacacacaacactgaacccagctagatttatttttattttcttgtagagacagggtcttgttatgttgcccaggttggtctcaagcaatcctcccacctagacttcccaaagtgctgagattgtgggcatgagctgctgcacttggccggaagcctatctatttcaattttagtatcctaaatagtccacaaaaacaaactgtcaccaagagtatgaactgaattaaaacacaatttcactgtacatttttaatctttctgattataacttacataaaactgaaaacatttctagctaaaactcaggatctcctttaagtactgaacgttgaacataaaacatttttaaattttttattttacctttggaaaagtaacg

SEQ ID NO: 104530 - DNA, 363 bp, Homo sapiens
aagagatcaggttcgtcctttagtgttgtgtatggttatcatttgttttgaggttagtttgattagtcattgttgggtggtgattagtcggttgttgatgagatatttggaggtggggatcaatatagggggaaatagaatgatctgtactgtggcggataggcctaggattgttgcggctatgatttatgcgaacagattttcgttcattttggttctcaaggtttgatttatattcttatgttttatttgttttgatgattgatttattagtgttagttcgttgtcttggtttattcatgcttttttttgttttttgtatttgtattatttgattagttgtgttgattgtaatttctttct

SEQ ID NO: 104531 - DNA, 391 bp, Homo sapiens
gttttggagggggacgtggcgtacgaaattatccagatgcttttgtgttatcagttctccttccttcccggcttctctttccccatctcttcccccatctcttccctctgccccccttccttgggttggctccttattgtttcttaaccctttaatatttttagaaataataattgtactactcccagagtataattttttttttttaccgggaaatgaaaaataaattactggttttctgggccattaatctttttttcttatattactacaactatatggaaatgtggaccctaatttgctattggaaaaactagggcatgagccaccatgcccggccttaaaatgccttcttaacggaaaaatgccaactccatccttaatctcaagg

SEQ ID NO: 104532 - DNA, 314 bp, Homo sapiens
gcggaggttgcagtgagccaagattgtgccattgcactgcagcctgggtgacagagcgagactctcaaaaaaaaaaaaaaaaaatttatcatttggataaacccacaaatttttttatttgaaaagaacatggtttttttaaataaagggggttttaaagtaaacactttgtttatgtgacagttttcaaatatttttactaaataaggggggttaaggaaatttttccagtaataaaatttggttgttacaacttatgaaattcaaaaaatatttttaaccattgtcagtatagaaaaatagccaagggtagg

SEQ ID NO: 104533 - DNA, 320 bp, Homo sapiens
ctcgaacccgggaagcggaggttgcagtgagccgaaataatgccattgcactccagcctgggcaacaagagtgaaactccatctcaaaaaaaaaaaaaaacccaaaaaaaacccaaaaaaaaaccctttaagggggaaccccaaaaaagggccccccgggcccttaaaaaaaaaaattttttccaaaaccctttcccaaaccctgaaacccttaaaaaaggggggatcaaaaaaagcccgttcccataaaggcttgaataactggaaaaaagccactttttttaaagggaaaaaaaccttttggggggctaaaaaaaaag

SEQ ID NO: 104534 - DNA, 319 bp, Homo sapiens
aaagatcctgtgacaaaagaacttgaataaagatccatgtaaccaatcaggagaacagaggagaaaagaagattaaaaataaaacaaacaggacctcagtaacctataggataatatcaaatagtctaacactcatgtacttggggtccgagaaggaaagaccaatagaatggggtagaagatgcatttaaaaatatggttttaggctgggcacagtgggttacatctgtaatcccagcactttgggaggtcaaggtaggcggatcacctgaggtcaggagtttcagaccaacccggccaatatggtgaaaccctgtct

SEQ ID NO: 104535 - DNA, 324 bp, Homo sapiens
atcgcttgaacccgggaggcagaggttgcagtgagccgagattgcaccattgcactccagcttgggcaacaagagcgaaactgtctcaaaaaaaaaaaaaggggttttttggccttaatccttgaattaacctaaaaatggaaaaggaaaaaggcttttggaaagtttttttcttttggccattataattagaaaaggaaaaatttcaaattctaaccagttttcagggaaccttttaaaaaaaaacccccaaacggggtccaggggctaaggctggaaatcccaactttttaaaaggccggggcgggcaaatcatttgacccg

SEQ ID NO: 104536 - DNA, 329 bp, Homo sapiens
ttagatctcttaaacgaacatcgggaaggggtacaacagagcctaggaggcatctggaaaagatttcccgaacaaaatctccgttgtactaatattaatttaaccaaaaatagaaagattactatgttggaaaggtgcgatgagaggaaacagactggtcatgggaagaactaaattctcatctaccagacgaggctaagtcaatagatatttacaggtgatagatcaagaaacaacaggataggctgagcacggtggctcacgcctgtaatcccatcactttgggaggctgaggcgggtggatcacttgaacccaagagtttgagacg

SEQ ID NO: 104537 - DNA, 374 bp, Homo sapiens
ggcacgagggcactcttcagcctaagttgctgcccaccgaggaggccggttatcttgaaatttagtcatgagaccggaacgaacttctcccatctgtgtcctgacttggtattagttttattttggatacctccttttttttttttgtttttttgaaatggccccttgttctcgtggttaatcctggagtgcaagggggcaatctttttgcaacctcattttcccgggttcaagcgatctttatgtttcagccttccgagtagctaggattactggggctcgcgaccatgcttgcataattatagtctttgtggttgatgggggttgtgttgatactattacatctggtttggctggatggttgaggcgagggg

SEQ ID NO: 104538 - DNA, 434 bp, Homo sapiens
ggcacgagtgccgctgttgctgctcgcgttgaatctacaaccgtagccagacatgggacgggaggacgagcattagatgcttaccgaatccgaagatcctgacgaggatgaagaggaagaggaggaattaacgataggactgatgctttcagtgcatactggcaaccttggaaggcaggaatgtgaaacttttccctactacttagcatcagaattgaatgggagaccgcattctgccatttctgacggcagtgagactatgacagctggccttctgcacggataccctaacatcagtgagagagcaatgcgagcagttgtagaaatgcgtaaaggcccggaagcggatagagctctgcgatgagcagtgatcctgtcgatcacatacagactaggattgcacggatgagctgtttgacttcttgcatgctacg

SEQ ID NO: 104539 - DNA, 432 bp, Homo sapiens
  misc_feature (1)...(432): n = a,t,c or g
ggcacgagagatatttgtagcagtcctttggaattggaggtgggatttcttttaaatggttaatggtgttcactttcttatactttgtgaataaaatgcatatcttatatatctcacaatcctgattgaagattggaaaatccaaaagtgaatggccaaaagttgccaggcctttattctcactagattttacaatgatttgcagatctttctagcacactttgaaactttggttttagattggacaagacagttttcttctctaagatcagaattaacgcctgggcgcagtggttcatgcctgtaatgccagaactttgggaggccaaggcaggaggaatcacttgagcccaggagttggagaccagcctaagcaacatagtgagaccttggctctacaaaaaatttaaaaattaggtatggtggtgcacn

SEQ ID NO: 104540 - DNA, 433 bp, Homo sapiens
cctcgaggccaagaattcggcacgagaggttttgttttgccattttgatttaaaatagaaatgcttttctcaccagtgtcacttcttattggtttgaatttcccttcaagttgaatggaatggagcaagtattgtcatggctcttaaagtaatttgtgcatagtgtcatgtacaattaacttcttaatacagtgcagaatggaaaatagacttggggatagaggtattttgggttggtaagatgacatataaacagtgatttttttggtttgtttttaaatttttatttttttagagacagggtcgtactctgtcgtccaagctggagtggatgagtgtgatcacaggccactgtaaccttgacctcttgggctcaagagaaacttttgcctcagccttccaagtaacctggactataggctcatgccactcg

SEQ ID NO: 104541 - DNA, 445 bp, Homo sapiens
  misc_feature (1)...(445): n = a,t,c or g
ggcacgaggcaaagtctatataggaatttgaatgtttgataatataataaaaaattttacctttatattaagagctataaataggttagaataattcttatgctctctaatagaaaaacatttaaataattaataaagtaacatttaaaaggaaagtttagcagttagaatgaagcttgttaaataaagctttagcacctgtatacatttttaatactttaaataagttttatttggggttatctctgttttctgtaggatgagtctcccagcactgattgaggtcagtgcttctaactgttttctaaatgctctagtaaaagtataaaggaagaggggcctggcgtggtggctcatgcctgtaaacctggcactttgggaggccgaggtgggtggatcacctgagggtcagagttcgagagcagcctggccaatatggtgaaan

SEQ ID NO: 104542 - DNA, 340 bp, Homo sapiens
ggcacgagggaggttgcagtgagccgaggttgtgctactgcactcccgtctgggcgacagagtaagaatccgtttcaaaaaaaaaaaaaaaaaaatttttcctttggcccaaccccctgggattaaaaaggttaatcctggattttaaaaaaaagcaaattaaaacccccatggaaaccccttttatgccctttagggggctttttttaaaaaggcaaaaaaccaccaaaccttggggggtttttcaaaaaaaggaatgcctttaccgggtttcccggaggggaaattaattcaaccctttgggaaaaaacggggggcaattccctaaaaaccttaaggg

SEQ ID NO: 104543 - DNA, 317 bp, Homo sapiens
  misc_feature (1)...(317): n = a,t,c or g
ggcacgaggggaggtggtcgccctccgtcgtggtctggcgtgtattccgagcgttggtgtctggcggtttccgaccgntggtgtctgtctctctcctctctcttttgttttgtttgtgccttgtctgtgtttctttcttgtcgatctttatttgatttgtttattttctttattctgttctttttttgtttcttgttattgttgttttattttttccttttcttctatactttattttttttttttccttattctttgtttgttaattatttttgtctttttatttatatttctttcttttttttatatttttcttc

SEQ ID NO: 104544 - DNA, 308 bp, Homo sapiens
ggcacgagtgcaacctccgtgttccaggttcaaatgattgtcctgcctcagcctcccgagtagctgggactacaggcatgcaccaccatgcccagataacgtctgtataataaggatagatgttgttataataaatgaaaatgtatatgaatattattatacttatttcaaacgaattatattttttagatgttttttgaaaagtagtgataataattgtgggatatttgtgtaaatttattgttaataaagaaatatttttaaatagttgttttaaaattttatgaaagtattatttattattttag

SEQ ID NO: 104545 - DNA, 357 bp, Homo sapiens
ggcacgagagaaagccttatggaggagaggtacagtttatctggaggagggagctcaagggaaatcttacatttttgcctgggtctctgtgacttgttgctgccttcctgagatggctggtcaagtagaaaggtgctgtcctaacatgggaacgcagggtttctcttcagagcaaatgggcgtgtgatagcccatcctttaaagacagtgtcaatgtgatctgtagatactgactttctacttccagactttgtgacactgaggactttcattaaaagtcctaactcagtggctgggggctgtggctcacgcttgtaatcccagcactttgggaggccgaggcggctagattacctg

SEQ ID NO: 104546 - DNA, 338 bp, Homo sapiens
ggcacgagaggcagaggttgcagtaggccgagatcccacctgggcaacaagagtgaaactctgtctcaaaaaaaaaaaaaaaaatcagttcattaaataagtccctacagtatgctagctaaacactgggctgattgctttgaccataacaaaggggtatgggatatggccattatagctccatacatctgataaatgaaaaaaaacttgaatgctgggctaataattgcaataaaaatatataccgttttgaatttgtaaacatcttaaaaaaaatacctaaaaaaaaacttttaatgaccaaagggattaacatgtctgctttccatttttaagaa

SEQ ID NO: 104547 - DNA, 343 bp, Homo sapiens
aatatgccaacaattcggcacgagataccctgccttagaggcccgtgtcctccttgagcttacttagattttctacccaaatagcctctcacaaaactcagtcctgtgagttaactatctgttgtataaggaagcagttttttaggagggtctccttctgtcgcccaggctggagtgcatctgcctgatcatggctcactgcaggcttgacctcacgggctcaagcgaccctgacatctcagtctcctgagtagctgggactacaggcatgctccactgcacccaatccatttggacatcttttggacagacggggacttgtcctattgcaaggttgtttttg

SEQ ID NO: 104548 - DNA, 344 bp, Homo sapiens
ggcacgagcactgcactccagcctgggcgacagagcaagattctgtcttgagggaaaaaaaagcccctaaggcatgatgccactgaaggccaagtcagccacgggccatatgtggccagaacaggtgagcagcatcagtctcattgctatggaggtggtgaacccactgattggtctggcggtctgaggttcatcctcggcatttctcctctggtacagcgccccggtaatactacaggcttgaacctaatatggtctgagcatagtcaactgatatcgatgcaccgagaataagaacgatactaccgcagggcctgagagactctcaactcattacaatcagc

SEQ ID NO: 104549 - DNA, 326 bp, Homo sapiens
ggcacgagagtaagaattaatttgcacacagggcttctaaaaagtgggccacttcttattttgagaaaaacttcaaaattatgtaataaatttcactgagaaataaaatattgacataaataacaatagaacaatatcaagtttttggtaaaataaaaagttattcatgtgaaaaataaaataatagaacaatactaggtgctggggaggatgtggagcaaccagaagaattatacactgctagcaagaatgtagaatttgaaagtgtcaacctcagtcactttggagaacagtttgacaatttcttaacacgttaaacatacgtg

SEQ ID NO: 104550 - DNA, 321 bp, Homo sapiens
ggcacgagccagctactcaggaggctgaggcacaagaatcacttgaatctggaaggcagaggttgcagtgagctgagatcgcaccactccactccagcctggacacagagcgagactgtctgaaaaaaaacgtaacagtacttaactacttgctgaaatgacatggatgggatttcaaaattatgctcattgaaagaagccagacacaaaataccactaactgaatgattcaatttatataaaattgtagaaaagacaagttatagtgacagaacacatatcagtgttgccagttgtcagggaggtggaagaagagaagtt

SEQ ID NO: 104551 - DNA, 341 bp, Homo sapiens
ggcacgagccaggggcgttgggaacggttgtaggacgtggctctttattggtgagttttccatttacctccgctgaacctagagcttcagacgccctatggcgtccgcctcgacccaaccggcggccttgagcgctgagcaagcaaaggcctcaatccactaattccttgcgctctccgctgggcccgctgtctgttctccgacgcctacccgggacgcctccctgggatgcttctggcgcgcagtggtcctcgcggaggtgatccaggcgttctccgccccggagaatgcagtgcgcatggacgaggctcgggataacgcctgcaacgacatgggtaaga

SEQ ID NO: 104552 - DNA, 435 bp, Homo sapiens
ggcacgaggattgcttgagtccaggagttgaaggctacagtgagctttgatcacatcactgcactctagcctgagcaacaaagcaagacctcatctcttaaaaaaaaaaaaaaaaaaaggttaccattgaaggtaagggtttttgaaaacctattacaaacctgatacatgcacagcctaatcccaggcactggttttacccaaagaattaaaacagagctccagcctgcagggaataaatagccaactgggaacagactaaaaaaactgaaataggtcacatatgtaccagtcaaaacggaaatacttatgaaaatttatagcacactgagctttacctccctgacccattcttggaggtcacagcaggatgaaatagctaaaataccccactttgaaagctaccaaaactccgggactttgaaaaggagttaa

SEQ ID NO: 104553 - DNA, 442 bp, Homo sapiens
  misc_feature (1)...(442): n = a,t,c or g
ggcacgagcggcacgagaccccttgttgggcccttgagatctggaaataaatcagttcatactttcagtgagccaagattgcgccattgtaagccagccgaagcaacaaaagtgaaactctgtctcaaataaataaataaaataaaataaaacaggccaggcatagtggcttcacttgtaatcccagcactttggngggnggatcacctcgaactcctaacctctggggatctgcccgcctcagcctcccaaagtgctgggattacaggcgtaagctaccacgcacaggcttaattttggatttttaatagagacggagtttgccatattagtataggatggtgctagcttaatgaatgcataatatccttgatgagaagcgagtagaattgatatcgaagaaagtggacgacaatcggttacgcatgatgtgggctgttag

SEQ ID NO: 104554 - DNA, 327 bp, Homo sapiens
  misc_feature (1)...(327): n = a,t,c or g
ggcacgagcatttcctaggctcccttgaagctaaatgtagccatggaactgagtctgggccaatgggatgtaagcagaagcaacctctgggaaatacccttaaagaaaggggacacaggccgggtgcagtggctcacgcctgtaatcccagcactttgggaggcagaggtggacagaacacctgaagtcacgagtgtgacacgctgctgaccgacctggagaagcaacagctatactagcagtagagactgaccctgagagagccgtatggcccgtccaagcctagagctgttggagatctggctgaacgtacgattggaaggagan

SEQ ID NO: 104555 - DNA, 332 bp, Homo sapiens
ggcacgaggtgcatgcctgtgatcccagctactctagaggctgaggtgggaggatccttgagcctgggagacagagattgtagtgagctgagatcatgccactgaactccaatctgggtgacagagaccctgtctcataaaacaatacagaaatttttacatagtcctatatgggtagttactaccatattagatagtgcagacttagttcactctgacctactgggactaatatttttaacacctagggacttagttacttgtatatggcgctctcgtccctatcgtagcttctactcatcgctacattgactagtcttcttcccaagtac

SEQ ID NO: 104556 - DNA, 361 bp, Homo sapiens
ggcacgagatgattggtcctaccagcctggctaatttttgtatttttagtagagatgaggttttgccatgttggccaggctggtctcaaactcctgacctcaggtaatcttagtatgagaatgaggtgcggtgttgaggagaaaagcagcctagtgcttacacctatagaggactggggtcaacagacccagcgctgtgggtgagcctggcttggctcacctgtgcctgcgggttctgccttgctcccccatagcagggctgtgtctgggtcagactccacgtggggatggatgcaagagcagggcacagtgtagaccacagtgtgttccccacgctagctctatagcgtgttgccttctg

SEQ ID NO: 104557 - DNA, 347 bp, Homo sapiens
ggcacgagagactggtcttgaactcctgacctcaggtgatctgcccacctcggcctcccaaagtgttgggattacaggcgtgagctaccgtgcccggcctaaaaattatattttctagccttggcaacatagcaagacctcatctcttctaaaaataacaaaattagcacacacctctagccccagaggctactcaggaggtggaggtgagaggattgcttgaacccaggagtttcaggttatagggagctgtgattgtgccactgcagtccaacctgggcaacagagtgagaccctactaaaaaaaaaaaaaaaaaaggatctttaattaaccggccgcaggctta

SEQ ID NO: 104558 - DNA, 348 bp, Homo sapiens
ggcacgagagccacaaatataaaggtttcctacttcatatgacactgatggagaacttgaataaggttcaaaatagaacccttagcaatttataggactaacccccaggctgaaatcagttcgtttcctgggatggtttgattcatttatttgagctattatggatccacctaactggtgtatgagtgcaaacacatcctgtgtgtgttcaatacctctctgttctttcctcactaaacctgctacaagtaaagaggtgtgctttggctgggtgaggtggctcacgcctgtagtcccggcactttgggaggccgaggtgggtggatcatggcatcaggagatcgagac

SEQ ID NO: 104559 - DNA, 365 bp, Homo sapiens
  misc_feature (1)...(365): n = a,t,c or g
ggcacgagtcctgacctcaggtaatccacccgcctcagcctcccaaagtgctaggattacaggtgtgagccaccacgcctgatctcatgtgtagttttttggttttttatttgtttgtttttttganatggagtctaaggctgggagtgtttttcccaccagcccttgcccatggtggggaggacatatggtctgtgtttgagatgtttgttcactttattaacatcttgcgatgcttctgtgatcttatagtgtttcttggtcttatgttggatggtggtgtttggtgtattgtggtatttatattattctaattgtttgtgttatggttatttaattatataagctgtttattggtagtgtag

SEQ ID NO: 104560 - DNA, 366 bp, Homo sapiens
ggcacgaggaagagagtagtggttttcccagcacagagtttgagatctgagaacagtcagactgcctcctcaagtgggtccctgacccccaagtagcctaactgggaggcacccctagtaggggcagactgacacctcacacggccaggtacccctctgagatgaagcttccagaggaatgatcaggcagcaacatttgctgttcagcaatattctctgttctgcagcctctgctgctgatacccgggcacacagggtctggaatggacctccagcaaactccaacagacctgcagcctgagggtcctgacccttagaaggaaaactaacaaacagaaaggacatccacaccaaaagcccatctgt

SEQ ID NO: 104561 - DNA, 339 bp, Homo sapiens
  misc_feature (1)...(339): n = a,t,c or g
ggcacgagaatagatctaagtagaaatatatatacatacatacattttatatagctccttcaacatattataaattgtatagtagagcacgtaaaatgtgctattaaaatgttaaaacctagaataatttttgagaaattatgcaggtaaccaggtcttgacaaaaaaatgacaaaaaacacaaaaaatgggagataaatttataggaggcttatttatctctctggtgattataggcatttaaagtcaaatatcagggccgggcacggtggctcacgcctgtaatcctagcattttgggaggccgaggcgagtggatcacttaaggtcaggagtttgn

SEQ ID NO: 104562 - DNA, 342 bp, Homo sapiens
ggcacgaggacaggtggagagagagatgttaatctcaatgtatcttcttgcttgactccagcctgggcaacagaacgagactccatctcaaaaaaaaaaaaaaaaaaaaaaaaaaaaaaaaaagggcccgaacttaaggtttaagggccgggggagggttccccaaaaaaaaaaggccaggggttaaatttgccttgggaagaaaaattgggaaatttttaaacccaaaaaagggtttaaaaataacctaaaacctaaggggttttcaagggttaacccccaaaggggggataaaaaagggttttttttccgggcttaaaaatgaatgggttaacaaaacca

SEQ ID NO: 104563 - DNA, 340 bp, Homo sapiens
ggcacgagccaagaaacagtttctggagcaaaaagacaaatctgcacttacagatctagagtaaaaacacaatgtaggtctgaggttcctagccaatcccaagccagaggcccctctgggaatctctcccaagggaaatgcatatgcccacctacggggatgtcacttcaggaaggtcaacatgaaggccatatttgaccatcagatttaaggggcatcctccaaatgaacccattcagtaaagtttttttgttctgttctgttattgttttgacactgagtctcgctctgtcaccaggctggagtgcagtggctcgaactcagctcactgtaacctctg

SEQ ID NO: 104564 - DNA, 491 bp, Homo sapiens
atatctcagaataatttatacgtagacaatttcttttttgttttgtttttttgagacggagtccagcctgggcgacagagcgagactccacctcaaaaaaaaaaaaaagaaagtttacgaatttgtgttgggttggattcaaattcgtcctgggccatatgcggtccacaggctgaggtttggacaagtttggtgtagagaatgaaagggatgaggcctttgctccagccttggagccattgatcaggatagtttttagagtgtacctctttgcttaaaaggcagagggtccaccctgggcaacatagcaaggccccacctacaaaagaactacaaacaactgggcgtggtggtgcactcttgcagtcccatctgcttaggagactgaggcaggagcattgcttgggcccgggagttggaagctacagtgagccatgattacaccactgcactccagcctgggtgatagagggagactcctcaaaaaaaaa

SEQ ID NO: 104565 - DNA, 348 bp, Homo sapiens
ggcacgaggttttagtgagctgagatggcaccactgcactccagcctgggcgacagagtgagaccgtctcaaaaaaaaaaaaaaatgctaaaaaaaaccgatcatatcaccagttggggaaaatttgaagaaactgaaactttaatatactgctagtgaaaatgaaaaagggaccaatctttttgaaaaacattttgccatttttgaaaaaagttaaccatgtgatcaacctatttcacctttacctttaccaaaaaaaccaaaaagggtacttccacacaaacccttgaataaatgttcatagcaactttaaaataccccaaatttaaaaacaattttagctgttca

SEQ ID NO: 104566 - DNA, 409 bp, Homo sapiens
ggcacgaggagacggggtttcaccttgttagccaggatggtctcaatctcctgacctcatgatccacccacctcggcctcccagagtgctgggattacaggcgtgagccaccgccgggccgagagggtgatttctaagcagagaattgtatcagttatgtggatacttttgccatatataagtatactatgaatatgaattattggcatcagttttacgactagaggtcctcctaggactctgatcagtctgctcatgattttatttatgaaaccgataggttcttaagcatacagctagtaattgtctttgtctagggcatgacctggcggcttagcacgtcattacttggatgtcattcatgatttggttaatcctgggttttgcttcatcttgcgtaatcctggtg

SEQ ID NO: 104567 - DNA, 323 bp, Homo sapiens
ggcacgagctggaatacaacctacattcttttccaggtgacagatactagaggacatttaacgagacactttaagagtgaaaggtttgcccgatgaaaagagttacagagatggatgatggtgatggtcacacagcatcatggacgcgtttaataccactgaactgtacccttgaaaatggttaatatgagtctcgctctgctacccaggctggagtgcagtggtgtgaactcgggtcactgtaaccttcaacttctagattccagtgattcttttgccttaatctttcaagtacctgggattacagcggcttggcaccatcg

SEQ ID NO: 104568 - DNA, 364 bp, Homo sapiens
ggcacgagctgcatagggctcggcgtggtggtgcctgtaatcccggctacttaggaggctgaatcacttgagcccaggaggcagaggttacagtgagcagagaatgtgccactgcactccagcctgggcaacagagcaagactaagccttaaaaaaaaaaaaggaaaaaggatctttatttaaccggccgaaaccttatccctttaagggggggtaaatttaacctggggacgggccgtggttttacaacgccgggacgggaaaacctaatgcaaaaggattgcttgggcccaggatttgaggctggagagacctatgaccgccattggactccaacctgagcaccacgggaagacttagtacg

SEQ ID NO: 104569 - DNA, 330 bp, Homo sapiens
ggcacgaggagcaattgagacctgatgtaggggcatggaaagtctaaagagttacatgttgcctctttctctttttttttttttttttggaaaaaggggcccccctattttccccagccgggaaatttgagtgaccccaggaggcggaccttgcagtgacctgaaatcaccccattgcattcaaccctggaaaacaaaccaggactccttttcaaaaaaaaaaaaaaaggggaaaaaaaatttccccaaaaatgccatttccccaccctttccccccaaaaattttacccaattaggcccaaaatttttttaaaaaaactttcccccccc

SEQ ID NO: 104570 - DNA, 838 bp, Homo sapiens
tttttagtggagaatgggtttttacaatgtttggcaaggatggtcctcgatctcctgaccttttgatccacccgccttggcctcccaaagtgaaacttttctttaaaatagagatgggatcttgcctgtattgccccaggcctggtcctcagactcccttgcccttaagcagtcctccccacctcagccctccctaaagtgcctgggattacaggcgtgaagcattacatccaagtgaaacttcttgagatggttacataatgtctaaatctgctggtgtagaagttaataaagtgtagaactgaataaatattaaatattagatcaagtttctcatgtttatcttaacgtataacgatttatcttaaagcactgattttcacaaaataacatcagtgtgaaattggaaaagaagccaaatattttatttcacgtatctgggaaatgaggtgctttagtcaactgaatctgcccaaaactaaaaagcattaattaaaaagtacttaactcagaaattataaaaataggagacatcaataaaatacattctacacagaatacgccaaccatacactactcttttttgataataaaaaatgtatttactgagccagttgtggtggctcgcgcctgtaatcccagcaccttggaaggccaatgagagtggatcagttgaggccaggagtttgagaccagcctggccagcatggtgaaatgccgtctctactaagaatacaaagatgagccgggcacggtggcacgcacctgtgatcccaggtactccgaagagtgaggcaggataattgtttgaactcaggaggtggaggttgcagtgagc

SEQ ID NO: 104571 - DNA, 310 bp, Homo sapiens
ggcacgagcttcattatattccttggttctttacatatggtcaaatgtattatgtatagagtcactaaacttgcctctcacaagcagtgaatcaggagtatcaaatgcatttattttacctaactctttaaacagttcatgccaaggactatcagtgttctccatacttttagaagtagagtccttaacatttttgggtctaatcatattaagcagccaattccagaaaccccaaaaccaacttaaaaactccatctttaaagttctattcctctagaaccactcctggtaccaaaatctgtattagtca

SEQ ID NO: 104572 - DNA, 346 bp, Homo sapiens
ggcacgaggatctttatggctcctcacccacacacacacacacacacacgcacacacacacacacgcacacacacaggtgttctcaatgcgagctagggccatggacatgccactctcaggggtctgtgtgttctgacattttctttccatatcacagccctatctgtgagtggcaccaatgatgctgaagactgctgtctgtgtgagacacagaaacctatctgtggatacatcgagaggaacttactatatcttcttatcaaggatgtctgcagggtgcctgctgtagtgtgagttgtggagagggtgtatagccttatctcgcgttatagcctgtggagagac

SEQ ID NO: 104573 - DNA, 410 bp, Homo sapiens
  misc_feature (1)...(410): n = a,t,c or g
gcgcccaccctcgatccccatcgagnacncttccggaattcaccggtcgacccaagcgtacgcggacgcgtgggttctctacaaaccacacagacattggaacactatacctattattcggcgcatgagctggagtggtaggcacagctgtaagcctccttattcgagccgagctgggccagccaggcaaccttctaggtaacgaccacatgtacaacgctatcgtcacagcccatgcattcgagataatcttcttcatagtactacccatcataatcggaggctttggcaactgactagttcccctaataatcggtgcccccgatatggcgtttccccgcataaacaacatatgcttctgactcttacctccctctctcctactcctgctcgcatctgctatagcggag

SEQ ID NO: 104574 - DNA, 360 bp, Homo sapiens
ggcacgagaaatactaccgtatggcccaccataattacccccatactccttacactattcctcatcacccaactaaaaatattaaacacaaactaccacctacctccctcaccaaagcccataaaaataaaaaattataacaaaccctgagaaccaaaatgaacgaaaatctgttcgcttcattcattgcccccacaatcctaggcctacccgcggcagtactgatcattctatttccccctctattgatccccacctccaaatatctcatcaacaaccgactaatcaccacccaacaatgactaatcaaactaacctcaaaacaaatgataaccatacacaacactaaaggacgaacct

SEQ ID NO: 104575 - DNA, 348 bp, Homo sapiens
ggcacgagctgagaaccaaagtgaacgaacatctgatcgcttcattcatgggccccacaagcctaggcctacccgccgcactactgatcattctataaccccctctattgatccccacctccaaatatctcatcagcaaccgactaatcaccacccagcaatgactaatcaaactaacctcaaaccaaatgataaccatacacaacactaaaggacgaacctgatctcttatactagaatccttaatcattattattgccacaactaacctcctcggactcctgccttactcatttacaccgaccacccaactatctataaacctagccatggccatccccttatgag

SEQ ID NO: 104576 - DNA, 317 bp, Homo sapiens
  misc_feature (1)...(317): n = a,t,c or g
ctgaaacgcaacacttaaaaaacatgattgaagtcacatttatagaaaagcatgaccccaatacgcaaaattaaccccctaataaaattaattaaccactcactcatcgacctacccaccccatccaacatctccgcatgatgaaacttcggctcactccttggcgcctgcctgatcctccaaatcaccacaggactattcctagccatgcactactcaccagacgcctaaaccgccttttcatcaatcgcccacatcactcgagacgtaaattatggctgaatcatccgctaccttcacgccaatggcgcctcaan

SEQ ID NO: 104577 - DNA, 293 bp, Homo sapiens
ccttcttctctcagctcgtcaaagtcattctccatccagctttgttccgttgctggtgaggaacttcatttctttggaggaggagaggcggtctgctttttagagtttccagtttttctgttctgttttttccccatctttgtggttttatctacttttggtctttgatgatggtgatgtacagatgggtttttggtgtggatgtcctttctgtttgtcagttttccttctaacagacaggacactcagctgcaggtctgttggagtaccctgccgtgtgaagtgtcagtgtg

SEQ ID NO: 104578 - DNA, 330 bp, Homo sapiens
ggcagagttgcttgaacccaggaggcggaggttgcagcgagccgagatcgcgccactgtgcactccagctcgggcgacagtgaaagaccccgtctcaaaaaaaaaaaaaattctagggggagaaattaaaataaggggggggcccaaaagtcatgtcacatgaaaagaaccaatggggaaaaaggttcttataaccaaaaaagtttttttatgctggttctgtacagaaatccagttagcccaaggcaggcatgattattccgcttggaaagggccctctaatatcgttaagagcctttagatatgaaggattgactgtgagttgttccg

SEQ ID NO: 104579 - DNA, 309 bp, Homo sapiens
gtggctcactcctgtaatcccagcactttgggaggctgaggctggaggattgcttgagctcaggagtttgagaccagcctgagcaacatggcgaaacaccatctctcataataaaaaaaaaaaaaaacgaaaaaaaattatttttataattggtaacggggctagggggaaaaaccctggggtccccttatctgggggggtctagtaggaaggtcatcatgggcttcatgccaagtcttggaactattatttgtgaaatctgcgttttttttcttttttttttttttttggaaaaaaggggtccccccg

SEQ ID NO: 104580 - DNA, 330 bp, Homo sapiens
caggcatgggccaccaaggttggcccataggaatttttctgtgtaaaacttcccataggtattgaatctgtaacctctgctacattagggaatgatgccatatagtgaactaaccaatttaaaacaaagaaagagagagaagcaggcaagaaaaaagtgaaagagctggaaagagagagagaaagaggaaagaaaaggaaggagcagagaaagaatgagaaggaaagaagataaccataaaatatggactgaagaagaattagagagagaaatcacagttttgatgtttacgaatttttaatttgtggccttttaaatctacttcatgtg

SEQ ID NO: 104581 - DNA, 329 bp, Homo sapiens
ttctgactcttacctccctctctcctactcctgctcgcatctgctatataggaggcgggagcaggagtaggagagagggaggtaagagtcagaagcttatggagtttatgcggggaaacgccatatcgggggcaccgattattaagggaactagtcagttgccaaagcctgcgattatgatgggtattactctgacgaggagtattgaccatgcatgggctgtgacgataacggagctgatgaggtcgatacctaaaaggatggctggatggcccagctcgggtcgaataaggaggcttagagctgtgcctaggactacagctcatgcg

SEQ ID NO: 104582 - DNA, 298 bp, Homo sapiens
gcagcctcgacctcctagtctcaagtgatcttcctgccttggcctcctgagtagctgggactacaggcatgtgccaacaaacctggcccaaaacgtttttcatcgtcaatacttctttgttgagttatttttaaatgttttaagatttccaaaaattgagtttttttgtgtgttatctttttgatgaagatttttaatttaatgtcctgtggtcagagagggtggtacaaatgatagaaattcctgaaatgtgttgagacttgattcatggccttttctcaaagaaaagcatatcagt

SEQ ID NO: 104583 - DNA, 327 bp, Homo sapiens
gaataaatgattaacctgcctcgactgtctgctattgttctgcgatggccgggagatagagtttcactctgtcacccaagctggagtgcagaggcacaatttctgctcactgtaacctccgcctcctgggttcaagcagaaacatattatgttaacaaagaatagaagagaaggcgttcattatcaggtcgcaatacctgttatcaagagtcagtataaatgtttccccttcataacaatgaattacaccaccaaaggctacagtcttcccagaattgccatctcttaggcagcaaaaatacatttaacaaaaggtcgacgcggccg

SEQ ID NO: 104584 - DNA, 330 bp, Homo sapiens
cacaatcgcttgaacccgggaggaaggtgttgcagtgagccgagatcacgccactgcactccagcctgggcaacagtgagactcaggaaaaaaaaaaaaaaaagagtaccattgtttaaaaaaccaaccatttttgggtggagaaaaatgcaccagggaagggataaccatgccaaaaccgaaaaacaaacaaaaaaagggaaatttctttgaaaagaggaaagaaaaaaccccagggctatacgggtggtcaaaggctccaaaaaattttaataggctgaaggcactaaggcatccataatccattaaagattccacaatttacccatg

SEQ ID NO: 104585 - DNA, 382 bp, Homo sapiens
caggcatgtgccaccatgcccagctactcgggatgctgaggtaggagaatcacctgaagccgggaggcggaggctgcggtgagccaagactgtgccattgcactccaatgggcaacaagagctaaattccaacttgggggaaaaaaaaagcttgcattaaaggtatttttaaaaatcatttaattgtgtggtatggtatatcattttccatcaatattacttctttaccttcacatatttctgaaatttcaaccaaaaattgggggtagaccttacaatgtttaccattttttgactgattgatacggtttggatctgtgtaccccctaaatctcattctgaattgtaacccccaaggttgaaggtggggtctggtgggagt

SEQ ID NO: 104586 - DNA, 134 bp, Homo sapiens
gtgaaatcacatggctaggccggaggtcattaggagggctgagagggcccctgttaggggtcatgggctgggttttactatatgataggcatgtgattggtgggtcattatgtgttggccgtcgactcggccgt

SEQ ID NO: 104587 - DNA, 363 bp, Homo sapiens
ggcacgagacctgatctctcatacgagcatccttcaccctttttattgcctgaactacgcggctcagactactgccttagtcatttacaccaaccacccaactatgtatgaacctagccatggccatccccttatgagcggtcgcaccggatataggctatagctctatgattaccaatgccctatcccacttgttaccacaatgcacgcctacaccccttatctccatactaggtattatcgaaaccgttagcctactcattcaaccaataaccctgggcgtacgccgaaccgctaacattacatgatgccacttactcatgcacctaataggaagcgccacgctatcaatatcaaccatta

SEQ ID NO: 104588 - DNA, 365 bp, Homo sapiens
  misc_feature (1)...(365): n = a,t,c or g
ggcacgaggagagagtaccctgtctctactaaaaatacaaaaattagccaggcgtagtggcgcgcacctgcattcccagctacttgggaggctgaggcaggagaattgcttgaactggngaggtggaggttgnnnngagntgnnatngnntnnntgntttttaggttgggtttattatggaataaatttgatggaattaggattagatattttatttattgggttgttgttagatgtagattgtgaatattaatatttgggaggggttaggttagaggtatttgggagggtgtagtatgtaaattttatttatgtaaatatttagtggttaggatattaaagaattggtggtgaggttgaagggg

SEQ ID NO: 104589 - DNA, 345 bp, Homo sapiens
ggcacgagaaaaaacacgacttctgggagaagagtgaaatattcctggtctggaactcctggggtgaagcaatctgcctgcctcggcctcccaaagtgctgggattacaagcgagaaccacaacgcctggactgtaatatgccaactacaattcagaaacccgataatacacataaccttaagacacacttcaaaatcattaagaaataaccatcccaaaaacacacaatttctccaactacacgacataactccataaaaaatacaatacacttctaataacagcaacataatgcctaatctacgacaatagcctactcctattcaaactcgccaccctcacgg

SEQ ID NO: 104590 - DNA, 367 bp, Homo sapiens
  misc_feature (1)...(367): n = a,t,c or g
ggcacgagactgggttaacatttgtactgagggtacaaaggaaatggtgggtaaaactgctggcctcttggcagaaatcaaaatgtgctttggcattttgccatttggcaaaataaaaaatgataatgtgtttctgattagggtgtttgcttgtatcagagaatttctatttatatcaaaaagacaaaaaaactgtcacaaggtctgttctattttttgttgttgctgttgttgttttgagagggggggtctcattctgtcaccaagctggagtgcagtggtggagtctcagctcactgcaacctctgcctcctggcctcaagccatcctcccacctcatcctcccaagtagcggggactacagggn

SEQ ID NO: 104591 - DNA, 386 bp, Homo sapiens
  misc_feature (1)...(386): n = a,t,c or g
ggcacgagaagaatatgaggcactacctaccacctacctacctcaccacgagcccatgaggtaatacactgttatctcacaccctgagagcccacttgatcgaaaatctgcacgctgaattcattgaccgcacaatcctaggcctacccgccgcatgactgatcattctatttccgcctctattgatccccaccttctaatatctgatcaacatccgactaatggccaaccgacactgactaatcaaactaacctcggaacgaatgataaccatacgcaactctataggacgaacctgatctattatactagtatccttaatcattactattgccactgctaacctactcggactcctgccttactcaattacgcgaaccacccan

SEQ ID NO: 104592 - DNA, 315 bp, Homo sapiens
  misc_feature (1)...(315): n = a,t,c or g
ctgctggtataaagatatgttgttgatttttgtctggtcttgcatcaaacctccctgtactcttattgtttctcttgtttttaatcgacaaattatgacaattttatctcttccttttccatctctgtgtatctgatttcttcttctctcactgaattgtctaaaacctgaaatacaatgttaaatgtcaggggtgatgcagacttctttgactagttcctaactagaaaagcacctaaagcttacaactaggtatatttgctatagattttagggaagccacccttaatggagaannnnnnnnnnaaactttta

SEQ ID NO: 104593 - DNA, 368 bp, Homo sapiens
ggcacgagaccaatgatcttttataacccagcccatgacccctaacaggggccctctcagccctcctaatgacctccggcctacccatgagatttcacttccactccataacgctcctcatactaggcctactaaccaacacactaaccatataccaatgatggcgcgatgtaacacgagagagcacataccaaggccaccacacaccacctgtccaaaaaggccttcgatacgggataatcctatttattaccctagaagtttttttcttcgcacgatttttctgagccttttaccattacagcctagcccctaccccccaattatgagggcactggcccctaacaggcatcaacccgctaaatgcc

SEQ ID NO: 104594 - DNA, 396 bp, Homo sapiens
  misc_feature (1)...(396): n = a,t,c or g
ggcacgagccacatgcacttgggatgccgttgacagcagacctaccgtcgatggcttcgtgctcccagacgtccctgctgctgcttttacacctgctacatctgccatggatctaagaggctagggcctatcaagccgctgggtgttccaagctttttgaccacgctatgctccaagcgcatcgcgcgcaccagctgaccattgacacctaccaggaggttgaagaaacctatattccagaggaccacaagtattctttcctgcatgacttccagacctccttctgcttctcagactctattccgacaccctccaacactgaggaaacgcancagaaatccaatctagagctgctccgcatctccctgctgctcatcgagtcgtggctggagcccc

SEQ ID NO: 104595 - DNA, 335 bp, Homo sapiens
  misc_feature (1)...(335): n = a,t,c or g
ggcacgagtttttatacaggcagggcctcagtttgttgcccaggctaaacatcatatgcttttaaaggaacctgctgaaacagcaaagtctcttaccatgaacagttgatggttctaggagcttggggaaaaggggtggagtngtntnatgntnttttggttgttgttgttgttttttgtttttttagttagtgtattgttgttatgttatgatgttgtattatatttatgtattgataagttttggtttttatttttaatattggattatgtaatatttttatagattagtatataatatatatttagtattattttatttattgtatatgtcg

SEQ ID NO: 104596 - DNA, 379 bp, Homo sapiens
tataatttgcatttccctgacaagtaattaacttgaacacttttctatatgtttattggttatttgactgtcttctttggtaaaatgctttgaagaggaacattttcaattatcagaagaaaaacattttatttttctaataacattccaaacaattatgatgacgctattctaaggaccatactttgagtagtgaggctttattgtagaagagctaagtgaaatgatatttgaaagaacctgcagaatttgattgtggcgtagcttttggcagtcttagagggtttgaggtgagtaggagaaatctcaaaaaaaaaaaaaaaagacggggaaaaaatttgggaacctaaacctttttattatataaatatcaaatatt

SEQ ID NO: 104597 - DNA, 413 bp, Homo sapiens
ctgcattccaccctgggtgacagagcgagactctgcctcaaaaaaaaaaaaaataaaaaaaaaaaaaccccggggcggggggaaaccccgggggaaacccaaattttttaaagggctaaaaggagtgaaaaactcgttcggggtttaaaaaaacaccgggccaaaaggggaaaaccccacttttaaaaaaaaccccaaaaataacgggccccggggggggggccttaaaacccccattttctggggggtttaggccagaaaatcctttaaacctaagggataaaggttccagtggcccgaaaaccccgactttcttctcgccctggggaaaaaaatgaaatttttttcaaaaaaaaaaaaaaaacttactataccccgggaaaattttttttttttggatgaaaaacatttag

SEQ ID NO: 104598 - DNA, 409 bp, Homo sapiens
cggacgcgtgggctgaatcacagactccgggaagtggagcccaaccccctgggtaatactgatgcactttcaagtttaagaaccactgttctacaatacaaagtacaacttaacttgaccgctctgaaaaaaaaaaaaaaaaaaaaaaaaaaaaaaaaaaaaaaaaaaaaaaaaaaaaaaaaaagggggggcccctttaaaaaaaccccgggggggcccaaattttaagcgggcttcgcatttaaaaatttttccctaaaaggggggtaataaaaaacctttctgggaattttttgaaaaaacctttttttttgggggggaaatatttgggaaatccccccctataatattaaatgctccagtggtaaaaatatttttataaggttaaaaggtgaaacacctccctctt

SEQ ID NO: 104599 - DNA, 422 bp, Homo sapiens
cccacgcgtccgcgaagatctagttggatatagtttttgatttaagttgcagttatagccaatttaggctaatgcttggttttggagcttttatacacaacgtttttgttaggcatcacagttttgcaacctctgctccaaagagaaaaatagaatgagttttctttctttttttttttttggaagccaaagcctcctttttttgcccaggttggagggcaataccgcaattggggctaattgaaacctcggcctccttggttaaagaatttctctggctttgcctccggagaagcgggaataacgggcggggtgccccaccctgggtaaattttggttttttaagtaaaggcagggtttcacattgaaaacttggtttggaactccgagacggggaatcaacccgcttgtgcctcccaaaa

SEQ ID NO: 104600 - DNA, 375 bp, Homo sapiens
ctgtaaatgacactgtgaataaacccgttaccttacaaaaataaaaaaaaaaaaaaaaaaaaaaaaaaaaaaaaaaaaaaaaaaaaggggggccccttttttaaaaaccccttggggggccccattttttcccggttccgcaatttttattttttttttttttggggggtttttttaaacccctttggggtttttttgggaaaccctttttttttggggggggaaaattttgggccacctttccccaaaaattttacccttttgggggaaaaaaaattttttttgggttaaagggggaaaaaaccttttaaattccccttttttaaaaattttttttttgggggttttttttaaaaaattttttccccccggggc

SEQ ID NO: 104601 - DNA, 361 bp, Homo sapiens
ctagttagtaaggtatttttggagatactgagtcttgccgatttattttttaagagacagggactcactctgttgcccaggctgagtgccaggacacaataatagctcactcataaacttccccagcttcctgaggagctggtactataggcatgcaccaccacacccagctcatttttttccaatattgatacggtctcgctatgttgcccaggctggacttgaattcctggccttaagagatactcccatttctgactgcccatgcactgtgcactatcctccatccctggccaattagagtgttttttttttttttttaacacaaagttttgttagtttgccaaggttaaagcgcaaa

SEQ ID NO: 104602 - DNA, 378 bp, Homo sapiens
cccacgcgtccgcaatattgtgcttttgattatgatgatatttaaaactataaatcaattttgggtgaaaatgacatttttaccaatcttttccatccatcatatttatctatttattttggtctatcttaatttctctcagtaaaattttgtggttttctccatagaattcttacacatttgttattagatttattcttttatttgcttgattaaagtatttttataataaaaaaaaaaaaaaaaaaaaaaaaaaaaaaaaaaaaaaaaaaaaaaaaaaaaaaaaaagggggaaaatttaaaaggggcggggggggggaaaaaatttttgggggggggaaaaaataatagtttttttagaaatggggggtgtttttt

SEQ ID NO: 104603 - DNA, 369 bp, Homo sapiens
ttcaaagttcagcactgtggttatcattggtgatgccagaaaacattagtagacttagacaattgctatggcagtttctaaacagagctttttctatacactatttgcaactggagtgcaatattgtatattctgtgttaaagaaataaagtatttttatcatttattaatactgaaaaaaaaaaaaaaaaaaaaaaaaaaaaaaaaaaaaaaaaaaaaaaaaaaaaaaaaaaaaaaaaaaaaaaaaagatagagaggaaaatatgagggacgcaagaaaaaaatagaacgcccccccacacatgagaaattttatcccccgctgacaataattttgagagcaataccctattctggttttattaaaag

SEQ ID NO: 104604 - DNA, 380 bp, Homo sapiens
agattccatcttcacacaaaaaaaccagttgggtgtgttagtatgcacttgtattcccagctatttgagaggctgaggtggaaggattccttcggccaaggagttcaaagtttcagttatctatgatcatgccattgcactcctgggcaacagagtaagttcctatcttcaaaaaaaaagaaaaaaaaggaagaagaaagggtaaaagaaaaagggctttttattatagccggaaaaaaataacccttttaataaaaaaaaacccagattgccttatggaaataccggtatacgaacctggaaaaacccttaatggagtgaaaaacatttgaggtctatgaattggacctttcaaaagtgtaaaaagggcggttcttccg

SEQ ID NO: 104605 - DNA, 362 bp, Homo sapiens
cccaactgcattgtacattcattgaggacagggactttaaacttcattatattgctgttgctgtgtttcacctttgaatgatttttaaataaaaatctcatctttgagtcacaaaaaaaaaaaaaaaaaaaaaaaaaaaaaaaaaaaaaaaaaaaaaaaaaaaaaaggggggcccctttaaaaaaaaccccgggggggcccaaattttacccggcttcaaaaaaaaaaatctccccccaaaaagggggttaaaaaaaacactactggggaattttagaaaaaaactctttttttgggggggaaaaatcttgaaaacaaccccccaaaaaaatataaccctcataaggaaaaaaaaaatttag

SEQ ID NO: 104606 - DNA, 378 bp, Homo sapiens
gggtttcgccatgttggccaagctggccttgaactcctggcctcaagccatctgcccatttcggcctcccgaagtgctgggattacagacatgaaccatcacgcctggctcatttgggttttttttcttaatgagtttttagtttggaaaaattttagaattacagaaaagttgcaaagatagtacagagggttttggtatacctttcacccagctgcccttaatgttaatatctcacatagccatgatacatttgtcaaaactaattaagaaattaacatatcaactaaactacagattttatttagatttcaccagtttttttccttaaatcctttttctgttccagaatccaatccaggataccacattgcactt

SEQ ID NO: 104607 - DNA, 369 bp, Homo sapiens
tgaactatgactctctataggtttattttgtttgatgatacataactgtttacctaatgaatcaataatccttttatcccctactgttctgtaaagagcactttaatttcaactatgcattggagctattgttcattgttttttatttatgaaacaacattctgaatacaaatctactgaccacagagcttccagtaaatgtcatacagtacaaggaagttcacagctttcaacatctgcatttaaacagaaatgaactcacaaaaaaaaaaaaaaaaaaaaaaaaaaaaaaaaaaaaaaaaaaaaaaaaaaaaaataaaaaaaaaagggggggcctccttttaaaaaacccctggggggccccaaacg

SEQ ID NO: 104608 - DNA, 348 bp, Homo sapiens
ggcacgagcagctactcgggaggttggggtgggtgtatctcctgggcctgggagttcgaggctgcagtgagccttaattgtgccactgcactcagcctgggtgatagagtgagaccctgtcttcccccccacacacaaaaattttttttaactaaatgaaaacgtaacatatcaaaatttatgaaatgtagctgaagctgtgcttacaggaagatttacagcttttataatgcctggatatttgaaaaggagaggcttaaagcactaacgtaagcgtccattgtaagaaactacataaaacacaaactaatccgaaatatctggatgtacaggtgtgtgtttcttggg

SEQ ID NO: 104609 - DNA, 324 bp, Homo sapiens
cggacgcgtgggactagttctagatcgcgagcggccaccctttttttttttttcccttttaaaaaaggggggttttttaatggaaacctcccaaccacctttggaaaacttgggaacaaaaaatttccattaaaccttttcccgggggggccccctttgccccatgggggccttaaaaaaggcccgggggcccctcaggttccccccctttttttaaaaaaaccccaaacttcacccccttagggcctaagggagggcccccccccgctcaaaaaattttaccttttttaaaaaccctcttgggaaacccagggaaaaggtttg

SEQ ID NO: 104610 - DNA, 299 bp, Homo sapiens
attttttttgtcattatgaggtcgtattacattttccttggtttttagaagtaagcatctcaaatagcacaagaacattcaagccagcctttttaacacaaagctaaatcctgaagcacttgtgaaattagttttgggtgttcaagagggtgctgttgggattatttaatggtatgggaattttctcatttttatttttaatttttggagacagagtgttgctctgttgcctaggctggagtacagtggagcaatttgagctcactgcagtctctgcatcccgagtagctgggattacg

SEQ ID NO: 104611 - DNA, 369 bp, Homo sapiens
gtttgttattactgactttctgaagcctacttctgtcaactcaaactcattctccatccagttttgttcccttgctagcgaggagttgtattcctttggaggagaagaggctttctggtttttgaaattttaagcctttctgctctggtctctccccatctttgcagttttatctacctttggtctttaatgttgggacctacagatggggttttagtgtggatgtcctttttgttgatgttgatgctattcctttctgtttgttagttttccttctaacagacaggcccctcagctgcaggtctgttggagtttgctggaggtccactcccaatcctgtttgcctgagtatcaccagcagaggctgca

SEQ ID NO: 104612 - DNA, 353 bp, Homo sapiens
ctttggtgctttgttatataatagcagccgcaaaggactaagacaatctacatgaatagtctgaaatagatgaaagtctgaaataagggttaaaatggagaaaaggggaaaacaataattgaggaaagctaaccattgagattaatttcctttgctaagcagctttgtaaatgttctgaatattttgtttttgtatttttagtagagacggggtttcagtgtgttagccaggatggtctcaatctcctgaactcatgatccactaaaatacaaaaattagctaggcgtggcagcgtgtgcccaaaatcccagctactcaggaagctgaggcaggagaatcccttgaaccaggg

SEQ ID NO: 104613 - DNA, 377 bp, Homo sapiens
ggcacgagccgttctgtctcccaggccggagtgcaggggcacgatcatagctcactgtaacctcaaactcctggactcaagcgatcttcctgccttaaccttaacctcctgagtagctaggactgtaggcatgtaccaccgcgcctggcctgtggctattttatcattcagattaatttaattttgtattttctggctcagatgaacttaaagaagcatcaaacattttttttttatgaaacggtaaatttaatagcatcacaggccggtaaaatatattcaagtaacagaaatatcaaagccttttggccacattaaactgaacactttatgaaagcatactcatcatggatcactttgaaatatacgagatctcg

SEQ ID NO: 104614 - DNA, 406 bp, Homo sapiens
aatacatacatatatttttaaaagttgatacttctttatgacccacagttgacctttattttcttaaataccagggcagttgtggctcattgtgcattttgctgttggcccattcatttcgtttttggaaattatggttttgtattttcatgtttatttacattcatttttgtttattcagggaaagctgatctttttttcaaaccaaaaaaaaaaaaaaaaaaaaaaaaaaaaaaaaataaaaaaaaaaaaaaaaaataaaaaaaaggggggcgcggtttaaaaaattcctggggggggcccattttttggggcttccccaaataaatactttttcttaaaaagggggggattttttaaggacgtcgggttttttttgggaagactctttatttttggggggaaa

SEQ ID NO: 104615 - DNA, 549 bp, Homo sapiens
  misc_feature (1)...(549): n = a,t,c or g
tgcatggccnggagggctgggccgctcgagcacgatgattgagtcacgatntgcagggtccacccacgcgtccgattaaatcctgcatgtaatatatctgctgtcatcttagttggaccaacttcccatttatttatcttaaaactatacagttacgtcttaattccatccaaagaagatacagtttgaagacagaagtgtactctctacaatgcaatttactgtacagttagaaagcaaagtgttaaatggagaagatacttggatttattaaacattgtgagatgtaaagatgctacattttaactgaatgactagagtgattatcttttttcccccgaagttagtcgtaaatcttttgggttggaaagaatgctctacatgaggatgaatagaacacagagaggcgaacagatgatatccctgtttgtgaccatgaattcctgaaagtggaccaaggaacactttttgaactcattctggctgcaaactacttatacattagaggttggcttgatgttacatgcaagactggtgccaatatgatcn

SEQ ID NO: 104616 - DNA, 442 bp, Homo sapiens
  misc_feature (1)...(442): n = a,t,c or g
ctgttgatctcacacaaactgaatagcatctggttagtttggatcctttcctaatgtctcctggagccttggaatatgatctgttcatgcaattcagtttgtgtgagatcaacaggtatttgttgaggccaggtgcagtggctcacacctgtaatcccaaccctttgggaggccatggtgggaggatcgantaagctcaggagttccagaccattcttctctacaccttgaccttgtattgtgatgatattatatgggtagtactattgtcctacatgctcctcgcggtctctcagtgcacctgagttcatagtccctgttcctactagtttcctctaattctgctgtgctactcactctcgatcggtcaagttgatcaccctgctatatgacctaatgttttggcttagtttatgagtatatcattgtccatggttctatg

SEQ ID NO: 104617 - DNA, 408 bp, Homo sapiens
cccacgcgtccgcccacgcgtccggactagttctagatcgcgagcggcgcccttttttttttttttaaggcggcgggaaaaaggggggactttaaaacggagggggcttaccaaaggcagcggaccatttttaaaaacaaaaaaagggcccggcgggaaaaaacgggcagggaaaacctccgggggaattacaaaaacatgggccggggtttaaaaacccccaggggggctttggggggcccctacttggacaaaaaaggccctttaaggggaaaggggccctttcaggggggaacccttttggggggggggcccaaaataaaaatccaggggaccttgtgaatccgccgaaactattggccttacatccgaaggtacaaccgtttcaaaaagcgccaaaaaaacatg

SEQ ID NO: 104618 - DNA, 411 bp, Homo sapiens
cgcaaaagagcacctaagttataaatgtgtgtgtgtgcgtgtgcgtgtatatatatatatatatatatagatatgtatatatatatatataggtgggcgcggaccgtaccataatgcgtgggaggtcctttaataccaatagctactgcttattctctatatttaacgggatagctgataccgcgggcgttcaggctttaagatagctaactgccccttacacatacttatgttgcgaaaaaccttattacgaggtttaccacgccctttctcacgcacatctcatatcacatgtctgccacataacccgccctctgctcgaacattctgatatgacaacgcatcgggggcgcgctccactgaaccccattttatatcccgcatgacctattgttattgcgctatccgcac

SEQ ID NO: 104619 - DNA, 436 bp, Homo sapiens
  misc_feature (1)...(436): n = a,t,c or g
accacatggtggacgcaagcatatcctctgtacttgtatccttggtgtgagaagcagagagctggagcctccccactcaccagccaagggcagcctgcacttcatagctgttgaatgggtacttgtacttctcaagattgtccaggaaagtagatttgccagctctgagccccctcttcagtggatgacccctttcagctagagttcagcagagtctgcttttatttttataaattatcatcgttccacacctctggtggccactgactcatgtgcctaagaaatgagaccaattaattttaaaaagtggaatagtggttgggtgctggggctcacacctgtaatcccaagactttgggagggtgaggcgggaggattgcttgaggtcaggagttcgagaccagactgngtaacatagtgagacccccaactgtcg

SEQ ID NO: 104620 - DNA, 408 bp, Homo sapiens
cccacgcgtccgccaccacagtgtgtactttttgtgtctgccttggtgggactcatcctctttgtgtgttttactggtttgttttgtcgtactgatgagaagtatttttccatttttcttttctttttgttttttgagacggagtcacgctgtgtcacccaggctgaagtgcattggcccgggtttgagtgattctcctgcctcagcctcctgagtggctgggattacaggcacacaccaccatgccctatttttccatttttcaaaaacggtttataacaattaacttttacgcattgttgctgcaaatgaggcagtttttatctggtgccgcggaggaaggatgttactcaagtagttaattgggattttcctgggttgttttctcttttatttttacccatcagg

SEQ ID NO: 104621 - DNA, 380 bp, Homo sapiens
ttatgctgagaaaagtctctcttactctcccgttccctatctacccagcttctaccacctccctaaaagtattagtttcttatacagtatatgtgactagaatttctttatataaaaagaagcaaatgtatatatttatttcctttcttttttaagttctcggatacatgtgcagaacgtgcaggttcgttacataggtgtacatgtgccatggtgggtagctgcatctattttatttccacgtttttaacacaaaaggttgcatactatatattattttgtacctttaaaaaaaaaaatgggaccgggcctagtgggtcacacctataatcccagcactttgggaggccaaggtgggcagatcacctgaggtcgggagt

SEQ ID NO: 104622 - DNA, 324 bp, Homo sapiens
  misc_feature (1)...(324): n = a,t,c or g
aactatttctatatcgcgagcggccgcccccgcttctctccttctcccctccccttttcnnnnttttggtttttttttttttttttttttttttttttaaacccccccgggggggggaaaaaaaaaaaaaaaccccccccccccctcggaaaaaaaaaaaaaaggggaaaaaaaggcggggaaaaatttttttcccccccccccaggggggggggggggggccccaaaaaaatttctttaaaaagggttttaaaatttttttaaaacccccccgggggaacaaaaaaagggggggggccctttttaatccccccgggttccccc

SEQ ID NO: 104623 - DNA, 534 bp, Homo sapiens
  misc_feature (1)...(534): n = a,t,c or g
acgggcccannncctagaaaacctggagnggccgtcgcgggcaatcaatgaataatcagtgcttctcaaactctaaagtgcaaacaaatcaccaggggggtattatttaaatgaaaactttgaaatagtaggtctggggtggggcctgagattttgcacttctaagaagcgcccacatactgttgctgctgctggtctgcaaaccaaatcttgaaaatcctgatatcctaacttaactgctctgagatggagcccaggcatccctgttttctaaaagctctccaggaatctttcgtaaacagagtggagataattgttcctccaggaaaggcagaaaagttgtggaagtggattgacttattgatacttggtttcaaataccttaatttttaaaaaaatgtgttttaaaaatacagtagtgcccaggcgtggtggctcacgcctataatcccagcactttgggaagttgaggcaggcagatcaccatagatcgggagatagagaccatcctggccaacatggcgaaaccccatt

SEQ ID NO: 104624 - DNA, 403 bp, Homo sapiens
tttcaaactcctgacctcagttgatccacccgcctcagcctcccaaagtgctaggattacaggcatgaaccaccgtgcccggccaggaataagcttttgacttacccaattcagataggttgatcttcggggttttttttttttttggaaagggagttcccttttgtggcccaggcggaagggaatggccatttttttaacggaacccttggcctctggatttaaagaatttttctggcctaaccctccaaaggggcgggaataacgggggggacccccgggccccgcccaaaatgggttgtttttattgtaccaccccaaaataaagggccatagccaagattgggaaaaaaatttaaaaataaaaattttcggcattgggaagggaatggggataccactt

SEQ ID NO: 104625 - DNA, 267 bp, Homo sapiens
  misc_feature (1)...(267): n = a,t,c or g
ntttgacngccgtcggaccggcccgtgattacccgttcgacccacgcgtccgngaccgttgactattctctacaaaccacaaagacattggaacactatacctattattcggcgcatgagctggagtcctaggcacagctctaagcctccttattcgagccgagctgggccagccaggcaaccttctaggtaacgaccacatctacaacgttatcgtcacagcccatgcatttgtaataatcttctaaaaaaaaaaaaaaaaagggg

SEQ ID NO: 104626 - DNA, 405 bp, Homo sapiens
  misc_feature (1)...(405): n = a,t,c or g
ccactgcactccagcccaggtgacagagtgagactacgtctcaaaaagaaaagaaaaaagggaaaagaaaagaaatgtgattttggagacttccatttcaagtcatttggtagaatggatgctctgctctaggtaccatcctcttattaaaaaaagatcttctgtaagaattttaattgcattattgtgcccacaaaaagtaagagacatgtcctaggggatagggagcaagaaacaatgctgggacagttggttatccatttggattaaaatggaatcagatccttttctcataccttaccccaaaattaatgcttgaagacttaaagacttatgtgaaaggataaacttaaaaataataataaagagagagtatcttcatgactacagagtaaagaaagtttn

SEQ ID NO: 104627 - DNA, 449 bp, Homo sapiens
  misc_feature (1)...(449): n = a,t,c or g
cggacgcgtgggagaacacatgtgaagagactttgaaattatcaaaagaaaaaaaaaagaccagacaaaatctcatgtgccaataacttttcaaggtgcctttgttaaggaaattatatccacttaattactataatatataagactttatgaaaagcactttataaaattctaatttaaaaggtcaaaaaaaaaaaaaaaaaaaaaaaaaaaaaaaaaaaaaaaaaaaaaaaaaaaaaaaaaaanggggggggggttttttaaaaaatttttggggggggcccaattttcccgggggagaaaaaaatttttttttttttttaaggggggcaataaaaaaacccccgcgggttttttggaaaaaacccctttttttggggggggccctttgggggccccccccccccaaaaaaaatgggctttggggaaaaaaaaaaattttttgggga

SEQ ID NO: 104628 - DNA, 415 bp, Homo sapiens
  misc_feature (1)...(415): n = a,t,c or g
cccacgcgtccgctttaatttattaatgcaaacagtacctaacaaacccacaggtcctaaactaccaaacctgcattaaaaatttcggttggggcgacctcggagcagaacccaacctccgagcagtacatgctaagacttcaccagtcaaagcgaactactatactcaattgatccaataacttgaccaacggaacaagttaccctagggataacagcgcaatcctattctagagtccatatcaacaatagggtttacgacctcgatgttggatcaggacatcccaatggtgcagccgctattaaaggttcgtttgttcaacgattaaagtcctacgtgatctgagttcagaccggagtaatccaggtcgggttctatctacttcaaattcctccctgaaataaaaaaaaaaan

SEQ ID NO: 104629 - DNA, 403 bp, Homo sapiens
cttctttgcaaatgtttctaaagttaatatatgtactatagagtccactcaagtaatataacttagttgtagaggaagagatatcaacaactgtgttacagatatgtactagaatattgagatgtgagtttatcaaaccaaatttgtggttttaggacttgatatgctatagtttgaaatatttttgagctttgggaggaatttaacattaagtccacagaggcataaaatattatttcttgaataaactccctgacttccctagacaaacctttaagaagtaaggctgaaggctgggcgcggtggctcatgcctgtgatcctagcactttgggaggctgaggtgggtggatcacgttaggtcagacgtttgagaccagcctgacccgcatggggaaatcctg

SEQ ID NO: 104630 - DNA, 380 bp, Homo sapiens
ccttgaacccgggaggtggaagctgcagtgagctgagatcgcaccactgcactccagcctgggcaacagagcaagactctgtctcttaaaaaaaaaaatgcactttaggagtaaatcttcacagagtatctgaagaataggtgagaagaggtgagtgatcaggtcaggatagaacctcctaggccacaacacctaaagtcctgagttcttatggcctacctttcctctggatttctttaaaatgctcatggtttgtaactgtcttgaaaagaaccatcgggaatgcacctcacctgttttcacactcatcttttaagaatggatgagatgatataagtgaagtgatttgaattcctttaccccctctaccccctctagag

SEQ ID NO: 104631 - DNA, 175 bp, Homo sapiens
caagagattgtgtggagaaatgagaaaaatccaatatgtaaataaattgcattatattttaaatacttatatatatataaatatgtaattttacaaacatgaacatttatacatatatacatttatttgtacaaataaatatgtatacatacacaaatgtatgctgtgtatgcat

SEQ ID NO: 104632 - DNA, 473 bp, Homo sapiens
  misc_feature (1)...(473): n = a,t,c or g
gaancttgcgcggaaaaaaaaactgacgccgttgaagcnccgaannccggngaccacgcgtccgcccacgcgtccgcttagttgggattcatggcatctgtcaataattgatgtgaacttaaatggcaatttacctataaaaagataacttactactcttcttttaaaagtctatatacttctgtcatttgctggaaatgaattattagtctttattcagcaaacatttatagaccaaatagtgggtaccaaaataagtactaccctgcagctgcttgatgatggtaataactaacatgtaaatctttaataaacagtgtacattcttaatctgtccatcaactcggtacagtcagtattgttgtccgtatttcacagattaagacaccagcctagaggccgagtgcagtggctcacgcctgtaatcccagcactttgggaggcccaggcgggtggatcaccttaggtcaggn

SEQ ID NO: 104633 - DNA, 403 bp, Homo sapiens
  misc_feature (1)...(403): n = a,t,c or g
aaaaccccactctgcatcaactgaacgcaaatcagccactttaattaagctaagcccttactaaaaaaaaaaaaaaaaaaaaaaaaaaaaaaaaaaaaaaaaaaaaaaaanccgggggggcccttaaaaaaaaaccccgggggggccaaaaaaaaacggggggaggaaaaaaaaaatttctccctaaaaggggggccaaaaaaaaaccaccgggggattttggaaaaaaaaaccaaattggggggggggaaaaaaggggcaaaaccccccccaaaaaaaaaaagccctagggaaaaaaaaaaaatttaaaggggaaaggggggaaaaaaaccccgaaatccgggggggggaaaaagtttcccccccgggttgtttaaaaaaaaaaattacccccggggggggg

SEQ ID NO: 104634 - DNA, 542 bp, Homo sapiens
agaagaaaaaccttgatcgcccctaggtagtcccgcctgcaggaattcggcacgaggtcacgtggtgcagagcacgcagagtccttctgtcggttggtcctggagcggcgcagccggagtggggccgtgaggagaataaaggcagccccgttgatgactgaaaatgacaaagcatccacctaacagacgaggaatcagctttgaagtgggagcccagttggaagcccgggaccgtttaaaaaactggtatccagctcacatagaagacattgactacgaggaaggaaaagtactcatccatttcaagcgttggaaccatcgttatgatgagtggttctgctgggacagtccttatttacgccctttagagaaaatacagctgaggaaagagggcttgcatgaagaggatggatcttctgtgagtaacaaatctgggaagttctgtagtatgcaaggtcagccattgggctgcttgtgtttcaatctttgatgttagtagcagctggagaccagttcttatttaggcctatagttgtaaccct

SEQ ID NO: 104635 - DNA, 410 bp, Homo sapiens
gtggtgcacacctgtagtgctagctgcttgggaggctgaggtgggaggatttcttgagcttgggaatttgaagctgcagtgagctatgattgtgccactatacttcagcctgagtaacagagaggagatctgtctctaaaaaaaaaaaaaaaggagagagagagagaggggaccttcctaagtccagttgaccctcagggaaggggaaattaaattgccccctttgaaaaaagggtcatgaaagttgggcacatactttaaaaaaaaaaaaaacccacggggtggggggcttcaggccggaaccccaacccctttggaaggccggggcggggggatcccctggggccaggagttggaaatcaccctgcccaactgggggaggccccctctttacaaaaagaacaaaaagg

SEQ ID NO: 104636 - DNA, 397 bp, Homo sapiens
tcgagaccagcctaggcaacatagcaagatcctgcctcaaaaaaaaaaaaaaaaatttttaaccttttggttttccccccccaaaaaagggggtttttttttttaaaaaaggggggggggggggggcccccccttgaatcctaaccttttgggggggccagggggggggaatccctgggggcaggaattccaaaaccacctggccaaaatgggggggccccctttttttttaagggacaaaatttaactgggggaaggggggggccccttgggccccaattttttaagggggtgggggcggaaaatccttttaaacttgggggcgggaggtgccaggaacttaaaagggcccttttcccttccaccttgacttagggagcgggattctttttaaaaa

SEQ ID NO: 104637 - DNA, 307 bp, Homo sapiens
gccaatttcagcaaggttctatagtgcttataaaaatatactttaaaaaaatgatactaaatgaataaaaggaaaaaataataataaggcatactgattaaactattaaattatgtttacataatgataagggttagagaaggtaaacagtgatttttgtgtttttgttgagaaagggtcttactctgttgcccaggctggaaagtggcatgattatggctcacttgaagtcttgacctcctgggctcaagcaatcctcctgtcacagcctcctgagtagctgggactacaggcgtcgacgcggccg

SEQ ID NO: 104638 - DNA, 379 bp, Homo sapiens
gtatagagatcgagcggctctcccacctcaacctcctgagtagctgggattgcaggcatgcactaccatacccagctatttatttgtgttactgtaagggagacgggattttaccatgctagcatgaggccatgctggactaaaactcctgtgatccaactaccttggcctaccaaagtgttgggaataaagacatgagcctctaatttgatttgtaatgaaaccaaacagaaacacttatgaaatgatgtcagcctgtctcacctgacaaagggaatgggtgccaggggtgatgtgacctgcattcggttggggccaggcatctccactctcaactgatgtctgtgacagcggttttgttcatgctttgaagatggac

SEQ ID NO: 104639 - DNA, 381 bp, Homo sapiens
gttctgagaccagcctaggcaacatgttgagaccctgtttctacaaaaaatagagaaaaattaggcgtggtggcttgcacctgtggtccaatctccttgggaggctcaggtgggaggatctccttgggaggctcaggtgggaggatcgcttgagcccgagacgtggaggttgcagcgagccaagactgtgtcactgccctccagcctgggcaacagagtgagaccctgtttcaaaaaaaaaaaaaaaaagcctttttgttgaaaaaccacagggggggggttaaaacaaaaacttttttttggtttttataaggttatacccaataaaaccttgttttaaaggtttttaaaaaaaatcaagttcctgcttaggcggggggc

SEQ ID NO: 104640 - DNA, 343 bp, Homo sapiens
cttcactatgttggccaggctgatcttgaactcctgacctcatgattcgcccacgtggcctcccaaagtgctgggattacagacgtgagccactgtgcccagccaataatattgttttcatactgttaacacaacatgcattttgcagcccatggatcaaggataaattttgacttttttttttttttttttttttttgaaagggggttcccattttgtcccccggtgggaagggcggggacacattttgggttattggaaccttttccttccagggtaaagcattttttcttactatacctcggggataagctggaattcaggggggcccccccgattcccc

SEQ ID NO: 104641 - DNA, 338 bp, Homo sapiens
  misc_feature (1)...(338): n = a,t,c or g
cattataagcagtatgtttcttacctattaaaaataagatcccttccagctcatattttacaattctaaatatgaaatagagaatgaagagttaatatgaactgactgtacgcaaatgcatggattgtcagagatttagaatataataatgttttttttttttttttttgaaacagtttcatttttgttgctcggcctggagggcaagggcacaatttgggttaattgaaacctttgcctcccaggctaaggggattctcccctgggccgnnnnnnnnnntcccnnnancnaanannnnctctttgtttttaaactctgaaaaactcccggggttcgg

SEQ ID NO: 104642 - DNA, 430 bp, Homo sapiens
ctgttatggtgatctgtgattagtgatcttcgatgttactactgtgattgttttagggcaccacagggcacacccagataaggcagtgaacttaattgataaatactgtgtgtgttgtgactccttcaccagttacccattccctttctctgctcacttcaagtttccctatgccctgagacacaacagtatttaaattaggtcaattaataaccccacagtggcctctcagtattcaagtgaatggaaaagtcacatccctctcattttaaatcaaaacctagacatgattaagtttagtgaggaaggcatgctgaaagctaaaataggcctcttaaggcaaacagtaggccaagttgtgaatgcaaaggaaaagttcttgaagaaaaatcaaagtgctactccactaagcatatgaataagaaagtga

SEQ ID NO: 104643 - DNA, 2464 bp, Homo sapiens
  misc_feature (1)...(2464): n = a,t,c or g
cgtggtgcagtccctggagggttctcacgctttggctgtctggacttttaagtttttccgctttttcaggaaggcgaccggcagcctcgggcaggggagacaggactgtatgtcagagaagagacggcgcttggacgccaggaatcctctgaagcaggagactgccctatccaggttacccttcccgaggggaaaccagggtctccttcagaaagctgaggcaggccgggcgcggtggctcacgcctgtaatcccagcactttggaagaccgaggcgggcggatcacctgagcagaagatgactcaagaccggcctctgcttgccgtgcaggaggcgctgaagaagtgcttccccgtggtggaggagcagcagggcctgtggcagagtgccctgcgggactgccagcccctcctgtcctccctcagcaacctggcggaacagctgcaggccgcacagaacctgcggtttgaggatgtgccggcgcttcgggccttcccagatttaaaagagcggctgaggcgtaagcagctggtggctggtgacatcgtcctggacaagctaggggaaaggctagccatcctcctcaaggtgcgagacatggtcagcagccatgtggagcgagtgtttcagatctatgagcaacacgcagacacagttggcattgatgctgtcctgcagccttcagcagtgagcccctctgtggctgacatgttggaatggttgcaggatattgagagacattatcgaaagtcgtacctgaagagaaagtatcttctttcgtctatccagtggggagacttggcaaacatacaagctttgcccaaggcctgggaccgaatttcaaaagacgaacaccatgatcttgtacaagatatcctattgaatgtttccttcttcctggaagagtaaggaagctatgcgtatctggagaccacgggtaccacagttgaagactgacattctgaaccctgatgtttctaaagaaacgtcagtatttcagtctgacatatttgaaacatcagtgccttgaaccttaggactgggtcttggggaggattagcgcctagatgtctgattttggagctgcagcatgccaggccgtggctgagagtatgtgagccatgccttgcccttttctgaggctcagggaagtggatggagctagagagacaacaggaaagacggtgctgaagaacatagtgtctttcctctattgtggacctaaagaggtggggaagcaaggacaagaggcaaagagccacactgcccttggcatcatccaaagcattgtctggttgacaccaggtcctggttttgtgtcttttgtcaatacctgaatccttgacaaaagaaaaagtggttttgatgatttaaagaaataagggtgattttgacagaaaatatattttaaaaattttgaccaattgcaatagttatcctcaagccaatttccagaacctgccaccagggggaggtggtgcagcatgaatcattctgaatgctttgtctttgaagtgttcccctattgctgttaccatctcagaggaagtaactgggcatggtgagactcctaaaatgacaggagtttttttggccaaagctggcatctgacttgccacattcctctgagtctggagtagccgcaggggtgggagaatgccagcccagagtcagtccatcggggttacatttccaaggtctgctgccttcatctatgtaatggccgtgttactttcagatctttcagcttcccagagtgttgtgggaatcttggtcattgaatgtaaagggacttagtaaagggtatagatatttttcaaaaatgaaaataactttttttcttataagtgataagcttttataaagatcataggaaaactagaaaaaatgtaaaatgtagaaaattgtaaaacaaacttcattagagatattttgatagataccttttcagtgtctatttacaaannnnnnnnnnnnnnnnnnnnnnnnnnnnnnnnnnnnnnnnnnnnnnnnnnnnnnnnnnnnnnnnnnnnnnnnnnnnnnnnnnnnnnnnnnnnnnnnnnnnnnnnnnnnnnnnnnnnnnnnnncaattcacaaatttttttaaagaacaaacgtgctatcatcgatacatactgttaggttgtctttttttaaaaaacctaatgtaatttgttcatctttttatatctgtaaatatagctcaacacagttatattctttttgtgaatgtattatatctacaatttaccttttttcttagattttacatgcattttcccaaatctttgtgtttgcctatctgtaaacggtaatacattctgattacaaaaaatgaaaatgttacatagaaatgtaccgttatccatctaccagataactattattaataatgtgtatttatttttccaggaattaaaaaacatctatcatataagtattgcaaataaaacttaaaaagca

SEQ ID NO: 104644 - DNA, 420 bp, Homo sapiens
cgctatgttgccaaggctggacttgaactcttgagttcaagcagtcctcccaccttggcctcccaaggtgctgggattatagacatgagtcaccatgccctgccattgttctttttttctgcggaggtggaatcttctagcgtagtcacccagcctggagtacagtagtgcaattatagctcactgcagccttcaacttctcaggctctactcagatcctcccacctcagcttcctgagtagtagcctccctagtgcttcaggcatccaccactgcactccagcctgggtgacagagcaagactctgtctcaaagaaaaaaaaaaaagaaaaaaagaaatttcccgcatccgatgaggacacaagtcactggattaggccccacccattttaactcccccacatccacaaaaccctgttg

SEQ ID NO: 104645 - DNA, 426 bp, Homo sapiens
gtaaaccaatcaaaaacagagttttctgtgtttccatgatagtgttgaagcctaatgacaagccaggtcttacagctgggctcttcagaaaaccaggtttctacatccaaagactgcttttcttttagctgccagattggattgtgaataaaaataattcttccctctccctctccctctccccacggtctccctctttccacggtctccctctgatgccgagccgaagctggactgtactgctgccatctcggctcactgcaacctccctgcctgattctcctgcctcagcctgccgagtgcctgcaattgcaggcgagcgccgccacgcctgactgcctcggcctcccgaggtgccgggattgcagacggagtctcgttcactcagtgctcaatggtgcccaggctggagtgcagtggcgtgat

SEQ ID NO: 104646 - DNA, 422 bp, Homo sapiens
  misc_feature (1)...(422): n = a,t,c or g
cccacgcgtccgcccacgcgtccgcggacgcgtgggtttttacaatgtgcatgaattgagatagaaggaggaggacgatgaaaaggtggggaaggagaataagtgaaggaaaaaaatggaagaatgaagagaaatgaagatggcagtggcagcagcactaagacgtttgataatgatgttattagaggatatttatgttctttaaatatctataactaatatgcattacacttgaatatgaaaaacaacagttatttttaaatgagaaaaaaaaaaaaaaaaaaaaaaaaaaaaaaaaaaaaaaaaaaaaaaaaaaaaaaaaaaaaanaaaacaaaaaaaannnggggggggcggtttataaaaaaatacccgggggccccaaacataaagtttgtgtaaaaaaaaaatttttttttttttt

SEQ ID NO: 104647 - DNA, 464 bp, Homo sapiens
  misc_feature (1)...(464): n = a,t,c or g
attgaangccgtagtagatggccgtaagtaccggctcgacccacgcgggcggatatatgcgctaattctcaacttacataattaatagctttataccatgcattatttaaaaagaaaaaaaatgtcctgctacaagatagcatctcaggaggtaaagctgaagttgttctgtaggtttaaaattatttagtatgaagacttctttagccctgagttattactgcttgcttcttctgttaacattgcattattattattattattactactactactgatcactgtgaagaggaaatatcaccatagaaacttggaggctaaagagtgggagggagaaggggaatggctccgatacagagactcaaaaccacagctctctgcatctcctgagaagcctttcagaagggtgttttcttcaaagagaagaatttaagattaggttttctatctctagttttcatgag

SEQ ID NO: 104648 - DNA, 134 bp, Homo sapiens
gcgccggaaaaccgggtcgacccacgcgtccgaaaaacactagttcccttaatcttaccaattattactaccttagccaacccctgcaaaaaagattgatacccatactacgtaaaaatatctattgcatgtgt

SEQ ID NO: 104649 - DNA, 422 bp, Homo sapiens
caaatcatgcaatttattctggtaccagcttttcatgaaagtgatagttttacctaggcatggaccgaccaggaaccttgttctgtggttgtgccaaggcccctctgtgtatagactagaggaggcttttgtccctaagggagacactatgtgtgatctctggggtatgtggaatcttctggttctgctatgattggtttatgatctgctatgattcccttctgctcatggatataaccgatcatgctaccatagttgattgattgactatgtatgtatgtatgtatgtttttagagacagggtcttgctctgtcacccaggctggagagcagtggcactattatagctcattgcagcctcaagctccttagcttaagtagtcctcctgcctcagccttctgagtagctggggttatagaca

SEQ ID NO: 104650 - DNA, 378 bp, Homo sapiens
ggcacgagggctgacagacctgcctgctcctggctattgccctgcgatgcctgccctggcttcgagaggctggagccctacacaccggcccgggatgcaggctttttgaccacgctatgctacaagcccataaggcgcaccaactggtcattgacacctaccaggagattggagaaaactatatcccccaggaccagaagaattctttcctgcttgaatcccacacctccttctgcttctcagactctattacgacaccctccaacatggaggaaacgcaacagaaatccaatctaaagctgctccgcatctccctgctgctcatcgagacatggctggagcccgtgcggttcctcacgagaatagtcgccaacaacc

SEQ ID NO: 104651 - DNA, 486 bp, Homo sapiens
  misc_feature (1)...(486): n = a,t,c or g
atcgaacgcctctgatagacgggcctgaagaaccgggncgacccacgcgtccggatgcctatcatatagtaaaacccagcccatgacccctaacaggggccctctcagccctcctaatgacctccggcctaggcatgagatttcacttccactccataacgctcctcatactaggcctactaaccaacacactaaccatataccaatgatggcgcgatgtaacacgagaaagcacataccaaggtcaccacacaccacctggccaaaagggccttcaataccggataatgctatttattacctcagaagtttttttcttcgcaggatttttctgagccttttaccactccagcctagcccctaccccccaactaggagggcactggcccccaacaggcatcaccccgctaaatcccctagaagtcccactcctaaacacattcggaatacttgccatagggggttccatcacctgagctcaccatg

SEQ ID NO: 104652 - DNA, 429 bp, Homo sapiens
atgggatgggataatatgtttaatggaaaagataagaagctcaaggactaagccctgtggccctcagttagaggtttaaataatagaaggaatggccagaagtggtggaaaataaactagtgaattgtggtgtcatggaagccaaacgaagaaatgaagaaaatagttgaaggccgggcacaggagcacatgcctatctataatcccaacactttgggatatcgagacgggcggatcacttgagctcagatgttggagaccagcctgagcaacatggcaaaaactccctctacaaatacaaaaaaattatccagggctgggcttggtggctcacgcctgtaatcccagcactttgggaggccaaggtgggcggatcacctgaggtcaggagtttctgaaccagcctgccaacatggtgaatacccactt

SEQ ID NO: 104653 - DNA, 481 bp, Homo sapiens
  misc_feature (1)...(481): n = a,t,c or g
anaagaaaaaaaagaaaagaaactaattatacactgtgatggaggctgcaaagaacaccactaagaattcaaaatcagctgggtgcggtggctcacacctgtaatcccagcactttgggaggctgaggcaggtggatcacaaggtcaggctggtttcgaactcccaacctcgggtgatccgcccgcctcggccttccaaagtgctgggattacaggcatgagccactgcgcctggccttctatgattntctggtagtcacgatggaaacaaacaaaacaccttataaccagagatcgaccccctcaagcaatacatcaattcccttcacaagaaacgtcggngctacatgagtatctgtgttgaatgcagtnctgaatgatcctatggatttttccggctggtagcactactgtacaacattcagtgcccacatccatctgtgccattaagctnttttgagacatgagagatgcctcttcc

SEQ ID NO: 104654 - DNA, 377 bp, Homo sapiens
gactctcttgaaccagggagtcagaacttgcagtgaggtgagatggtgccacggcattccagcctggcaacagagcgagactccgtctcaaaaaaaaaaaaatttgttgtataaaggcatatggacttgaattgcgtattcccccaaggtggcaccttttttgggggcgggaaaagtcagccaattctgaaactccctaaagtttattgccttacttatgagcaaaaacagggagatactggcaaagaagggccattttcaggcttttggggaagtgcctgctgaaacctgaggaggagcatgctgttctttcttacagctggaacttagttgaaggcatccctctttgcgttgcagagtaataataaaactctcca

SEQ ID NO: 104655 - DNA, 399 bp, Homo sapiens
catggtcctgtggacagctcacctacgggcaatggctccaggctcccggacgtgggggctcctgacttttgccctgctctgcctgccctggcttcaagaggctggtgccgtccaaaccgttccgatatccaggctttgtgaccacgctatgctccaagcccatcgcgcgcaccaactggccattgacacctaccaagagtttaaagaaacctatatcccaaaagaccacaagtattcgttactgaatgactcccagacctccttctgcgactcagactctattcccacaccctacaacatggaggaaacgcagcagaaaaccaatctagaggtgctccgcatgtccctactagagatcgactcgtagctgagaccagcgcagtccaataagagatgaag

SEQ ID NO: 104656 - DNA, 400 bp, Homo sapiens
  misc_feature (1)...(400): n = a,t,c or g
catatagtaggcatttaacaaatgctagttcaagttaaatctaaagtgggttaaaaaggaggctggcattggtaccttaaaaatgtcagtcttgtctagctctgtaatggagtaatggactgatggaatcattatgactcccatggttagaaaatagtatttttgtaatgacagattctttatctgtagaaatatgcctatacagttacaatgcaacacctatcacaccccatcctataaaaaaaaaaaaaaaaaaaaaaaaaaaaaaaaaaaaaaaaaaaaaaaaaaaaaaaaaaaaaaaaaaaaaaaaaaaaaangggggggggggcctttttaaaaaaatcttgggggggccccaccctccgcggggggaaaaaaatttttttttttttttaaaggg

SEQ ID NO: 104657 - DNA, 238 bp, Homo sapiens
atacaaaaggttggggaacagctaaataggttgctggtgatttggttaaaaaatagtagagggatgatgctaataattatgctgtgggtggttgtgttgattcaaattatgtgttttttggaaagtcatgtcagtggtagtaatataatgtgcgggacgattagttttaacattggagtaagtttaggttatgtacgtagtctagccctactagtctcaatctccgtcgacgcggccg

SEQ ID NO: 104658 - DNA, 345 bp, Homo sapiens
ctcatctgagaaggccaagcaagtacaaagtgatcactatgttgccagagaaaataaagacaacaaacagacagaatggaatcaggaaaatgtgagagtgctgagcatttgaaaccatattaggctaggtgtggtggctcacacctgtaatcccaacactttaggaggctaagcaggatgatgacttgagtctagcagtttgagacaaatctggggaacacagcaagacctcatctatacaaaaaaatttaaggctgggtgcagtgactcacacctgtaatcccagaactttgggaggccaaggcaggtggaccacttgaagccaggagttccagaccagcccaa

SEQ ID NO: 104659 - DNA, 416 bp, Homo sapiens
ggcacgagctcccccaaccactcagggtcctgtggacagctcacctaggggcaacggctgcaggctcccggacgtccctgctcctggattttgccctgctctgcctgccctgggttcaagaggatggtgccggccaaaccgttccttgatccaggctttttgaccacgctatgctccaagcccatcgatcgcaccggctgggcattgacacctaccaagaggttgtagaaacctatatcccagaagaccgaaaactttcatttccggatgactgccatacctacttctgcttctaacactctattccgacaccctcccacttgggggaaacgctactgacatccaatctagagctgctccgcatatgcctggtgctcatagactcatggctggagcccgcgcggatcctcacgagt

SEQ ID NO: 104660 - DNA, 422 bp, Homo sapiens
ggcacgaggacccgggaagcggagcttgcagtgagcagagatcacgccacagcactccagcctaggtgacagagcaagactccgtctcaaaaaaaaagggagaaggtcaacagggagaccatcatggcacagtaggggctggaataaagcagcctctgtctcccctcaggagatgggtcacagggagtacatatctggacttcaccattagacagacctgacctggaatccagctctgtgggctggatttgctctgtggcttgaccgaaactgcttatcctctctgagcctccatttccttcatgtataaagggtaaaatattccacttcacagtggacacttcacagttctctccctctagctgctctcaccaaagatgtcttcataagaaccagctccaaatggggagaaaaagacaacc

SEQ ID NO: 104661 - DNA, 421 bp, Homo sapiens
  misc_feature (1)...(421): n = a,t,c or g
ggcacgaggtccccacccaaatctcatcatgaattataatccccataatcctgatgtgtcgagggaggggcctagggggaggtgattggatcatgggggcagttatcctcatgctgttcttgtgatattcagtaagtcctcatgagatcttatagggttttgttttgttttttgggatggagtcttgctctgttgtccagggcagagtgccatggcgtgatcttggctcactgcagtctctgcctcttgagttccattgattctcctgcctcagctacttgggaggcttaggcacttgaatgagaatcacttggacccangaggtggaggttgcagtgagcaatgattgggccactgcctgggccacagagtgagaatcttgctttaaaaaaaaattaaaaggtaaaaaattttttttaag

SEQ ID NO: 104662 - DNA, 410 bp, Homo sapiens
ggcacgagaggctggagtgcagtaccgcgaccatggctcactgtagcctcaacctcctgggctcaaatgatcctcccgcctcagcctcctgagtagctgaaatgacaagtgcgctctgccacacccggctaatttttatttaaactttttttttttttttggagcctccctccacccccgggaccaaaccaaaattgttttgaaaaaaaaaaaaaggggacactttaaaaaggttttccccttttttaacccatattttttgggggggtccccaaaattcccttggcccacccctttatttggggaatgttttggtattaggaaccggggtgcaaatattaattttaaaacaaagaagggggaaacatttaaaaatgaggttaaaactttgtttttggtttacccccccc

SEQ ID NO: 104663 - DNA, 421 bp, Homo sapiens
ggcacgagggatataagatcatgtcattggccagccacgatggctcatgcctgtaatcctggcactttgggaggccgaaccaggaggattgcttgagccaaaagttcaagaccagcctggacaaaattgtaagagcttgtctttattaacaatcaaaaaaaaaaggagagagaattttcccgggcgggggggtacacaactgtgttcccagttactcaggaggctgagggtaggatgctgcattgatccgaaattgcacaactgccttccagcctggatgacagagcgagaccccacctttaagagagagtaaaaaaaaaatgatgtccttgaggcaaaaaatttttttaccatcctaacttttatgaacacaaccaaggaaaaaatggttgcccaaaggatagggagcctttttcatggg

SEQ ID NO: 104664 - DNA, 412 bp, Homo sapiens
ggcacgaggtaagctatgattgtgccactgtactccagcctgggtgacagagtgaggccctgtctcaaaaaaaaaaaaaaaaaaaaaaaaaaggtttggggggggaaaaccaaaattttcaaaaaatcctttaaaaaaaaaaaaaatttttggggggaaaagggaaacctcttttaaaaacccccgggaaaaaaaatttgctttttgaaaaaaataaaaaacgttccccaaaaaaagggggaaatttcccaagaaaaaaaaagggcccagggaaaaaaaagggggaaaaaatttgggggttaaaaaaaaaaaaaacccggggggggaaaccccttttttttttttttttttcccccttttttcccaccccaaaaatttgggtggggcaacaaacaccgagaaaaaaaaattg

SEQ ID NO: 104665 - DNA, 410 bp, Homo sapiens
aatcctcctgtcttggtggggattgctttaaatagggtgctgaggaaaagtctaagaagtgacatttcagccaaaagctaaaggagaaaagggagtaaagctgtggctatttggggaaagggatccaggaaagggagtggccaaaggccttgagcaggacagccagggccagaggggattcagctggggtagccacagatcagagataaaggggatcagatggtgccgcaccgtgttggtaggtttggtggactttgactccaaacacatctttttaagttttttgttgtgtggctgggcgtgatggcgcacctggggttaaggctcacttccctgcggctcagaagccatgggatggtggcttcccagggccctgaagtgctggagtcgggccaccacctatcccaaga

SEQ ID NO: 104666 - DNA, 386 bp, Homo sapiens
actagttctagatcgcccaccttttactattctctttttaccacaaagacaccggaacactatacctattattcggcgcaggagctggagtgctaagcacagctctaagcctccttattcgagccgagctgggccagccaggcatccttgtagggaacgaccacatctacaacgttatcgtgacagcccatgcatttggaataatcttcttcataataatacccatcataatcggatgctatggcaactgactagctaccctaataatcggagcccccgatatggcgtttccccgcataaacaacataagctttggactcttacctacctctctcctactcctgctcgcatatgctattgtggacgccggagcaagaacaggctgg

SEQ ID NO: 104667 - DNA, 431 bp, Homo sapiens
  misc_feature (1)...(431): n = a,t,c or g
cttgctgtggatttagctttggcttaagggaatgttgtagctggttggatcttttattcaaagcacggaaactttctccatatcagcaataaggctggtttgctatcttatcatttgtatattcaggggtatagcacttttaatttccttcaagaacttttcctctgcattcacaacttggctaactggcacaagtggcctaactttcagccttttggcttttgccgtgcttttctcaattagcttaagcatttctagattttgatttaaagtgaaagatgtgcgagtcttccttttacttgaacacttagaggccattgtagggttattaattggcctaattttaatatttttatatctcaaggaataggggaagcccaaggagagggagagagacagaatggctagtcagtggatcatccagaacacan

SEQ ID NO: 104668 - DNA, 443 bp, Homo sapiens
aaaaaagtaaaaggaactcggcaaatcttacccctcctgtttaccaaaaacatcacctctagcatcaccagtattagaggcaccgcctgcccagtgacacatgtttaacggccgcggtaccctaaccgtgcaaaggtagcaaaaaaaaaaaaaaaaaaaaaaaaaaaaaaaaaaaaaaaaaaaaaaaaaaaaaaaaaaaaaaaaaaaaaaaaaaaaaagggggggggggctttaaaaaaaattctggggggggccaaaactttgcgggggggaagaaaatttttttttttttttttgggggggtttttaaaaaccccctttggattttttggaaaaaaacttttttttggggggggaaaatatcgggccaactctcccaaaaaaaattaagcctttggggggaaaaaaaaattttttgggggtgtgggggggaaacctccttt

SEQ ID NO: 104669 - DNA, 451 bp, Homo sapiens
cggacgcgtggggactagttctagatcgcgagcggccgcccttttttttttttttttttttttttttggaaaagggattttttttttgcccccaggggggggggggggggtttctttttaattttttggaagccccccccccggggtaaaaattttttttttgccccacccccccaaggatttaagaataaggggcattccccccttccccggttaattgtttttttttttaaaaaaaaaaggattttcgggggttaaccagggggggtcaaaacccccgacctaaaaaatgggctggtcgggccccccaaaggggggggattaagggggggacccccctttcctgccccccgggggggaattttttttaggctttttttttgggacccttttttatttttttccaaacccaaaaaggggctttaaaaaaaaataaaaacaaccccccttt

SEQ ID NO: 104670 - DNA, 461 bp, Homo sapiens
  misc_feature (1)...(461): n = a,t,c or g
taacttctgggctgtggttgtaaactgtgagcactacaaaatgtttttccttattgataccatattatggtaggaaagacatggaataaaaaatttagatagtncaaaaaaaaaaaaaaaaaaaaaaaaaaaaaaaaaaaaaaaaaaaaaaaaaaaaaaaaaaaaaggggggggcccccttaaaaaaaaccccgggggggcccaaaaataaccgggggggaaaaaaaaattttttttttttttaggggggggtaaaaaaacccccccggggaattttgaaaaaaaaccttttttttggggggggaaaaattgggcccccccccccccaaaaaaaaaagcccccgaaggaaaaaaaaaattttttagggggaaagggggaaaaaaaccccttattttctggggctggaaaaatttttccttccagaaaaaacnaaaaaaaaaattcccccccgggccggggg

SEQ ID NO: 104671 - DNA, 423 bp, Homo sapiens
ttgcagtgagccaagatcgtgccactgcactccagcctaggtgacagagcgagactccatctcaaaaaataaaaaaaaagaaaaagaaaaatgcagatcctctcatgttcaaggttgtcttgtatttaggcacactgggtatatacagtatgtaacagattacattgttttatcgaccttctgcaatgaaagccactttaaaattaaaacagccagatttttttttaagctttcatttttgaagcctaccctccaagtaatctgaagaattggggtttcggatgaagaaaggaaatgtcactgttggtgttccagtgatggggatggcaacagcagtagctaagaagacattggcaaaggttgccgggggggtggtggggggaaataaaaatgcagcgatggccacagcaacacaggggacca

SEQ ID NO: 104672 - DNA, 391 bp, Homo sapiens
ttgaaggtttgctgcagctcacctacaaaacccactggggttttgagagagaacaggtctttgactaccatttttacttctttaatacttactggactattcaaggcctttctatttgtgccatttttagcatggagtatttttctaagaatgtatcatttattttcatctaggttttttaattcattggcatgtcattcataattcttcactgttaaaaaatctatttttctggtcaggctcagtggctcacgcctgtaatcccagcactttgggaggctgatcagtggctcacgcctgtaatcccggcactttgggaggctgaggcgagcagatcacccgaggctgggagttcgagaccagcctaaccaacatggagaaagcccgtctt

SEQ ID NO: 104673 - DNA, 423 bp, Homo sapiens
  misc_feature (1)...(423): n = a,t,c or g
gctggtctcgaactcctgacttcaaataatctgccctccttggccttccaaagtgctgggattacaggcgtgagccaccacgcccagctgaagcttttcaataatgctggtgtcccttcactatcacattccttattgttttggtaagtgaactatactctgggcccctccaatgaacatagtcaactggacgggcttcttctctcatgtaataaagccatcctaacatgttcacttctctaagctttttgatctattcctctatagtctaccactaagttctagtattgctgcttcatttagggtggaccactgctttattctaccttcctaaaaccatttcaaaactggcctctggggtacttgccaatgtgctgaatcctgtgtcacaggagagtacctccatattaacacacttttctn

SEQ ID NO: 104674 - DNA, 460 bp, Homo sapiens
  misc_feature (1)...(460): n = a,t,c or g
tgcccccatgganncccctnnntttggatcgcgtgtggtaggcgcgacgcatgcgtgcggggattcaccgtgttagccaggagggtctcgatctcctgacctcatgatccgcccatctcggccttccaaagtgctgggaggacaggcgtgagccactgcgcctggcctaaatttttatacaacgtggagcaaatacaaaatttgctagagaatatattttagaaatcaaaattttaggagttctaatggtaagtaaagaattttaaatttacttttctgtaatggagtgtaacttaatttctatgcagaatcttctactttaagagtgaatgttaaacatggcaaaataataaagtgacctctgtgaatttgaaatttgagataatatttcttttccatactgatattacaatttgaagaaatttccagttcatataactttttttcagtgggtgaagcg

SEQ ID NO: 104675 - DNA, 396 bp, Homo sapiens
cggacgcgtgggagaacacatgtgaagagactttgaaattatcaaaagaaaaaaaaaagaccagacaaaatctcatgtgccaataacttttcaaggggcctttgttaaggaaattatatccacttaattactataatatataaaactttatgaaaagcactttataaaattctaatttaaaaggtcaaaaaaaaaaaaaaaaaaaaaaaaaaaaaaaaaaaaaaaaaaaaaaaaaaaaaaaaaaagggggggggcccttttaaaaaaatttttgggggggccccaaatttccggggggggaaaaagattttttttttttttttagggggggtaaaaaaaacccccctggggttttttgaaaaaaaactttttttttgggggggaaaaaaaaaaaaa

SEQ ID NO: 104676 - DNA, 379 bp, Homo sapiens
  misc_feature (1)...(379): n = a,t,c or g
cgcacgccccccgtggcggggacgacccattcgaacgtctgcccagtaaaagcctttctgcagctnaaaaaaaaaaaaaaaagaaaaaaacctaaaaccaaaaaaagaactgggcccgttagacagaacgtgagatggggccgctcgctatccccgggccgagcccccgctgaaggcccccagggcggaagtaccgaaagccctccccttctggtggggagatgcctgatccttggcctgcgggaaccaggggtcccaccagccgcctacgggaggttcctgagggattacatgaattctatccaagggaaacttgaaaaacaaagaccanaatgaggtttgccttctttgactggcgctgcggaactaatcaagcacc

SEQ ID NO: 104677 - DNA, 367 bp, Homo sapiens
cccacgcgttctttggacgcgtgggaaaaaattttttaaaaaaaaggaaaaaaaaaaaaaaaaagggtaaataaaaataaaaaatattaaaaaaaaattttatttaatataaataataaaatattaaaaaaaaaaaagtggggggggtgtgtttttttttattattggggggggggggcatttttttgggggggggagattttttttttttttttttttgggggggtttttttttaaactatttttttttttttaagaaaaatttttttttttggggggtaatttggtaaaacactcctccaaaaaaagttcgtgggtggggtggtaatttttttttttttttttttttttgtgaactacccctcct

SEQ ID NO: 104678 - DNA, 417 bp, Homo sapiens
gccaggctagtctcgaactcctgacctcaggtgatccactcgccttggcctcccaaagtgctgagattacaggtgtgagctactgtgcccggccgtgaatgggttttttatgtgtgtacctgatttttaaaaacgtaaacccaaatttagacctaaaagttcttgagctttgcaaaggtagattgctatttgtcctcccactgtgaagagcttgttggcactcagatttgctgattggaggatctgggtgaggatctgatttctgttttctggcaacaaggcatcaacatagaaacagtctttgtttggctccttaaagttcccacttcctgggtgcgatgggcactaggggaggggcagggacttcatcactgattcttatattcagtcccacagaaagtgggtgaaggccgaata

SEQ ID NO: 104679 - DNA, 347 bp, Homo sapiens
ccttggttggcattatagccctccctagtacaaagggtctctggccaataggatcactcacttttggaactccaaatgaagctctatgcgtctgctcaggctgccataaccaagtgtcacagaatgggtggcttaaacaacacacattttctttttctttttctctctctcttttttttttttttgaaacaaagtttggctttgccccccaggctgaagggaaggggcccaattttggttaactgaaagcttcccctccggggtaaaagggattctccggcctcacccccccagtgtgttgggataacgggcttggcccaccccccccggttaattttgttttttag

SEQ ID NO: 104680 - DNA, 384 bp, Homo sapiens
ttaaaaaaaaagtgagcctgatgcagggggtcatgccttaatctcaccgctttggaaggccaacgggggaggatggattgatgccaagagctggacaccatcctgggtaacatagcatgaccctgtctataaaaaattgtttttttgccgggtgcgggggctcacgcctctaatctgaacactttgggaggccgaggcggtcaggacacaaaggcactagttgaagaccagcctggccaacatggtgaaaccccgtctttactagtgctccaaaacaaagaaaaattagcgcatatttgggacaaccagttaaaaaaaggtgggggttcttattggtgaaaaatttgagcgtgcaaatctgcaatgggggttgcaaatgaattt

SEQ ID NO: 104681 - DNA, 342 bp, Homo sapiens
aatagatgtacatacatacatgtatgtgtgtggatgtgtataaacatgtatatgcatatggttcacacatatacatacatacatgtatgtatgtacatctatttatgaactttgctgtgagggcctaggagaaaggacacctcagtagcagtgagtatacctaggactcaggccttggttgctaaataccagtctcctctaaaataagccaatgctctttggagaaatggagattccagggctgggcatgggaagtataagaggggtctggaacatattctcatgacagaaaataaagaagtggtcaaaggtcgacgcggccgcgaattccagatctatgaa

SEQ ID NO: 104682 - DNA, 327 bp, Homo sapiens
tggtcgggctggtcttgaactcctgacttcgggtgatccacctgtcttggcctcccaaagtgctgggattacaggtgagagtcactgctccctgctgcaaatttcttattaaatctgtttgacagattttagaatttctataagtaatgtttaaaattacaaccatttgggctgggtgtggtggctcatgcctgtaatcccagcacttattttatttcttatcaggagaacgagaatcatcatactactttgcatcggaggttaagctcattcttttccttaaaatgggaagataaaggcattaccccctctccgaggcctcatatg

SEQ ID NO: 104683 - DNA, 370 bp, Homo sapiens
cccacgcgtccggaggcaggttgcagtgagcccagattgcatcaccactgcactccagcctgggcaacagagggagactctatctcaaaaaaaaaaaaaaaaaaaaaaaaaaattttcccccccaaaaaaaaaaaatgggcctttttaaacccaatagttaacccttgaaaggaaaaaattgggaaaaaagggttttttttgggaaaaaaaaaaaaaaacccttttgaggcttaaaaaaagggggaaaaaaaaagggacccaataagggggctttttttttgaaaagggaaaaaaagggtaaaaaaaaaacgggggggggtttggggggggttttttttttttaaggggggggaaaaaaaaaaaaaaaaa

SEQ ID NO: 104684 - DNA, 358 bp, Homo sapiens
  misc_feature (1)...(358): n = a,t,c or g
gctgaagggaggcagctgaaacaccaaacacccaaagcagcagataataaacaaaacaaaaaacaaacctcttttggctgatttgctttcctagctctgccgggatctaatattttagagattctctataactagagcagagagtgaagaggccattcagaaatacattgaagagttagcctgagatttaaaattagntgttaacaatccccaaaggaatatatagctaatatatgggcaggtaattaaaactggtaattaaggccaggcacggtggctgatacctgtaatcccagcactttgggaggccaaggcaggaggatcacttgaggtcgggagtttgagactagcctggcct

SEQ ID NO: 104685 - DNA, 367 bp, Homo sapiens
gcctgtagtcccagctactcatgaagctgcggcaggagaatgacttgaacccacgagggaaaggttgcagtgagccacgatcatgccactgcattctaccctgggtgagagtgagactccgggtttctctctctctgtatatctatataggaaagcattaataactatattggaaactatggcatgtccttgttgtctatcccaatatctattttccctttccctttcctccataggaataaaaccccaacttcattcagaaaggcagctaagtccagctgaaaattcccagtctcccttgaagttcagcataaccattttctagtcaatgatatgtaaatagaaatgtgtgtaggacttccagaca

SEQ ID NO: 104686 - DNA, 370 bp, Homo sapiens
cggggtttcaccatgttgaccaggctggtcctgaacttctgacctcaagtgatccacccgccacagcctcccaaagtgctgggattacaggcatgagccaccacgcgtggctgcctttttttttttttttatggcaggaggaaaacgggaccaccgttccctttaaacaaaaacccggggggttggaatgttttggggtctgttggcacctggggccttccaaaagaagggtttttttttttatggaacccttcttccagttgtggttgcctgggccatataacccgggggggtaacccggtttcccaccttttttttttaaagccccccaaattggtccttgaacacaaaaatgggggctctttttttc

SEQ ID NO: 104687 - DNA, 457 bp, Homo sapiens
  misc_feature (1)...(457): n = a,t,c or g
cttgaacctcgagcagctaatcgaaccactcgaggtcctgtggacagctcacctagaggcactggatccaagctcacggacgttcgtgctgctggcttttgccctgctctgactgccctggcttcaagaggctggtgccgtacaaaccgttccgttatccaggctttttgaccacgctatgctccaagcccatcgagcgcaccaactggccattgacacctaccaggagtttgaagaaacctatatcccataggaccagaagtattcattcctgcatgactcccagacctacttctgcttctcagactctattacgacaccctacagcatggaggaaacgcaacagaaatccaatctagagctgctccgcatctacctgctgctcatcgagtcgtggctagagcccgtgcagttcctcatgagtatgttcggcaacaacctggagtatgacaccttn

SEQ ID NO: 104688 - DNA, 375 bp, Homo sapiens
  misc_feature (1)...(375): n = a,t,c or g
ccaactccccgaaccactcatggacctgtggacaggtgacctagtggcaatggctccaggctcccgtacgtccctgctcctggcttttgtcctgctctggctgccctgacttcaagaggctggtgccggccaaaccgttccggtatccaggctttttgaccacgctatgctccaagcccatcgagcgcaccatctggccattgacacctaccaggagttcgaagaaacctatataccaaaggaccagaagtattcattactgcatgactcccagacctccttctgattctcagactatattccgacaccctgcagcatggaggaaacgcaacagaaatccaatgtagagctgctccgcatctgcctgctagtcan

SEQ ID NO: 104689 - DNA, 359 bp, Homo sapiens
ctccaactccccaaaccactgacggtgctggggacagctcacctaccggcgatgtgtctcgcctacgccactgccctgattctgggttgtgctctgctttgcctggcttgagttgaataggctcgagccgcccaaaccgtgccgcaatctaatttttaagaccacgctatgctccaagcccatcgcgcgcaccagctggccattgacacctaccatgagtttgaagaaacctatattccacaggaccagaagtattcattcctgcatgactaccagacctccttctgcttatcatactctattgcgacaccctccaacatggaggaaacgcaacagaaatccaatctagagctgctccg

SEQ ID NO: 104690 - DNA, 370 bp, Homo sapiens
ctccccgaaccactcacggacctgtggacagctcacctagtgccaatggctccaggctcccgaacgtccctgctcctggcttttgccctgctctgcctgccctggcttcaacaggctggtgccgaccaaaccgttccgtgatcctggctttttgaccgagctatgctccaagcccatcgcgcgcaccagctggccattagaacctaccaggagtttgaagaaacctatatcccaaaggaccagaaggattcattcctgcatgactcccagacctccttctgcttctaagactctattgcgacaccctccaacatgggggaaacgccacagaaatccaatctagagctgctccccatctccctgctgctaa

SEQ ID NO: 104691 - DNA, 361 bp, Homo sapiens
agctcacctactggcaatggctccaggctaccggacgtacctgctcctggcttttgccctgctatgcctgccctggcttcaagaggctggtgccgtccaaaccgttccgtaatccaggctttttgaccacgctatgctacaagcccatcgtgcgcaccagctggccattgacacctaccaggagtttgaagaaacctatatcccaaaggaccagaagtattcatttctgcatgactcccagacctccttctgcttctcagactctattacgacaccctgcaacatggaggaaacgcaacagaaatccaatctatagctgatacgcatctgcctgctgctcaacgagtcgtggatggagccc

SEQ ID NO: 104692 - DNA, 366 bp, Homo sapiens
cccctaaccactcagggccctgtggacagctcacctagcggcaagggctccaggctcccggacgtccctgctcctggctattgccctgctctgcctgccctggcttcaagaggctggcgcctgacaaaccgttccgatatccaggctacttgaccacgctatgctccaagcccatcgcgcgcaccagctgcccatcgacacctaccacgagtttgaaaaaacctatatcccaaaggaccacaagcactcattcctgcatgactcccagacctccttctgcttctgagactctattgcgacaccctccaacatggatgaaacgcagcagaaatccaatctagagctgctacgcatattcctgctgtt

SEQ ID NO: 104693 - DNA, 341 bp, Homo sapiens
ccgaaccactcagggacctgaggacagctcacctagtggcaatggctccaggctcccggacgtacatgctcctggcttttgccctgctctgcctgccctggctttaagaggctggtgccgcccaaaccgctccgttattcaggctttttgaccacgctatgctccaagcccatcgagcgcaccagctgtacattgacacctaccaagagtttgaagaaacctatatcccacaggaccagaagtattcattcctgcatgactcccagacctccttctgcttctcagactctatttcgacaccctgcaacatggaggaaacgcatcagagatccaatctagag

SEQ ID NO: 104694 - DNA, 329 bp, Homo sapiens
ccaagagagctctggtgccctggcatgatggggggatgccgaggcctcaaccccacccaaggggactctaccgactctgtttaaccagacgctcccccaggatggctgacattttgaaatggaaggaaaacagcgggaacaagggatacaacccacatcagcagacagggtgactgaatggtggcagatggttatggagtctttggaagggatacatacaggagtctattataatttagagaaattggccaggtgcggaggctcacacctattatccaagcactttgggaggccgaggcaggcagatcacttgaggtcgggggttcgag

SEQ ID NO: 104695 - DNA, 316 bp, Homo sapiens
gcacgaggagagagagagagagagagagagagagagagagagcgccattgtgagacagatacatactcagggagagggcctgaccgagttagtttttccctatcgccgccccgctcccagtgggttgaagtttacctttgtctatgtgcaggagcacattctcggtgtgggcgggaatggtctttctcctttacagatcggtgttatcctgagagatggacgtggtcttgcacatatacggtgtgggacacgcaataaaattttaagaattcttaagtctcagggacgtgctcctgatctttcatgagatctctac

SEQ ID NO: 104696 - DNA, 514 bp, Homo sapiens
  misc_feature (1)...(514): n = a,t,c or g
agaggcagggtttctccatgttggtcaggctggtctcgaactcctgacctcaggtgatccacccacctcggcctcccaaagtgttcggattacaggtgtgagtcaccatgcttggccatgccggttgtttctgctgcttgctgtgtagaccgctgtgatgaccatcttcttattgaccctcctttgtctctggagccccgccacctgccttctacctggagccttccttccaggtccttcttcaacatcagctccaggatctgcaagatctttggatatggccgctgcagaaggaaggagaaccacttcctggagaagcaggagtgagccaggatctgccacacaagagagccgggaacccagggcatgggttaaggcgaggagcaggtccggagggaagatctgaggcaaagagagagcctgtcacctgtgctgccttgagatgctgacatctgaggatgccccagacagggcctgtggctgctntctgaaatagtgcagcaccttctctgct

SEQ ID NO: 104697 - DNA, 355 bp, Homo sapiens
tttcgagttgtctgttgaaagttcttcttttaagggacaggtcaaatatgactggcttgttaaatatttttcatacactttacctttgaatacagatattaatggtttggtcttaatcgcctctacttaatattaaacatcttatttctgattctcttattgtggaagagtcttgcatgttgaggttgtgaggtatgtctttaactggccatagtaactacattatcttaaatttaaactttctttggccatgtgtagtggcacacacctgtaatcctatgactttgggaggccaaggtgggcggttcacttgaggccaggagtttgagaacaacctggcctacagggggaaacc

SEQ ID NO: 104698 - DNA, 383 bp, Homo sapiens
ggcacgagcaaaatttgtgggttgcagataacaatgtttaagagcgagaatttatagttctaaatgcttatagtagaaagaaagaaatgttaatgataaaaactttctccctttaaaacttcaaattaaacacaaaaattataagaagtaaataaagacaagggtaagtatcatgttagtcaaggaatacaaagtttcagttatgtagcatacgtatattttagaaagttaatatacacaatgatgacaatagttaatagtgctttattgtatactgaacttgtaatttgccaagggcgtagggttttggtttttgattttggttttttgagacggagtcttgctctgtcatccaggctggagagcaatagtgcgatcttggg

SEQ ID NO: 104699 - DNA, 404 bp, Homo sapiens
  misc_feature (1)...(404): n = a,t,c or g
ggcacgagtgagccgagatcgcgccattgcactccagcctgggcaacagagcaagacttgtctcanaaaaaaaaaaaaaaaaaaaaaagggggctttgaaggggttttttgaacctttaaaaaaggtaataaaagggggtaaattttttttttggggatttaaaaaaaaagggggtttttttttgaccccccttttaaacccgggcgggtttttttcccccatttaaaaaatttttaaaagggcccggccccggggctcccccctttaatttaaactttttggggggccgggggggggggtttttttgggggtataacccccccggccaaaaaaaaaaaaacctgccttttaaaaaaaaaaaaaaattatctgggggggggggggccccccctgtattcccgtt

SEQ ID NO: 104700 - DNA, 371 bp, Homo sapiens
ggcacgagctccatgccatcctatggaaagagaaataggggaaggtctctgagtacctgcatgcaagcactcctgattgccctctggagagtccaggctgaattaaagaggagctggattcgatgcttgaaaattaattgaatgcttgaaatgaatatatatatatatgagtcactttgtcacccatgttgtagtgcagcggtgcaatcatggattactgcatctgtgaactcctgagctcaggtgatcctcccgactctgcctttggaggagctggaacctcatacatgtgtgaccacatctggctgatttttaattttttaaatagaagctgggtcctgacatggtgcctaagctggtctcaaactggt

SEQ ID NO: 104701 - DNA, 399 bp, Homo sapiens
aggtttgctttgatgaattaaattaaaatgagaaaagcaaaaagaaattaacctgtctgggtatcatattccctatctataaagtagcaattataacagtagtgtctatttcttaagttgtcatgaaaattaataacattgtttatatcaaaaaagatttacatataaaattcagagattatgaatcatgccagtcactttagaatcatttttgggatgtagtctatcattttagttcacctttttttttttttttttttgaaaaaaacctttgttccgtcccccgggctgaagaccaggggatgaatttaagttaattgaaccctttgcctccggggttaaagcaattttttgcctaaccctcccaagaagcgggaattattggccccggccaccacg

SEQ ID NO: 104702 - DNA, 384 bp, Homo sapiens
cggacgcgtgggttatgaaaatatagccggaagtggaattgttggatcatatggtaatttcatttttaattttttgaggaactgctataccggtttccacagtggctatcccagtttacatgcccgcccacagtgcgcaggagtttcagtttctccatatcctctttagcgtttgttattttctgttttttttcagcagtagccatcctaatggatatgggttggttcctgttttctatttggaactttaaaaaaaattaaagcaggtaatcggttctttcttttggtaatcatttctgagttagagtaggttaagcccaggtggggcacggtggctcatgcctgtcccaacactttgggaggctgaggatcacttgaggacag

SEQ ID NO: 104703 - DNA, 369 bp, Homo sapiens
agccggatcgtgccaatgcactccagtctgttcaacaagagcgaaactccatctcaaaaaaaaaaaaaaaacccccaccccccggtttttttggttggttccggccccctaggcgggagggcaggggcccaatttatttttacaaaagcctggacccccggggttaaagggacccccccccctccccctcccagggggggggaattacgggggggggcccccttcccggggaattttttgattttttgaaaaaaaagggtttggcggggttcccaaggtgggtccaaacctccggggttaaagggatctgccggccccaccctctaaaggggcccaccccttgggcaacggctttttttccaggaaccg

SEQ ID NO: 104704 - DNA, 387 bp, Homo sapiens
caatttctaaagtctatgtttacattatacttgcaagaaaaggcttattttaatcacagcacaagtgggtaactgttacagatattcacatgactctgcacttcccatttgacagcagagggcaggattgtggtggccgctctcaagttaccatcatcacaaatcagcttatttaaaacagtttattatgattataaataatctaaaatattttatttaaaatagattatttagaataaattattttaaatactttgtgatgtagaacattctctctggccgggtgtggaggttcatgcctataatcccagcactttgggaggccaagatgggaggattgcttgagcccaggagtttgagaccagcctaaacaacatagcgagactt

SEQ ID NO: 104705 - DNA, 369 bp, Homo sapiens
caccatgttgcccaggctggtctcaaattcctgggctcaagtgatcctccaaaaacctcagcctcccagagtactaggattacaggtgtgagccactgcacccagccaagagaatcatctcttcaagtggaagacactggtcctccttctagtcagggcatggggtgatggcttccagaagaggtcacagactcagatgcctacagaggccaagcagataatatgaatgagggaagagggctggtgagataaaaaagaaagtgttggagatcgatgcaagccagagagcaggtgatctacctaacaggctcagctgatgttcacctcccgatggcctgccccgcaggatgcagcctcctcagggctggt

SEQ ID NO: 104706 - DNA, 385 bp, Homo sapiens
cccacgcgtccggttctagatcgcgagcggcagccttcagtgaatattggtttctctttggtatgtcaataaaagtttatccgtaaaaaaaaaaaaaaaaaaaaaaaaaaaaaaaaaaaaaaaaaaaaaaaaaaaaaaaaaaaattgtcaaaaaaaataaaaaaaatggatcaacaaaaactccgctcccccacaattaaatgaatatggaattaatattttagagacggggttaaaacaacaatctcctgtaactaattaaaacaatgatttatctaattaatgtaagtcttctattgtcagggcatctttcctattccacacttccccaccaatatggtttatttatcgtacaaaatttttatctaagaaaagcagcagagca

SEQ ID NO: 104707 - DNA, 421 bp, Homo sapiens
cgagggatgagctgtctcttacttttatccagtgaaattgtcctgcccgggaagaggcgggggtgacacagcctgacgagaagaccctatggagctggaatttattaatgcaaaccggacctaacagacccacaggccctaaactaccaaacctgcgtgaaaaaattggggtggggcgacctcggagcaaaacccaaccttcgagccttacgtgctcttacttaaccagccaaagcgaactactatactccgttgagcccatagcttgaccaacggaacaagttaccctggggataacagagcagtcctattctagaggccatatcaacaatagggttcacgacctcgatgttggatcatgacatcccgatggtgcagccgctattaaaggttcgtttgttcaacgattaaagggctacgg

SEQ ID NO: 104708 - DNA, 475 bp, Homo sapiens
  misc_feature (1)...(475): n = a,t,c or g
nattgaacgccttgngaccggttgaagccttcggcgacccacgcgttcgccgatgcctatcatataggcaaagccaacccatgacccctaacaggggccctcttaaccctcctaatgacctccggcctaaccatgtgagttcacttacactccataacgctccttatactaggcctactaaccaacacactaaccatataccaacgatggcgcgaagtaacacgagaaagcacataccaagggcagcacacaccacctgttcaaaaaggccttcgatacgggataatcctatttattacctcagaagctcttttcttcgcaggatttttctgagccttttaccactccagcctagcccctaccccccaattaggagggcactggcccccaacaggcatcaccccgctaaatcccctagaagacccactcctaaacacatccgtattactcgcatcaagagtatcaatcacctgag

SEQ ID NO: 104709 - DNA, 352 bp, Homo sapiens
accaccccatgacccctaacaggttccttttaactcctactaatgacctccagcctagccatgtgatttcactaccactccataacgctcctcatactaagcctactatccagcacactaaccatataccactgatggcgcgaagtaacacgagaaagcacataccaaggccaccacacaccacctgtccaaaaaggccttcgatacgggataatcctatttattacctcagaagctgttttcttggcaagattttgctgagccttttaccactccagcctagcccctaccccccaattatgagggctctggcacgcaacaggcatcacgccgctaaatcccctataagcac

SEQ ID NO: 104710 - DNA, 484 bp, Homo sapiens
  misc_feature (1)...(484): n = a,t,c or g
ggtttcaccgtgttggccaggatggtctccatctcttgacctcatgatctgcccgcctcgggctcccaaagtgttgggattacaggcatgagccactgcgcctggcaaatgttttagtttttatggttattattatttttttttttggtggtggaggggtgtctgncctcncgttcatctctgctctgctgaaaagtgcaatccagaggaataatgccatgttcagcacctactatgctctaacatgcactgtggggacagccgtatcatggtcatccgtttcttagccccaaaggaatatgatgatgagttaggtgcacgctccagcgatggcaggaagactggtatgtcactacatcagggtataccgccggtttgaacatgtgtgcaaaagggcagtgcatggtcagtatccgtagaaagatcgagtagatggctgtgttccataggcttagccgcctgcgagcatagcaaaatcgagctc

SEQ ID NO: 104711 - DNA, 466 bp, Homo sapiens
  misc_feature (1)...(466): n = a,t,c or g
agtgcgcgnnnnnngttcctttgtactttgctgntcgaannncnnnannggnangaggaagngctagatatactaaaaaaattggatcattatatatgtttttccatattctcccttgaatattctaataccagatttgaaattggtgtattatctaaaatgataaattgggtaatttaaatcattcatatgtgatcaaaatatcagcatgtccttttacatttcttagttatctactggtattctgaaactttttacccaattattttgtagaacaaaacatatgggtgctttttaaatatttatattacatgaaatttgcattacttttttttttgaaacaagacatttctgccattaggctgaagtgcattggtgcagtcttggtttactgaagcctccgccccctggcctcaggtgtgatccctccacttcaccctcccgagtagctgggacaaggccctct

SEQ ID NO: 104712 - DNA, 390 bp, Homo sapiens
gggttgcagtgagccaagatcgtgtcactgcactctagcctgggcaacagagcaagactccatctcaaaaaaaaaaaaaaaaaaggcatttttagggcccgggccctttgggggggggtttttttcattaaaagggttttaagggcccccccttgtggacccaggggaaaaaacttttttctttttgggggggaaaaaaaaccccttggcaaaaaaaaacccccccgccagcgggtttttaacttttggaaaacccgggttttaaaaaaccaacccccaaaggccccgttcctccggaaaacctcccaaaggaaaaaaaaaaggagttgaattttttttgttaacccggggccagaaaaaacaaagaatttttgccccctttccccaggg

SEQ ID NO: 104713 - DNA, 499 bp, Homo sapiens
  misc_feature (1)...(499): n = a,t,c or g
ggctattctaaggcttttgcagaaaaataagtgttcaatgtttgtagttcttcaaaagcatgttgcagtagccagccatactatgtgtattcccagtatcatgtacgcactacaaaaaatgtgtgcttgctgctgctgtgagtgaaccattgcttacgataacaaacttaactagatctgtaaatgtacagaatagcatcagatgtttctgacagattacaaaatgtttcgaacgtataaaatcaacgggagcgttcgtaacatttatatctattgtataacactgtatgtctaacacatgggctgcctattctgatcatatactcagcttatcaactagcgatttacgacctgctgctgagacgagatgcgctggcgcggctgcaggcggacttggccgatcggcgccgggggctgcagcccaagaagcgtttcgctttcaagacccggngaaaggatgctgcttcgtctaccaaagtagacgcggctcctggcatat

SEQ ID NO: 104714 - DNA, 392 bp, Homo sapiens
ctgcattaccccactctgcatcaactgaacgcaaatcaggcactttaattaagctaagcccttactagaccaatgggacttaaacccacaaacacttagttaacagctaagcaccctaatcaactggcttcaatctacttctcccgccgccgggaaaaaaggcgggagaagccccggcagatttgaagctgcttcttcgaatttgcaattcaatatgaaaatcacctcggagctggtaaaaagaggcctaacccctgtctttagatttacagtccaatgcttcactcagccattttacctcacccccactgatgttcgccgaccggtgactattctctacaaaccacaaaaacatttgaacactatacctattattcggcgcatgggcttga

SEQ ID NO: 104715 - DNA, 459 bp, Homo sapiens
  misc_feature (1)...(459): n = a,t,c or g
nttgagggcgtngnatnnnaatggacgatatagtcagngcggnggcattcctcaaaaatcaccccctagaaacatgaagtaaccactcattcatcgacctacccaccctatccaacatctccgcatgaggaaacttcggctgactccttggagcctgcctgatcctccaaatcaccacaggactattcctagccatgcactactcaccagacgcctcaaccgccttttcatcaatcgcccacatcactcgagacgtaaattatggatgaatcatccgctaccttcacgccaatggcgcctcaatattctttatctgcctcttcctacacagcggacgaggcctatcttacggagcatttctctactcacaaacctgaaacatcggcattatcctcctgcttgcaactatagcaacagccttcataggctatgtcctcccgtgaggccaaatatcattct

SEQ ID NO: 104716 - DNA, 415 bp, Homo sapiens
caagatatcaccattgccctcgacaacgggcatcaagatcgtactccgtctcaaactttctgcctccttggaaagctctacatctccttgtgattggagtgcgggtaacaagattccttaatgaggaaaaaaagcaagaacagaagccctagtcatgaacgatagagaagcaaatgtttggaacggaagcgaagtggagacaaaaaaaaaaaaaagggcggcccccccaaaaaaaaaattggggggttcccttttggcggccaaatggaacttaaacccttttccattttgggggggttttaaaatttgaagggggggcctttggaaagggacctttatttttgtgccgggaaaaaagggccaggggggccgccaaattttaaaccctaaactttaaaaaaacttttgggggggg

SEQ ID NO: 104717 - DNA, 357 bp, Homo sapiens
  misc_feature (1)...(357): n = a,t,c or g
tttatggcttggcctcgaatacggtgtgtcctggagaatgttccatatgcacatgataagaatgtgtattttactcttgggtggagtgttctgtacacatctgtcaggtcttattggtttcgtattttctatttccttgttatcttttatttggttgttccatccattattattatttttcttgcctgataccaatgctgatatccatccatgattgaaagtggggtattgaagtctccaactttctttctttcttttttcttttctttttggagacacggtcttgctctgtctcccaggctggaaacgtggtggcatgatcatagctcactgtagcttctgtctcctgggctcacn

SEQ ID NO: 104718 - DNA, 391 bp, Homo sapiens
gccgagattgcgccattgctctccagcctaggagacggagcaagactctgtctcaaaaaaaaaaaaaaaaaaaaagggcatggatggaaaaccggggtcccttgaggagggcggcggaaataaaaaacctagggggcccgggaccaccactggggggggctgaaaaccccggggtaaaaattaaaaccattttggcaaaccacccgggggggggtcccggcaaaaattggcccccttctttttttcacagaaaaaatttggcattcggaccccaggggaaaaaccaaaatgcccggaatggcccggttggaaccggccctacaccaaatttttaccttatccacagaggccaaaaatggaaaggggccaaaactggcttttttttttatat

SEQ ID NO: 104719 - DNA, 390 bp, Homo sapiens
gcttaggcctgggagtttgaggctacagtgagctgtgattgcgccactgcactctagcgtgggtgacagagaaagaccctatcttaagaaaaaaaaaagaaaagaaaaagaaaaaacaaccaaaaaaaacacccaaccctatataggtattattattacttctataggacacatagaggtttggaaagattaaatcacttgaccaaggtcacaaaataagttctgaggctgggatctgggattcagtcttattatatgcccttcctctaccactccctaaaacttctcattccctcaatccccatatatcatcttaaaatctgcaataaatagccccatacattcgttggcacttaggaaactgttaccagatggctgagtaactgtatt

SEQ ID NO: 104720 - DNA, 459 bp, Homo sapiens
  misc_feature (1)...(459): n = a,t,c or g
agagaaacaanntttgatnccatcgagnacactagtcagtgtggtggaattcatcatttactttcctaatgaactagctttcattttactctatggacttaccttgagttcttccttgcatgatatccaagaacctgctcctggggtctggattgggacccctttcctgtaacagcatggtaagtccaaaatctgtagagtaggctaagaccctggagactcagggaggagttacagtttgaatctgaaggcagtctgcttgcagaatttcttcctttcctggggaagtcagtctttttccattaaggcctttagctgattggaagaaatccacccagattatagaggtaactgctttactcaaattccatcagtcaaatctcattcaaaaaacaccttcacaaaaacaaccagaataatgttttgaggtaggatttttgttcttggtcactttgcaag

SEQ ID NO: 104721 - DNA, 417 bp, Homo sapiens
  misc_feature (1)...(417): n = a,t,c or g
aaaaaaacaaaacctcaaaatatacttcatatgtttgttagggttaagattaaataaatacatataagaagtagctattgttgtgtttagtaaatatgtacatataatgtgtttagtatatttagcataaacgtataatctctgacccaaaaaaaaaaaaaaaaaaaaaaaaaaaaaaaaaaaaaaaaaaaaaaaaaaaaaaaaaaaaaaaaaaaaaaaaaaaaaaanngggggggggggctttaaaaaaatttttgggggggccccccactccggggggggaaaaaaaattttttttttttttttgggggggggtataaaaaaccccgggggggggtgggggggaaaaattttttttggggggggggnntttccccccccccccccccaaaaaaataagggtgggggggggaaaaa

SEQ ID NO: 104722 - DNA, 375 bp, Homo sapiens
gacaatcgcttggacctgggaggtggaggttgtagtgagctgaaattgtgccactgcactccagcctaggcgacaggtgaaactgcgtctaaaatacaaaaaaaaaaaaaaaaaaaaaaaaaaaaaaaaaaaaaaaaaaaaaaaaaaaaaaaaaaaaaaaaaaggggggggggcctaaaaaaaaaaaataggggggggcccaaaaataccgggggggaaaaaaaatttttttttttttttaaggggggaaaaaaaaaaacccctggggtatttttggaaaaaaatctttttttggggggggggaaaatgccccaccccccccccaaaaaaaaaaagctgtcgaaaaaaaaaaaaaattttaggggggggaggggg

SEQ ID NO: 104723 - DNA, 360 bp, Homo sapiens
cccacgcgtccgcccacgcgtccgtcaaaaggactgtggaggtcagtgagccacttgtggattctcatctggaaacgatcccgtgtgttagaaccttcacaaggagtttttcttgtggtgattctcgaagccttgataggcgttccagctggtcttttcactttgagattcttttcctttgctcctctgatcaagtcagcacacaccttttctggggattctatgttgcagctcattaaagtgattcagattcagtgaattgtcacctctggctccgcaggttttcttcaggtatctttaaagccgtgggtgggccgggtgcggtggctcacgcctgtaatcccagcactttgggaggcc

SEQ ID NO: 104724 - DNA, 371 bp, Homo sapiens
  misc_feature (1)...(371): n = a,t,c or g
ataagacaaacatttttccaaaaaagagaaattgttgggattattctctgttattggaatgtcggatactatagtcagcttcattaatcatcaagaatgctatggattttccatttttatagggtctatatctcagttaaggtaatacttgtaattcttgtgccccatgaaaaaaaaaaaaaaaaaaaaaaaaaaaaaaaaaaaaaaaaaaaaaaaaaaaaaaaaaangggggggggcctttttaaaaattccctgggggggcccaaatttcccggggggggaaaaaaattttttttttttttttggggggggaaaaaaaaaccccccgggggttttttggaaaaaacccctttttgggggggggaaaaaa

SEQ ID NO: 104725 - DNA, 368 bp, Homo sapiens
caggaaaattgcttgaacccggaaggcggaggttgcagtgagcgacggtcacaccattgcactccagcctgggtgacaagcgcgaaaactccatctcaaaaaaaaaaggaaggaaggaaggaaaccggatcttcaatgccgggggaagggaaaaacactcccaaggtcacaaagccaggccggggggactcctgaaagtacactgacagctccgggggggtcccagccaaatccccctacaaaaaaggatctgttggcctgctcttccgccctaaaaggccaggaggggctggggaactacacaaaaaagggggccattctttgatatgtcctacggcacccgcacccaagggatacacacttatttg

SEQ ID NO: 104726 - DNA, 357 bp, Homo sapiens
aaaagagttactttgatagagtaaataataggagcttaaacccccttatttctaggactatgagaatcgaacccatccctgagaatccaaaattctccgtgccacctatcacaccccatcctaaagtaagggcagctaaataagctatcgggcccataccccgaaaatgttggttatacccttcccgtactaattaatcccctggcccaacccgtcatctactctaccatctttgcaggcacactcatcacagcgctaagctcgcactgattttttacctgagtaggcctagaaataaacatgctagcttttattccagttctaaccaaaaaaaaaaaaaagggggggccgctttag

SEQ ID NO: 104727 - DNA, 365 bp, Homo sapiens
aagtaaacagagcagaagtgaccactgggacttcaggcaagaagctcaccaccaggcacacagcaaagggactgaactgacccctgtttgcactaagccacccccaccccccactctgctttcccaagcttgactggcatatacctaggcctgtgtgtgtgtgtgtgtgtgtgtgtgtgtgtgtgtgctcttttccgtctaaggcatgaataagaggggaggtcaaaataaacacccaatctgaggccgggcacgggggctcacgccggtaatcccaacactttgagaggccgaggcgggcggatcacgaggtcaagagatagagaccattctgtctaacacggagaaaccccatttccactaaa

SEQ ID NO: 104728 - DNA, 348 bp, Homo sapiens
  misc_feature (1)...(348): n = a,t,c or g
tccgaggaggttagttgtggctttaaaaatgattaaggatactagtataagagatcaggttcgtcctttagtgttgggtatggctatcatttgttttgaggttagtttgattagtcattgttgggtggtgattagtcggttgttgatgagatatttggaggtggggatcaatagagggggaaatagaatgatcagtactgcggcgggtaggcctctacctgcacgacancncttataaaaaaaaaaaaaaaaaaaaaaaaaaaaaaaaaaaagggggggggcctttttaaaaaacccttgggggggcccatttttcccgggggtgggaaatatttttttttttttttt

SEQ ID NO: 104729 - DNA, 337 bp, Homo sapiens
cagcccatgacccctaacaggggccctctctctcctcctaatgacgtccggactatccatgtgatctcacttacactccataacgctcctcgcactacgcctactaacctacacactaaccatataccaatgatggcgcgatgtatcacgacatagcacataccaacgccaccacacaccacctgtccagaaaggccttcgatacggcataatagtatttactacctcaaaagatattgtcttctcaggattattctgagccttttaccactccagactagcccctaccacccaattatgatgtcactggcccccatcaggcatcaccccgcttaat

SEQ ID NO: 104730 - DNA, 372 bp, Homo sapiens
ctcttgaacccctgaagtggaggtttcaatgagcctagatcacaccactgcactccagcctgacgacagagcgagaatccgtctcaaaaaaaaaaaaaaaaacacctgggggggcccgggggtttccgggtttaaacaacaccttttgggggggcaagggcggggggcccccgggggtcgggatttaaaaaccacccggcccatggggggaaaattttggtttttcctaaaatttcaaaaaaaaaatttacccgggggagtggggggccccctgtaaccccaccctttgggggggctgaggcagaaaaattttttaattttggaaggcaagggtgccagggatttaatttttggccctggccctccacccgg

SEQ ID NO: 104731 - DNA, 369 bp, Homo sapiens
aattgcttgaacccgggaggcggaggttgcagtgagccgagattgtgccactgcatgccagccttgccgactgggcgagactacgtaactacgtctcgtaaataattaagtagtgaaaatgacccgtcattacctctctgctagatgttgattcctgaaggagagccgatgacctgacatccactttgtgagtgttgcttatgcatggagacgaaacactttagaaaaccactttattattattgtttaaggccaggagttcaaggtcagccctagcaacatagtgagaccccccctcatctccatacaaaaaaaaaaaaaaaaaggggcccctcgggttttaggggcccgtttaaaccccgttaaaaa

SEQ ID NO: 104732 - DNA, 371 bp, Homo sapiens
caagtgatcgtcctgccttagcttcccaaacttacaggtgtgagcccccacaccagtcaacgctgtggtcttatgcacctggtgtcccctatgccctgagcaatgatcctcctgcttcaaactccgaaagtgctgggataacagatgtgaagcagcatgtgtggtccacatagtattcttatgggttaaattgagtcctcctcaaaacatgttgaaatcctaaattctagtagctcagaatgtgaccttatttagaaatagagttattgcgggccgggcgtggtggctcatgcctataatcccagcactttgggaggtcgaggcaggcggatcacctgaggtcaggagtttgagaccagcctgaccaacat

SEQ ID NO: 104733 - DNA, 379 bp, Homo sapiens
caggatttgtatatcatatgttcttcagaatcaaagcgttctacagggtgaatatctctacctgaaatgcttggaaccagattttggaatgttctcgcatacatagtgagatgttttggggatgtgacataggtctaaacaagaagctcatttgtttcatatacaccttattcacatagcctgaaagtagtcttacgcagtgcgttttataattctgtgtgaaacaaagtttgcgtacattgaaccattggaaagcaaaggtgtcacgctggtattgaagaagtttcagattctagccaggcaccgtggctcaagccagtaatcccagcactgtaggaggctgaggcaggaggatcccttgagcccaggagtttgagat

SEQ ID NO: 104734 - DNA, 1565 bp, Homo sapiens
ttttttttcaattaatttcagcagcatctttattgcaacaaagaacctgtaataaaatgcaagaaaactaatgtttccctttacatgattaaaagccatatacctaaaaatgagaaaacccataagcttactggagacatgcaattctttttatacaagtcaatgcttaaaacagcaggcacttcatgttctaaaattaaacacctgaattccaattttgctgaatacaatataaatttgttttggggttacttaaaaacaaacatacaaaccctactttttctttatctgtaaaggacttatgaaatgatcacctagagcccaggaccttgcactaacatctctatatttgaggctggaagatggctaggtgaggctgggaaggtgggaatcaaaaaagtttcctttttcctttatatctgctgggaatagacacactcaccttatatagtttagaaatggccatgtctcttttcttacatcaaatagctataaagatgggctcccaggcttaagcaagcactctactctatattccaatcctcaaatcctccactataccaaggaag[450 bp omitted]gaaggaataaaacaagtagtaaaaaaaaaaaaaagtaagcatcggtatcaatatcgcattcttttaaaaggtaatgcatgcattgtgacctaatcctcttgtatgaggctttggaaaagaacccaggaatggcatagagagaaaaactttcattccaaaattaatctccagacaaaggggatagaaacaaagtaaacaacatctcctgctgctttcagagtgagacggggccaaatagttaccacagatgagcagcttcatggactactgtttaggttcttgtgaatcagtccagtgtaaaaaatcacctattattaatccaactccattctctatagaagagtttcttaaagtagtccacagatgacttactataggatcgcctggaaagcttgttagaaatgcacattcctggtgtctacccaaatcaatggaatacaaatttttatttatttatttattttgaggcagaatctcactctgtcgcccagactggactacagtagcgccatctcggctcactgcaacttccgcctccccaggttc

SEQ ID NO: 104735 - DNA, 283 bp, Homo sapiens
  misc_feature (1)...(283): n = a,t,c or g
gcacgaggctctctctctctctctctctctctctctctctctctctctctctctctctctctccctctcgcgctccctccctccctatagcccctaatccacaactcgctccttgtccatatccccttctccctcgaccttgaaacccctgagctccttttcccagacctcgacaaaggcttcgcccgctccctgcccttttcctactaaccctcccgtgatatccatcgccctattcccctctccttttccagaggaatcccctccctgcctcccccgcccn

SEQ ID NO: 104736 - DNA, 349 bp, Homo sapiens
ggcacgagggccttctgagcttaacattccaaagattccaaggattgctgacaatgaccatgaactcacgctctggcatggacaaggaatcaaagaattggatctgggcatggggccatgtgcctatactcccacctactcaggaagctgaggcaaaacgatcacttgaccccaggagtttgaaaatgccttgagctatgattgcaccactgaactcctacatggaccacaaaacctaccgccaaagctattttttttaatttaaaaaaaaaggactcatgggattaataggtgtttgtgatggggcaagattcatagacaagaacaaattttgggtaaggattacaaa

SEQ ID NO: 104737 - DNA, 358 bp, Homo sapiens
ggcacgaggtaattttgaggtctataagtataagagcatgcttttgataacagtaagtgggggacaaggaagccaaacatgacactatgtatgctataattataataatataaaacagaaatgtgggaatagcattgttaggagttcagcctttataatcattaaagaagaacctggttagaatctttattatctgtataactttaagcaagttatttaacttctctaagtttcagtatccttaatcatttttattgccacaactaacctcctcggactcctgccttactcatttacaccaaccacccaactatctataaacctatccatggccatccccttatgagcgggcgcagtg

SEQ ID NO: 104738 - DNA, 367 bp, Homo sapiens
ggcacgagccaactaaaaatattatacgcaaactaggaggtaggtgcttgaccaaagcccatataaataagaaattataacagaccctgagaaccaaaatgaacaaaaatgtggtcgcttcattaattgaccccacaatcctaggcctacccgccgcagaactgatcattctatttccccctctattgatacccagctgcaaagatgtaatcaacaaccgactaatgaccacccaacaatgactaatcgaactaacctgggaacaaatgataaccatacacaacactaaaggacgaacctgatgtctgatactagaatgcttaatcatggttattgccacaactaagctcctcggactcctgccgta

SEQ ID NO: 104739 - DNA, 655 bp, Homo sapiens
tggaagaattctgtgaaagcaggaacccttataactaaattatttctctccagtgctcaaagcatgaaaattttctgctgtctttggaactttgtctacaaacagttagaagatgcagcccaagggctcaccatgggtggcgatgttgaagaacatggtgagtttgactgtggctggtggcagaggtctctgtgtgtcagcggcatctgcaaagcagcccaatcttaagtattttgttataacagcacatacagactaagacaacttccttgaccaaactttaattgggctcatctgagcattctgcttaaccagggcatgaccttggtctgccattaggcaagaatcctgctaagttattttagagagaatctccgcaccttttatatctaattacctttgatatctgatcaagtttcttattccccacccttgatgtctaagtccttggcttccctctaccaagaatcctattagacaattttagcaagaatccccctacccttgatatctccttttgttaattctctatccactgaccttttcattcttctcattggcaatacatctatagctatctttgctgaatttggagtaagtgcaatctctctcccctcttgtaatagtcttgaataaagtcttccttaccatttca

SEQ ID NO: 104740 - DNA, 380 bp, Homo sapiens
ggcacgagatccattgatggacacttaggttgattccacatctttgctattgtgactagtgctacgataaacatacaagtgcagggatctaattatttcttttcctttggatggatacccagtagtgggattgctggattgaatgggagttctaattttagttctctgacaaatctccatactgttcttcctagagattggactaatttacattcccaccaacagcgtataagagtttccttttctccacatcgccactaggttgtaagttccttgaatgtagggatcatgtctcttttcttcattggtttataacaagagcctaagagtgtttggcacatggcaagtacttgttttctagctgacagatgaatgaacaa

SEQ ID NO: 104741 - DNA, 367 bp, Homo sapiens
ggcacgaggtagatgaaaccacaaagatgggaaaaaaacagaggagaaaaagcagagcacctctcctcctcaaaaggattgcagttcctcaccagcaatggaacaaagttggacagagaatgactttgacgagttgagagaagaaggcttcagacgatcaaactacgagctacaggaggaaattcaaaccaaaggcaaagaagttaaaaactttgaaaaaaattgagacgaatgtataactagaataaccaatacagagaactgcttaaaggagctgatggagctgaaagccaaggctcgagaactatgtgaagaatgcagaagcctcagtagccgatgcgatcaactggaagaaagggtatcagcg

SEQ ID NO: 104742 - DNA, 356 bp, Homo sapiens
ggcacgagaaaacacctgctttttttttgaaatggagttttaggcgggagtgcagtggaacgatctcggctcactgcaatctctgcctccaggagaatggcgtgaacccaggaagcggagcttgcagtgagccaagatcacaccaccgcactccaggctgggcgacagagccagactccgtctcaaaaaaaaaaaaaaaatggcaaaaggtttaaataacttttcccccgggattatcccagggaaaggaccatttccaattggaaccggggctggaaaggaaaattccacacccttgtcaaatttaccaatattggggggggggggccagggaaaaaggtttaaaaaagttttct

SEQ ID NO: 104743 - DNA, 347 bp, Homo sapiens
ggcacgagcaaccattttcctttcctttacacttatcaggttcacaattctactgactatcctagaaatcgctgttgccttaatccaagcctacgttttcacacttctagtaagcctctacctgcacgaccacacataatgacccaccaatcacatgcctatcatatagtaaaacccagcccatgacccctaacaggggccctcttagccctcctaatgacctccggcctagccatgtgatttcacttccactccataacgctcctcatactatgcctactaaccaacacactatccatataccaatgatggcgcgatgtaacacgagaaagcacataccaaggcca

SEQ ID NO: 104744 - DNA, 533 bp, Homo sapiens
accaacctggccaacatggtgaaacctgtctgtacaaaaattagctgggtgtggtggtgcacgcctgtaatcccagctacttggcagactgagacaggaggcagagtttgcagtgagtcgtgatgatgccactgcactccagcctgggagacagagcaagactctgtctcaaaaaaataaaataaaatggttcctgagtatttttagattcgtagagtactaagcagaatgtacagtaaaacatgcctaatttcctattttctgggcttgctgtggaccacattttaagtcactgtgaaatacagatttgggatgttgaagacagactctaaaatttgcttttatcttcacagtaggtggggttcattcactgtgtgagtaaatcacataactgctttctatgggttatgtcatcgttattcttatccagagataatttggaaaaatgtcctaccagtctcagatgcttctgtgggtctccttttatattatgtggcaatcaaaactgccatcaactgactgattatcctaaa

SEQ ID NO: 104745 - DNA, 368 bp, Homo sapiens
ggcacgagcttgaacctaggaggtggaggttgcattcaactgagatcataccacttcattccagcctgggtgacagagcaagactctgtctcaaaaaaaaaaaagggaaaattctgggagggacattggttaagaaaaccccttcagaattaatccttcttttccccacagaagttttttttcttgtcacctaaaaggggccggggggtataaaaaccttttgggggggactaggccaccccacctttaaaacatcccccattttccttaaactttaaaatttcagggcggggcccctttgggtactcaaaaatttgaaaaagttattgggttttccaaaatgcccactgggggttattgatttgttt

SEQ ID NO: 104746 - DNA, 355 bp, Homo sapiens
gtatagtgtgaagttccttgtctgctggcagccagaggcgacgagtctggacctcatggaagtccagactctagtctgggcgcgtcccttttgacggcgtttcgctcttatcacccaggctgcagtgcaatggcacgatctcggctgactgcaacctctacctcctgggttcaagcgattctcctgcctcagactcctgactagctgggactacaggaaggatgtcgattctgcgcttctcagtaactacgtgacgtgaaaatacatatcaaaaacactgtgcaggcaccagagtcctgagattgtcagagaatttctcacagcaatgaaaagccacaagttgaccaaagttggg

SEQ ID NO: 104747 - DNA, 370 bp, Homo sapiens
tcgctttaaaggagaggtgctgaccacacgtgaaatcacaatataaaatggccggcaggcctccaggtaggcagcaattcctagacatttgcctgtgttccctgggggagctggtggcctgtgaccatccactgggaaaatcccttctgtgatgaaggtctgatggatgccagaagattccacggaacatgctgggtgggtggtctgtattacaccacaccgttgatgagcagtgaggcccaaacaggtatatcaaaaaatgctcagcatcgctgatcatcagggaaatgcacatcataaacacagtgagacgttgcctcacacctgccacaatggctactgtcagacgaaagacaacaagtgtgggtga

SEQ ID NO: 104748 - DNA, 412 bp, Homo sapiens
ctcaaactcctgacctcaagtgatccgcctgcctcagcctcccatagtgttgggattccaggcctgagacactatgcccagccttcactgcttttatgcaaaggaataaatagagtgattattaaagtgctctggatcacacacatacaaacacacatatgcacatacatacacacacacaaaaatacacacactttaggtaacataaatgtgtgtggctgtcagtgaatgctgcatttttctgagcttgtaaccttccctttactaactgtctccacattatgaccacctgaaaatgctacactgcagtggtacattcttcagcccaactaggattggatcagaggagttactgggttgatagtcttggactgaagctctctaaagagcagaatttctgtgatgtgcaggt

SEQ ID NO: 104749 - DNA, 413 bp, Homo sapiens
cggacgcgtccgcccacgcgtccggtgactcctaatttattattgtagaaggggagcaggttctgggcttgtcccttcttttcatcaacctctttttcctcttgtttaactcttcccattttacctcacccccaaaaaaaaaaaaaaaaaaaaaaaaaaaaaaaaaaaaaaaaaaaaaaaaaaaaaataagtggggggggggcctttaaaaaaatcccagggggggacaaatattttcgggggtggggaaagttagttttctttttttaagggggggataaaaaaaaactctgggggtatttgggaaaaaaaattttttttgggggggggggctatttctgaaaccaccccgaccgtatataaaattcctggggaaaaataaaaattttaaagggtaaatccctgcccacccc

SEQ ID NO: 104750 - DNA, 410 bp, Homo sapiens
atatatatatatatatatatatatatatatatatatttgtgtgtgtgtatatatatatatatgtgtatatatatatatgtatacacatatatgtatatatacgcacatatatatgtgtatttaaaaaaatcaaaacaaaaaaaaactcttttatacgtgggtattttataaagctacaatctgttcagtgtttttaaaaatctgtatatatgacattgaaaaaaaaaagggggtcttttcacgagaggggggatgtcccggccatatgtaactttttcttcacaaggcaactgggggggggggggggggtagagcccctccttgacatttcgctcaagttatatatacaggggcgctttgtcttgttaaaaggcgcttatgtggggtgtattagaatcttcaacaaaagg

SEQ ID NO: 104751 - DNA, 421 bp, Homo sapiens
agacaaccttagccaaaccatttacccaaataaagtataggcgatagaaattgaaacctggcgcaatagatatagtaccgcaagggaaagatgaaaaattataaccaagcataacatagcaaggactaacccctataccttctgcataatgaattgactagaaataactttgcaaggagagccaaagctaagacccccgaaaccagacaaaaaaaaaaaaaaaaaaaaaaaaaaaaaaaaaaaaaaaaaaaaaaaaaaaaaaaaaaaaaaaaaaaaaaaaaaaaaagggggggggggggttttaaaaaaaaacctggggggggcccaaaaatccgggggggggaaaaaattttttttttttttttggggggggattaaaaaacccccctggtgtttttttaaaaaaaaccttttttttggg

SEQ ID NO: 104752 - DNA, 391 bp, Homo sapiens
accgttgactatcctctacaaaccacaatgacattttaacactatacctattattccgcgcaagagcgggagtcctacgctcagctgtaagcctccttattctagccgagcagggccagccaggcaaccttctaggtgacgaccacatatacagcgctatcgacccagcccatgcatttgcaataatgttcttcatagtaatacccatgataatcggaggctttgacaactgactacttgccgtaagaaacggtgccccagagatggcgattccccacataaacaacataagctgctgacgcttacctccctctctcctactcctgctcgcatctgctatagtggaggccggagcaggaacaggttgaacagcctaccctcccttagaagg

SEQ ID NO: 104753 - DNA, 412 bp, Homo sapiens
  misc_feature (1)...(412): n = a,t,c or g
cagcccatgacccctaacaggggccctctcagccctcctaaagacctccggcctagccatgtgatttcacttccactccataacgctcctcatactaggcctactaaccaacacactaaccatataccaatgatggcgcgatgtaacacgagaaagccnaaaaaaaaaaaaaaaaaaaaaaaaaaaaaaaaaaaaaaaggggggggggccttttaaaaaaaccctggggggggccaaattttccgggggggggaaaaaaaattttttttttttttaggggggggaaaaaaaaacccccgggggatttttgagaaaaaacccttttttggggggggggaaattggggcccccccccccccaaaaaataaaggccttggggggaaaaaaaaatttttggggggggaggggggaa

SEQ ID NO: 104754 - DNA, 466 bp, Homo sapiens
  misc_feature (1)...(466): n = a,t,c or g
tggnnggccccaannaaatggaggccatcggatggcnncgatttcccgggccgacccacgcgtccgtcttatttacctttttctgtgactcagagccgtaagtatcacctttatttaatacacagtgttgtgatacagcaatgttgttatggggtggagaagctatctgcccctatagcaaataatgtttttgtgcctgctttttagtttttctccctcctttcttgctggcattttctttattctcaatgctcctgctcatagaagcttcttacctccctgtctttttttaatctactgagagaaaccaaccaagtaggcttgttagaattgtctcaagcaaagtataaaaagactccaaggctgggcacagtggctcatgtctgtaatcccagcactttgggcggccaaggcgggtggatcacttgagctcaggagtttgagaccagcctggccaacatggcag

SEQ ID NO: 104755 - DNA, 458 bp, Homo sapiens
  misc_feature (1)...(458): n = a,t,c or g
attgaaagcccctcggaaccgctcctttgattccggttcgacccacccgnncggnaagggagggaccaagggaaagggaatttaatcatggggatggttaccctcatgctgttttcatgggagggagttttcacagaatctgatagtcttgtaatggatgctcccccttttgctgggtacttctccttcctgctgccatgtgaaaaagatgtttgcttccccttccacctgactccaatacacaatcaagtcaatgcagaagagaacagattggtagagctatcagaaaaatattaacatttgagacgcagaacattaaaagattaaaaacagagaaacaactgctgaaattgctggagtgaagtggcaagatcacggctcattgtaaccttgacctcccgggctccagtagtcctcccacctcagcctcccaaagtgctgggattacagcaggctcc

SEQ ID NO: 104756 - DNA, 440 bp, Homo sapiens
  misc_feature (1)...(440): n = a,t,c or g
cccacgcgtccggcttgaacccaggcggcagaggttgcagtgagtcgagattgcaccactacactccagcctgggcaacagagagcgactctctcaaaaaaaaaaaaaaaaaaaaaaaaaaggccccttttttgggggggaaagggggccccttttttttttgggggggcccccttggaaaggcattaattggaaaaaatttacccccccccaagggggggaaagaacccccggtttaaaaaacaaaattttttaacagggaaaaaagggaaaacccccgggcctttttaaaaaaccccctaatttttcaaaaaaaaaaatttcccccaaaagggaaaaaaaaaggggactttatatttgggggaaaaggcaaaaaaaaatttctttcttaaaaaaaaaaaggtggcccaattaaaccaaaaaaaatattaattttttan

SEQ ID NO: 104757 - DNA, 457 bp, Homo sapiens
catagaacgccctcggttcggaccccgaattgccggggcgacccacgcgtgcggtctacaaaccacaaagacattggaacactatacctattattcggcgcatgagctggagtcctaagcacagctctaaccctccttattcgagccgagctgggccagccaggcaaccttctaggtaacgaccacatctacaacgttatcggcacagcccatgcatttgtaataatcttcttcatagtaatacccatcataatcggaggctttggcaactgactagttcccctaataatcggcgcccccgatatggcgtttccccgcataaacaacataagctgctgactcttacctccctctctcctactcctgcgcgcatctgctatagtggaggccggagcaggaacaggttgaacagtctaccctcccttagcagggaactactcccaccctggagcctccg

SEQ ID NO: 104758 - DNA, 428 bp, Homo sapiens
accgttgactattctctacaaatcacaaagacattggtttactatacctattattcggggcatgagctggaggcctaagcacagctctaagcctccttattcgagccgagctgggccagccaggcaaccttctaggtaacgaccacatttacaacgttatcggcacaggccatgcatttgtaataatcttcttcatagaaatacccatcataatcggagggtttggcaactgactagttcccctaataatcggtgcccccgatatggcgtttccccgcataaacaacataagcttctgactcttacctacctctctcctactcctgctcgcatctggtataggggaggccggagcaggaacaggttgaacagtctaccctcccttagcagggaactactcccaccctggagcctacgtagacctaacg

SEQ ID NO: 104759 - DNA, 372 bp, Homo sapiens
ccgagatcacaccactgcactccagcctgggcgacagagccagactctgtctaaaaaaagaaaaaaaaaaaagaagggtcctgtctgggttacatacccatatatcagcaggtattttcaatttttctatcactgaaatacaaaaaatatttaaatttcacttccaaaaaattttgctatggtcttttgacaaaagtcttctttattttcttaagttggaattaaagaatagaatgtttacagaaaagggcatctaagtataattcaaatgattttcacaaacgacacacctgtgaatgcttccagatcaagaaacaactttatcaacatggcagaagccctcttcatagtcttttatagccactactctgc

SEQ ID NO: 104760 - DNA, 372 bp, Homo sapiens
taaaaatacaaaaattagccaggcatagtggcacactcctgtagtcccagctactcgggaggctcaggtcatcctctcacctcagcctcccaagtagctgggactacagcatgcaccaccatgcctcataaaaaaaaaaaaaaaaaaaaaaaaaaaaaaaaaaaaaaaaaaaaaattgggctcgggggggggtaaacacaaaatttttgatttgaaaatttataaccccccggggtgtttttttttgggggtcccccccccccaaagattttttttttaaaaaaaacgggtttcccttttttttaagaaaaaaaacccccctagaggaggccccgcgggcccggacctcctttaataaaaaaaaaaaaaaaa

SEQ ID NO: 104761 - DNA, 365 bp, Homo sapiens
cgcggccgcgtcgaccagacatggaaaaccttgtgggcacaatgagtctggatttcattccaactgcaatggaaaaccaaaggatttttaagcatgggagtgtctaaattacatttttttaaacatagctacctgctacacaacttcccttagtttccgaactaaaatcgataccaagggaatcctaaaatcaaaatacaccttataatgtcatgaccacaccccccccatacacacgactcccaagtagctccaagtttcatgagaaattgcttttaaaataaatgttaaaggatctagagtttaggacaggcgcagtggctcacgcctgtaatcccaacactttgggaggccaaggtgggtgg

SEQ ID NO: 104762 - DNA, 371 bp, Homo sapiens
  misc_feature (1)...(371): n = a,t,c or g
caaggtctcactatattgcccaagcaggtctcaaactcccgggctcaagctatcctcccacctctgcctccctaagagctgagattacaggtgtgaactactgtgcccagctaactaggatttttttaaactccaaattttatagcaagtgaatggtgaatcaagaaagtgattccagagacaaacaatgtagtaagccccattttaacacaggtggtgattccatgggtcaggatttgcaagtcacatatttatctgacatgtaaccagctctcacattgttttaaccaaaaagcataagcacaaagacacaaaacattcattttttaaattacagaattttttttttttaataaatagtgacagggtcn

SEQ ID NO: 104763 - DNA, 407 bp, Homo sapiens
cagaatactaaagagtaatcattcatctgtgaacttcacatttaaactctcataaaacagattatgtaactttcagtttgtgtaatttggtttgatagtattaaaccaacatagtgctgggaacttatttttgttttttactatcaaaactttttattttggtcaattttgatcaatcctaagatggatcattaaatgaaagatttttgaaacagatgtttatgtaaaatgtagcaatattttatgcttatgggccagtatttcattcagtaactattttgggggtcctttttacttgaacctctagtaattcttgagctatttctcttttcttgagacagagtctcacatcgtcgcccccctggagtgtagtggcatgatcttggctcactgcaacctctgcctcc

SEQ ID NO: 104764 - DNA, 155 bp, Homo sapiens
ttttttttaaagcacaaacttttttttattttcagagacagggtctggatctgtcctacaggctggagtgcagtggccaggccttgacctcctggcctcaagccattctcccgcctcagcctcctgagtatctgggactacagtcgacgcggccg

SEQ ID NO: 104765 - DNA, 344 bp, Homo sapiens
  misc_feature (1)...(344): n = a,t,c or g
gagatgctctctggtgatccgcctgccttggcctcccaaattgctgggattacaggtgtgagccatcacacctggcctttgtctcctttactcaagcaggagactctcctcatagccacaacatctgggaatgtgctgggtcacacctgaagccagcacatttctgaatctcacccaaggcccatagtgagtactgcctggctaccactactgcttattcagagcccagaggctcttgagtcagcacgtgatgaaccctgccaggacttggtcatacccctcaagacagtggtttcccttccagcccagggtgtgtttagaaatcttgtctgggaactggggan

SEQ ID NO: 104766 - DNA, 354 bp, Homo sapiens
  misc_feature (1)...(354): n = a,t,c or g
gtttgatagcattttacccacagtggaacttctttcaaaactgcagtcagttctcttcaaccccgccactacttaatcaactacgtttatgtaatattctaaatctttcattggcatttcaacaatgttcacagcatcttcatcaggagtagattccatctcaataaatcactttctttgctcatccataagcagcaactcctcatctgttcaagttttatcatgagattacagcaatccagtcacatctccaggctccacttttaattcgagttctcttgctatttctaccacatctgcagttcctgcctccactgaagtcctgaacccctcanagtcatccatgagggctgg

SEQ ID NO: 104767 - DNA, 151 bp, Homo sapiens
agcctccttattcgagccgagctgggccagccaggctcgaataaggaggcttacagctgtgcctaggactccagctcatgcgccgaataataggtgtagtgctccaatgtctttgcggcttgtagagaatagtcaacgtcgacgcggccgt

SEQ ID NO: 104768 - DNA, 344 bp, Homo sapiens
tttaaatgtactgctatgtgtgcaaagctaataaacaatcattctttattcttttttttttttttttttttttttttttttttttttttaaaaaaaaaaaaatttttttttttgccccccttaaactttttttttgggaaaaaaacgtttttttttttttttgaaaaaatgcccccccccccctttttttttaaggggcaccccccttttgtaagggggtcttttttccaaaatttttaattttaaaaaaatttttttggggatttttttttaatttcaaaaaaaaaaaaaggttttttccaaaaagtggtaaggggggggaaaaaaaaattcttttttttttt

SEQ ID NO: 104769 - DNA, 291 bp, Homo sapiens
cgggaggcagaggttgcagtgagctgcgattgcgccactgcactccagcctgggtgactgggctacagagcgagactctgtctcaaaaaaaaaaaaaaggtggccccaaattttacccacccttatccatttttcacccttatccaaataatttggttaaggaccaaaaagggggaagaaaacttgtaaattttcttgccccaggctttgttaccagtgggttatttgggctgggacctggggcccagggccattcactcactgggtaggtttatggccaacgcggccgca

SEQ ID NO: 104770 - DNA, 349 bp, Homo sapiens
  misc_feature (1)...(349): n = a,t,c or g
tcaaaaccctcatgtgactgcattttttttcttttttatagggtttatcttctgactgacctacttgtgaagtgcggnctttttttttttttttttttttttttgggaaaagggggtttttttttttttttttccccccgggttgggggggggggccaaaacccggtttcttgggggtttaccccccggggctaaaggaaaccccccccccaacccccccaaaaagggggggaaacgggttttttccttttccccgggttttttttaaggggggtttttttttttttttgaaaaaagggggccctttttttttcccccggggggaaaattttttttttacccccccccc

SEQ ID NO: 104771 - DNA, 354 bp, Homo sapiens
ctgtaatccctcctactttggaagatggggcaagaggatcactgagctcaggagttggaggctgcagcgagctacaataataccactgcactccagcatgggcaacagagtgagatccagcctcttaaaaaaaaaaaaatccattctgagcatactggcctctggttttcataggggcctgggagagagctcttatcacttatcacattctgtaaagatgtccatttctccaagcacgataagatcagggatgaggggctgtcccttaagctgggcacagccatcacctggcttccaagaaggatagtggtacacagagagccagggcctaggagggagaggactggacttgaa

SEQ ID NO: 104772 - DNA, 351 bp, Homo sapiens
tttccctcatatatggagctcctgcaaagcaataactaaaagctaacaatagaaaaacaaatacaggacacaaacaggtactttagaaaggaataaaatggtctctgaacatacagagaggagttcaacctcatttacggtcatacaattactcttttttttcttttttttcttgagactgggtattgctcaggctggagtgcagtggcacgactacagcccaccgcagcctcaacctcccgggctcaagcgatcctcccacctcagcctctcaagcagccggcaccacaggcatgcattgccacacccggctaattttttaagagacagggtttcaccatgccgtccagg

SEQ ID NO: 104773 - DNA, 345 bp, Homo sapiens
  misc_feature (1)...(345): n = a,t,c or g
ctggcatcattcagctaatagatggnggcgccagatgggctattgggttattaaacttccctgaatctttgtttttttttttttttttggggagaaaaatccccctttttgcccccggggggggacgaggggcccctttttggtcaattagacactcgaccctgggggatagaaaaaattttcttcgcccccccccccaaaaaggggggataacaggggggggccccctggcccggttgattttattttttttaggaaagagggggttcccccttgggggccgggggatttttaaactcctctcccccggggggcaccccccgctttccttttcaaggggggggg

SEQ ID NO: 104774 - DNA, 344 bp, Homo sapiens
catatagctgaaatagcccaggtaggggattgatgatttatcagaatcttgactgagagcagaattatcaaaaatacgtcgtaagcaaataaaacacttgaggacttaggatgtacaccatataggggtcagagagcccattatggcaggagtgacaggtgttactgatcttttggacaatgggtagtttacataggaaaatttaaagagttggctgtgttggccggacgcggtggctcacacctgtaatcccagcactttgggaggccaaggcgggtggatcacaaggtcagaagatgattgagaccatcctggctaacacggtgaaaccttgtctctactag

SEQ ID NO: 104775 - DNA, 333 bp, Homo sapiens
ccgtgaacccaggaggtggagcttgcagtgagccgagattgcaccactgcactcccacctgggccacagagcgagactccgtctcttaaaaaaaaaaaaaaaaaaaaaaggccccccaaaaactttgggaaaaatttaaaaggaaatttttcccccttcccaatattaaaacgggatttttggataccccaaaaaatttttttttttgggtaaattccaaaaccccttgttaaaaaccttttttataacccaaagttttttcccctttttttttaaacccaaaaacggttttttccttaaaaaatttaagggggcttaaaaaattttttaaat

SEQ ID NO: 104776 - DNA, 334 bp, Homo sapiens
aaatatctcatcaacaaccgactaatcaccacccaacaatgactaatcaaactaacctcaaaacaaatgataaccatacacaacacttaaggatactagtataagagatcaggttcgtcctttagtgttgagtatggttatcatttgttttgaggttagtttgattagtcattcgcgggtggtgattagtcggttgttgatgagatatttggcgacgcggccgcaaatacgaagccttgagagaatccctttttcggcggtgctggagagtcttgatcgtcgaatagatgttataagcataattcattgcttttgtattgaacctacctaaatt

SEQ ID NO: 104777 - DNA, 348 bp, Homo sapiens
atcgcttgaacccgggaggcagaggttgcagtgagccaagattgtgccattgcactctagcctggacaacaagaggaaaacttcatctcaaaaaaaaaaaagaaggaaaggaaaggaaattttaaaaagaaaaccaaatgaagggatggaaataatgcttttgtttggggggaacatcatattaaaggtctgctccagttatccaatactgcataacaagccaccccaaaacttaggggttttaaacaacagcatttattagggccacactactgaagttgggccatggcttggtcaggacagctattttttgttccactcagcctcactgggggggacttgaaaacg

SEQ ID NO: 104778 - DNA, 350 bp, Homo sapiens
tccccctctattgatccccacctccaaatatctcatcaacaaccgactaatcaccacccaacaatgactaatcaaactaacctcaaaacaaatgattaaggatactagtataagagatcaggttcgtcctttagtgttgggtatggctatcatttgttttgaggctagcttgattagtcattggtggggggtgattaggcggctgttgaggagaattttggaggcggggaacaatatagggggggacgaagcggccgcgattgcggatcgtcggtagatgagtgtattggcattgcttgatgtgagcatagcatggttagttttggggagtggggtattacagagttgcg

SEQ ID NO: 104779 - DNA, 329 bp, Homo sapiens
tctgtttacttgggcatatgaaacaaatgagaacaaaataaaactgttcactgtataataattagataaatagaaaaacccaagtaatacaaatccacagaagtcccactaataatcactattaacagtctggttatatgaccccagactctctcctatgcccaagtatacagagtatattgtacacatacatatagaaataaatctatatatatatatatatatatatatatatatacacacatacatacaatctatttataatgcactatgatagtattcatagtattttgctggctcattttttttacttattacctatatagaac

SEQ ID NO: 104780 - DNA, 342 bp, Homo sapiens
gggcattctgctgctgagcttgcagaaaaagaaaaatgagctcaaaatttgctttgagagctacagggaattgctattactcctgtaccttctgctcaatttcctttcctcatcccaaataaatgccttgttaccagaaaaaaaaaaaaaaaaaaaaaaaaaaaaaaaaaaaaaaaaaaaaaaaaaaaataacagtctgaaaatagagcaaaacaaaaaagaatataaagggcttgggggccaggtaagaattatcactggcttgacttctaggggaacccccgatttttgccaagggccatcctttgatgctaaaatgggttgaaatttgtaagaggcccg

SEQ ID NO: 104781 - DNA, 362 bp, Homo sapiens
cttgaactcctgacctcaggtgatccacccgtgtcggcctcctgaagggctgggattacaggtgtgagccacggcagccagccagggatgaatgattttctatgcaaggctccatgccaggcattggtttcagtcttggtacactcttattattcctgatctctcctagggagagtgcaacctccacactcagcttattgcctcttattttaaaaatagttatggagcatctactaggtgcttgggagagggcagaaaagacaacgagagtccttgcccttcatggaacttatgttttagtaaggagagggagacaaggagtcaacagtaagcaatgaaccatgaagtatatgataacagag

SEQ ID NO: 104782 - DNA, 407 bp, Homo sapiens
agaaaactgatacgtcttacctggataacactcgcttggcacgagggccacatttctcttaccaaccatctgcatctcccactgtcttttctttctgatgctaattccttccacgggatgcttcttttttgttttcagacagggtctcgctctgttgcccaggctggagtgcagtggtgtgaacatggttcactatagcctcaacctccctggctcagtcaatcctcccacctcacctcctacaggcgtgggccaccatgccaggctgattttttaattttttgtggagatggggtctcaccatgttgcccaggctgatcgtgaactcctgcgttcaagcagttttcttgcttagcctcccaaagtgttgagattagaagtgtgagccacctaaagcaggccctttt

SEQ ID NO: 104783 - DNA, 412 bp, Homo sapiens
gggttatctattgtagtgatctttgatcagtgatctttgatgctactattataattgctttgagatgtcatgaactgcacccatataaggcagcaaacttaatcaataagtgtgtgggttcagactcctccattcaccagctattctcatgcctcttctcatgccttcatatttccggagacacagcaatactgaaattaaaccaattagtaatcccacagtggcctctaagcgtgcaagtgaaaggaagagttgcacgtctctcactttaaaccaaaagctagaaatgattaagcttagtgaggaagccacgtaaaaagctgaggtaggccaaaagctaggcctcttgcaccaaaaagttagccaagttgtgaatgcaaaggaagaattcttgaaggaaattgaaagtgct

SEQ ID NO: 104784 - DNA, 422 bp, Homo sapiens
  misc_feature (1)...(422): n = a,t,c or g
nattgacttggtgctatagcacgancacgcnaagcttggcacgaggggatgcaccatgttagccaggatgggctcaatctcctgactttgtgagacgcctgccttggcctcccaaagagctgggattacaggcgtaagccaccatgcccggcctgagctagaactcttaacgccacgatgtccagtgtttctcaaaccgtatcccagagggctattctaagggatattatcagatgttaccaggaggaaaaaggaagatcttttggctaaacactgactttatgaaagcaactcaaagtctctgatggagcgaagagtcagngactttaacatgctcattacgtatcctaaatttgagaaggaggacttgatgttcaatgcatttcaaacataatttcacttacggtgtattgggaccaacn

SEQ ID NO: 104785 - DNA, 453 bp, Homo sapiens
  misc_feature (1)...(453): n = a,t,c or g
gagcggggttttcctgaaacatcgtgnacttcatntacgccagcttggcacgaggaatgaaggacagtgaaatccaatatgttatattggattcagcagtgggctatggtggcagggccgcagtacagtgcagtgtcgaaatggggaaaggaacttgacccgttagttatgaaaagaagctgtggcgaaagagacagatggattgccaggagttgctgtccagaggacatgaaaacaaagatctcaacagagaattctatccattttgaaccctgtaactaacagtgaaatcaaccaggaaaatccttcatgatttcatctacttttcatttcatgatggagttcactcttgtccatgctggagtgtaatggctcgatctcggcttgttgcaacctccacctcccaggttcaagggattttcctgcctccacctcccaagtggctgggatcgc

SEQ ID NO: 104786 - DNA, 432 bp, Homo sapiens
ggcttaataaacaccactgataatggatgttttgtttctgtcattattataattccctttctaagatgctgatatagatcattgtgtacagctttttttttttttggagcctttccctggggttaggccctttaaaggggatttcccaggccaaccagtggggtttaaaaacctaaaagtgggaaaaacaggcccaaaccctggggggcggaaatttccccaaagggccaaaaaccagggttggaaagaattttgaaaaattaaagggaaacccccccttcctttgcctttaaaaaaggggaaggaagggggataccggcccttggaaaaaacctgccccctcgggggaaaggggaattccggggaaaaagggggggaaaaccgggccaccgggatttaagggccccatggaaaaaattaaaagggggaaaa

SEQ ID NO: 104787 - DNA, 422 bp, Homo sapiens
  misc_feature (1)...(422): n = a,t,c or g
ggggtggtgcatgcctgtgatcctagctactcangaggctgaggtgggaggatcgctagagcccagagaaccaaggctacagtgagccatgatcatgctactgcactccagcctgggtgacaatgagaccatggctcanaaaaaaaaaaaaaaaaaaaaatttcccgggggggcccaaatatgggggggtttaaaaacccgggtaaaggagttaaaggggttccaaaaagaacggggaaccccttggggtttaaaaaaaaaaaaagggccggacccccccttttttaaaaggggggctttttcaaggggggagaaaaaaaaaaagggggaaaaaatttcctttttccgccccggaaaaaaaaaaaacaaaaaggcaaaatttaaacccgggtcccccgggattaaaaaaattcccccttccc

SEQ ID NO: 104788 - DNA, 492 bp, Homo sapiens
ggtggcacgagggctgcccattgtctgagatgtggggagcgcctctgccccgccgtcccatctgggatgtgaggagtgcctctgcccggccgagaccccgtctgggaggtgaggagcgtctctgcccagccgccccgtctgagaagtgaggagaccctctgcctggccaccaccccgtctgagaagtgaggaggcccttcgcccggcagctgccccggctgagaagtgaggagcctctccgcccggtagccaccccatctgggaagtgaggagcgtctttgtccgggagccaccccattcaggagggaggtgggggtggtcagccccttcctggacatctgccccatccgggttggaggtctggggttaaacccccgcccggccagtccgcccgtcccggaggtgaggggcacctcttgccggccacccctactgggaagtgaggaggccctcagtctggtcagccgcacctttcgggagggaggagggagg

SEQ ID NO: 104789 - DNA, 380 bp, Homo sapiens
gggttgaccaaatcctagagttggaaaaggttctaaaaagaacttaatttttcattgtctctctaggttatgtgactttcctgtccaaatacagctgaggtgggaaatagacacagttgtaaccttgaacccgggaggtggaggttgcagtgagccgagatcaaaccactggacttcaccctggcaacagagcgagactctgtctctcaaaaaaaataataataataatatttttggtactaagaatcattcagcctctatttttaatggagccttaaggctactttgggtaagtttatttttttgagttataaaattcttgacctactggcctacttattttaaaaaatgcttagtttattgtgccatgaaaaacaggg

SEQ ID NO: 104790 - DNA, 396 bp, Homo sapiens
ggcataccttgaggcgagcaaaaaaattaaattttaaccatgagggaaatcgtgcacatccaggctggtcagtgtgggaaccagatcggtgccaagttctgggaggtgatcactgatgaacatgggatggaccccaccggcacctaccacggggacagcgacctgcagctggaccgcatctctgtgtactacaatgaagccacaggtggcaaatatgttcctcgtgccatcctggtggatctataacctgggaccatggactctgttcgctcaggtccttttggccagatctttagaccagacaactttgtatttggtcagtctggggcaggtaacaactgggccaaatgccactacacaaagggcgccgagctgggtgattctgtcctagatgtg

SEQ ID NO: 104791 - DNA, 407 bp, Homo sapiens
gggcggaacagaacccgagctgagcttgtggatgcggctgctaactggctgcgcacagaacctgagagaagagggtggcaataagtacttttgcctcattctgaagccttggaaggagctgacaccatgcctcactcgtacccagccctttctgctgagcagaagaaggagttgtctgacattgccctgcagattgtatccccgggcaaaggcattctggctgcggatgagtgtgtgggcagcatggccaagcggctgaaccaaattggggtggaaaacacacaggagaaccgtcggctgtaccgccaggtcctgttcaatgctgatgaccgggcgaaaaagcgcattggaggcgtcattttcttccatgagaccctctaacagaaagatgatgacggtgttacctt

SEQ ID NO: 104792 - DNA, 449 bp, Homo sapiens
  misc_feature (1)...(449): n = a,t,c or g
natagaaaacagttatgaccagttgatcgccctgcttggcaccaggcagaacttaaaaaaataaaagggccagccacagtggctcacacctgtaatcctaacattctgagaggttagaagcaagaggatggcttgagcccaggcatttgcagccagcctgagaaatagagcgagaccctgtctcaatcaatcaatcaaaaacgacagagatagatagatagatgatagattgatagatgatagatagatagatagatagatagatagatagatagatagatagcaacatggtctaaatgagtctaggagtggagtgtccttgaacttggggagaccaccctccactgcatttgcattattgatactatggctggagagggccttttgcctaaaagcttggagtatgttggggcccccgagagcaggtgagggccagaggttcaaatcat

SEQ ID NO: 104793 - DNA, 348 bp, Homo sapiens
ctggctttgtcactgagtagtggggttatgtactcaaattacttcacctctctgaggcttagtttcctcatcggcgatattgaacaataatagggcctgccccactgggttgccgtgaggacccaataaggcaatgcttatggagggccctgctcggtgctggtacagaggacctgatgaatcccagcactgaccttcccatccacctgtttagattccaaatttcagagggacctggtgaccctgagaacagattttagcaacttcacctcaaacactgtggcggagatccaggcactgacttcccagggtgagtctggtttggatggggctctgggctggggccag

SEQ ID NO: 104794 - DNA, 375 bp, Homo sapiens
ttttgagatgaagtctcactcttgtcacccaggctggagtgcaatggcgcaatctcggctcactgcaagctctgcctcccaggttcaagtgattctcctgggagctggaggttgcagtgagccaagatcatgccaccgcactccagcctggagagacagtgagacgaaaaaaaaaaaaaaaaaaaagttctttagtttaaggtgttaaatccttcattacgtgcggaaattcacaacttcctgttgggaaatcctgaaaaaccccgttggttaacttcaactggccctggggcacaaattaaattgtttttgttaacacacatcgttggcctttttttatagaacaatctcccttttatttgaaagggtggcagg

SEQ ID NO: 104795 - DNA, 355 bp, Homo sapiens
gttggccaggctggtcttgaactcctgccctcaagtgatccacccacctcggcctcccaaagtgctgggattataggtgtgagccactgcacccagcctaagttggatctcttgaatgcaaaaaggttcaataagaggcaacagaaaaccttttttcttttatgccaggaacaaaatacagtggtacctagaaccaacattattttatgatatagtgtgcattaaactactgggcacaaagtgtaacaggtaatgaaatatttgaaggtagaaactaaagtaatacttataaaattatctctttagtaaaaattaataattcactattaactgaaactcttaaaacgaatgtgac

SEQ ID NO: 104796 - DNA, 339 bp, Homo sapiens
  misc_feature (1)...(339): n = a,t,c or g
atagttgggtggttggtgtaaatgagtgaggcaggagtccgaggaggttagttgtggcaataaaaatgattaaggatactagtataagagatcaggttcgtcctttagtgttgtgtatggttatcatttgttttgaggttagtttgtgctgtagaccaaatgtttgttgtgcccccctaaaattcaaatgttggaatctaatcctcaatgtggtatttggagatggggcctttgggagatgattaggtcatgagactggagcctttgtgaataggataaatgctgttataaaagagaccctggagagcttctttgccccttctaacacgtggggatacn

SEQ ID NO: 104797 - DNA, 374 bp, Homo sapiens
  misc_feature (1)...(374): n = a,t,c or g
gcctgtcagtgatctattggaccaaaccttctgcacactcggccagttccctctccaatgtccggtgccatctttcctgacctttgtttctttctgttcaggaaccatcagtccccttgtaataaaggtggtagatttcattgaggttttagattgaaactttgaataaatcaaaaatactcattcttaaaaaaaaaaaaaaaaaaaaaaaaaaaaaaaaaaaaaaaaaaaaaaaaaaaaaaaaaaaaaaaaaaaaaaaaaaaaaaaaaaaaaaaaaaaaaaaaaaannnnnnnnnnnnnnnnnnnnnnnnnnnnnnnnnnnannnnnnnnnnnnnaaaaaaannnnnnnnnnntttttttttttttttttttt

SEQ ID NO: 104798 - DNA, 435 bp, Homo sapiens
tatggaaacaaagtccattggtttctaagctccatttatttaggcaacaagtgctactcagatatttatttatttatttctgttctgcacttcatgttagaaaatgctcactttttttttttttttttttttttgggggggggtttttttttttttcccgggggggttttaaaaccctgggaaaaagggaacccccccccttggccccccaaaggggggggaaaaagggggggaccccccccccccggccctttttttaaaattttttgggggccccctttcttttttggaactttgggggagcccaaaaaaatttttttttagggaggtttcaaattttggttttattctccccccagggggggtgggttaattcccctaaaaaagggggccggggaaaaatatttaaacttttgttctccccggcctgaaatt

SEQ ID NO: 104799 - DNA, 417 bp, Homo sapiens
tggcatttcaccgtgttccccatgctggtctcgaactcttgggctcagactatccgcccgccttggcctcccaaagtgttggtattgcaggcatgagccaccatgcctggccacaaattctttttttacttttaattttccagatatttgaaaaggacatgcactaaactactagacagaatgttgtagttaatatgcaagacactccatttatcttagcttcagtttcctcctatgtaaaagggaacacctacccaacccatctcatgaaatgagtgttgaatgagatgatgtacacaaaagctttttgtaaattgtaagaggctacataaatgtaagttgttagtataatataatctgggtattataacatgattctgattttgttgaccagccacttatgaatcagtgttgttc

SEQ ID NO: 104800 - DNA, 411 bp, Homo sapiens
  misc_feature (1)...(411): n = a,t,c or g
cggcaggcggaggttacagtgagccaagatcgcgccactgcactccagcctgggcgatagagcgagaccgtgtctccaaaaataaaataaaaaaaaaataaccccaagagaggcatctgtactgagcatgacttactttctgtcagtcatgtacagcattgtagtgaatggagcaaaacaactgtcccttcccaccactcagctgcctcttagttatatatgaattactttggaaatttctttgcttcatttcttttaaataagaataataaagttttaattttttggtcaaacaaaaaaaaaaaaaaaaaaaaaaaaaaaaaaaaaaaaaaatnnnngggggggcgtttttttataaaaaccttgggggggcacacactttacgcggggggatattattttttttttttt

SEQ ID NO: 104801 - DNA, 390 bp, Homo sapiens
cccacgcgtccgcggacgcgtggggatccagcatatgggagtattactatatagaactatatgaaaactaactctttaaacagtaaagggttatggctttttcattttccaggtcaggaagtcaagaatttttcttctttaaaaagggaggtactaagaaggttccctttcctcataaacccctaggggttaatatgtttttatttaacatgcttttattttatattttattttattttattttattttagcttgttatgttatgttatgttatgttatgtcttatgttatgttatgttatgttatgttatggtatgttatgttatgttatgttatgttatttgagacagggtctcattctgccatccagactggagtgcagcgtgatct

SEQ ID NO: 104802 - DNA, 482 bp, Homo sapiens
  misc_feature (1)...(482): n = a,t,c or g
gggagccgggccgatttatcctggaacttgctgaccgnannnacnnnnnnnnnanccacgcgtncggtgagccaccgtgcccggcctttttatttcttttaatcttaaaagtgatagcatttacttgtctaaaggagagtgggggagaataccagagggactggaaaggaagaacccttttttgggaggggtaaaatagctgtagatttcttttagtagaaaaatgtttatatatattgaatactacttctaataataacttatagagagctacaaggctttcaaaattgtttcagagaacattatacaagttgatggtcctaacagtgctgtgtgataggtgaaacagagattgtagcctttattatatagatgataaaactgaggcatagactgggcacagtggctcacacctgtaatcccagcactttgggaggccgaggccagtggatcgcctgaggtcaggagtacaagaccagcct

SEQ ID NO: 104803 - DNA, 371 bp, Homo sapiens
caaaacttttttttttaatacattatatgaatgtttagggagcccatggatgaaattgtttaaattacaggcgtgagccatttcacccagcctcttccttttatagggggtctcgctctttcacctaaactggagtgcaggggcatgatcatagcttactgcaactttgaactcccaggctcaggtgatagctgccacctcagcctcccaagtagctggaactacagatacatgccatgcatgcctagctaattaaaaaaaaatttttaataaagacaaggtctcactgtgttgtccaggctagagaaggattatttgctttaagatttttctgctctgagaagctttccctgggggaggtaaaaaagtag

SEQ ID NO: 104804 - DNA, 377 bp, Homo sapiens
  misc_feature (1)...(377): n = a,t,c or g
aaaaaacttgccaggcgtggtggtggcacatgcctgtagtctcagctattcaggaggctgaggtgggaggattgcttgagcctggggaggtggagactgcagtgagccatgatcatgccactgcactcccagtgagaccctgtctcacaaaaataaaaaataaattgaaaatggaattagtgtgattcagcagtcccacttctggatatatatccaacagaattcaaagcagatctcaaaaagattcgcatacccatgtttatcatagctttatttgcagtagccaagaggtagaaacaacccacatatccatcaatagataaatggataaagaaattgtgggctgggtgcggtggctcacgcctgtaatcccagcn

SEQ ID NO: 104805 - DNA, 369 bp, Homo sapiens
cggagctcacacagtaatgctctgacggggcggagctcacacagtaatactctggcagggggcggagctcacacagtaatgctcactggctggctgctcacctcctactgtgtggcctggttcctaacaggccatggactggtaacaatctgtggcctggggattggggacccttgatttaaagaatcgaggacacactcacctagcaaaccatctgctaagaaaaaaggaggaaaagcaccaacattaatttgaacttagaaataaactacaaggccagacatggtggttcacacctataattccagcacttcgggaggccaaggaggaacgatcacttaagcccagcagttcaagaccagcctgacc

SEQ ID NO: 104806 - DNA, 352 bp, Homo sapiens
  misc_feature (1)...(352): n = a,t,c or g
gtcaaactcctgacctcaggtgatccacctgacttgggctcccaaagtgctggtattataggcgtcagttactgcgcctggccaattcatattttatagcgtcaaatatttatttacatgtgtatacattagattatcagatttgtaagtttttttgtgagctttgttgagggttagatgaataattacattggattcttcagagttgaactcactaccttgattctaaggacgttatgagaacctgtgacaacagcaaaactttaattctcctaatctttagtacagngtccaggaaaggagctattgtttttgcactttttcattcgttcattctttgagcaaagcaaca

SEQ ID NO: 104807 - DNA, 354 bp, Homo sapiens
gcccaggctggtcttgaactcctgacctcaagtgatccactcaccttggcctcctgaagtgctgggattacaggcgtgagccaccacgcccggcctgtgttctcatttcctcctattgtccaaatgccacaccctctgtgaagccttcctgatttccataatcaattaattctcctttctctacaatatgtacctcactagatttttttattaagtgaggtagggaataaaataataagagcttgcctttaacaagtacttaccatagaataggcattttgataagtgcttgacaagcataatctcattttacctcataacactgaggtagatgctattattatccccctttta

SEQ ID NO: 104808 - DNA, 340 bp, Homo sapiens
gtccttttggaaagctgaggggcatgtttgttctgtgtaatttctcactgtggttgttcattgctcagagaatagggtgagcatatactctcttctggacctgcaaggagtgtgaccctatgagcgcctgccccggggattcagtagccttaggtgtttggttcactttttctttttcttttcttttcttttctttttttttctcttttttttttgagacagagtctcactgtgtcacccaggctggagtgcaggggcacgattatggctcactgaagcttgactgccccaggcttaggtgatcctcccacctcagcctcctaagtagctgggactatag

SEQ ID NO: 104809 - DNA, 343 bp, Homo sapiens
gtagaaatagtaagatagctagaattagaagtggagcctgaggatgtgagtgaattgctgcaatctcttgataaaaattacctgagttgctttttaaagaggtttctagagatgaaatatactcctggtgaagatgtcgtgaacactattaaaatgaccacagaggatttaaaatataacacagacttagtggataaggccgctgcagggcttgaaagaattaacttcaattttgaaggaagttcttctgtgggtaaaatgctatcaaatagcattgcatggtacagcgaaatcttttatgaaaggcagagtcaatttatgtggcaaacttgattgctggctt

SEQ ID NO: 104810 - DNA, 356 bp, Homo sapiens
cctccttcagaccctctccatatcttctcttgcattaccagcacctggaatttataattaacctatagtaccctggtacgtttctaggtctggaagctgtttttggaggctgatggtgtagatcaccattagggatggaggattatttattcattttaaatgggagttcccttgaataacaaacagggatgagctgctatataagatcttgtgtagttaatatgctttcttacccttcttatatatatatttattgattgattgattttttgagatggagtctcacactgtcgcctgagctggtgtgcagtggtgcgatctcggcttgctgcaatccctgcctcctgggttcaaga

SEQ ID NO: 104811 - DNA, 368 bp, Homo sapiens
aacttttacgcgggcgggaatttgaagttcatataaaccgacctggattactccgggctgaactcaaatcacggaggactttaatcgttgaacaaacgaacctttaataacggctgcaccatcgggatgtcctgatccaacatcgaggtcgtaaaccctattggtgatatggactctaaaataggattgcgctggtatccctagggtaacttgttccgttgggcaagttattggatcaattgagtatagtagttcgctttgactggggaagtcttagcatgtactgctcggaggtggggttctgctccgagggcgccccaaccgaaaattttaatgcagggttgggagtttaagaactgtgggtttgg

SEQ ID NO: 104812 - DNA, 352 bp, Homo sapiens
cccaggctggtcttgaacttctggcctcaagtgatcctcccaactcagcctcccaaagtattggaattataggtgtgagccactacacccagcctagatctcaatcaggtgacactgaaaatgtttggtcataaaccacagtgaaggaaggggaggcagctgttagatcatctgccttgacccacagtcctcatccatttgcaccttggcaagccctctactacatctgaatctcgaaatgggggataacctcttgggagagtctatgctagtacccttctagtagtagtttacaatctgccaacaaatcttgaagccttatttggttgatatcaatttgagaggtgggagg

SEQ ID NO: 104813 - DNA, 334 bp, Homo sapiens
ttggcttgtatatcatattggccacttcccttatagcttattccaagccaccaaggaagtccttgcttatcctagaagatgaaaaagcatgagaaccaagacctagctgttaactcttctagaagtgaataaaatttaccaatttcacctctttttttttttttttttttttttttttaaaaaaaaccctgggggggccccccgggtgggaaataggggttaaagctaaattttttggaccctcccccccccgggttaaaaaaattttttttcctaacccccccaagggggggggataaaaagcccccccccccctgcccgtatatttttttgt

SEQ ID NO: 104814 - DNA, 348 bp, Homo sapiens
  misc_feature (1)...(348): n = a,t,c or g
cttttatgctttgttgatgtatggaatactcagaaagttcactgcaacacctgatttaaactacaaccaggagactctgtcagattaacactacaatctgaagaactacagagactctcaaaaaaactagtgtatagtctacagtagatattaacctttgtttttcttctgttttcatagaaacaccttttattaaaaatctgtttgccgcttcnnaaaaaaaaaaaaaaaaaaaaaaaaaaaaaaaaaaaaaaaaaaaaaaaaaaaaaaatggagggggggggggggggggccaataccaaatttttgtatggggaaaatagaaaaccccccttgtttttttttttt

SEQ ID NO: 104815 - DNA, 359 bp, Homo sapiens
  misc_feature (1)...(359): n = a,t,c or g
aaagaatttactcagaatacagaatagaaaaacagagaaattgaaattacaaaagaaaaggtataggaaaaatagatccagaaaatccaacatttagtataacagactagagtgtatagaagaagtaaagaaataatggaggaaaaaaaaaaatccctgagccaaaaacagctgatacttcaaactcccaccgaagatcagcaagaatattgaaagaaaacacatacctagacatatcctggtgaaattaaaaacagaaagaaaattttaaaggtttgagcatgaaaaataagctgtagggaagagaaccagactgacataaaacattcaactgtaacattaaatactaaaagggaacn

SEQ ID NO: 104816 - DNA, 413 bp, Homo sapiens
cgtcgccagccgagccacatcgctcatacaccatgtggaacgtgaaggtcggagtcaacggatttggtcgtattgagcgcctggtcaccagggctgcttttaactctggtaaagtggatattgttgccatcaatgaccccttcattgaccttaactacatggtttacatgttccaatatgattccacccatggcaaattccatggcaccgtcaaggctgagaacgcgaagcttgtcatcaatggaaatcccatcaccatcttccatgagcgagattcctgcaaaattaagcgtggcgatgctggcgctgagtacgtcgtgtagtccactggcgtcttcaccaccatggataatgctggggctcatttgcacgggtgagccacaaggggcatcatctctgccccctctgctgat

SEQ ID NO: 104817 - DNA, 413 bp, Homo sapiens
tcatgtcctccagagcatcttcatcagtttccctgtctgtaaaatgagtgtttgtattagtttcctgtggctttttttttttttttttttgggaaaaaaaaatttgttttttttggccaggggggaaaaaaaggggaaaaattggggggacgggaacctttggccccaagggaaaagggaattttcggggcccccccccaaaaaacaaagaaaaaggggggccccccccccccccaaataattttggttttttaaaaaaaaaaaaattttaccagggggggcaaggggggtaaaaaacccggaactttgggaaacccccggcgccaaaccccccaaaggggggggatttaggggggggaccaccaacccagggccaaaatggttttttaaaaaaaaaaaaaaaacaaaaaaag

SEQ ID NO: 104818 - DNA, 407 bp, Homo sapiens
tttcgtctgggcaggctagatgctggacaggacacattatacaaggaagtctggattgcagggtgcagtgagatcgatgtgtaagggctatctgttgtgtattggttatctagtgctgtgtaacaaacaacctccaaccttagtggcttaaaataacaagtgttcttttgagaatttgagaacagctgttcccctggctggcagcgcagaggtgtcatgattcctggagttactgtagaagacatgaatcagcaggagttcatcagagctctggtagccctcctcaaaaagtccaggaagctgaaagtccctgaatgggtggataccaccaaactggccaagcgcaaagagcttactctctgagatgagaagtggttctacacatgagctgcttccacaacatagca

SEQ ID NO: 104819 - DNA, 417 bp, Homo sapiens
tttcgtcttaagtccactgtgtatatatatcatattttctttattcatttgtcccctgatcaacacttaggttgattccatatctttgctattgtaaacacggctctacagtaaacacggagatgcaggttatcttttttatatactgatttcttttcctttggataaattccaggtagtgggattgctggatcacatggtagttctttttttttttttttggaaacggattttttttttggttgctaagggggaagggcaggcccttggtttggtttaatggcacccttggcctccaaggtaaaggggttttccctccctcccccccccagggggggggaataacgggccccctccttcacccccagttaatttttttttttttaaaaaaaagggggtttggccttgtggcctagc

SEQ ID NO: 104820 - DNA, 417 bp, Homo sapiens
  misc_feature (1)...(417): n = a,t,c or g
actgaaaccaccgtggaagtcgcctggtgtgaactgcaggatcgaaaattaacaaagtctgagaggcagagatttaaagaagaagctgaaatgttaaaaggtcttcagcatcccaatattgttagattttatgattcctgggaatccacagtaaaaggaaagaagtgcattgttttggtgactgaacttatgacgtctggaacacttaaaacgtaagttcatcagtattacaaaagctgaccaagaagtatgagagaatttgattttttaaatttcaggtctaccagtttcactttggttgttcagcctaagaagggaacagtccttccaactgttactgtattagcatatttccttgcccacaaagtcctctagtatataaagtgatttgataattatttcttggtaagtattgan

SEQ ID NO: 104821 - DNA, 465 bp, Homo sapiens
  misc_feature (1)...(465): n = a,t,c or g
ggcgttggaattctgnnnnacaccatgttggtcaggctagtctcaaactcctgacctcaggtgatccacccgtctcggccttccaaagtgctgggattacaggcgtgagccactgtgcctggccacttgcagagatttctaggtgtggcttttttctaatgtagtgaaccctaagacatgcaagatacccaataagttatgaagagaattatattggcagagacactgccagcttggactgaaagggacagagccagtgcaaaaggacaagacggctttgcacacccaaacttttacaggcaggaagcaggcagatgaaactgtggagctgcaaacatctttcatggaagaggtgggacgactcagggagagccatggagaatcattcatgaacaggagtaggcatcaaagagttcctagcatttctccaactggattacagaatttccacacaccagtgacttt

SEQ ID NO: 104822 - DNA, 418 bp, Homo sapiens
tttcgtgctgctgccaccgccgccaccaccgcctctgctcgtggcgtgggaaaggaggtgtgagtcccggtcgcgagccggcggcggcgccgctgcgggagggtcggcggtgggaaggcgatggcggatttagataaactcaacatcgacagcattatccaacggctgctggaagcgtgaggggccaagcctggtaagaaagtccagcttcacgagaatgaaatcacaggactgtgcttagagcctcgagaaatctttctcaggcagcctatcctactataacttgtagcaccactcaaaatatgtggcgacatccatggaccatactatgatttgctgcgactttttgagtaccgcgggttgccaccaaaaagcaactacctgtttcttgaagactatgtggacaggcgacagcatg

SEQ ID NO: 104823 - DNA, 421 bp, Homo sapiens
tttcgtccggcctccccgcggggatgtctgactggcagaagactttgagctctggagtcagcgcgatgaccgtcttaatcaccacggagatgatgtcagaccacaccttcttgatgtcaacgcctttggaagacagtctacaaaggatgctggaaaaagtccttttgctgccaatgctagcactgtccgagtggatgaaggtgatccgtgcaataataaaacgattatttgaccaactacaagcaacatgcggagcaggctattgagaggggcctcctcatgaaagaagacagctggtccacagcagagaaatcttgaaccagctctcccaagaagatggggcggacgctctgcagacaaccccccttcaggatccctgaggaagagcggaaagaacatgcagaagactcctggaacggcg

SEQ ID NO: 104824 - DNA, 409 bp, Homo sapiens
  misc_feature (1)...(409): n = a,t,c or g
gccatgtgaaggcagagaatggagtgacgcagccacaaaccaagcaatgcctggagccaccagaagctggaagaggcaaggaagggactcttcttcagagggagcagggccctgcccacaccttagcttcagacttctagcctccagaactgggagagaagaaatgtctgttgtttgaagccacccagctgtggcactttattacggcagcacgggaaatgcatacagcctccaaaagagaacgaagcccttctgagagcttgattccagacatgcaagaccctgagcccaccgcgcctgggtttctgcctacagaactgtgagataatccatgggtgttgttttacgccactccaattgcaataagacagtgaggatgtcatgtgagtgaccagcaaggcatgtggcn

SEQ ID NO: 104825 - DNA, 419 bp, Homo sapiens
  misc_feature (1)...(419): n = a,t,c or g
cttcacttaggaacgtaatcgngtcccctatcctacttccccttcctaattccacagctgctcaataaagtacaagagcttaacagtgaaaaaaaaaaaaaaaaagggggggcccttttaaaggacccctcgggggcccaaacctaacccgggcttgcaaaggaaaacttttttccttataggggggcgcattaaaacctacctggggatctttggaaaggacctttacttttggggggggaaaaattgggacaccctccttccaaaaatttaacgctctagggaaaataaaaacttttaaagggaaaaatgggtaaacctacctccatatcctggctgcttaaaaaatggggnangccaanagcatttcgctcacttgctgatcctcagggacaccaagacctacatgcttgcttttg

SEQ ID NO: 104826 - DNA, 379 bp, Homo sapiens
gccttcaaccacctgcacgcgggccatggcctctctggggcagccatgaagtccctcgtcctgctcctttgtcttgctcagctctggggctgccactcatccccacatggcccatggctgatttatagacaaccgaactgcgatgatccataaactgaggaagcatctctggaggctatagactacatcaatcaaaaccttccttggggatacaaacacaccttgaaccatattgatgaagtaaaggtgtggcctcagtagccctccggagagctgtttgatattgaaatagacaccctggaaaccacctgccatgtgctggaccccacccctgtggcatgatgcaacgtgaggcagctgaatgagcatgctgtccaag

SEQ ID NO: 104827 - DNA, 397 bp, Homo sapiens
cagaccatgacccctaacaggggccctctctgcccttctaaagacctccggtctagccatgtgatttcacttccactccatagcgctactcatactaggcctactaaccaacacactaaccatataccaatgatggcgcgacgtagcactagaaagcacatacgaagggcaccacacaccacctgtccaaaaaggccttcgatacgggataatcctatttattacctcagaaatttttttcttcgcaggatttttctgagccttttaccactccagcctagcccctaccccccaattaggagggcactggcccccaacaggcatcaccccgctaaatcccctagaagacccactcctaaacacatccgtattactcgcatcaggagtatcaatcacc

SEQ ID NO: 104828 - DNA, 391 bp, Homo sapiens
caaaaattagccaggcgtggtggtgggcacctgtactgtggaggtgcccacccatctgctggttaggctgaggcaggataatcgcttgaacctgggaggcggaggttgcggacagctgagatggtgccactgcactccaccctgggcgaaagagcgactctgtctcctggaggacagacattaggagaggacgcccacacccacacataagaaagccatgtggcggcagaggcatatatgggagtgatgcggacggacacaaactaagggatgccaccatgcctagcacaggcgacagacaccagccttcatgatacaggcctgggacgggctctccctcacagccttcaaagggaaccagacctgccaccaccttgaccctggacttatg

SEQ ID NO: 104829 - DNA, 418 bp, Homo sapiens
  misc_feature (1)...(418): n = a,t,c or g
ggattctgttattaattaaatgttacatttaattatagctcatcctaggagtgagttttctcttttctgaaagtaagtgactcattgcactccagcctgggctacagggcaagactccctctcaaaaaaaaaaaaaaaaaaaaagggccccggggggaaaaaaaaaaaaaggggggaaaaaagggggggggtttaaaaaaaaacccgggattttttaaatttaaaatttaatttaaaattaaatttaatttaaaaataaaatttaaaattttggacaaaaaaaaaaaaaattcggggggggttcgaaagggtttttcaaaaaaggggggggaaaaaaaaaaaaaaaaaaaaaaaaaaaaaaaaaaaaaaaaaaaaaaaaaaaaaaaaaaacnggggggggccccccccccaaaccccc

SEQ ID NO: 104830 - DNA, 491 bp, Homo sapiens
  misc_feature (1)...(491): n = a,t,c or g
attagaaaaccttgaccagcctgcangaattcggcacgaggtaaaagcttcagtggctttttcagtatagtaaaagcttcactgtatataacaaactttgctggtacttggtataaggagtagataaagcccttcagcttgcttacagtggcttgccatcagtagcactgccttgcagatacccgtttgacctcatcttcctccactgacccagttttctacttccaacttttctaatacagcttgcaacctctggcataacttcagaccttggccattggtctcaactgtttgaaaacctaaagattactcacccatcacgcttagttttgcagcatggtagggggaatgggaagtaaattcttcttaaaaaatttttttatgttgggctcggcacgatgctcacgcttgtaatcctagcattttcagaggccaaggtgggcacatcacttgaggtcaggagttcaagaccagcctggccaacatggtgn

SEQ ID NO: 104831 - DNA, 461 bp, Homo sapiens
catcgcattgacccgctctgcaggaattcggcacgagctttcttttttctttcgacggggtgtcaccgtgtaagccaggatggtcttgatctcctgacctcatgatctgcccacctcggcctcccaaaatgctgggattacaggtgtaagccaccacgcccagccctgaattgtttctttagaactatttctcagctactcaatttatgcataaaagattaaagtattcattaatgaatgttatgacctcagatttgtacacaataagttatacatgtgagatagtggaatatatacagaattaagatggtgaaacttgaaaatttctttctaaagttttcggttagatttctgtattcttcagtaattgcaaattgcagcacaaacatctccacacgtttctgtcctatccatttgttacctctcccaccaccacccctgaatccttgaaatgatagtct

SEQ ID NO: 104832 - DNA, 485 bp, Homo sapiens
  misc_feature (1)...(485): n = a,t,c or g
cttagaccncgccctgaggngttttgccccgcgctgcaggaattcggcacgaggagcgccggcgagcggcgcggtgagaccctcgtgcagtagagacggagtttcaccatgttggccaggatggtcttcaacttctaacttcgtgatccacgctgctgggattacaggtgtgagccaccgcgtgtggcctctgggcaccttttgaaggtggtttcaccccaacatcagcagggtggaggcggagaagctgttcctatccagaggtcagcgtggggacttccttgccaggcccagtgagagcagcccggggggcttcacgctgtccgtcaggtagctgaagcagagagagaaggcggcaggcatcagcggtttcttctatgaacttataagatcaaagactttaagactttcactatttcttctaccgctatctactacgaacttcaaagaggaaccaggagtacggaaggagcatgaaagtgacn

SEQ ID NO: 104833 - DNA, 477 bp, Homo sapiens
  misc_feature (1)...(477): n = a,t,c or g
cctcgaccgccngttgcatcgcgtgcaggaattcggcacgaggccctacagaagagcattctgactgttaaaagaaaaacaaacagaaagcaacaagagcatcaacaaaaaagtccccacaagaacgccactcaaaggtcaggagcctcaaagatcaaagctagataaactcagaaagatgagaaagaatcaacaacaacaacaaaaaatgctgaaaactcaaaaggccagagtgcctattcttctccaagtgattgcaatacctctctagcaagggcacagaactaggaggaggctgaaatggatgaattgacagaagtaggcttcagaagacgtgtaataatgaactttgttaagctaaaggggcatatcctaacccaatgcagagaagctgagaaccatgataaaacattacagaagctgttaaccagcataaccagtttagagtggaatataaatgacctgatggagctgaaa

SEQ ID NO: 104834 - DNA, 462 bp, Homo sapiens
  misc_feature (1)...(462): n = a,t,c or g
cttgccccacccccgtataccccgcgctgcaggaattcggcacgaggatttttgcccttgttctgtcctttttttcaaaaaagaaaatgtgttttttgtttggtaccatagtgtgaaatgctgggaacaatgactataagacatgctatggcacatatatttatagtctgtttatgtagaaacaaatgtaatatattaaagccttatatataatgaactttgtactattcacattttgtatcagtattatgtagcataacaaaggtcataatgctttcagcaattgatgtcattttattaaagaacattgaaaaacttgaaggaatccctttgcaaggttgcattactgtacccatcatttctaaaatggaagagggggtggctgggcacagtggccgacacctaaaaacccagcactttggggggccaaggtgggaggatcgcttgagcccaggagttcan

SEQ ID NO: 104835 - DNA, 508 bp, Homo sapiens
  misc_feature (1)...(508): n = a,t,c or g
cggagccnggggnnnnnnnaactgagaccctagtcagtngcgggaattcgcagaaacaggtggaaggcgtgggccagagagctgaccttcccccagcaacactttcttactgtagtagccgtggaaacaacctgggagggtgccacgagggcttctcaagtgccccttgcccctggggtctcatggaaggaggaacttgtgttaacgtggtgtggtggaaaaagcaagcatggagcgcgcacaggcttggagtcccacggatctaggtttattcttattctcttgggcacttactagctccatgacttggtttctttttctttctttttttttttgggagacagggtctcattctgttatccaacctggagggcaggggcttgataacagttaactgcagccttgatttcctgggttaaagggaccctcccacctcaccctcctgagtagctggaactataggccggaaaggctaatctttaaattttttgtgaaaagaagggcctat

SEQ ID NO: 104836 - DNA, 458 bp, Homo sapiens
  misc_feature (1)...(458): n = a,t,c or g
nttttaattgaagacctcgagtaccgtgcggnggaactcgcctttgaatggagtagagggaaggcatttataagaaatccccaaaaaatatttctagaggtgtgactgccacttcactttttaaaaaaggacatggctagcgtctaggtagaacaattaaggcctctagaaagcctggtctaaagaggcctctggttattataaaagaatgggcatcctgtgtgaaatacagtagcagtcgactggggccccagatgtttcttcagtctgctcctttcccatgcagagaactgtgacatgtggttcaccaaaatagaacttttcatttttactaatcatttgttattaaaacaggatttagaaatgctttggtgaggccaggctcatgcctgtaatcccagcactttgggaggccgaggtgggtggatcacttgaggtcaggagttcgagaccagcct

SEQ ID NO: 104837 - DNA, 445 bp, Homo sapiens
ataaaccggtcggtccactagtcctgtgtggtcgaattcggacaagtaaactggaatattcacataatagaacattatacaattgtcaaatgaactataatgatacctaaccatatggatgaatctgagcaataaaataattaagtgaaaaaagtttaatcccagaagagtaaatgtagcatgatgccctttctaaatgaaaggttttttcttttctatggagttattctttacatacaatatagttcataaattttaaatatattgtttaataaattttgataattgtatataatagtatagtcaccatcaagatgtagaaaatagaaaataggctaggcacagtggctcacgcctgtaatctcaacactttgggaggccaaggtgggaagatcacttgatcccaggaattctagatcagcttggacaatgtattgagacctgg

SEQ ID NO: 104838 - DNA, 467 bp, Homo sapiens
ctccgagaccatctgatagtagacccttagtccagagtggtggaattccctctcacttcagccttcccagtagctgggattacaaatatttgccacagcaccagctactgtggatttctaatggtaatttcctctttccctgtttcttataagggagatttgcccatttaatcccattttaaaatttattcaatcatttgtgtatgttattataaactcacaaatatttattttattatttgggctataatccaatgctgtatatagagagggagacagggtcttgctccattgcctaggctggagtgcagtggtacagtcatggcttgctgcatccctaaccttctgggctcaagcgatcctctcaagtagctggtgtcatctgccttgctaattttttttttttttttttaaaaaaatggagtctcgttgtgttgcccaggctgggctaaacctcctgccctcaa

SEQ ID NO: 104839 - DNA, 474 bp, Homo sapiens
  misc_feature (1)...(474): n = a,t,c or g
tctggcntnnnattgatagcattcntcagngcggnggaattcggcaaaactatgacatagttaagttccagttttcaaaacattaaagttaaggttgcagaatggtagcatgtgagccacttctaactttcaggcaagtttagtgtagtgctaagactagaacatattccattcaaatttaaaacacataggtagatagcagtagcttatggttatacataaaggatacacaagaaaacagtttggttaaataaggtaggataaatattttctcttgtatcctctcaaagctttgaatgtagtactaggtgcacatattaatatttaaaaagtaagtaaaataatgtgttaaaaatgagataagaatatgtacaatttttttttttctttttgagacggagtttcgctcttgttgcccaggctggagtgcaatggcacgatcttggctcactgtaacctctgcctcccgtgttc

SEQ ID NO: 104840 - DNA, 455 bp, Homo sapiens
  misc_feature (1)...(455): n = a,t,c or g
nttcgaagatagatagaccagtgcggcggaattcctagcgttaaaggcactgcagagaaatgaggtgcagaggtggcccctctgagtatttattttactcaggtaccagtggtacatatatacagtgtaattatgaccaggctggtaaaattggctgctcgcaaacaatccccttttttcctggcagtatttggaatttatcatttattaataactatacatttttaaaggcagaagaagaaaatctatctatctatctatctatctatctatctatctatctatctatctatctatctaaatgacctgacagaagaaaactgttaaaaatggatattattggaggggatttaaaacagtgggtgtgaattatcattctgatggaaagaaaatagcaaaacaatgtgttacaagtatttgctaataaacagtatactgccagcttctaattgctn

SEQ ID NO: 104841 - DNA, 497 bp, Homo sapiens
  misc_feature (1)...(497): n = a,t,c or g
ggaggttcnnnaagttnnnnnnaattgagncccttgnactgatgaccatagtccangcggnggaattccttcttgccaaatgcagacgaggggtgagcctgccagcgtttgcgacgtccccgcacgacaggctcatactttctgaggatcgtgcatagcataggacgtctgaacctttgtacaaatgtgtagatgacatcttgctacagcttttatttgtgaattaaagatgcatcgatggttaaaaaaaaaaaaaaaaaaaaaaaaaaaaaaaaaaaaaaaaaaaaaaaaaaaaaaaaaaaaaaaaaaaaaaaaaaaaaaaaaaaaannnnnnnnnnnnaaaaaannnaaaannannnnaaaannnnnaannanaaaaaaaannnnnnaannnnnnnnnnnnnnnnannnttccattttnnnnnannnnaannnntnnnaaaaaaanaannanatnnnnntattttatgaatggtnnnntntattanccttannnt

SEQ ID NO: 104842 - DNA, 478 bp, Homo sapiens
  misc_feature (1)...(478): n = a,t,c or g
aatagaaacctgagnaacctancccagagacgnggaattcctcagtgtcctacagacgcacacagaccaaagttgcttctctgggaagttgtctgcaaattggccataaaaccctgttccctgataccttcttgtttccttcctagaggttggatatttatgctattttatgaagacttcagagcactgaggcccaggccttgccactttctgactttagtttcttgtccaaaactgtgttggtaacaaagcactttggataggcaggggctgtggcatgtggaattccacagtgtacaagatcaggacaccctcctaaggtcctccatgttttctaggcttgataagacttaggttggctcaagctgggcacagtggctcacacttataattccagcacttcgggaggccaaggcaggcggatcacttgaggtcagaagttcaagaccagcctggccaatgtggtgaaaccctgtct

SEQ ID NO: 104843 - DNA, 476 bp, Homo sapiens
  misc_feature (1)...(476): n = a,t,c or g
ntttgatagacntcnactacggacgngccgnggaattctgtgtgtgttgtgttgtgttttgttttttaagggagggaatttattatttaccgttgcttgaaattactgtgtaaatatatgtctgataatgatttgctctttgacaactaaaattaggactgtataagtactagatgcatcactgggtgttgatcttacaagatattgatgataacacttaaaattgtaacctgcatttttcactttgctctcaattaaagtctattcagaaggaaaaaaaaaaaaaaaaaaaaaaaaaaaaaaaaaaaaaaaaaaaaaaaaaaaaaaaaaaannnactataaaaaaaaaaagagagagaaaaaaccccgggngaaaaaaacaaaagaggcttttgggggcccccttcctagatatatggcccccccccccctctttttccacccctgggggggtttataaaactcaccttttattt

SEQ ID NO: 104844 - DNA, 464 bp, Homo sapiens
  misc_feature (1)...(464): n = a,t,c or g
aggtggctnnnnnnaactgactagcataacntangccgngacgnggaattccgggaggtggaggttgcagtgagccgggatcgcaccactgcgctctagcctggtcaactttagcgaaactctctctcaaaaaaagaaaaagagaaaaaaggtaacaattttaaaaataataaaagttccagcgttccaagagctgcttcttgttcaaaaaatggttattcctgctgtggggttggagaaagccaagtgcgtgtggctaacagcaggcctatggcatgttaaaggcaattagggccagcgctggagttgcagagtcagatcctttgataaacctcaggcgtgtctgtctgatgccaagtggaagcttgtgctctgcagtacagaccagtgtccctcctgcaggaagtagattaagcagcgtctgttgaacaggaaaggcctctgtgatagccgtgaaagtcgat

SEQ ID NO: 104845 - DNA, 452 bp, Homo sapiens
  misc_feature (1)...(452): n = a,t,c or g
gaggccaggggngnnccccaatgatgactttcgatagagcgcgtaagacccacgggcagggcttgggacctccagcctgccttgcccaagcccacctgtggtgggctcccttgaggcccaagcctccccgatgggcactgccccttgctctgcggaggctggtcccatcgactgcccaagggctgaggagtgcaggcacttggggcaggactggtgggcagctccacccacggccctggtgcgggatctactaggtgaagccagctgggctactgtgtcgggtggggacttggagaacttttatgtctagctggaggattgtatatgcaccaatcagcactctgtgtctagcttggggtttgtggatgcaccaatcagcactctgtatctggctaatctggtggggactaggagaacttttatgtctagctagaggattgtaaatacaccaa

SEQ ID NO: 104846 - DNA, 591 bp, Homo sapiens
  misc_feature (1)...(591): n = a,t,c or g
agcgatagatcactactcagagtggagcaaccnctagaggaaggcaggaaccaggactggcaggcagccagaaccctcttggacagagatataattacttattatgacctctagcccatgcattgagcaaaatggccctgtaggctggcaccaaccctgtctagcaaataaacgcggccatggtggggatgggagggcaggtaagtgggccttgtaggaaatggcagaggcctgtgagcccctggggcctatatattccctcagcaacacaaccctacagactcccaggttatattttcactcactgcatcccatttgctcatttgctcgcctctctgcatctctgttcttcatttcaatggtatgaatattgatgatgagaacaggaatgcccatgtgcatgcgcgtgcgtgcgcgcacgcacatacacacacacacacacacacacacacacacacgctctacttaatgaaccanagggaaactttgatgttgctcaagacaagagggagagccacgggctcgcacgcaaggtgcatcttttcttgaagtcttntccaggcctgctcntncagctcttagtcctctgag

SEQ ID NO: 104847 - DNA, 461 bp, Homo sapiens
  misc_feature (1)...(461): n = a,t,c or g
gggcagcgcaatgaaaaccctcgaactgagatcatanacagngcggnggaattcgaagcacaaagaataacttgtccaagatcacagagtttaggaagtaaggaagcagggctttgagctttgcatcaagtgatgacccataaatgcaaatggaatacaacaggagtgggtccctaaagtcccacccagagaatgcccttctgccaaaaaatttcggattgaaacagcaaaaacacctaagcaactgatagtcaggtggttctctgatttaattgtttgaaagcagtcactggaagcaaagctatgtgactcagctttggtgatgtactccagctggagtctgacaggccaggtgcagtggctcgcacctgtggtcccagcactttgggaggctgaggcgggtggatcacctgaggtcgggagtttgagaccagtcttgccaacatgttgaaaccccgtct

SEQ ID NO: 104848 - DNA, 459 bp, Homo sapiens
  misc_feature (1)...(459): n = a,t,c or g
atcgagacctgaggcccntcggnggaatccgctacgggtgtgctgcagtctccaacgcagctacgaacccactcctttagtgagtgaaactagtggccccgtgaacaatgaccacatggcctaaattctcccatattcctatattctgtcctttggcctcagacacacctcagcatccaaaggatatctcccagatactccagtatctgtgtacaacagccgcagaacctccttccaagctccaaatcaggccaggcatcctgatttttataaccatactcatatatccagatccatgacataacactagtttatagccaacacatttaaataatttccccactggggccaggcgcagtggctcacatcagtaatcccagcactttgggaggccgaggtgggcggatgactaagtcaagagatcgagaccatcctggctaacacggtgaaaccccatct

SEQ ID NO: 104849 - DNA, 473 bp, Homo sapiens
  misc_feature (1)...(473): n = a,t,c or g
gtggtatnnntttcgtctgcatccttagtgtcgtgcaattcggcgtttcaccgcggtggccgagatggtctagatctcctgacctcgtgatccgcccgcctcggactcccaaagtgctgggattacaggcgtgagccaccacaccgggtctgtttgtcttgattatcctgctctgctttcaggagttgttacactatgacatatatgatctccaggcaataggcaggaaactctcatgtattgctttttagtaatttttgataaaacgtatggtatgggaggaagtcagaaacttaaggactaaaatcaaataaattgtttttattagaaataaaattctagctactcaggaggctgaggcagaaagattgcttgagctcgggaggtcaaggctgcagcgagccaagattggactactgcactccagcctgggtgacaaagtgagaccctgtctcanacaaacaagaactaat

SEQ ID NO: 104850 - DNA, 413 bp, Homo sapiens
agattccattgtatggatgtactacatgttgttcacgcattcacctatctatggaagcctgggctgcatccacctgttggctattgtgaataatgctgctatgaacatgagtgtgcaggtatttcttccaaaccctgctttcaattcttttagatatatacccagaagtggggtatactttcatatcttaaccttgaccggaacttattggagtttcatctttactcagctggctccctcccttctggtcacactggactttaacccttagaagggatggagtgagatttattcatcttggtggcattgtgaggatgagtcacttagcaatcaacaagtttctgctcaatagtttccctcgggctctctactcaatccaattactaggagaaggatgccatgtgaactttttt

SEQ ID NO: 104851 - DNA, 389 bp, Homo sapiens
attagccgggcgctcctgtcatcccagctactcatgaggcagaggttgcagtgagccaagatgacgccactgcactccagcctgggtgacagactatgactccatctcaaataaaaattaaactgggggggactttataaaaaacattatgaggaacttacaggatgccattattgggagtgtgtacttccatgttgaaagggtaaacaggctaaattgactcactgctttaaaagagaaagaaaatattgtgggcgggatttgctccttcttctacccgagcagaatgactgggttctgaaacccaaaagacctcattagatttgtagtgggtatatatttgaacgtagagtcatctcataaaatttttgtacaacagcctctctcct

SEQ ID NO: 104852 - DNA, 399 bp, Homo sapiens
ccgactgttcatatgtaaaggagactggccgctggggctcaggaccgggattatccgagctctgcagaagtgcaccgctattgctttgggagggtaaaaaaaaaatcacacggattccagtgaaaaagcgacagagggtggtggcctttggaaccgccgtgaaagcttctgcctggaacccgaaacttgcatgctatggaacacccgatctttggctggctgcgcaaccctcacgccacggcgcaaggctagcacccgttatcccaatcctctctcgccctccatggaagagctgaccatatttgttaccccgagctctgtacttcttcctcatcatgcataatcgcaggataccccaactaagagggcatgtttgccagccagcatcacagggtgcac

SEQ ID NO: 104853 - DNA, 427 bp, Homo sapiens
  misc_feature (1)...(427): n = a,t,c or g
cccacgcgtncggactttttattccataaagtttttattggatctccagaatcaggaaataatgaaagcaggattttttttttctttagcataaggtatcccaaataccctctttgttttcagaagttgttccagatctgaaaatgggcttttataacttggctgtcttcatatagctctgaacatacaacattttgcttttgatttaggaacagtgttttttctcatgagataaaactagcacaagcagtttttcattattaaaagaatgtgaattatattggtgactttagtaaaagagtgctctaagaataaactaacaaaaaacacataatttgaatcaacacaaccacccacagcctaattattagcatcatccccctactattttttaaccaaatcaacaacaacctatttagctgttccn

SEQ ID NO: 104854 - DNA, 418 bp, Homo sapiens
  misc_feature (1)...(418): n = a,t,c or g
cttacacttaggagatttcaacttaanttganntgctctgaccacaaaaaaaaaaaaaaaaaaaaaaaaaaaaaaaaaaaaaaaaaaaaaangggggggggcccctttaaaaaaaaccccgggggggccccaattttccccggggggaaaaattaattttttttttttttaggggggctttaaaaaacccccccggggttttttgaaaaaaacccctttttttggggggggaaaaaagggcccccccccccccccaaaaatttaccccttgggggaaaaaaaaaatttttaagggggaaggggggaaaaacttttttttttttttttttttaaaaaattgggggnnnnnnnnnnncccccccccccccggggggggagcaggcgccccccccccccccaaaaagccccccacggagat

SEQ ID NO: 104855 - DNA, 402 bp, Homo sapiens
attgaataattatttataaaaaatatgggggggccctttttagagaacccttggggggcccgaatatcccccgggggggggaggttttattttttgctttaaggggggggttataaaaccttgcttgggttttttgggaaggaacccttctttggggggggggaaaagagggacccccccccccccaaaattttggtgttctagggaaaaaaaaaatttttaaggggaaaggggggaaaaaaaactatcaaccccccctgaaaaaaaatagcgcggaaaaggtaatgcattcgctaagataaggtcactttatggtttcttatttattactctgcatcttaagtgtttgagctctgctcatttccatatagaacttataagtaaaatgcggatctgagacct

SEQ ID NO: 104856 - DNA, 408 bp, Homo sapiens
  misc_feature (1)...(408): n = a,t,c or g
tgagccaccacgcccggccagagacggggtttcaccgtgtcagtcaggatggtctcgatctcctgacctcgtgatctgcctgcctcggcctcccaaagtgctgggattacaggcgtgagccaccacgccaggccaggaaattgtattgtttaggaatgcgtactaatgagtgatacaaataagaaattgcatgagaatggtggtgacctttggtgaggagagaagaggctgctggggtgatggttgtgctctctctccaccaggatggtataccgttaactttgcatatttcctttatatttattcatccagctatattttatattttacatactttttctgcacattttatttcacaatataaaaaggtntaaaaatacacacacactgactcctatatggagatta

SEQ ID NO: 104857 - DNA, 465 bp, Homo sapiens
  misc_feature (1)...(465): n = a,t,c or g
nctcgtagttcgctagtccagtgcggcgggaggaggaatctcgaacccctggcctaagtgatcctcccacctcggcctcctaaggtgctgggattacaggcatgagccaccatgcccaaccccactgttgtcttgacatgagttatatctacaggttaagccatacatcttgcattgcttacattccagtttccagagaaacttttagatagtcccagatgcctagtttgagatcttaaccagaagcaattctaccttaattgaaccaagcagcaacttatggccttaaatatgaaggatattgacagaatcaattacatccttgaaggaccttaagagaagatcaggtatatagggggtgatcattacagncttctctttccattatgttagaaacctgccctcaagcaaaaacaagataggcctgtctttaactgctcaaccactcaattggctcctctgtaa

SEQ ID NO: 104858 - DNA, 468 bp, Homo sapiens
cctcgagatcgtagtccatagtcagtgtggtggaattccatgaaagagagaccttcaagaaaagagaattgctgcctagaagggagcagggacagttttcagtgtttcttaggggaaatgtgcaaatgagagaaaagagtgagaaaaagtcatttcacatacagaaaaaacaagacatgtcgtctcagaaattgtgtagtttcttgcttaagcactcgagatgttcagtgaacagctaacaattgtaggtaactattcccaattttaagaggctgatttacttcaaataaatatctgaaggaaaaaggtctctatttgttatattacattttattttattttttgagacagggtcttgctctgttgcccaggctggagtgcagtggtgtgatcttgactcactttagcctcatattcctgggcccaagtgatcctcccacctgggactacatacaggtgcatgccacc

SEQ ID NO: 104859 - DNA, 478 bp, Homo sapiens
  misc_feature (1)...(478): n = a,t,c or g
tgggctacaannttgataccctagccanggttggaatccctacaaccagcaagacattggaacactatacctatgatccggcgcacgagctggagtcctaggcacagctctatgcctccttattcgagccgagctgggccagccaggggaccttctaggtaacgaccacatctacaacgttatcgtcacagcccatgcatttgcaataatcttcttcatagtaacacccatcataatcggaggctctggcaactgactagttcccctaataatcggagcccccgatatggcggttccccgcataaacaacataagcttctgactcttacctacctctctcctactcctgctcgcatctgctatagnggaggccggagcatgaacaggttgaacagtctaccctcccttagcagggaactactcccaccctggagcctgcgtagacctaaccatcttctccttacacctagcaggagtg

SEQ ID NO: 104860 - DNA, 475 bp, Homo sapiens
  misc_feature (1)...(475): n = a,t,c or g
agttcatnnggggngggcgggctnnnnnaaactgagactaagacatgcgaaggacntcgnccaggctagtcttgaactcctgagctcaatagatccacctgtcttcgcctcataaagtgctgggattacaggcatgagccactgtgcccagccaccctatagtatttataaagtgtttagaaatagtgtctggcacatagtaagcacttagcagatgtgaacccccactataacttgggagattttggctgagggccctcaactgtcctggggatctgcctttgtggagacggggctgggatggacgctgccaggctccctctggctctctgcagatctctgttgttccctgacttctccatttggtcaggtgtggccaggcagcatgagcatcatttcccccctgattatagggttaaactaagaagtgatcatgacaggcgtcatcatgaaatatccccactgcaattggtgg

SEQ ID NO: 104861 - DNA, 479 bp, Homo sapiens
  misc_feature (1)...(479): n = a,t,c or g
gtactctacagggagagccgggccnnnnnnaattgagactgaggactttacnacagnccggnggaattcatgttggccaggctggtctcaaactcctgacctcatgtgatccacccatctcggtctcccaaagtgctgggattacaggtgtgagccactgcgcctggccgaggtccatgtattttaactggttgatatatcttttaatctttatgtcccccttctatttttttcctttttcttttcttgttttttaatatgccttacaactcaactttttgtcaaaaaaaaaaaaacaaaattgttttttccaagataaaatttttgggtggctccttaaggttttttggtggtggtgaaggttgtttaaaaaaaatttttttttttgcccctcaggtggaggggcggggcccaagttaaacttactggagcctttaacccctggggttgaagggtacctcctaccggaccttctgggg

SEQ ID NO: 104862 - DNA, 461 bp, Homo sapiens
  misc_feature (1)...(461): n = a,t,c or g
ccgcccccccgnnnnnattgagnccttatagtagacattagncagtgcggtggaattccctcatcccgtcagttgcaagcctgactagaacaaaagcctggcctcccaggaagaagagggaattcctcctgcccgactgttttttagctgggacattggttttatttctgcctttgaactcaacctgaaacactggccgttcctggattttgagcctgctggccttcaaactggatctataccactggctctcctgggtctccagcttcctgactgcagatcttgggatttgttggtctcataaatattatatatgtatatgtaaaatgttgattctgtttctctttaaaaagaaaagacagctggccaggcacggtggctcacacctgtaatcccagcactttgggaggctgaggcgggtgcatcacctgaggtcaggagttcgagaccagcctgaccaa

SEQ ID NO: 104863 - DNA, 367 bp, Homo sapiens
cggggttttgccatgttgcccaggcttgtcttgaactcctgagctcaggcaatccacccgcctcggcctcctaaagtgctgggattacaggcgtgagccactgctcccagccaggcatatagatttatgtagttttaagaagtcaaacagattaccaagatttaaaatgaaaggctgcaatcctgagccccaatgaatagatttgctcctcagaagcagccctttttaattcttctgtttcttttaagttacctgtttaaaaattttgaaagacataacatgcttattcttgagttatcatttaggagtaatctagtggactttttttttttttgtggcacaccaccctacccttgaaactttatgg

SEQ ID NO: 104864 - DNA, 357 bp, Homo sapiens
gtattttcctagaataaatactggaaagtgaaattgcgtggtcaaaggccagacacatttttaaaagctgcctctttcccaatcacacatttcccacatccatttatttgctgaggatcttcacaaaatttggactgagattaaacacagaatcagagaagccctatgctggaaagatcttagtatatacctcttgaactaaaccagtcttactttagaaaaaaaaaaaaagggccaggcgcgggggttaatgcctgtaatcccaccattttgggaggccgaggggggcggatcatgaggccaaaaaattgaaaccatcccggccaacttggggaaaccccatctttattacaaata

SEQ ID NO: 104865 - DNA, 392 bp, Homo sapiens
ggaggctgaggcaggggagttgcttgaaaccaggaggcggaggttgcagtgagccgagatcgcgccactgcactccagcctggtgacagagggagactccgtctcaaaataaaaatatataaagtcttagggttattgtagtgtgtcttggaaagcaaacagaaaggggcctgaagggatgttgaagatttaaagagaaaaagatgtgaaatagttgtcttgggaatgggaaaacaaatgtactagggacatgcagaattaccagcaggtggggagttggatttaactagggctttgccaggtgaattcaacaaaggaaggaaagagcaaaggtattgagtatgtatgcaaacctatatggtatagcctattgctcctaggctacagacctg

SEQ ID NO: 104866 - DNA, 366 bp, Homo sapiens
gtgagacataaatatatatacctgctgtgtatcaaccaaaatttaaaaaaaagtgggggtgagaaaagacatccttgttcctgatcacagggagaaagctttcagtctttcaccattaagtataatgttagctgtgggatttttgtagatttcctttatcatattgagaaggttgccttctattcctagattgttgactgttgttatcatgaagtggaggcggatcttatctttccttttttttttttttctaaagatttttgaaacggaatctcccttttttactcaggctggaaggcaggggcatgtcctgggttcattgaaacctccacctccggggttaaagcattttttctgtgttaagtt

SEQ ID NO: 104867 - DNA, 347 bp, Homo sapiens
  misc_feature (1)...(347): n = a,t,c or g
ctcaggccttgccaatactttctcaactaagtttatgtagtattgtaattcctttgttgtcatttaaacaatgttcatagcatcttcaccaggaatagattccatctcaagaaaccactttctttgagcatttataagaggtacctccttatctgttcaagtctgatcatgagttgcagcaattcagtcacatttttaagctgcacttctagttctcttgctagttccaccacacctgcacttgcttcctctactgaagtcttgcacccctcaaagtgatatatgatggttggaatcaactttttccaaactcctgtgaataacatgttgctattttagcctcttcn

SEQ ID NO: 104868 - DNA, 488 bp, Homo sapiens
  misc_feature (1)...(488): n = a,t,c or g
agcgggaaaanntttgagctcgtatccctgtccagngcgtggaattcgatttaagccctgtgtgcattaggtatttgtcctaatactttccctccccttgcctcccaccccctgccattcacatgtcttactcgagtttttaagcactctagacttatgtatcttattccagttgctgagtattatatggcggcaccattccacagatttgtactttgaaaaattaggccagtaaggttgacgaagtgattctaaagaatcttgccaacctggggtcggccaacaatattctataaagcatgtgctccagtgctgcactgtccagtgcagtagccgctcaacacatgtggttattgaaatttaaattaataaaacttccagccaggctctgtggctcctgcctgtaaccccagcactttgggaggccaagacaggtggatcacctgaggtcaggagttcgagaccagcctggccaacatggtgaaatn

SEQ ID NO: 104869 - DNA, 526 bp, Homo sapiens
  misc_feature (1)...(526): n = a,t,c or g
aggaggtnnnnnnnaattgaanccaatcgatgncgctgagancctgcactggnaccaaaacttatctgtgacaatatcttgaacattaatgcctttaagagaaatgcccttaaaaatacctttagcaagcatttccttagcaaacacgctcctagcaacagagagtaagttttgtaagggcatgtgaatacgaaggcagagactggagtgatgccaagaaatgtgaaagatttccaggagccatcagaagcaaggaaaaacgcatggaaaagattccgagtgctcagaaggaagcaaccctaccaccacctgatttggacttctaagctccagaactagccctggctgtgttcactgaatggatctagtctctgaaaattcaccgacatttttggcttggcgctgtggctcatgcctgtaatcccagcactttgggaggttgagacgggaagattacgaggtcaagagatcaagactatcctgggcaacatgatgaaacgctgtctctactaaaaacacaaaaaaa

SEQ ID NO: 104870 - DNA, 485 bp, Homo sapiens
  misc_feature (1)...(485): n = a,t,c or g
gggcgttacccccagcttagaaccccctagggacctancgnctanntggctnagcacaanccgnnggaantnngaanangaggaggaggagccggngctggtactgagccctgattagcccgggcctgttccagccgcggtcagctgccgccgagactgtgcctgttcccaggagggcgtcgtggactgtggcggtattgacctgcgtgagttcccgggggacctgcctgagcacaccaaccacctatctctgcagaacaaccagctggaaaagatctaccctgaggagctctcccggctgcaccggctggagacactgaacctgcaaaacaaccgcctgacttcccgaggcacctgtaatccgagctactcaggaggctgaggcagaagaatcacatgaacccgggaggcggaggttgcagtgagctgagatcacaccattgcactccagtctgggcaataagagtgaaaaaagctgtctaact

SEQ ID NO: 104871 - DNA, 474 bp, Homo sapiens
  misc_feature (1)...(474): n = a,t,c or g
cactgagtatcgtgngtcctcncncgngncgnggaantcgacggggcttcaccatgttagccaggatggtgtcgatctcctgacctcatgatccaccctcccaaagtgctgggattacaggcatgatccactgcgcccggcatctcagagactttgatcatgacccaaaggataaaattctggaagagaagggatggaaaggatgaggataaagctggaaaatgtgggggctgaataatttagagccttagagaagaatttattctgagtaaactgaaaagctattgaaagctgtaggcagtggggtgacatggtgatatttataatataaagtctcattggagagacagaacataggcacaagatgataaggggagtggggaagagaggaaccagcacaagttaacacctactgtgtgtctggcatgaatctcaacagtttacacacattatatcatttaatcctcacctctg

SEQ ID NO: 104872 - DNA, 472 bp, Homo sapiens
  misc_feature (1)...(472): n = a,t,c or g
aatagagaactgaggccatgncggggaactcgccagcctcagcgtttgatggagcccagccttggagctggagttaggcgtcaggtgggagagtgcatgtgccgtctgtgaccttggtgcagctttgtgagcaaacgtgtccagagttcaggggaatgtcttacaaaggctcttggacagactgggaccacctcaaactgtcctcttcctcagggtccctgttccccagctgtgctcattcaggggtgtgggagccagggcagaggggactggcctctaggtggcggtgttgcacaagggcccagtcgcagccaggcgggcgggagctgttaaaattatttggctggatcggtgggctcatgcctctaatcccagcactttgggaggccaaggcaggcggatcacgaggtcaggagttcaagaccagcctgaccaacatgatgaaaccccatctgtactagaaatacaaaaa

SEQ ID NO: 104873 - DNA, 462 bp, Homo sapiens
  misc_feature (1)...(462): n = a,t,c or g
nctcgagaccactaggacagcgcggtggaattcggtaattgctttgaggcatcacaactcatgcccatataagatggcaaacttaattgataaatgtgtatgttctgactactccaaagactggccattccccatcttccttcccctcctcaggccaccctactgcctaagacacaacaatatggaaactaggtcaattaataatcctccatggccctctaaatgttcaagtgaaaagactaatgaagaaggcatgttgaaagttgagataggctaaaagctatgcctcttgtgccaaacatttagcaaagatatgaatgcagagaaaaaattcttgaaggaaattaaaagtgctactccaatgaacacatcaatgataaggaagcaaaacaggcttattcatgatatggagaaagttttagtgatccggatagaataccaagccagccacaacattctcct

SEQ ID NO: 104874 - DNA, 522 bp, Homo sapiens
  misc_feature (1)...(522): n = a,t,c or g
aggaggccnnggnnccccgcccccnaatcgaagaccccttngccagngtttcgagnacccctagtccagagcggtggaattcaatctcctgaccacgtgatctgcctgcctcggcctccctaagtgctgggattacaggtgtgagccaccgcacccggcctctccttgattttctaagctcctctcatccaacctgaaaacatatttatctagtctttaggatagtcattctggcttttacagctttgtgtgttctcttggacttattatcttgatttaaaaccttcctatttaaagcagggccaaaattttaacaaaccaaagacctctctgtttttggcacagcctcctttagtacagaaaatcctaaaggtaaaggaagtcctgtgcgtacaaggaaatacagtggaaaaagccctcaaataatatttgaaaatgttattcacatattgtctttatttcaactcagattcctttctcattccatttttatctggctcctacactcattgcttcacagaa

SEQ ID NO: 104875 - DNA, 489 bp, Homo sapiens
  misc_feature (1)...(489): n = a,t,c or g
cggagggagcnnnnnccnnncaactgagacctgaggaacntcggnggaatccaaaataccttagcctgggaaaattataaataataaaattttatttctaatagttctggaggctgtgaagtccaagatcaaggctccaacagattcaatgtctggcgagggcttattctctgcttccaatatgatgccttcacgctgcatcctcacatagcagaagaggacagagggcactcttcccaacctcatctataagggcattaatctcattcatgagagtggagccctcatgactcaatcacttcaaaaagaccctacctcttaatactatgaattggtgggaggtgagaacactaacattcaggccatcacagatgtcaaacttttaatcatattaacctctgatgataaaatgatgtgttttaagatgtggggaagagctttcactttttactctaatatattggggggtntgtttaatttttaatgatg

SEQ ID NO: 104876 - DNA, 445 bp, Homo sapiens
  misc_feature (1)...(445): n = a,t,c or g
natcgaattgtagaccattaggccgngcggnggaattcgagagaaaaagaagactagttggagactcccaaatgaattaataaatctgtcacagaaatggaaatcaaaataagaggaagtcacatttcatctcaagagcttggtgatacccagtgttgcaaagatagggaagagcaccctcacaccctgtctactggtaagggatgaatcgtgcaacctttgtgaagggcaaccagcagaacctgccaaaattctaaatgcatctatcttttgacctagccattctgcaattagaactgttcttagaggaaaaagatatatcctcacttgtaaaatttttttgaaaaaggccgggcacagtggctcatgcctgtaatcctcacactttgggaggctgaggcagatggatcacttgagggcaggagttctggaccatcctggccaa

SEQ ID NO: 104877 - DNA, 500 bp, Homo sapiens
  misc_feature (1)...(500): n = a,t,c or g
gatgggcnncattgagnccctnnnnattgtagtccctagtccgtgtggtggaattccaatgagcaggaagtgaggtgaccagttggccccagaaattagctgcctctgtaacaggagcaaaacagtgcttatgggtagggaatgctgggaggactgaggtgggaggtcacagctccgcagtccagcccgtgttttggaaaggtttgtgtgaactgtatatagtccccaggaaccagacctaaagtccttgagtgccaaagtactctgggcagacaggcgatattacttcttggtgaaggctggctttggggtcagtcgcacagacttggagttcagtcccagctctgcctctgtgtgttgtgggatcttacgtgctctctgagctgcagttttcaaattataaaactgagataacggccgggcgtgatggttcacacctgtaatcccagcactttgggaggctgcggtgggcggatcgctcaaggtcaggagttcaagac

SEQ ID NO: 104878 - DNA, 385 bp, Homo sapiens
caggatcttgctgtgttgttcaggctggtttcgaactcctaacctcgggcgatcatcctactttggccccccaaagggctggaattataggggggagccactgtgcccagcagatttcagcttctccaatctctcccttgacttcctggcaggagagctagataaactcaggtagacatgtctttcatggctacccaaagactctgtacagctagccctcaggagcctgtttaagtcaagatgtccttgcagtcccacactgatactactgagccctaagtttaagagtgctgttattcagggttgggctcagtgcctcacacctctaatccagcactttggggggccaaggtgggcagatcgcttgaactcgggagttaaatac

SEQ ID NO: 104879 - DNA, 497 bp, Homo sapiens
  misc_feature (1)...(497): n = a,t,c or g
agaggagcganncnnnnnacactgatgactgacgatcatgcgaaggacctcctgnaatatgtattaacattgaaaacatgctaacggaaagaagccagacacaaagcttatatttcatgattctatttatataaaatgtccagaataggcaaatccataaagagaatagattagcggttgtctagggcttgggggaaggaggaaagggagttactactcatgggtataggtttctttttggggtgatgaaaatgttctggaattagattgtggtaatggttgcatggtcttatgactacactaaaaattagtgaattgtatatactttaaaggggtgagttttatggtacgtgaattatattgcaataaaatagtttaatggctaggcacggtggctcacatctataatcccagtgctttgggaggcgcatgtgggtggatcacttgaggacaagagtttgagaccagcctgaccaacatggcaaaacctcgtcttg

SEQ ID NO: 104880 - DNA, 1265 bp, Homo sapiens
  misc_feature (1)...(1265): n = a,t,c or g
gtgcggtggaattcttcctctggagaaaacatggctgggacagctgaaggtgagggtcagcaaagacacagtcagctaaaaagctcatctaaaagccaggctctaatgccaattcaagagcctgggactcaatgtgagctcagccagaatcttcagaatctctatggtaccccagtattcaggcctgttctagagaactcctggctctttccaaccagaattggaggtaactttaaccatgtttccttgaaagcctcctgggttatgggccgcccctttgggtcagagcagaggcctaagtggttccatcctttgccttttcagaatgcaggggcccagggccgaggtaaaagttttggtattcaatccttccatccccagatattttattcaggtgaaagattcatgaaattttccagagttgctcggggatgtcactcgaatggaacatttgggagactgccaagacccatttntcagcatgtacaggcctgccctgagagaccacaaatgatgggaactcttgaaaggtctagggcagtagcctccaagataggtcactcctattccctggattcacagccagcaagagcagtagggaagccatggcctcagcaagcttgcaccagggtaacagagttaactgaagcaactggaaaactgataagaacatcccatattggaaagcctcaccctcagtcctttcaaccagcagcagccacacaaaaactaagacctgcttctcagcaaggagtccagatgaagacacaaggtggggcttcaaatccagctctccaaatagggtcccatcccatgtgcaagagctctcagttcaaatccgatcagtccaacccatccacagtcaaacactcccagcctaaacccttccattctgtgccctctcaacctaaatcctctcagacaaaatcctgtcagtcccagccctcccaaactaaaccttctccatgcaaatctactcagcctaagccaagccagccctggcctccccagtctaagccttctcagcccagaccccctcaacctaagtcatcctcaaccaatccttcacaagctaaggcacaccactcaaaagcagggcagaagaggggagggaagcattaaagagctaactccagagatctataaagcatatcctttacccaggccattcctatcatatagtaagcagaagagttgccatgaaagtaaaagactactgtcattagcatgtaaaacaaagaaagatatacatgaccgaattggat

SEQ ID NO: 104881 - DNA, 469 bp, Homo sapiens
  misc_feature (1)...(469): n = a,t,c or g
cttcgagtacattagcactgcgcggnggcantcgggattacaggcacgcatcaccatggccagctaatttttgtatttttagtagagatgggattttaccatgttgcccaggaaaagttcactcttttaacatgtaaaattcagtggcttttagtatattcataaagttgtccattggtcaccagtacctctttctagaacatttttatcacccccaaaaggaaccctggacccattagcagtcactcctcattcccccaaattccccagcaccaggctctcccccgtctactttctatctctatggatttacttattctgaggaatgaatagaaaaggttgattgtagaacatgtggtccttttaagactggcgtcgtttacttagtataaagtttccaaggttcatccgtggggtagcctatgttagtatttcatttctttttatggatgaataatatttcgccgag

SEQ ID NO: 104882 - DNA, 473 bp, Homo sapiens
  misc_feature (1)...(473): n = a,t,c or g
gtggaancccccatcgagnacactagtccgtgtggtggaattccagtctaccattgatgggcatgtggattgattctatgtctttgctattgtgaatagtgctgcagtgaacatacccatggatgtgtctttatgtgatttaacccattttataaatgaaaaactgatgtccagacaggccagacaatttctatacacccaggtggaaacaaagccaggattagagttccatgtcccaactccattgtgcatgtgttgcctctcatttttcttggatccctgtatattctcctaatttgataactaattgtttcatgtgagtttttcattttcaaaatactaaaatttttactttctgctgattgttgctagagttaatgattatgatttcaatatcctattttcctttttttttttttttttttttaacccccacttttggggaccaaaggtcaaggcattacctttttcga

SEQ ID NO: 104883 - DNA, 429 bp, Homo sapiens
aataagcaatatttcaaagatggtggtaggaagaaaaaggctgtcatttttttagaaaaacctagatgtaaaaaaaatgcgagatttgctaaatgatgtttatattttacagttagatattctctaaacaaaacaaaatatccttcatatggacatttctggaagtactactacagtgggactgaaattctctagtccctggtccctctttcccctttgaaaaaaaaatcacttctataatatattctttctctgccctattatttaaattgagaatgtgaaccagtacagacattatggaaaatacggaaattcctcaaaaaattaaaaatagaattaccatctgatccagcaattccacttaagggtataaatctaaaggaagtgaaatcagtaccttgaagtgatacctacactcccatgtgcatt

SEQ ID NO: 104884 - DNA, 470 bp, Homo sapiens
  misc_feature (1)...(470): n = a,t,c or g
gagaggccngatgagaccacctagcagatgntgaangcnccggaataccggtcgacccacgcgtccgatggattatagtgtagatttgttttttatagcattttatctgacatagagtaagcatttgtatttatgagtatccttgaaatagatttcacaattattaacccagcctgggcaacaagagcgaaactccgtctccaaaaaaaaaaaaaaacctttttttaggtttcccttattttagggaaaaacttgtagggattttgcttaaaacagttttgcaaaagggggcggggggagttttttttgggcccaaaaatcctcctgaaaaaaaccctgatcctcctttggattccccccccaaaacttttaggaggttgggggcatttgtaaaaacctttccaaagggccttaaggcggcggtggtttttccagccctggtttaaccccaagggcagatgggggggtgn

SEQ ID NO: 104885 - DNA, 405 bp, Homo sapiens
  misc_feature (1)...(405): n = a,t,c or g
cccacgcgtccgctttaactgtgatcttaaaactgaataaaaatatttaataaaactttgaaatattttaaaaaaaaaaaaacaataaaaaaaaaaaaaaaaaaaggggggggcccgttaaaaagaccccggggggggcccaggatctacccggacggcgcacgaaaaaacctcccccacatagggactgcaaaaaagcactggggggggtattgggaaaaaaaccctcatgggggggggggaaatactgggcccacccccccccaaaaaactagacccttagggggaaaaaacaatctcaaaagggttcagggggaaaaaccccgccctaggctgggggggggaaaaantaggagccaactattttcatgtcatgcctagncgtaagtaggacttaagagaccg

SEQ ID NO: 104886 - DNA, 389 bp, Homo sapiens
  misc_feature (1)...(389): n = a,t,c or g
aatggaatgtgagtgactcagtgaatgccacatccaagcagaggcgttaaacattcctgcatggcctctggtgatcctgtcctccagcatgagatgaatatgcttcagataactgctgctacttccctggatcctctcatgacagccaagtgaagcaaataggaagccaattcaccacccagatccaggcccatctgaatctagccaagcccagaagagccctgtagaaccacagctgacctatggaaatgagaagtaaatgtttgttgctggccnanaaaaaaaaaaaaaaaaaaaaaaaaaaaaaaaaaaaaaaaaaaaaaaaaaaaaaaaaaaaaaaaaaannaaaatatttannnnnnaggggaaaaaannattttcatctttga

SEQ ID NO: 104887 - DNA, 429 bp, Homo sapiens
aaaatctgaaaatgttatataataactttaaaaagccaggtaattaataatctgcactgatattacatccacaggaccacagtatttatgtgtatgaattaaggattaaaagataatgtggataaataaactattgatctatgtctgtgtaaaaaaaaaaaaaaaaaaaaaaaaaaaaaaaaaaaaaaaaaaaaaaaaaaaaaaaaaaaaaaaaaaaaaaaaaaaccacagggggggggggcctgaaaaaaggattctaagggccccccctattaacaaactattgatctattttttttttttatttaaaggtatttttttatagctccttgggggtttttttgaaaaaaccctttttttgtgggggggacaataaccgccccccccccccccccaaatatttgcccctttggggatactttttttttg

SEQ ID NO: 104888 - DNA, 341 bp, Homo sapiens
ctcagagaaaacaaaaaacaaacaaaaacaaacaaatttacaaaatacaaccaagtgttcaccatctttaagagattcacctaacacataaggactcacataaacttcaggtaaaggggtggaaaaacatattccatgcaaatgtaaaccaaaagcaaacaggagtagctattcttatatcagacaacatagacattaaagcaacaacagttaaaaaaaaaaaaaagagggaaaaccctacaatcctaaatatatatgtccctaacactggggctccaaaatttatgaaacatttactactaaacctaaaaaatgagagagatggcaccacagtattgggg

SEQ ID NO: 104889 - DNA, 433 bp, Homo sapiens
cggacgcgtgggaaagaaagaagagatcacaaatgaaccagaaaacaactaacaaagtggcaggagtaagtccttacttatcaataatggcatggaatgtaaatgaactaaactttctaatcaaaagacatagagtggcttaatgcattaaaaaaacaaaatccatgatctgttacctacaagaaacaaactttataaaagatacacacaggctgaaaataaggggatggaaaaagatattccatcccaatagaaactaaaaattagcaggagtagtgtattagttcattttcatgctgctgatgaaaacatacccgagatttgtggaactttgaacttaagagagatgatttacggtatctggcggaaaaaatttctaagtagcaaagcattaaagaggtgatttgggtgtggttaaaggcaatcagttttt

SEQ ID NO: 104890 - DNA, 407 bp, Homo sapiens
aaagtagtatattcactatggaaagcagcttggccagttttctgaaatctaaatactaaactagcacacaacctagtaattgcactcctgggcatttatgagaaatgagcacttatgttcataccaaaacctgtacacaaatgttcacagaaggtttctttgtaatagtcctaagctgaaaacaaccctgatgtccttcaattaaaggcttaaacaagccgtggtacattcatgccatgaatacttctcagagtaaaaaggggtagcaattcaagaaacaacagatgctggcaaggttggagaggaacaggaatgcttttacactgttgacaggaatgtaaattagtccaaccattgtggaagacagtgtggcgcatcctcccagatctagaatcagaaatactatt

SEQ ID NO: 104891 - DNA, 425 bp, Homo sapiens
cttcaaattcctccctgtacgaaaggacaagagaaataaggcctacttcacaaagcgccttcccccgtaaatgatatcatctcaacttagtattatacccacacccacccaagaacagggtttgttaaaaaaaaaaaaaaaaaaaaaaaaaaaaaaaaaaaaaaaaaaaaaaaaaaaaaaaaaaaaaaaaaaaaaaaaaaaaaaggggggggccccttaaaaaaaatcttttggggggcccattttttccgggggggaaaaaaaaaaatttttttttttaaaggggggggaaaaaaaaacccccgggggttttttaaaaaaaaacttttttttgggggggggaaaaatgggcaaaaccccccccaaaaaaataagggccttgggggaaaaaaaaaattttttggggggggggggggcaacccccc

SEQ ID NO: 104892 - DNA, 384 bp, Homo sapiens
ggcaatatagcgagacctccatctctacaaagaaattaaaaattagacgggcatggtgacttgcacctgcagtctcagctactcaggaggctgaggtgggaggatggttggagcccagttggtcccactgcactccagccagggcaacagactgagacgctaactaaaaataataataataataataataataatgagtcagatcagaagtctcactgcttgtaatgctcctgtggctacatctcacagtaaaagccaaagttatgcagccacggaaaagaaatgaagcatgaattcacactgcaacgtggataaactgaaaacatgatgctgaaagaggccagacatgaaatgacaaatactgtatgattccacatatatgaa

SEQ ID NO: 104893 - DNA, 385 bp, Homo sapiens
  misc_feature (1)...(385): n = a,t,c or g
aaagggtcaaaaaggatccatgtaggtatgtttaacttctggaggacaaaaagggtacccctttacatttgggaaactaagtagttataggaacatgtaaaaactttatttgatatagtggttgtaaactacataattctttaccgtaaatggtagacacaggaaagaaaagaagtcaaataaggatcagctaaatttgggtttgcatgatttccttgataaccctttattattattctagaaatatttagggagagaaaaaaaaaaaaaaaaaaaaaaaaaaaaaaaaaaaaaaaaaaaaaaaaaacaaaaaaaaaaaaaannncnnnngggggggggcccaattagggggtgcttgggggggccccaaaaactacttttttta

SEQ ID NO: 104894 - DNA, 481 bp, Homo sapiens
  misc_feature (1)...(481): n = a,t,c or g
ggctggggnagagccatcagcanccttttccgntgatcgtgcacnggcnncggaannccgggncgacccacgcgtccgcatgtctatcatatagtaaaacccattccatgacccttaacaggggccctctcagccctcctaatgacctgcggcctatccatgtgatttcacttccactccataacgctcctcatactaggcctactaaccaacacactaaccatataccaatgatggcgcgatgaaacacgagaaagcacataccaaggccaccacacaccacctgtccaaaaaggccttcgatacgggataatcctatttattacctcagaagatcttttcttcgcaggatttttctgagccttttaccactccagcctaacccctaccccccaattaggagggcactggcccccaacaggcatcaccccgctaaatcccctagaagtcccactcctaaacacatccgtattactcgcat

SEQ ID NO: 104895 - DNA, 405 bp, Homo sapiens
  misc_feature (1)...(405): n = a,t,c or g
atcggaaagggtcagaaaggatccatgttggtatgtttaacttctggaggacaaaaagggtacccctttacatttgggaaactaagtagttataggaacatgtaaaaactttatttgatatagtggttgtaaactacataattctttaccgtaaatggtagacacaggaaagaaaagaagtcaaataaggatcagctaaatttgggtttgcatgatttccttgataaccctttattattattctagaaatatttagggagagaaaaaaaaaaaaaaaaaaaaaaaaaaaaaaataaaaaaaaaaaaaaaaaaaaaaaaaaaaaaaaaaattnttngggggggggcgctttttaaaaatgcctgagggggcccccaacactcccattcagagggcataaatatttt

SEQ ID NO: 104896 - DNA, 440 bp, Homo sapiens
  misc_feature (1)...(440): n = a,t,c or g
tgggacaggaaanagacctgatgcctgcggaccggctggaatccctggggcgacccacgcgttcgccagcccatgaccgctaacaggggccctctcagccttactaatgacctccgatctaaccatgggattgcacttccactacataacgctccttatactaggcctactaaccaacacactaaccatataccaatgatggcgcgatgcaacacgagaaagcacataccaaggccaccacacaccacctgtccataaaggccttggatacgggataatcctatttattacctcaaaagttgttttcttcgcacgatttttctgagccttttaccactccagcctagaccctaccccccaactaggagggcactgtcccccaacaggcatcaccccgctaaatcccctagaagtcccactcctgaacacagtacgtttac

SEQ ID NO: 104897 - DNA, 431 bp, Homo sapiens
agatcgtgccaccgaaatccagcctgggtgacagagccagactctgtcaaaaaaaaataaaaataaacaaaaaggaaaacccccttccgaaaaaaaaaaaacacaacccccagcgggggggaaaaatttaaaaaagcttttttcggggaaaaaccctttgttttccaaaaattggcaaaaacttttggggcttcattatgggaaaaacaatggtccaaccccaagtgaaaattttgaaccaaactttccccaataaaaaagagggggcgaacaaaaagccaaatttttttttttaggggatgggtaataaaaccccccagggagagccggttcctgccctttagaaaaagcaaaatttaaaaaaccggcccttccaaaacttgggggaaaccccagggaacgggaatgcctaatatccggtgggggaaaat

SEQ ID NO: 104898 - DNA, 423 bp, Homo sapiens
cggacgcgtgggcgaccgctgactattctatacaaaccacatggacattggaacactatacctattattcggcgcatgatctggagtcctaggcacagctctaagcctccttattcgagccgagctgggccagccaggcaaccttctaggtaacgaccacatctacaacggtatcgtcacagaccatgcatttgatataatcttcttcatagcaatacccatcataatcggaggctttggcaactgactagttcccctaataatcggcgcccccgatatggcggttgcccgcataaacaacataagcgtctgactcttacctccctctctcctactcctgctcgcatatgctatagtggaggccggagcaggaacaggttgaacagtctaccctgccttagcagggaactactcccaccctgg

SEQ ID NO: 104899 - DNA, 486 bp, Homo sapiens
aaaaattagccgggcatggtggcatgcacctgtagtcccagctactcatgaggctgaggtgggagaattgcttgaacctaggagatcacgccactgcactccagtttgagcaacagagcgagactccatctcaaaaaaaaaaaaaaccaaaaacgggaagggcccgggggtattttccccccccctttgggcgggtttaaattttaagcaaaaagggaactttccaaaaaaagtttattgggggggggggggaagaaggaaaaaaaaaccttggggttgttttttaagcccaccaggcaaaaccatcgattttgggggatttggtttctgagccccaccccaataagggatgattttttttgggtaaaggaggcaccaggaccttcgggggggggaaaccaacccaagggtgggggtgggaaaaattttccttgaggaaccaaggttctacttaacggaaagggagggtggttttttaattgaaag

SEQ ID NO: 104900 - DNA, 406 bp, Homo sapiens
aacaagagaccaacaaagtggatgtcatcaaaataatttctgcacatcggccgtgagccaccatgcccggccaatccagatgatttttaaaaatcataaaactcaacaaaaaacaacccaattcaaaaatgggcgaaggatttgataggcatttttccaaagaagacatacaaatggccagtcaacacagggaaaatgttcaacatcactaatcgttagggagatgcaaatcaaaaccacaggctggacatggtggcgcacgcctgtaatcccagcactttgggaggccaatgtgggcggatcatgaggtcaggagatcaagaccatcctgtgtagggaccagccctacagggtcagtgggtctcgccccgtgtgtggagatgagagagtgtagaaataaagacag

SEQ ID NO: 104901 - DNA, 399 bp, Homo sapiens
  misc_feature (1)...(399): n = a,t,c or g
cggtaatcgcataaaacttaaaactttacagtcagaggttcaattcctcttcttaacaacatacccatggcctccatgactttttcaaaaaaaaaaaaaaaaaaaaaaaaaaaaaaanggggggggcccttaaaaaaaaacccggggggggccaaatttaacggggggaggaaaagaaaaattttttccctaaaagggggggaaaaaaaaaaccccggggggattttggaaaaaaaacctttttttggggggggaaaaaaaggggaaaacccccccaaaaaaaataaaggcttaagggaaaaaaaaaaattttaaaggggaaaggggggaaaaaaaccccaaaagggcggggggaaaaaaatggggnnnnnnnnnannaaaacacccacttggggggga

SEQ ID NO: 104902 - DNA, 489 bp, Homo sapiens
  misc_feature (1)...(489): n = a,t,c or g
tgtggggggngnncactgaacctangcangatggagaccctagttagagtggtggaattccaacatctctacccacattatcatgtttcttgatcacaactaggttacaagggttggagatacacaaagatgaatgccatactatttatgcttataaaaaagcaatttatcttttgttctactacagaaaatccttcctcaaaaacaaattcatgaagtcagccttgctcaaacaccttcagtggctctttatttctggacataaatctaaattcctttgtcaacattttgagatcttcaataacctggtttcagtcttccaatttaatcttaaatatgttctactgaatgaaccaagtgcttaaacaatttttattccttattaataaagatacaggctgggtgtggtggctcacgcctgtaatcccagcactttgggaagccgaggcaggtggatcatttgaggtcaggagttcgagaccagcgtan

SEQ ID NO: 104903 - DNA, 434 bp, Homo sapiens
  misc_feature (1)...(434): n = a,t,c or g
acgcgcccccattgattcatcgcattcgcgnggcggaattcaaataaaagaagtcagtcacaaaggactacatattgtaggatttcatttatatgaaatgccaagaataggcaaatctacaaagatagaaaatagattagtggttcactagcgggagggattgggggtgataactaagggtatatagcatttttggaggggtaataaaacttctaaaattgtggtgctcactgtacacaatctgtgaatatacaaaaaaattgaatgcatactttaaatggatgaattttatggtatatgaattatatttcaataaaactgttaaaaattataatatacaagctgggtgcagtggctcacacctgtaatcccagcactttgggaggccgaggtgggtggatcccctgaggttgggagttcgagaccagcctgag

SEQ ID NO: 104904 - DNA, 404 bp, Homo sapiens
acggggtctctccatgttggttaggctggtctcgagctcctgacctcaggcgatccacccacgtcggcctcccaaagtgctgggattacaggtgtgagccactgtgcctgaccacaggaaaacttatttaaatgagagatttgactcgaaagatcccgtttttttaaggctcttagttcttaaaagcggcacataatagaattagtataatcccaaataaattttcagtagatttttggtgtaacttgagaagatgattctgtcatttttagtgacaatttaaaagacctgaaattgtctacagccatagaaagtgaactactgatagttgtttctgtaaagttttattggaacacaaccacacctatttgttcatctgtattggctttggttactttgcgcag

SEQ ID NO: 104905 - DNA, 389 bp, Homo sapiens
atgtgcctcttcccaaatttattttcagacttatttttttactagttttatttctgaagggcgcattagagagagagaaagccagagagagagagagcgagagagaggaaagaagagacaaggtgggaccgatggtataattgagttcatagaaagacagtgaagtgaatcatgggtgtttcatcactttacaaaactgataacaataatatcatttctagaaacgtgaatttacagtatgaaatggtaaacattttttttttttgagagggagtttcattttgtcccccaggttggagtgcaggggggcagccttggttcactgcaagctccacctccagggagccattcccttgcctaagcctcccccagatgttgggatggcgggg

SEQ ID NO: 104906 - DNA, 393 bp, Homo sapiens
  misc_feature (1)...(393): n = a,t,c or g
tttttaaatgttgattgaggtttgtggtatacttggttaaagatttccaataggcacttagaatttcagattactactcagattatttggaatctgttgttagagagtacaagggaattaaatagagacagatatattctttttttgagacagtgtctcactctgtcgcccagcctcctgagtagctgagaccgcagatgcgcgccaccacacccggctgatttttgtagtttttgtagagacggggtttcaccatgttggccaggctagtcacgaaatcctggactcaagcaacgggggcagatatattcttaattgctgtgtattgaggtaatcctctaacactgtggcacttacctaatgagaattataaattcataattctgctaaggn

SEQ ID NO: 104907 - DNA, 411 bp, Homo sapiens
  misc_feature (1)...(411): n = a,t,c or g
cccacgcgtccgcccacgcgtccgcccacgcgtncgggttttcaccatgttggccaggttggtcttgaactcctgagctcaagtgatccacccgccgtggcctcccaaagttctgggattacaggtgtgagccactgcacccggcctctggtcagtgcttctgttgagttcaagaaaaatgaccaattcatctaaaaccccgagctggcagatgctctcccgcgctgcggcggctgacgtcagtgctactttcagcgtctttggtgcagncttggtgttcgctctcaaatgggctcttttcaatatcacatatcatatgcaggatgcagaggggcccggcttacataccgagagtcagaggactcatgcggccacaaataggttgggaacagtgtcccctaataagatgag

SEQ ID NO: 104908 - DNA, 391 bp, Homo sapiens
cggacgcgtgggcggaggtagtagtgagccgagattgtgccattgcactccagcctgggcaacaagagcgaaactccttctcaaccaaaaaaaaaaaaaaaaaaaaaaaaaaacaaaaaaaaaaggggattcccaaccttaaaaaaaaaaaaacgggaaaaaggggggggccccttccgggaaggggaaaataaaaggaaaaacgggttggaaaaccaaaacaaaaaagggtaaaaatttttaaaaaaagaaatttgggggcaagtttgggaatgaaaaaccccaaaaaaaaggggttttggggggatttttttaaaaaaaaaaaaaaaagggggggtaaaaattaaaggaagggggggggaaagggtaaaaattattttaaaaaaatttt

SEQ ID NO: 104909 - DNA, 423 bp, Homo sapiens
  misc_feature (1)...(423): n = a,t,c or g
gctggtctcgaactcctgacctcaagtgatccacccgcctcggcttcccaaagtgctgggattacaggcatgagccgccacgcccggcctcacctccatttttctaatagcatattctaacttcacatctctgtgtcacattttggtaattcttgtaatatttcaaactttttcattattattatatctgttatggcgatctgtgattggtgatttctgatgttattgtaatttattttgaggtgccatgaaacctgcccatataagatagcaaacttcatccatataattgtatatgttttgactgctctacctaccagttgtgcttgcacattctctctctctctgtcaaagcttaatccagaggaaggctctaactctgttcaattntatgaaggctgagagaggtgagaaagttgcaca

SEQ ID NO: 104910 - DNA, 374 bp, Homo sapiens
acatgcctgtagtcctagctactgggaaagctgaggtgggaggatcacctgagcccaggagtttgagcttgcagtgatctatgatcacgccactgcactccactctgggttacagaaaggatgaagtagttatttttaaaaaataacttctttttttacatccagaatgtaaagtaggaaaagttttagactctaacacctttcttttagaaaataaaagaaaactaagtactttttcctcctcatcacccttctcttttattaaaacactttcagaatttcaacattgacatagccgtgcaaatttatttaggatttttttttcagtgccagctttggggtaacccaaccagtagctactatataagggaatg

SEQ ID NO: 104911 - DNA, 381 bp, Homo sapiens
ccacgcctggctaatttttgtatttttagtacagacagggccagactggtcacgaactcctgacctcaggcgatccacccgcctcagccttccaaagtgctggaattataggtgtgagccatcgcacctggccaccagacccccattaacttcagtagggatggcaccaggtttgagaggccaaaagagatccagagccagcaaacaagacttaggtttgattgaggggaatttgcatacagagcagtccagtggaggtgggctagataggagaactgccccacctgcagaaagtatgcagtatatatagcattttcacttaacaccctccccctaacaactttgatttaacccaaaacaaaggggctaaatcccctgtat

SEQ ID NO: 104912 - DNA, 399 bp, Homo sapiens
catgcatggagctatcgtctcctatgcctttttctggaataccgtgaaggacttacctggggctgttttatagccagcttaaaaaagaaataaggagtacattctaaaataacgaaagtatagcatagtaaataataggctgtaggaattttcagctctatgataatcttatgggaaccaccattgtaaatgtagcctgttgttgagtgaaatattgttatgtggcacatgactactcagttttaataaaagttccatgtgcttgaaaattgaaaatgtattttccaacccaggcacagtggctcgcgcctgtaatccactttgggaggccgaggtgcgcagatcacttgaggccgggagtttgagacaagcctggctaacatgccaaaccccatctct

SEQ ID NO: 104913 - DNA, 397 bp, Homo sapiens
agctaaagaatctcagaaagcaagctgccatattttttaacactacatgaaaacaatagaggaggaagctctctcaagttcaaaatgctaccctgaaccacatctctttttaaaagcataggaaaagtaatttcacacaaaaatgaataacagaaaatatataagccaaatatcatacaaaattatgataagagaataagcagcagaattatatttctataaataataaaagcataccaataagatgtgaacagagaacagataaaaactataatcatctattttcaaaataaactgaaatgtattaagaaaatgatatggccaggtgcagtggttcacgtttataatcccagcactttgggaggctgaggtgggtggatcacttgaggccaggagt

SEQ ID NO: 104914 - DNA, 396 bp, Homo sapiens
agaattattcaacagcagcactgtttttgaggggccacatttggggctggagatggggaactctttactatgggagctctcctatttattgcagggggcttaacagcaccctgggcctctacccactaaatgccagcagcaacccccatccccgcaaattgtgtaaaccaaaaatatatacacacattgccaaatgtcccataggacacaaaatcatatacccatacgctaacacacccatacactaacaccacacgcatacacacacacacacacacacactttaagactcgctgctctggccaggcgtggtggctcacacctgtaatcacaacactttggggagctggggcaggcaaattacttgagttcaggagtttaaaaccagtctggcca

SEQ ID NO: 104915 - DNA, 465 bp, Homo sapiens
  misc_feature (1)...(465): n = a,t,c or g
gggcggcccccnaatagataacatagagaatcctcggaccggaccggaattcccgggattcagagcccaccctaatccaggatgacctcgtcttaaccagtttcttctttaaaaacgctatatccaaataagggcacattctgaggttctatgtggacatgaactttggggaacactacacaacccagttcagaccatacagacgtgggagccgttcccctatctaccactttgtagccgtgtgacttcaggcaagtcacatcaccgctttgtgcctctgcttttccacctgtaaaacagaaataacagtcatcatcaccatcatcatcatcatcatcatcatcatcatcgtaatccctgctaggaatgctgccgggcacatagtgatagctatgcagtttggtcagataaagtcagccaagagcccgtagctgctatgtagaggtaaactgcatggacagccan

SEQ ID NO: 104916 - DNA, 386 bp, Homo sapiens
tgcacacctgtagtcccagctacttgggaagctgaggcagaatcacttgaacccaggaggcagaagttgcggtgagccgagatcgcatcactgcactccagtgtgacaaaaaaaaggattaggtggctttatgtccagctctcagctaggacttgttctgcagcttgcatttacttagcagagctgttgtcaaaggcttcattggcagtttgggaaccagggcaaacgctatgaagggtgctggctggtaactttctcagttaacatgatccctgctagggatcatgctttcacctgtccagccactgggtgtgacccagtgggaccaagtagacagttgtagggtttgcaaactatgcttttaaatgtgctcaaatgtcctcctt

SEQ ID NO: 104917 - DNA, 408 bp, Homo sapiens
  misc_feature (1)...(408): n = a,t,c or g
tccacctcggcctcccagagtgctgggattacaggcatgagccacttttcccagccagaataattttggtaggcaggaaaatgcacattatgtacacacattgctcttctctgatttgctttaacactgaaaaactgaagattgtaaatgtagtctcaatttagagtgaattaacaaaagatttgtttttcaaaaaagcaaatgtataaaattaatgggtaacagatgccattagttgctaaaaaatagtatgactaaagttggtaattatctagctatgcaaataacagcccaattaaattaagactctattgggtgcatgtggaaagcattgatgtgcagtgtggggcctccactcagcatttccttactgtctctttacagagataccaattccccctgaattan

SEQ ID NO: 104918 - DNA, 406 bp, Homo sapiens
  misc_feature (1)...(406): n = a,t,c or g
caaccttgactatagtcccatattttagtccaaatactgtgattggcttctcttcctgttagacacaacctatgcaaaaccaaatgaatttgggttcggtatttctatcgtcattggctttggaaatcatttcacacttaatagaaaaattgtgagagttttacagaaaactcctctatagctttttcctagattgacaaacactcanaaaaaaaaaaaaaaaaaaaaaaaaaaaaaaaaaaaaaaaaaaaaaaaaaaaaaaaaaaaaaaaaannnananannnaaaaaaaaaanaannnaaaannnaanaaaaannnnnnggggggggggttttaaaaaaagaattttaatttgggcgggggggggagagtttttttttttttatttataaaatatatataatgt

SEQ ID NO: 104919 - DNA, 391 bp, Homo sapiens
aaaaaattagctgggcgtggtggcggtttcctgtactcgggaggctgcggcaggagaattgctggaacctgggaggcggagggggcagtgagcctagatctcgccattgcactaacaggctcggctactacagcaagaccctttctctcaaaaaaaaaaattaaaaaatatattatttattgttggtggggttcctctcttacccccttataaaacaatctttgtgtggccctgcctcggttttttccggggtttggtgtttttctctcctcttcctttatggtaaaacccccgtctctttaaaaatatataatctctcccctctttaaatgtttctttttttttatcttgattctcctttatattactcttttaattattctctttcttt

SEQ ID NO: 104920 - DNA, 410 bp, Homo sapiens
  misc_feature (1)...(410): n = a,t,c or g
ctcagggattgtaaatgcaccaatcagctctctgtaagtggaccaatccactgtctgtaaaatgggccaatcagcaggatgtgggtgggggtcagataagggaataaaagcaggctgcctgaagtagcagcggcaaaaaaaaaaaaaaaaaaaaaaaaaaaaaaaaaaaaaaaaaaaaaaaaaaaaaaaaaaaggggggggggggttaaaaaaaaaattatttttggggcccgggggggaaaaattttttttttttttttgggggcccttttttttttttggggggcggtttttaaaaagggggggggggaaaaaacccgggtataaaaaaaataaaatttctgggcacccccccccttttttgggggggggaaaaaaaaaaaaacggccnnnnnnnnattttttgngct

SEQ ID NO: 104921 - DNA, 415 bp, Homo sapiens
  misc_feature (1)...(415): n = a,t,c or g
ctcagggattgtaaatgcaccaatcagctctctgtaagtggaccaatccactgtctgtaaaatgggccaatcagcaggatgtgggtgggggtcagataagggaataaaagcaggctgcctgaagtagcagcggcnaaaaaaaaaaaaaaaaaaaaaaaaaaaaaaaaaaaaaaaaaaaaaaaaaaaaaaaaatagggggggggggtttataaaaaaaattttttttggccccgggggggaaaaaatttttttttttttttgggggggcttttttttttttggggggggttttaaaaaaagggggggggaggaaaaaaatcttttttaaaaaaaataaaaaattcacgacaacccccccttttttgggcgcggggaaaaaaaaaaagacgcccccnnttntnttaagttgaggaat

SEQ ID NO: 104922 - DNA, 384 bp, Homo sapiens
  misc_feature (1)...(384): n = a,t,c or g
cggacgcgtgggaagaattggatggcattcattaaggaagggtgggtcccaactgggaggatgggggggagctttataaaacattcctttttggaatcaaaaaacacttggctgggaaaaaaaaaaaaaaaaaaaaaaaaaaaaaaaaaaaaaaaaaaaaaaaaaaaaccacatgataagataaaggatcttttcgaccccgtgtgaaacaaaaaacaaaacatatccattccttaaaaaaaaaatactaaaaggtccaaacaaaataggaggaactggaaaaaacagttggagatactgaaaaataatttattaagcacactgcattaaatacccagggaaagaaagagcattggnggnaatttnnaaataataggggaacct

SEQ ID NO: 104923 - DNA, 398 bp, Homo sapiens
cattgctcgggtgatgggtaaaccaaaatctcagaaatcacaactaaagaacttatccatgtaacgaaaaaccacctgatccccaaaaactgttgaaataaagttgctcaccagaagttatgcatttatccatacatactggagaagctcagtaaactcatgtctatgattatataagaatcactgagtaagagaatagaaagaagcagtgcaatccatgcagtcaccttctagattcagtaaataaaccacctgtattcgaataagaatgatttgatttttcttttggtcttttatctttttttttttccttgaaggagacccggggagcctccattgataaaaggttggcttccttatcttggaggggtcctgaacttacgaaaagaccccttaag

SEQ ID NO: 104924 - DNA, 405 bp, Homo sapiens
cccacgcgtccgctcgaacttctgacctcagatgatccacccaccttgggctcccagagtgccgggattacagccatgagccaccgcgtctggccaaacattcatatattttatataacattggcaactgtcctgtttgtagtgttcttgcttcacatatggatacacctggtgtcagtttttacaaaaaccaagtgagttttggtgcgtatgccaggagggacaccccagaatgttaactgtcatgatcactggctggtagatgctgtgatttttgtagtgttttcatccttcgtgcctggttgacttatctgtctcctgagtgtatccagaattactgtcctttattttttattacacagatgtatgcatgtgcactgtttaaaaaaaaagatgagaacacat

SEQ ID NO: 104925 - DNA, 411 bp, Homo sapiens
cccacgcgtccggtcccagactacgctgaagctccacgagacctctccttctctgtgcatggaccagtggctgactctggagcccaggctgttgcttcccggtctggtgatgaatcctccattgtctggtgagtgtatatatgctgattgtttttttttcctcactgctatttgctcaatgcaccttctattttatacttaaatgaacctaaagtagtttacaatctgcacttatgtgtgagtgctgtgtgtttgcttgtacctgtgcactccccacacagaacatgtctctactaaaaaaaaaaaaaaaaaaaaaaaaaaaaaaaaaaaaaaaaaaaaaaaaaaaaaaaaaaaaaaaaaaaaaaaaaaaaaaaaaaaaaggggggggccttttttaaaaaacttcttttt

SEQ ID NO: 104926 - DNA, 460 bp, Homo sapiens
  misc_feature (1)...(460): n = a,t,c or g
cggggaaggaaccttgaagccgtccgccgacgaccggnccggaattcccgnnnncccatttcgtcttgtggcaccaagtcagaatttcattcaaaagacaattaggaagatggttttctatggaaaatatttaagtgtaggtcttaatgtgaaagaaagagggagagaaagaaacccctttattatgttctcccttccttaggcattttttgtcccgtgggaaaaaactgtactagggacagagacctctgttaagttttagagaaaagggatcttttttttttttattggaaacagagttttgttttgccccccaggctgaagggcaggggcacaatctgggttaattgcaactccccctctggggttaaagcaattctcttgtttcttcctcccaagaggtggggattacgggcgctggccaccacccccggttattttttgttttttaagaaaagat

SEQ ID NO: 104927 - DNA, 475 bp, Homo sapiens
  misc_feature (1)...(475): n = a,t,c or g
gcatgtccnnnaggagnnnnaactgaaaccccatcgaggccctcngaannncnnnnnnnnnnnngtgtgtcgggtcgacgatttcgtgcccgaagcgcggacgcggttttttaaatctatttgagaggcctggaacaacaaaaacatcaagccattgntaagtaccttcagccaggtacctggcagtgaaaatgaaaaaaaatgtacccttgaccaagctttcataggtattctagaagaagaaattataaatcattcatcatgtgaaaacgttttagctattatttctcttgctattgggggagtaactgaaggtaagtatggttccgttttgttttgtttaaagtaatcttggacatgacatgctttatttaaaacgtcttctccccatacttctccacctatctgattttgtttattcttcaaggtctgcctgactcccaactttgccaagaagtcccagttgaattatttt

SEQ ID NO: 104928 - DNA, 394 bp, Homo sapiens
  misc_feature (1)...(394): n = a,t,c or g
nnccgtcttgaactctagacctcaagtgatccacccacctcggccttccaaagtgctgggattccaggcatgaaccaccttgccgggccaagttgaacttttctcttgggggaataatttccctgctcaacatagacctgggggaattttcttgtctctctcttccctggcattttctctggtcttaggcaagcatttcctgccttttctgattccctcactgtgtgtgcatgggacttaggggaggaaggaggagggagttttctgttaagggagccgtgaatgagcaggaaatggctatttggtaccagttattctgcagaattagggagtgctgatgctgacaaggagtcagaaggattcagtcatcatgacatctgcagtcacaactggg

SEQ ID NO: 104929 - DNA, 409 bp, Homo sapiens
tttcgtatgttggccaggctggtctataactcccagtctcgagagatccatctgcctcagcctcccaaagggctgggattacagacgtgagccacagcgcccggcctaatcccctactttgatttactgtccctccccacatcatttcttcccttattgaaagctctgggtcctccccaatgccccaccatgtaaaccaatctgtcctgctgggtttggggcaccgcggtgggcaggggagaacccgtttgtcagaaggttcagagtttctgagttcctcatgcttaatcatcagcggccacagcacaacagtggccgagggtgggttgtaaattctcacctggcctagaggacgcagccacgaccccagcgcttggccatctctgtagaggattcgcgggtggaccat

SEQ ID NO: 104930 - DNA, 395 bp, Homo sapiens
  misc_feature (1)...(395): n = a,t,c or g
tttcgtagntnntgccattgcactccagcctgggcaaaaaagcaaaattccgtctcaaaaacaaacaaacaaacaaacaaacaaaaaaaaaacctcatccttgaaagaggcccccaggaaaaagtcaatgatctcaaactacttgatgggcggggaaaaaaaataaatctcttccagggacttgatcttcatgtccttgaccaggcagcccagcttggggatgggcatccactcctttgcctggaccttgcctctgaaagctccccgcagcctcagcccctgccctgactatggccacaatcctagccccaaaagctgctgacaaagcttccatggtttcccattccaggcttctgggccctcctgctgccatagggtcatctaccatttggtgt

SEQ ID NO: 104931 - DNA, 427 bp, Homo sapiens
  misc_feature (1)...(427): n = a,t,c or g
tttcgtgtgatattttttcactggggnatttttttgtttgttttttctgtctttctttctttctttctttttttttttttttttttttttggggaaaaaaaattttttttttttccccgggggggggggggggggaaaaatttgggtttattggaaccttggcccccaggggaaaagggttttttttcccccccccccccaaaaagggggattttagggggcccccccccccgccggggaaatttttgggttttttaagggaaccagggttttcccttgggggccaggggggttttaaaccccaaaccctggggaaaaccccccccttggccccccaaaggggggggaaaaaggggggaaacccccacccccggccccttttatttttgttttgaaaaaaaaaggcttttttttttggaaaaaagct

SEQ ID NO: 104932 - DNA, 655 bp, Homo sapiens
  misc_feature (1)...(655): n = a,t,c or g
aagatgcagcaccttgctacactccagggtgtttgtcccacaacagagctgggctgaattactaatgcggactttgtttaacaacggactaaagagggagaagcccatgaacactgtgaggagtgcatgacaggtgcttgtgggatgacatgactcggcgccctccagctgctgctgccaccgcctgtcctgctgggcggccaccccctcgcagggaagaagagcactcacaactgctgctgatctccttccagggcttccgctgggactaggatcaggatgtgaacacccccaacctggaccatctggccagggagggcgtcaaggccaagtacctcatgccgccccttgtgacaatgacctccccgtcccacttcactgccatcacaggtaagcgccactctgcccatttcacccgatgcccatcaaatccccagcgtccgtcattccctgtgataagaagcaaaagctcggtcagctctagggaggttgaggttgctcnnnnnnnnnnnnnnnnnnnnnnnnnnnnnnnnnnnnnnnnnnnnnnnnnnnnnnnnnnnnnnnnnnnnnnnnnnnnnnnnnnnnnnnnnnnnnnnnnnnnnnnnnnnnnnnnnnnnnnnnnnnnnnnnnnnnnnnnnnnattttctcatcctct

SEQ ID NO: 104933 - DNA, 399 bp, Homo sapiens
tttcgtgtacatgtggacctttctatactgccaccctccacatccactttcctacctctggttctcagtcctcttccacagaggtaatgggtttgcagtggagagaaccaaagtcccactttcaccttttgttctcttcaaattaaggccagctccattcccaacccctcagcctgttatagctgttgatgtccctttctggcatgatttaggcactagtgatacactgtctcactacgaccatccaggtatcaggtctgagtggctcgaagtacttgatgcgacagggcatggtggctcacggctgtcatcccaacactttgggaggccgaggcgggtggatcacctgaagtcaggagtccgagaccagcctggccaacacggtgaaaccctgtctcg

SEQ ID NO: 104934 - DNA, 447 bp, Homo sapiens
  misc_feature (1)...(447): n = a,t,c or g
tttcgttctctacaaaaaataaaaaaattagccaggcatggtggtgcatacctatggtcccagctcctcaggaggctgaggtgggaagatggcttgagccgcagatgctgcagccaggattgtaccactgcactctagcccaggcaacagagtgagaccctgtctcaaaaaaataacaataaaaagagtaacttgtggttgctttaattatggctcttaaagtctgctcagacaagcacccccaattgcctgcacctggggatccttcctccacccagaggtcgccacttctgggagttgggtttcatcctgaccctgccatgtcacgatccagtggtcccttggaaggaccggtgatccggnggcagagatggggtccctcccctcctgattcaaaaagacctcctgtgaggccatgaaaccctaaagggaggaggcgcatggtgn

SEQ ID NO: 104935 - DNA, 434 bp, Homo sapiens
  misc_feature (1)...(434): n = a,t,c or g
tttcgtgagctctttgtatatgaaggcaactatccttttgtcacagttcaagcttttatggacatggaaaatgtttacaatataatgttaaaaggaaaaatcctaggatacaaattgtatgtacaccacaaatccagttctagccatgtgtaagatgtgtactcaggttgataatgtttttcctttaaggccactgccgtgcagggacttccctaactctgacacacttgggtggcagtgccatggaactaataatacatctggggctctgtttagggagaatgaaattcattcatacaacatgtattattctttttcttttttttttatctgccacccaggctggagggcaggggggtgatctaagttaactgcaacctccgcctcttgggttcaaacaattttcttgcttcagcctcccaaggagctggaan

SEQ ID NO: 104936 - DNA, 426 bp, Homo sapiens
tttcgtaaaatataaaaattagctggttgtggtggcaggcacctgtaatcccagctacttaggaggccgaggcgggagaatagcttgaatccaggaggctgagattgcagtgagcctgggcaacagggtgagactctgtctcaaaaaaaaaaaaaaggccaaattaaaaaacccccttaatttttctttttttggccaaaggaaaacccatcctttcctcctttatggttaaaaaacacaattccccccattttcaaccacataaaaaccggggggggctgcatttggaatgaaactgaggaactccccaggggaattttgtggcaaatgccaaaaaacccttggcagggtttatcccccaaactttcccaaaaaaaataaaaaaaaaatttgaagggggcccgggccttaacacaaagattcttc

SEQ ID NO: 104937 - DNA, 434 bp, Homo sapiens
tttcgtgggtgatgtcaggggctggcctgtgctcccatgtagtgctcaccccgaggaactggccttgggtggcagaggagaggagaggcctggggaccctgaccctcatctcccatcacctccgctgggctgcgtgaccctgagttacacactaatgattatccccgtcttgcagggatgttggcacctactcagctagagcccaccccccacatacacacacacgcgtgcgcgcacacacacacgcgtgcacacacgtacgcgcgcacacacacacacacacaactgcgcatggctcccatttgacaaaagagcagccagggctctgtaccctgccagggtctagctggtgaccagggctgggcgggagggccatagctacagcccaggcctgggtccattgtgctggcattatcacggctgcacatcccccg

SEQ ID NO: 104938 - DNA, 406 bp, Homo sapiens
  misc_feature (1)...(406): n = a,t,c or g
ggaccaagtgggcatcaggcattcatgagacctctctcaggaggcagtgctgtagagcagacagcacctaaaatcgtcgnncccagaccttcctcacaggggaagcagtcctgtcactggcctcagagcctcacatgcatgagttgctttgccagccagcaggccctgctacattcctcgtggggcaagtactaatgacaggtcaggagaatcaggaaggtgaggcgggggtcctctgagccttcaagaaattagcaaagaacaactctatgggagttaatagatccctttctcggccgggcgtggtggctcacgcctggaatcccagcactttgggaggccgaggcaggcagatcacttgaggtcaggagtttgagaccagccttgccaacatggtgaaaccccc

SEQ ID NO: 104939 - DNA, 399 bp, Homo sapiens
  misc_feature (1)...(399): n = a,t,c or g
tttcgtgggaggaagagatgctgagaatcgagcttgctgatatatttgggggctgctgagatgaaaaggtttagggttattattgtagcctttccttttaattcctctttctgctgctgctatcttctggagaaggaagctggtaagaagctgaggtattgaccacagctgctgcagcttatgaaattcttacaaaattagctacttgagaggctgcggccccagaatggcctgaacctggaaggcttagcttgcagcgagtcaagatcgcgcccctgcgctccagtctggcggacagagcgagactccgtctcttcaccacaaccccgccctggtgctggagggcgcccttccttcttttgaccacccggatacacatccccagctgaaaataatccn

SEQ ID NO: 104940 - DNA, 406 bp, Homo sapiens
tttcgtggaggaggaatagaatttaaaaaattgggatttactattagaaaggaattttattacttttttttttttttttttaaaaaacagggactaggcttttccccccggctggagggcgggggcacaaaaatagttcactgacccctgaactccggggctaaaccgaccctcccgccttggtctcccaggcggccggaactaaacgccccccccccccccccgggtgaaaaggaattttttttttttttaggaagggggtttctttttgccccccaagaagaagctgggggggaaaatatagtttaaggaaaacctccccccccgggataaagagaattctttgccccaccccccgggggtgacgggaataaaggggcccccccaccccccccactatttttgg

SEQ ID NO: 104941 - DNA, 423 bp, Homo sapiens
cgagtatgatctaaacatttatttgtttattgaactaggttcaggagtccaagaggtcttgtgatgtagtcaagtttttaaagtggcagtatgtcttgccaggaaaagaacctggtcttagatactgtgggttctgcttctggtgagagagtcgcttaaattctttttttttcttcttcttcttttttttttgttttttgagacagatgttgcctaagctgctgtgcagtaaagcgatcacagctcacggcagccttgacctcctgggctcaggggatcctatacctcagctttccgaatagctggggctataggtatatgccaccatctctactaaaaatacaaaaattacccagcttggtggcatgtgtctgtggttccagctactcaggaggctgaggcaggagaatcgcttgaacccag

SEQ ID NO: 104942 - DNA, 416 bp, Homo sapiens
attgtcagcaattggtatgcttttaactttcagaaggaacagttaacagaaaagacacaggatgtattaaaaatgaaccagttctgtctacttttgtactttttcacagtaagcattttggtgttggggaaagtatgactacaaagctcaccatcttctaagaggaggaatatattcagctcagtatatttaacgtattttaataagtttttaataatggtaaccatgactcctcggggaaagatatattattcaatgtatctttgaagaaaaaacctacaatacacttttgaaatgttttcatacaaaatggttaacatttaaaagtgtgtatatatcatgggctgggcataatggctcacacctgtaatcccagcactttgggaggctggggcgggcagatctcttgaggtcag

SEQ ID NO: 104943 - DNA, 415 bp, Homo sapiens
agaaaatatggataatcatttttaaaattctgcttaaatatgtcaaagaggctttgaaatcatgatgattagaatggctacaatttcagagacaagaaaaccaaggaaagttgagctgatgattccctacttttttcctgggaatatttgctatttctgaatgtagacagctgggcagagggctacagttatgggaaagaaaagcctgctgaacttaaggtggtctcatggaacagagtcagaatgggaaggaaggtaacttgaggaacttcaaaatacagcctgtcagaagctagaaccattcctctcgagaactgaaacaaaacaaggatgcttactctcaccacgcttattcaacatagtactggaagtcctagcctgagcagtcaggcaagagaaagaaataaaaggcatc

SEQ ID NO: 104944 - DNA, 405 bp, Homo sapiens
cagggttttaccatgttggctagactagtctggaaatcctggcctcgtgttgtttgcccgcctcagcctctctaagtgctgggattacaggcatgagccaccacacccagccagttttttaaaaagtaattatttctctttgttgatatctcacttatttatatgtcattttcgtgatttcctttttagttctttctctgttttcctttagctctatgagcatatttaagacagtttttacaaagcctttttctagttactccaatgcttttgtttcttcaagtgtaatttattttgctcctttgattggaccctgttttcctgtgtctttgtatgccttgcagtcttttgttgaaaactgggcatttgaagaaacagctacttctcctaatttttgcagaccgg

SEQ ID NO: 104945 - DNA, 383 bp, Homo sapiens
gggtctccttacattgccaaggctggtcttgaactcctgggctcaagggatcctcccaccttggccgcccaaagtgctgggattacaggtgtgaaccaccatgcctagccagatgatttttaaaaaggggctaccattatagagttttaagttttcttagtatcttcaatgaaaaataattttatttcatgaaatatccataatgtcactactttaaagacctactttcaataatgtaatgaaacagccttatatgtacactatggcttaagccaagcccatgataagagtaattctgtatactacacacaccaaacatgtaacatcaaatagaatcaaatattattacagtattgaaattttatcttttaacaatgcaagag

SEQ ID NO: 104946 - DNA, 408 bp, Homo sapiens
ccttgacctgtgccccatttccctcctccacctgtctgacctggcattcctattttgggggaccagaagtggggggaagagaaaagatgactgtttctttgctttcaccattcctgcatgccatgcaaaggaaggaatattgcacttttaaatatccgttttattaagtaaatggttactctttcaaggacaaaaaaaaaatgcaaattgttacaaaactggtagtttttgtaagggcaacccctacccgctgctttgtttttttaccaatggcatttgcattttaaggaactactggcccacccttgggggaaaacagtttggaggttcctctaaccactgaaaaaagaggggccacatgatccagcaatcccactgttggatatataccccaaaaataagaaatgg

SEQ ID NO: 104947 - DNA, 393 bp, Homo sapiens
  misc_feature (1)...(393): n = a,t,c or g
ggaaaactaacaaacagaaagaacacccacaccaaaaccccatctgtatgttagttttccccccaacagtcaggaccctcagctgcaggggggaaaactaacaaacagaaagaacacccacaccaaaaccccatctgtatgtcaccatcatcaaagaccaaaggtagataaaaccacaaagatagggaaaaaacagagcagaaaaactggaaactctaaaaatcagagtgcctctcctcctccaaaggaatgcagctcctcaccagcaacagaacaaagctggacagagaatgactttgacgagttgagagaagaaggcttcagatgatcaaactacaccttgctaaaggaggaagttcgaacccatggcaaagaagttaaaaaccttgaaan

SEQ ID NO: 104948 - DNA, 476 bp, Homo sapiens
  misc_feature (1)...(476): n = a,t,c or g
cagagtcctattgatgcctagacgcaccgtcgcaccggnccggaattcccgggtgaagaagccaagacttagcagagaaagctaaggcaatcgtgccactgcactccagcctgggtgacagagcaagactccatctcaaaaaataaaaaaataaaaataaaaaaataaaccttaatgctaacgctgaccataaactagatcctaaatatgacctggtcatgaccctgacttcaaccataacccctaacttaaccataaacttgatctttaccttaaacatttccctgaccatgaagctgaccctgacctaaacctaaccagaacattgaccatgacccagaacctgccctgaccctaatcctgaccgtgatgctaaaccctaatcttgatatcgaaaactaacttgactcatcgtgacatcgattctgaaattgatactcaaactctgaccatgaacctgaccctaatagtgaaat

SEQ ID NO: 104949 - DNA, 407 bp, Homo sapiens
  misc_feature (1)...(407): n = a,t,c or g
ctcatagatggtatctatcagaaaattacagcagacatcatgcattaatggtgaaacattaaatgcagttctattagagaacagcaagagaaggatatctgttgtctccatttctatttgttaatgcagcaagtaaagaaatagaaatgtaatgcaagattgaaaaggtggaaataaactgtcctttactgatggtgtgatttttttttaacctagaaaacccaagaacatgaactgagtaaactaagttttgaaaggtggttaattagaaattcaccattcaaaaactctatagttttggctgggcatcgtggctcgtgcctgtaatcccagcactttgggaggctgaggtaggtggatcacttgaggtcaggaggctgagatcattctggccaatatagtgaaan

SEQ ID NO: 104950 - DNA, 399 bp, Homo sapiens
  misc_feature (1)...(399): n = a,t,c or g
agaagagttgcttgaacccgggaggcggaagtttcagtgagcggagatcgcgccattgcactccagcctgggtaacaagatggaaagtacatctcaaaaaaaaaaaaaggggggggccctttaaaaaaataaatttttatggccgggtctttgagagagtaattttttttaagagggccccaaaattctttctttggggcggccttttaacaggaggggggtgggaaaaacttggggggtccccaattatacccctttgaaaaaatccccctttttcccggggggggaaaaaagaaaaaagcccggtttgncccanacctgttttgccaagacttattcgcctggatttagacttttttttttttgggaacgaagttttctcttcgcgccaggctggaa

SEQ ID NO: 104951 - DNA, 377 bp, Homo sapiens
ttttaatcgataagggattgaggtttaaaatctggcctatacataagcatattcaaaaatttaatgattaaaaaaatctggcctagagaaaagcttatctgaaggtaggtggagaaagaatggcttctagatggaagagatgataaaaggcaggggtttgtcgaaacctcctgccctctcctcatacctcacattaaaatcctcatgacttaaaagagtgagagcgaggaggagattattccttaaatcaagattttcccttgacctccaagttgctgggttttttgtttgtttgtttgttttttgggacagagtctcactctgtcatccaggctggagtgtagtggtgcagtcgcggctcactgcagccttgacct

SEQ ID NO: 104952 - DNA, 392 bp, Homo sapiens
tctgttcattcacttagtgattcttatatgccaggacttgtgctaggaactgcagactcccaaaataattagacattattcttgctgttctagagcccaaagtttattataatacaaatggataaaagtaaattaattcatgcctaaggtgaggataaggagaagctgactaagaggtggtcaagagcagattataaaggagcatgcgtagcaagctgaggagtgtgcacctctcttcataggcgtcaaagaaccacccaaaaacttgacgcattggttgggcacggtggctcatacctctaatcccagcactttgggaggctgaggcgggcagatcacttggggtcaggagttcgagaccagcctggccaacatggcaaaaccctgtgtct

SEQ ID NO: 104953 - DNA, 406 bp, Homo sapiens
ggtttcaccatgttgcccaggctggtctcaaactcctagactcaagtgatccacctgcctacagtgctgggattacaggtgtaagccactgtacccagccattccagaacattctgatgattcaaccataactcatttcatagtataattgagtggataagaagggttggtgtttgctgtctcgccatattaatagttttgtgttggaactccttgactgtcaatcaagtattatgtttgaggaagatgtaaacatttaatacttttaagattaggagaggtttgaagggttttatgtcatgaacacacatattaaggaagaagcatggctctgccctcttgaaagactaaagaaatattccatcagcagtttactttagaagaacttgaagataggttgatactg

SEQ ID NO: 104954 - DNA, 384 bp, Homo sapiens
atgatcttaggtgttattattgtaattgttttaggcaccgtgaaccacgcccttgtaagatggtgaacttaactgatgaatgttgtgtgcattctgactgccccaccaactggccattcccctatctctttccctttccttggacttccctattccctgtgacacaataatattgaaattaggccaatttcaatattaggccaattcaaattaggccaatttcaatattaggcctgaaatttcactggcttcaaaatgtccaagtgaaagaaagagccgcacacttctccctttaaatcaaaagctagaaatgatttagcttagtgaggaagccacatcaaaagccaagacaggctgaaagctaggcctcttgcaccagatagc

SEQ ID NO: 104955 - DNA, 404 bp, Homo sapiens
acgaaagtaaaggagagctacttaagggtatgttttaccaaaaataagaaccctggactaggaaagaggttttaaagatatcttcttctctgaagatacattgttatctttctatcctctgcctcattctgatgcccacgctggagtgcaccgcggcaattatggcttactctaaccttgaactcccgggcacaagctgtcctcccacctgtgcctcctgagtagctgggactacaggtgcatgccaccgtgccccgaccgttctaaaaatttttcttagagaccggattttttttttttttttcacaaatgttacctacccctggtgccacacacctgcagatccggctatcttcaaggctaacgcaagatgatcccttcaggcctagagttaattgttgcct

SEQ ID NO: 104956 - DNA, 408 bp, Homo sapiens
cgggaggctgaggcaggagaatcgcttgttctccgttaaggtggagtttgcagtgagctgaaatgcagccactgccctccagcctgggcgacagagcgagactctgcctaaacaatttaaataaaaaaaagaaaaggaatggggggcgcccggcttaagaaaaaccgttgtctgcgtttttcaccgcgtgtcaccgacttagcatatgggcttgagtatctcgctggcttttctttttccaaacaggacatgcttatttgcctgattacaaaaaaatatgcattctccctatttaaacaaattaggccctatgaacgcataagaacttataaacactaaaactgctaccgggttttaattcacacacaccacgcacacccccacattgttgtcactgcgagaacggag

SEQ ID NO: 104957 - DNA, 473 bp, Homo sapiens
  misc_feature (1)...(473): n = a,t,c or g
gagagggncccgcaactaaanccctaaggnacccgcanngcgngnannttgtaagtacgcactgtgggaggccaagacaggaggatcactttatgcccagagttggagaccaacctgggcaacatagcaggaccctggctcttaaaaaaaagaaaaaagacgggaaaacccccaaaaaaaaaactaaaactttaaagcgggagaaacccttaaagcatgtaaagcccattttggagatgaggaacacacccaggaaaatgaccgggcttccctgaaccccacggttagttagggcaaacatttaacccataacccagcttttttaattcccaaatacttttttttttacgggcacataaaaaggggggaggagtcagggcttggggccccacccctacagtcccacccctttgggaggccaaaggggggaattgcttgaacccgggagttggaaaccaccctggccaacacag

SEQ ID NO: 104958 - DNA, 419 bp, Homo sapiens
gcgggagaagcctcggtaggttagaagctgcttcatcgaagttgcagatcaatatgaaaatcacctcggagctggtaaagggaggcctaacccctgtctttacattgacagtccaatgcttcactcagccattttacctcacccccactgagtgtagccgaccgttgactattctctacagaccacaaagacattggagcactatacctattattcggcgcatgagctgcagtcctatgcacagctatcagcctatttattctagactggctgggccagccgtgcaatcttctacgtaacgaccacatctactacgttatcgtcacagcccatgcatttgcaagaatcttcttcataggaatacccatcataatcggaggctttgggaactgactagttcccctaataatcggggcccg

SEQ ID NO: 104959 - DNA, 412 bp, Homo sapiens
  misc_feature (1)...(412): n = a,t,c or g
ctagctgcccctttgccaggcggcctgagcagcccctgccagaccctcctctgcactcctctgccaggttaataaagcactgacttgtttctcaaaaaaaaaaaaaaaaggggcggccgttttaaaggatccaattttacgtccgcgggcatgcaacgtaatattttttttatggggcccccaaaataaaattcccgggccggggtttaacaacgtggggaggggaaaaacccgggggtaaccaaattaaatcgcttgggnnncnnnnnnancnnnnnnannncccttttccttggggaatcgtttatccctcctaaacaacaaccgaacactgccctatccccccccacttcttttttgttagacgtgcgaatatagctcccgcccgacatttttttttaaacctgtcctt

SEQ ID NO: 104960 - DNA, 1078 bp, Homo sapiens
gcgtccggcattcccgggtcgacgggaggcaggagggaaggatgataattagcattttgcagagcttagaatgtcacctgtgtgggtattttataaatgccttttcattataataggagtcatatatagatacatttagtcatcgatttatcaatcccgttttgacatgttcactgtttaactacattaattatggggtggaagctctcaaatacattgcgaagtctagaaaggctaaaacagaggagaggagggtcctattgtttgggacacagacccaggataaaggggaagcctgagaatgtgccatccttcagatggaaagatgccatcacccacacacataatcactggggtgtatacttaagttgcttttctgacataatgaggtggggtagagaaaccctttcccttcccatcactcccccaatcttaggacacacttgcagggatgtctggaactgcatggagggccacacggaggggcttggtggttgagggagcgtgctttagaaaccaacacagctaaagcttatgttatgtctagctgcatcacttactagccatgtgatcttgggcaagtcacttaaccttttctaaacaatattcccttctataaaatagagatattgatagcacctacctcactgggttgctgtgaagattaaatgagataattcatgtgaaatgcttaggacagtgtctggtaggcactaagggcccaataaatgttggctgctaatattattaaaacaatttggtatgctgggggatgtcttagaagtatgtagagtagaccaggtacagtcgtcacgcctataatcccagcactttgggatgccaaggtgggcagatcacttgaggtcaggagttcaagaccagcctggccaacatggtgaaaccctgtctctactaaaaatacaaaaattagccgggcgtggtggcagatgcctgtaatcccagctactgaggaggctgaggcaagagaattgcttaagtctgggaggcagaggttgcagtgagccgagatcgcaccactgcactccagcctgggcaacacagtgagactctgtctcaa

SEQ ID NO: 104961 - DNA, 420 bp, Homo sapiens
ctgtcctcaaattgcttccagtcttattgggcagatgagacacactctagtgattaaagcatatgtactcatttacaaagcactgaatacttaagggcactgaatacttaagtgtgctagttataattaggttcagttgtacatacagcaactatacaacagcaaaaccccaaagaatagtgaattaaacagcagaaaaatttatttcttgctcttgtgaaagaactggtgcagctactttggaaaacagtttggcagttcctcaaaaagttaaatatagagttactatgtgacccagcaattctactcctaggtatatatccaagagaattgaaaatgtatgtccacacaaaaacttgtacatgaatgttcatagtagaattattcataaaatccaaaaagtagaaacaacccacatgt

SEQ ID NO: 104962 - DNA, 452 bp, Homo sapiens
  misc_feature (1)...(452): n = a,t,c or g
attgaaagtcgaacgcctgcgcgaccggcccggannnnnnnatcgacccacgcgtccgtgttgatggacatttaggttgattttatatctgtgctactgtgaatagcgctgcaacaaatatataagtacagttatctttctgatacactgatttcttttcctttgcatagatacccagtggtgggattgctgaatcagacagagccaatagacgatcagtaatggtggccaatcatcagctagaaacaaagtatttagcagtgcttgaaaacaccaaaactctgagaccactgaccttccaaaacttcaacagccctgagtgaaaagtccaaacacatttatccaccattcaaagaccctttattttctgtcctctgtgcatctcagtagtctctttttaccacactgtctatatactgcatgacccatttacgtgaaactatctgacactc

SEQ ID NO: 104963 - DNA, 465 bp, Homo sapiens
  misc_feature (1)...(465): n = a,t,c or g
ntttgaaaacttcgagnaccatctggccagngcggnggnnnnnncgttgggtcacagaggatgtcacaatagccaccaataggcagtcccctagtcccatatataccaagcccagccttgtctagcccccaggctcctagaatgggatcacacccttgcctcatccccagcgcttcctgccatccaccccttgaaacagattttctttccctgctccccactcatttctgcctggctgtgttcaccaaggagagattctcaccccctcccccatctccctatccacgtttctagaaattcctaaggtcttaaaagttttccttttttttaccccctttccttttttttggaggcacggtcttgctgtgtctctcaggctggagtgcagtggcgcaatcatggctcactgcagcctcaacttccctgggctcaagcgatcctcccacctcaacctcctgagagacg

SEQ ID NO: 104964 - DNA, 456 bp, Homo sapiens
  misc_feature (1)...(456): n = a,t,c or g
cgatgcggaaaaannaaactgagaccactggagagcccggnggaattctttcaccatgttggccaagatggtcttgacctcttgacctcgtgatccgcccacctcggcctcctgaagtgctgggattacaggcgtgagccaccgcgcccagcctcggatggacattattgaactgacgcaactgggtcattgcccagctctggaaccacatgaatcaggaccaagccaagtcaggctcctgcttcctggggactttggaacctggcccaccacccaccaaggtctcacccctcctgccccatggccaaccttatctgctccacactgtcttcctttgatgggggttctcctggcactgggcctggaggctggtgtccgcttggcctttctggcagcccagcccgggcagtcttcaaagacagcagctgcagccttcaccctctggccacgggcatt

SEQ ID NO: 104965 - DNA, 485 bp, Homo sapiens
  misc_feature (1)...(485): n = a,t,c or g
gggcgtttgagtccctatccagtgtcgtggaattcgttgcttgaacccgggaggcannnnnngccccgagccgagatcacactactgcactccgtcctgtgcgacagagcgagactccgtctcgaaaaaaataaaacaatgaaggaaaggtaggcatacaccatactgactgccacctactgcagacagcacccactcctacctaatccccaggaaagcctgagaggaggctgctatcaacaaccccccaatacagatgacaaaatcaaggcctggagaaattaggtccttgacctgagatcatcgagggtcattctgtgctagacactgctcctaacacgttgcatacatttctctttcagtctaaacaagcaccctttaaggtagggactgttaagatctccattatgcttcatgttttttttgcttgttttttgagacggagtctcgctgtgtcacccaggctggagtgcagtggcgcgacc

SEQ ID NO: 104966 - DNA, 402 bp, Homo sapiens
cgctgtgttgctcaggctggtctcaaactcctgtcctcaagcaatcctcccatcttcgcctcctaaatggctaggattataggcgtgagccactgcacctgctctgataaggtttaatgcattaaaattttaaagttctattctacaaaaattttgttaccaccagtaacaaaattaaaagaccagggaagatttgcaatgcatgtagctaacaaagattagtatctagattatatccataggccaataagataagaattttagaaaagtggatagagaatatgaaccagcagttcacagaataaaaaaccatattggcagttaacatatttaacatatgaatagatgctcactctcaataatcagataaattacagattaaaatgatacattttcacattt

SEQ ID NO: 104967 - DNA, 409 bp, Homo sapiens
ctttcatccacgccatccaaaccttctccgcatcagcaataaaactgttttggtgtctcatcatttgtgttttcactagagtagcccttttaatttccttcaagaacttttcctttgcattcacatcttgactaactctttggcacaagaagcctgcttttcagcgtgtcttggcttttgatatgccttcctcactaagcttaatcatttctagcttttgatttaaagtaagaaacagagccaggcatggtggctcacgcctgtggttccagaactttgcaaggccgaggctgggaatctccgaatcctaggagtttgagatcagcctgggcaacacggtgggcacctatttctacaaaaaataacaaaaaaaatacccaatgtgctgtcgcatacctgttgtttcagc

SEQ ID NO: 104968 - DNA, 397 bp, Homo sapiens
tgtaaggaatagcagtggtgtgtataaagcagagcgcacagccagcaactggcccctagccacactgctgagcacctactgtgataagctgccattgtggtgtgtgaagcaaaggggaaacatgcctgctgtggtgagcttcctgtagggcaggttgtacaaccagaggtgggttccaaggttacaaagggactcttagtgtattagtctgttctcacattactataaagacctacctgagactggatcatttataaagaaaagaggtttaattggctcacactggctgggtgcggtggctcacgcctgtaatcccagcattttgggaggccaaggccggcggatcacttgaggtcaggaatttgagaccagcctggccagcatggtgaaaccctgt

SEQ ID NO: 104969 - DNA, 401 bp, Homo sapiens
agacaaggtctcactatgttgcccaggctggtcttcaactcctgagctcaagtgatcctcccgccgtggcctcccaaagtgctaggattacaggtgtgagccaccacgcctggcctgatatgagtatgttgaaccatccttgcttccctggaatacaatccatttgatcatggtgtattatcttttgatgtgcagctggactcagtttgctagtatttcattgagaagccaggtcacatgggttccaactaaggaagacactgagaagacattggtgcaaatctagaaggattataacatctatgactgcatcaataaccttgcttgggcttgggatgatgtgaccaaggagtgtatgtatggtatctaaaagaagacactcaagaggttcatctatgact

SEQ ID NO: 104970 - DNA, 403 bp, Homo sapiens
  misc_feature (1)...(403): n = a,t,c or g
agctttctttccttctctaatatgtctattttgaaagttattccttggtttccctatcttacatggctcctcttctcccccttgattgaaggtccctagtttaactcataaagtatcagcattagtaagcagtaattctttctgagtgatgtacttagtgatctttcatatgaatatgaaggtggcctggcgcagaggctcactcctccactcattccagctgggattttacaaatcccagcactttgggaggccgaggtgggcggatcgcctgaggttgggagttcgagaccagcctggccaacatggggaaaccccatctctactgatncaaaaaaagattaaaaagggggggcggccctttaaaagaaaccaagtttactaacccgggcatggcaatgtt

SEQ ID NO: 104971 - DNA, 396 bp, Homo sapiens
  misc_feature (1)...(396): n = a,t,c or g
cccacgcgtncgcccactcttccttcctttccctggatttgtctgtctttgctacatgtccccacccccgtgctgaaacacagactggacacagattcagcactttgctgcctctctctgcattgtaccctaagtgagactatttcaaaaaaaaaaaaaaaaaaaaaaaaaaaaaaaaaaaaaaaaaaaaaaaaaaaaaaaaaaaaaaaaaaaaannnggggggggggcccttaaaaaaaaaaaatttttccccgggggggggggaaaaatttttttttttttttggggcccaaaaaatttttggggggggggggtttttaaaagggggggggggaaaaaaccccggggccccccaaattttgggggggggggaggggnnnnnnngnnngnnnnan

SEQ ID NO: 104972 - DNA, 393 bp, Homo sapiens
  misc_feature (1)...(393): n = a,t,c or g
aacttattgaaccaccgctgcgctgtctgttcattagcagttcctgggccaaatgtgttgttgatgttctgagttgtctccgctgctttaagacccattttgaactcaaataagaagatttctcaaatttactttatgtctaacatcatttccattgtctaagataaacataaacagcaagtaataagtcattagcaaaaaaatataaggtgagaaatgcccattaaaatgatttataacataaccatatttatgtaagaatgtattccaatatcaaatggcaaattccaacaatgcaaaaattggaattcctttttcacttttctaattttaaggcagggactatctatttatcttgtaaatctcaaatgatcaaatgaaaagcattttgcn

SEQ ID NO: 104973 - DNA, 389 bp, Homo sapiens
tgtaaacattcaattcttactatgtggtgagcactatgctagactctcaaactgtaatggagatgaaatcttttggagctggcagtgtactaggagacaaacattgatcaaataattctctcagtaagtgtatggacaaactgaattaaactgaattaaatgccttgaaggaaagtttcttgcatcccttagagcatggcagggaagagagggggctggactaggggtgggagaagactgccctggagaaattgacatctgaagaatgaatagggccaggcacagtggctcacacctgtaatcccagcactttgggagaccaaggcaggaggatcgcttgagcttaagaattcaagacccagcctgggcaacatggtgaaacccccatc

SEQ ID NO: 104974 - DNA, 389 bp, Homo sapiens
agaaactgggaaccttaccagcggaagataactgcctacatctcaaactcagggttgaaagctaaatcgctccaacaactctggtgcacatacgggatccgagatgatagggatgctgctgcaggaggattacctgaacccagtcatttgaagctgccataagctgagatcccgccaccacactccagcctggacacaaagcgagatcctgtctccaaaataactaaaatagataatatcaaaaataaaactagaagaaaatatgggtgagttctatataatttgggggtgaaaaggatttgtgaggcatatcacatatcataggcagaaatcatgaaggaaaagagaaaagatttgaatatgaaagaccaggagctttcgtatgacca

SEQ ID NO: 104975 - DNA, 395 bp, Homo sapiens
  misc_feature (1)...(395): n = a,t,c or g
atagaaggaaggaaggaaggaaccccccccccccccaaaaggaaaattttggccaccttcctttcttttaaaagggcaattctttccccttggggggcctttgttcaaaaaagtttttttacttcaagaaattccaccaccacccttgcttaaaagaaaagggggggggggaggaccctgcccccaaaaaggggggggccctttccattttaaaagggggggggccgttttaaaggatccaagtttacgtccccgggcgggggagagaaaaatttttttataggggcaccaaaataaaattcacgggccggggtttaaaaacgccgggaggggaaaaacccgggggtaacccaactaaaaaagggggtgggggnnnnnnnnnnnnnnnnnnnnnn

SEQ ID NO: 104976 - DNA, 410 bp, Homo sapiens
  misc_feature (1)...(410): n = a,t,c or g
cccacgcgtacgaataacttgaccaacggaacaagttaccctagggataacagcgcaatcctattctagagtccatatcaacaatagggtttacgacctcgatgttggatcaggacatcccgatggtgcagccgctattaaaggttcgtttgttcaacgattaaagtcctacgtgatctgagttcagaccggagtaatccaggtcggtttctatctacttcaaattaaaaaaaaaaaataaaaaaaaaaaaacggggggccccctttaaaaaaaaaaattttttttaccggggggggggggggaaatattttttttttggggcccctaaaataaatttcctgggccgcgttttccaaccgggggggggggaaaacccggggcgttccccatttaagggggcgtgggggng

SEQ ID NO: 104977 - DNA, 408 bp, Homo sapiens
  misc_feature (1)...(408): n = a,t,c or g
tttcactgtgttggccaggcttgtcttgaactcctgacctcaggtgatccacccatttcggcctccccaagtgctgggattacaggtgcgagccaccgtgcccagcccctttggggtttttatggagtcttcattacttaggcatcattgccctttggtgatcaacttaaccttcagcccctttcccctccctggagattgggggtgggcctgaaagtcccaaccctccaatcatgccttggtttttccagtgactagccccatctctttaaaaaaaaaaggaaaaaaccaaaaaaataacaatgngcggggggggccctttaaaaaaaaaaaattttaaccccgggggggggggaaaaaattttttttttttagggcccacaaaaataaatgcgggggccggggttt

SEQ ID NO: 104978 - DNA, 406 bp, Homo sapiens
tgtatgtttaaccttttgaggaactagtttctgaagcagttgcatcattttaaattcccatcagcaatgtatgtgggttataatttctctatatcctcaccaacagttgttattatttgtctgtttggttatagccatgttaagtaagtgtgaactgatatttcttcatgatttccttctttgtttttttctttaaatttttgagacagggtcttgctctgtcgcccaggatagaatgcagtggtgcaatcacgccactgcaactccagcttgggtgacagagtgagaccgtctcaaaaaaaaaaaaaaaaaaaaaaaggggggccctttttaagggaccaatttttacgtccccgggttggcaaggtaatattttttttttggggcccccaaaatcaaatcccgg

SEQ ID NO: 104979 - DNA, 412 bp, Homo sapiens
aagtgaccaagttcaagatgctggcaggcttatttcttctgaggcctctctccttggcctgccgacagccaccttcttgctatgtcttcccacgggctttgccctgtgcacacgtgtccctggtgtctttcttcttttaaggacatcagtcatattgcgtgagggtcccacccttgtgacctcattttaccttaattacctccttaaagaccttgtttccatacagtcacattggggtttagggcttcaacctatgaattttggggaaacacaatttagtctataacaaaagttagtttgaaaagaaaaagaaagtatgccgggcatggtggctcatgcctgtaatcccaggaatttgggaggccaaggcgggctgatcacttgaggtcaggagttcaagaccatcctggcc

SEQ ID NO: 104980 - DNA, 401 bp, Homo sapiens
acggggcggctggccgggcacagggtctcctcacttcccattaggggcggccgggcagaggcgcccctcacctcccggacggggcggcttaaccaggatggtcttaatcttctgacctcgtgatctgcccgcctcggcctcccaaagtgctgggagtacaggcgtcagccactgcgcctggctgtaatcagtggatttttaacatgagggcttatttaatatctttataaggacatggtgccgttgcagttggatttaatcactattacagcaatgaatactgtttaggtgttctttacttactgatttaacttccccctctgacggtttgtgtatctctaatgctacattcatcttcctctcatcatgtaattttatttccctcaaccagggtgcaatag

SEQ ID NO: 104981 - DNA, 389 bp, Homo sapiens
  misc_feature (1)...(389): n = a,t,c or g
tgcatttcaatgccactggtgccatgtgcctctgagttcggaagctggttcggtagctggaacagcccaccccagtggaaattctacacagggcaaaatctgcacttgtttcgatgggaaaaagggaaaagtccctttaaagaaagttggtcctatgggaatgataatttataacagctgataattaatctagacatcaccatattttatcttgatgtttatatttcttctaatcctgctttgaattgtatcattccttaagtaagcaagtaaatgttagtaaataaaaaaaaaaaaaaaaaaaaaaaaaaaaaaaaaaaaaaaaaaaaaaaaaaaaanaannngggggggggggccttttaaaaaaaaaaaataataaccgggggggg

SEQ ID NO: 104982 - DNA, 415 bp, Homo sapiens
  misc_feature (1)...(415): n = a,t,c or g
cggacgcgtgggctcattaactgattacagagttggtttgaagacatagctataaccattctctaccatgcttcatagagaccccatctctccnnaaaaaaaaaaaaaaaaaaaaaaaaaaaaaaaaaaaaaaangttcccccggggggggaagccaagccggggccccccccttccaaaaaaaagggggggggaagaaaaattcccccaaggaaagggggggtccaaaaaaaaaaaaaatttgccatggaatttaacgcggggaaaaagaaaaaaatcttggtttaaaaaaaaaaaaaaaaaaaaaaaaaagggggggcccttaaaaaaaaacaaatttaacgccccggggggggaaaaataaaatttttttatgggggccccaaaaataaaaataggggccgggttataaaaa

SEQ ID NO: 104983 - DNA, 504 bp, Homo sapiens
  misc_feature (1)...(504): n = a,t,c or g
tgctgggattacaggcgtgagccaccgcacctggccgctagcctggcctattttttatttttatttatatattttgagagacggggtctcactgtcacccaggctggagtgcaatgatgctatcatatctcatctcagccatgaactcctgggttcaaaggattctcacgcctcagccgttcaaatagctaggactaaaggcatgcactactacgcccagctgtctcccattttatttacctatgaggaaactaaggaacagagaggtcaagcagcttgcccaaggtcacagagccagcaaggattttgaatttcatccaaatgtaatgggttgcaccaaaggatctaatgcaggtcatgtttaagagctggtccctgccttccaaaaaagagagaaaaggccngcgtgtggtggctcacacctgtactcccaccacttttcgaggccgaggcggtggatcacctgaagtcangagtcaagaccacctcgccaatgaagttaag

SEQ ID NO: 104984 - DNA, 385 bp, Homo sapiens
gtttctccatgttggtcaggctggtctcaatctcccaacctcaggtgatccgcccgcctcgggctcccaaagtgccgggattacaggcatgagccaccgcgcccagccacaaattactattttttttttatacgaagcttagatgagaagctttacacttgggtttagaaggaggggaaataatctcatggcatataattcacatggaacaaaggactggcttcttaaaacttaaaaacaggaaaaacaagtttcacactcccacaaataataaatgttaaaccaaagaatatctttggatttcagagacatttatgaatggaggtacaagaatgtgctttcaaaataactattttctttctaaagcttgttacaaggatttttg

SEQ ID NO: 104985 - DNA, 389 bp, Homo sapiens
aatctgcccaccttggcctcccaaagtgttgggattacaggcatgagccaccgtgccagccatgataacatcttatttctaatttgagtttcatatttgttatacttgatttctcagtcattggtggtcgatagccactgagctccaacagataatgcagccctgtcagacattaaaatattcatactttttctttcacatagggaaataatcttccaagtatatacacatagcagttacattatatcattatggttttgatttgcatttgtctaatggctaatgatgttaagcacctgttcatgcactgattggccatttatttatcgtccttggaaagatgtctattcagatccatttgtcattttattgattgagttgtaagagtt

SEQ ID NO: 104986 - DNA, 384 bp, Homo sapiens
cggacgcgtggggagtgatcctgtctataggtctgtgatccaggactggggacttgtggaacccggggctctactagaacagggcgaggatgcctttcctccttaggagcttagtattatttttttttggagacaccgtttcactttgttgccccggctggagggctggagtgcgaccttgactcactgcaacctcagcctcctgggttcaggtgagtctcgtgcttaaacctccggagaagctggaattacagttgcgcaccaccacgcccagcttcctttttaggatcttaaaagagagatgttggtaaaattgggagcacgacccctagcaagaggggagtagttcttttttttttttacagaggactgcaaggccggccg

SEQ ID NO: 104987 - DNA, 399 bp, Homo sapiens
  misc_feature (1)...(399): n = a,t,c or g
ttttagtttctgacatcattagaatctcagtaatttttttcaggccattccttggccaaaagaaatacctaacagttacatttattaacttatgttctaacaactctagtagccatttgaaaaaaactatacacacacaagagcaaaagtgatgtgatgatttttttaaaaatagagacagtgtcttggctctattgcccaggttggagggtcatggctcattgtgacctcaaactcctgggctcaagcaagcctcccacctctgcctcctgagtagcggagacttcaggcacgtgccaccacgcccgcctaatttttttgtagagatggggctctggctgtgttgcccangctgtaaggaactcctggcctcaggtgatctgccttggcctaccaaaa

SEQ ID NO: 104988 - DNA, 397 bp, Homo sapiens
aagctggatagagccagggtccctgagttcaccacccagagcaaagtcacttgtcgatcagaaatacagaactagttttggacttgatgtgagaaatcttttactgtatcatagtagcaagcattaccccaaccaatacctgtgctcatactgctacagtttttttttttttttttttaagggacggggttttgttttgttgcccaaattggggggcaagggggccattatggttaattggagcctccaattcgggggttgaagccatcctcccgccgaaccctccggggggggtgggactagggggggcaccacaatgcccagctgattttggggttttttgaaaaaacggggtcttgttttgttgtccaggctggtttaaaagccctggcctaaa

SEQ ID NO: 104989 - DNA, 379 bp, Homo sapiens
  misc_feature (1)...(379): n = a,t,c or g
agaccccatctcaaatatacaagtaaacaaataaactcttacataataaaattaataaattccctctgttctggcagggggactaaaagctaattataagtaagtcctcaagtccatggaagattttagctttccatgtgaaagaatcttctacaaatctttggctagctgttttcacctcagaggtagctcagccaagaagtctccttccagattgtgacctattaatttctgtgtgtgtgtggcatctggatctttttaaagcttcttaggctgagccgggtgtggtggctcactcctataatcccggcactttgggatgccggggcggagggatcacttgagcccaggagttttataccagcctgggcaacatggn

SEQ ID NO: 104990 - DNA, 464 bp, Homo sapiens
  misc_feature (1)...(464): n = a,t,c or g
ggctgagccnttatcgaagccgtacgtatgccctcgganncgcaanncngggncgacccacgcgtccggccagaaagtctcccacagtctgggttttttcagtttccacccaggctccctggatcctggtgtcttggatgccagtgtgggtcagtgtggcaaacacctaaggctttgcatttgcaggaccatctattccaaggtggtggagagaagcacagactcctactcctcattgtaaccagcttgagacaggctccagaacagcacccatgactgtccactttgttctttattgtagaaaatagaaaggcctacttccacgacatcgggaaagtcagcctcctgttgtcacctaaaagattttcggccaggcacggtggctcacgcctgtgatcccggcattttgggagactgaggtggatggatcacctgaggtcgggcgttcgagaccggcctgaccg

SEQ ID NO: 104991 - DNA, 404 bp, Homo sapiens
aatttttcttcctctttccttgcttccttgttctttttgtctttctctccttcctgtttttctttcatgtttcactgcagctggtcttcttccagggagggcttgggacagtgcctggcagtgagttcccctccagccatgagcttttctgactccctcagtgctaacgctccctccctctgctaccaggggacctgcatgcacttgattctagccttaacagctctcctgtaggacaggtgtgtttccctaaggcccagctggtcatgattttcacatgattactccatcaaaaagtacagaaacagggctgggcgcggtggctcacgtctgtaatcccagcactttgggaggccgaggtgggtggatcatctgacgtcaggatttggagactagcctggcca

SEQ ID NO: 104992 - DNA, 417 bp, Homo sapiens
ggaggtctccctctattacccaggctggtctcaaactcctgagctcaagcaatcctcctgatcacttggccttccaaagtgctgggattacatgcgtgaaccaccacgcctggcccctcaaattaatttttatgtattgtaaggtaggggtcaagattcattctttttctatgtggataaccaactgctctggcactgccgactgaaaaaaccactttcccccactaaattcagtagtgttcttacctcaaatcaaccaactgtatctgtggggtatttttctggattttctactgtgttccactggcctatttatctttgcaccaacatgcggtcttaatttaatgtaacattatagcacatttcaatagctgaaagtgtaagttagccaacttttgaggatgacaaagtctttat

SEQ ID NO: 104993 - DNA, 380 bp, Homo sapiens
atgggagtttcgctcttgtcacccaggctggagtgcaatggcgtgatctcggctcactgcaactgccacctcctgtgattcaccttcaagtgattctcctgcctcagtctcccgagtagctggtacaggtgtgtgccaccatgcctggctaccacctttctaatttattaaaaatacatggttgaggcttactgagtaggtcaagttcatttctaaagtttatttcctcccaattaaagtggttagcaactggagattgacgtgctagaccagccagatgtcaatattattggttgtttacttacccaacattctaaaaacctcaaatcactttctaaaacttaactttataaactttataattttgccatataaataga

SEQ ID NO: 104994 - DNA, 382 bp, Homo sapiens
acatgtctagtcccacctactgaggaggctgagttgggaggatcacttgagcccgggagatcaaggctgcagtgggttgtcatcatgccactgtgctccagcgaaaaatctaggtgtttctttctgaatatggactgtcctcccgccatctcattttattgtgaaaagttacaaagatagtaaaggtgaaagaattttacagtgaacacccatatactgatcacctggattctacttttagcattttattatacttgttttatcagactatatgtctgtcttttgatgttttcaaagtaaattgtagataccaatacacttctgcctcagaacttcagcatgcgttgcacaaatcttaagtggatatttcccattaacggcg

SEQ ID NO: 104995 - DNA, 401 bp, Homo sapiens
  misc_feature (1)...(401): n = a,t,c or g
ttgcctgataaagggcatgttaaattaatgtgatcacaacttatctgaggtccatttcctattacgtgatgtggaaaacatggtgtgaatttaatcatccattcatttctaaaccatctcaaatatctgttacttctgcagatggccaatttattcatttcccaattccttttaacttgtgtttcagagcctctccttttctgatactgtcaccaaatcataaaggttgggagactgcatgaggtaaagcagatgcgtggtactaaaaaacaggagaaaatgtttccatactggaataatgataaaaatgtctgtccaggtgtgccggctcatgcctgtaatcccancactgtgggaggctgaggtgggtggatcacctgaggtcaagagttcaacacccc

SEQ ID NO: 104996 - DNA, 389 bp, Homo sapiens
ctcggcctcccaaagtgctgggattacaggtgtgaaccaccgtgcccagtctagccatttcattcttaaaaaaaataatctccatgactggagtacagtgctctcattcttagaccaaacacagaatgacttaggacttttattccttttggagtgatttttccaacaaaactgtgagaacacagtggtgcacgcttacctttatgggttttgtttttttgtttttggaagttttctttttgcagctttaccatgaggagggtcccttttgcaaaaatatctcaggcctttggtggcttttcttttttctttttttttcttttcttttgagacagagtcttgatctgtcgtgaggctggagtgcaatggcatgatctcagctcactgcc

SEQ ID NO: 104997 - DNA, 420 bp, Homo sapiens
tcaccattgatgggatagcaaccttgaaagatttccttataccgccacccctggtcatcttgtactgggtgtctcctaaggcttcatgagtgacatatctatgacccattctcaggagtagagatttctgctgatctcatccatttcatgttgattcttactagtttttttctccagaggttagctttattttggaaactgtgtattgaatgtagatagtaggtaattgtcatttatagtgtgccagatttaagacttttttgggaagtggcaaagaaatgggcttaattagagtgtttggcagtaataaagttggacataaaaatgaaggtcatggctaggcgcagtggctcacacctgtagtcccagccctttgggaggccaaggcaggcagattgcttgagctcaggagtttgagac

SEQ ID NO: 104998 - DNA, 413 bp, Homo sapiens
ctgtatactacttaaagtaatttcaggtatttgttctacattttgggaaaagttgccatgaatgatgggggcaggggtggatattaggggttttaggaaggacaggacactttgagatttatgttttagaaagattcactctggctgttgggcagagaaggatggcagaaaatggactggaagacagggagaccagctaggggctgttgcagttgtctcagagagagtctgaaccaagggtatgcagtggagtatagaggaagggaaaaatatgaggggcattcagaggtggaatttgataggaattataaaccagtggcatggggccgggtgtggtggctcacgcctgtaatcctatcactttgggaggccaaggtgggtggatcacctgaggtcgggagtttgagaccagc

SEQ ID NO: 104999 - DNA, 425 bp, Homo sapiens
aaagagatgtagaactgggatggcagtcaaagaaatgcaaattaaaacaacacggagttgctgtttttacctttcagactggcaaaggccattaagtctctgtcttggcatcagtgcttctattggcacagctttagtggaacaccccatgggtgggagtgtacactagcactgccttcctaggtggcagattgtccataggtatcaagaggcttgacattttttcagactttggtcccagccattacatgtctagaaatttcttctaaggggataatctgacatggacataaagattatgtgcactggctgggcgcagtggctcgcgcctgtggtcccagcatcttgggaggccgaggcatgtggattagttgaggtcaggagttcgagaccagcctggccaacatggtgaaaccctgtctctt

SEQ ID NO: 105000 - DNA, 387 bp, Homo sapiens
agtgaatcgagatcgtgccactgtactttaatctgggtgaccgagctagactctgtctcaaaataaaaattaaaataaattaaattaaaaataagttatacattttgtgtttaataattggatggaaccaaaactctagacaatataacaaggagaaatggcagtagttttcagtggataataaagtatttaagatctttgtaaggagaaccaatatggggaataagttaagaatttgttagaaaaatgtgcaattcagcatatatgttaagaattgaaggataattaccaaaaaactaaaataagacaaaaagaatataacctaaaacttccaaaccaccagacgaaggaaaacaagattaaagaataatccatctattctacaaa

SEQ ID NO: 105001 - DNA, 382 bp, Homo sapiens
  misc_feature (1)...(382): n = a,t,c or g
cggacgcgtgggcacctgttggtcagggtggtctcgaactcctgacctcaggtgatccacccgccttggcctcccaaagtgctgggattacaggcgtgagtcactgcacccggccaccaagcagccttacctttgtcagtttctactactactctcttggacaaattgtcttttgtgtctccttgcttgagtcctccttttctcttacacaaactccttatttcgagatccaattcagatgtatcttcctgttgaaattcctgtcatttttggagatgccccttcagagttttcgttccttctactgcatttctttttttttttgaaaaaaaagtttcacttttgttccccaggctgganngnanngncccaatatcacctg

SEQ ID NO: 105002 - DNA, 388 bp, Homo sapiens
  misc_feature (1)...(388): n = a,t,c or g
caggggcctggagctgcaggatcccaggggaggggtctctctctgcatcccaagccattcagcccttctcgctgtacccagtaaaccctcaataaatatctttgtcagccagaaaaaaaaaaaaaaaaaaaaaaaaaaaaaaaaaaaaaaaaaaaaaaaaaaaaaaaaaaaaaaaaaagggggggggggggttttaaaaaaaatatattttcccccgcggggggaaaaaaaatttttttttttttggggccccccaaaaaaaactggggggggcggtttttaaaaaggggggggggaaaaaaaccggggggcacaaaaaaatataggtgtgggggaaanataatngggaggcacaaaaagaagaaatgcttgaacccacgagggggan

SEQ ID NO: 105003 - DNA, 397 bp, Homo sapiens
gcggggtttcgccatgttggccaggctggtctcaaactcctgacctcaggtgatccacccaccttggcctcccaaagtgctgggattacaggtacgagctactgcgcctgatcgtgatttgttaagtttcatttcattcatttattttaaaaagtacttaaggagggcctgtgtacagaaactctgtttggccctgggtgaccaagattgaccagggtttctgctcccagggaacttaaagtctgagttaaataattggaagtgtgcagtctttcattcagtgatttattcagccatgcaccacgatgtatcagttagatgctttgaattgctagtgtcataaattccagttcaaatgggataattgataaaagcagttaagtggctcacataaccc

SEQ ID NO: 105004 - DNA, 382 bp, Homo sapiens
ccatgttgcccaggctggtctcgaactcctgggaacaaacaatccacccacctcggcctcccaaagtgttgggattacaggcatgagccaccgcacctggcctataagtcaactttttcaaagacctcatggaataaatgaacaggctaatatataattctggattttccttgattaacctgtaaattaggtggatcacaattcctggcactcagatcaccagcaaatctcttttgtttttcattttattattggaacttacagaacagtatttatataccaataccacatattcatatacttgtacccccagattcctctaaaactggacaaaaggagatccagttgggtctatgggagattccaaactattcttgtgaag

SEQ ID NO: 105005 - DNA, 431 bp, Homo sapiens
gcgatttccttctctgcgtatgaagcatgtatgtgtggcacactgttcaaggtgctgaaaatcaaactcttctcaaggagctcatgagcaatcaagggagatggatgggtgagccactgattatcatgtgacaagtggggtaatagagatatgactaaaatgctatccaaagaactgaaaaaaaaaaaaaaaaaaaaaaaaaaaaaaaaaaaaaaaaaaaaaaaaaaaaaaaaaaaaaaaaaaaagctgggggatgaagaagaggataaagaatgacaatcatcttgggggggggggggggcgcttataaaaaatatattattcccgtctcgcgcggcgagtggtttttttttgagtttgttgaaatataaaaaattgggggcggcggtttatataatattaggtgagaaaacaattctctggctctaacc

SEQ ID NO: 105006 - DNA, 254 bp, Homo sapiens
  misc_feature (1)...(254): n = a,t,c or g
tntgttnnncnnggtggtctctaactcctgacctcaagagacctgcctgccttggcctcccaaagcggggggattacaggcgtgagccacctctcccggcctggaaaataattattaatgcgcgtagtgtgggaattattctctaacatgtttgagaattgaaaattaaatattttctaaactagatagggagctatagagcatccattactagccctgtcattttatagaaacccaaaatggngagttacttg

SEQ ID NO: 105007 - DNA, 411 bp, Homo sapiens
  misc_feature (1)...(411): n = a,t,c or g
ngggggtacgcgccttgtgtttccaactatttgtaaggctcaggggggaggatcgcgtgaacccagaggcggatgctggggtgagccaagatcacaccactgtactatagtcagggcgacagagtgagaccctgcctccaaaaaaacaccacataaccctggcttcatgaaacctacctcctagtaatctacacaggaaccctcatcctcaagtgcaggtgtacatctggctggtagccaccctgcctgtcacttggattctcttcatctcccatcctcccactctggctgaggtgatctctaaatctctactttcccatcaggctgctcatggcctgtacccagcttgcttcagcctgtctctctaacttcactccccagtcctctcctatgagaactttcagcttcttg

SEQ ID NO: 105008 - DNA, 395 bp, Homo sapiens
gggtttcaccatgttgttcaggctgatctcgaactcctggactcaagtgatccacccacctcggcctcccaaagtgctgggattgcagacatgagccattgtgtctggctggattgacagcttttgattttctttatccttaagggttgatcaaattttcctggttctttatataacaagcaattttggaatacagacttgacattttaaatattatgttgtgagactagggccacccttgggtcaaagctgggagagaaaagaggaaaaattttaaaacagaacaaaatggaaaactgccccacttagcagattgcttctgcaagttttggcacctttcttcaatctgtctgctgttattggaacttttcagagctcttgggtggtggctattt

SEQ ID NO: 105009 - DNA, 478 bp, Homo sapiens
  misc_feature (1)...(478): n = a,t,c or g
agggtgtacgccccccccccccggatagaaagtcgtacgcctgcagatagaaggctgtacgcctggggtacacccacgcgttcggcgtgacgttaacatgtgtagcatcccttcaacacttgctgatctcctctttgaacaggagagcaggcctcaaaggctcaaagcttttggcaaatgacacatggagtcaagatttattaacattgctctgtttttgtaatatttactgttgccattattgcccagttatgacaactgagacaggtttttcatttatggtagtaaaaataaaaaagcaaggccattaaaggaaaaaaatattacatgccgctcttttttttttttttttaaaagggagttttgttttgtcccccaggttggagtgcggnaccaaaatttgggctcactgctccctcccccccccaaatataagcaatccccctgcctcatcctcccaagagggggggactacggc

SEQ ID NO: 105010 - DNA, 398 bp, Homo sapiens
cggacgcgtgggaaaattttaggtaaagacaggatcagcactactgattgttccttttgcttcacgctctagtgtggcttggccttgtcagcagttactggtccttaaaccctagtccaggaaagtgggaagccattaataggctgcctttgggttttggtttgttttgatacgattcttgagacagaggcttgctctgtcccccaggctggattgtttctttgcgaagtcggctagctgccaacctcgccctccctagttcaagagagtctgctggctcagcctcccaaagagctgggattacaggtttgacctactgtgcgcggccggactggtatgggtctacttatcggtgagccgcttacatataaatgagaagaaccagccccccccccccg

SEQ ID NO: 105011 - DNA, 396 bp, Homo sapiens
atggtgtttcaccgtgttggccaggatggtcttgatctcctgacctcgtgatctgcccacctcggactcccaaagtgctgggattacaggcatgagccaccacgcccagccgcccactcttatttcttacttcacaaatgaaacagaggctgagtgaggtcacatgtcaagcccaaactcctctatgagttaaacattagtcaacagtgtgtactgtgtgtgcatggggcagaggaaagaacacccaacagggaatctaggggctgcctggaactccagctcctcctcattttgtaatgcattcatttattcattgaataaatgttacttgagcatctactgtgtagatacatggtaaataagacaggtgagggccctgctccattggagctcaaa

SEQ ID NO: 105012 - DNA, 390 bp, Homo sapiens
tcttgagcttccaatattgctactaaatactctgatactattcttattcctaatcctttatatataccttgttttctctccaaatgcttttagaatcctttttatcaccattgttcttgagtctttttcatttattctgttggtacctagcaagccctggaaatattctttaattctgagtaatgcttttgtattatgtatgatgatttcctcaccaccatttcctctattttctctttctacaactcggattaataaaaaattagatttctggctgggcgcagtggctcatgcctataatcccagcactttgggaagccaaggtgggtggatcatctgaggtcaggagtttgagaccagcctgaccaacatggcaaagccccatctgcg

SEQ ID NO: 105013 - DNA, 414 bp, Homo sapiens
  misc_feature (1)...(414): n = a,t,c or g
aaatagtnnnnccttgaaaaaaaccctgaatgtctgttttcagaaggatgggtggatagattgtggtatatccacacaatggattaccattcagcaaaatgaatgaacgacaactctataactgtgtataacaactggatgaacctcatgacttaatgttaaagaagcaaaataagaggaatagatagagtgttatggaacaaggagggaaagattagtcctaactattgaacatcttggaaacttctctgagaagttggccttgagtgtttcaaatcacattttgtattaagaatttttggccaggtgtggtggctcatgcttgtagtcccagcactttgggaggctgaggcgggaggatcacttgagctcaggagtttgagaccagcctgggcaacatggtgaaaccctgtt

SEQ ID NO: 105014 - DNA, 489 bp, Homo sapiens
  misc_feature (1)...(489): n = a,t,c or g
cgcantacncggcgncggnntccnnnaccttggacctagangtcatcgaccgnacnacagnnccggaannaccggggcgacccacgcgttcggtctggctgaacgcggtggcttatgcctgtaatcccaacactttgggaggccgaggcgggtggatcatgaggtcaggagatcgagaccgtcctggtgttaggaataacactcaaaatcctaaggaaattgaacactcaaacaaaggattcttagcaaagcaatttacttctgcacagaggggtgcctcattggccagtcgccatgagagcacacctgaacaaaggggcacgagagcctttattcctgacgcaagtcctgcccctgtacctttttcccattggctgggggcgggtcgtacaatctaaactaatcccgggtggctaaacatttgatttttttttagataaggtgggacgacagtgaaatctagagtaaaaccaagctggcccaaggtgg

SEQ ID NO: 105015 - DNA, 366 bp, Homo sapiens
cctaccccagcctcccgagtagctggtactacacgtgggcaccaccatacccagttgagtttgattttttttttaattttgccaggagaaaccccgctattggcctcgtgtggtggctcatgcctataataccagcacttccagaggccgaaaatcacttgagcccgggaggtcgaggctgcattgagctatgactgcaccacttcacaccagcctgggcgagagagcaagaccctgtctaaaaaaaaaaaaaaaaggggcggccgttttaaaggatccaagtttacgtccccgggcgtgcgaggaaatagtttttttttagggccccctaaattaaatccacgggccggggtttaacaacggcgg

SEQ ID NO: 105016 - DNA, 393 bp, Homo sapiens
  misc_feature (1)...(393): n = a,t,c or g
aaatttaattttaattaaccacatatagctggtggctactgtattggccagtacaaaaaaggagccatttcagacaatcgtattttacagggatgttgtggaaagagttttgggttcaaacacattcttaacattttaatattctagcccctagccgagcagctttgggcaaatcatttaactagagtgacccttgtttcttcaggtgtaaaatgggaatgaaaaataacttctgttgttgtgagcaacaactgaagtcccctagactagttgtatatatatttatttgagacagggtctcactctgtctcccaggctggagtgcagtgttgccatcatagcttactgcagcccagatctcctgggctcaagtgatcttcctgcctcagcctn

SEQ ID NO: 105017 - DNA, 399 bp, Homo sapiens
gctgaaaacgacaggaaatgtactacaatctcactcaagggtggccttgaaagagagtggcaaggcaaaaccctcctaatgggcagggatttgggtggtgtagctgttcacccattttgtatggacagagcagagctcaaggtgagaatatatacaaacttttgggtagtggtgaatggcctggccagctgatcatagatgtggaaagggaacaattagaagactggagacaaggagatctgggcagaggcatgtggatgacaaaggcaagagtacacaaagggccaggcctggtggctggtacctgtaatcccagcactttgggaggccgaggcaggtggatcacctgaggtcaggagttcgagaacagcctggccaacatggtgaaaccctgtttct

SEQ ID NO: 105018 - DNA, 420 bp, Homo sapiens
agatgataccaaaagtcccatttgaaatccacatgataagcaaaaccatggatcagtttgcttagggagaattatgaagaaagagctccatggccaggctgtatcttggaaaatcaccacaggaagtaaaagccagtcagggaacaatgaagagggcagaaagagaaggagaatattgtcctgtaatggaaacaggaaggatattgaaagagtcaggggtgatcacaaccggagcaagtaagtaaaaaaaaaaaaaagggggggccgttttaaaggatccaagtttacgtccgcgtgcttgcaaggaattagtttttttaagggggcccctaaattaaattcccgggccgggttttaacaacgttgggaggggaaaaaccttggggttccccaatttaatcgctttggagcacatccccg

SEQ ID NO: 105019 - DNA, 405 bp, Homo sapiens
gagttgcagctaaaaattaggtgaagaataggaaggtcctcattgataacccattaaaatgagtatttaggactgaaccaagagaggtgattcatctttctgtctgtatagaatttggataattgactcagtaatgaaatggaaccaatcaaaagctgctgctgctgctgctttttttttttttttaagggggaccctcctttttttgttcaggctgaagggaaaggttggggcctcggttatttgaaacttttgcctccggggttgggggggttctcctgcctcaccctccaaagaagttggaatggaaggcgcctgccataattccgggttattttttgtttttttagaaaaaaggaggttcccccttgtgggccaggagttcaaaaccacccgggccaacag

SEQ ID NO: 105020 - DNA, 496 bp, Homo sapiens
  misc_feature (1)...(496): n = a,t,c or g
ggagccgggggncccaaactaaagctaacgcatcagcnaccggnccggaattcccgggctcacaaactcttactatgattggtggactacctacggccggccatgactacttcctcatagctgccccttcccacaagcggacctgaggaccctttggccctgtccttcaaacccaccccctttccttccaccctttctggaatgatatacacaggccacccatcccctgagcacactagccacctaatgcccgccccacctgtcaataataataaagcatgccgcttttttaaaacatgaaaaaaaaaaaaaaaaaaaaaaaaaaaaaaaaaaaaaaaaaaaaaaaaaaaaaaaaaaaagggggggccccttaaaaaaaaaaaaattttcgcgccgccggggggggaaatttttttttttttttgggggcccaaaaaataaatgcggggggcgggttttaaaacccggggggggggaaacccccggttcttcccct

SEQ ID NO: 105021 - DNA, 415 bp, Homo sapiens
cggacgcgtgggcagcaatgtatgaggtccaaggaccaggaccaaagggaaaaacagccatctcaccagacacctgcctacgaccagatgcgtcatctccaatattaactaactccctggaacctggactcaaggtgtgaaataaagggtaatgggaaaccgcaggagaatcacttgaacctgggaggtggaggttgcagtgagccaaaatcgcatcattgcactccagccagggaaaaaaggcaaaactctgtctcaaaaaaataaataaataaaataaaataaaacaaggtatagcaaataaaggagcattccttcttgaaaaaaaaaaaaccccaaacaaaaggggggggggctttatatgatacaaaattatcctccccgggcaagagaaaaaattgtttttttttaatgc

SEQ ID NO: 105022 - DNA, 410 bp, Homo sapiens
cggacgcgtgggcaagatgacgccattgcactccagcccgggcgacagtgcgagactctgtccaaaaaaaaaaaaaaaaaaaaaattctttttggggggttttccaaatttagggaagggggccggcttcctgtaaatccctatccctccccaaaaaggctggaaattttttaaaaagagggggggggaatatcctttttagcccgggggcatttttatttaggggggaaaaaaaggtttaaattttggggaaggtggggtaactttgaaaacccttttgacggctttttaaggaattaccaccagggaacacctggtatttttttcacctttggagaaaattttgaaaagacggggccccgggaaaattcttggccttataaaattcgggcccccgtgagccccacaaa

SEQ ID NO: 105023 - DNA, 422 bp, Homo sapiens
gagacagggtttcaccatgttggtcaggctgttctcaaattcccaacctcaggtgatccacccacctcggcctcccgacgtgctgggattacaggcgtgagccactgcacccagacaggattattcttacttatttatttataggtctcaaagcatttttaaaaggtcacaatcaatctaccgttttatgtaaagcctttaaaagagacagtaagctgaatgatccatttagttattttttggtgaggaaggggtggtaggaagaagagaatgtcatccatgtttcttaattttctttttttgtgtggatttttctttttttctattaaaaaatggatggcacaattttttttctataaaaaacctgcactctatcctgggtgacagagtgagacgctgtctcaaaaacaaaaaacaaaact

SEQ ID NO: 105024 - DNA, 406 bp, Homo sapiens
  misc_feature (1)...(406): n = a,t,c or g
ctctcctgcaccagggtaggttgatgcttggacagtggggaaatggaagaacaaagacattgctgatgagggagaatgtagggaaattcccagctgagccttcgtgctcagccttgggtgtgtggctccaggcccttgcatgctatccagggctagtgagaagacagtgagcaaaccactgggaaaaaaaaaaaaaaaaaaaaaaaaaaaaaaaaaaaaaaaaaaaaaaaaaaaaaaaaaaaaaannngggggggggccttttaaaaaaaaaaaaaatttagccggggggggggggaaattttttttttttttttggggcccaaaaaaatatttcggggggggggtttaaaaaacgggggggggggaaaaacccggtggccccccaattattatgggtggggcacc

SEQ ID NO: 105025 - DNA, 390 bp, Homo sapiens
gggtttctccatgttggccaggctggtcactaactcctgatctcaggtgatctgcctgcctcggcctcccaaagtgctcagtaatggcttgagccactgcagccggcctctgccattggtatcttaaacagtcttgaatttaggatgcatagatacatattttaatactagtattttacttcattgattccatctgaatagtttgaaactcatgttttcagcagtggacttaaaaagcggatatcccttatgcattctgaatttttcagtaagcagatatttttctttatctggacacctttatgttgtcacttttatgcaaatctttttgttatatgtatttatgaatgtggtgctgacaagaacatccactggttctcatttttacct

SEQ ID NO: 105026 - DNA, 366 bp, Homo sapiens
taaaaatagaggtccctttcaactttaaagttctaagatcctataactatgtagaatttattaaataaaatgttacttgcatacataattacatataagttgtaaggaaagttcaagaacttcaaaacatttgtgtttgtattaaattcagagtgtgtttgtattaagtgctatcattacacttagggcgttttctaaaaacataacctgggtaagagttgcccatacttcttagcaccagaagagggggatgtttttatttttagaattgtcctgtattcaattaaaaaatgtttttcagctgggcataatggcttatgcctataattccagaactttgggaggccaaggcaggtggatcacttg

SEQ ID NO: 105027 - DNA, 370 bp, Homo sapiens
  misc_feature (1)...(370): n = a,t,c or g
gacactataattagctcatttctgagctgctaacccagaccagatagtctaaccctgcagtgaatgtgaaaaagccttgggatttacctattgaatttattttcctccttaagcccatagggaagctcagaacacttttgggatgacagagctacataattatggtaccattattttcctgttagagatggcctgacgatcctagtcacctatcagttgaaagccattagaaggcttttgacccttaaaagtaggtcaggtgcagtggctcacacctgtaatctcaacactttgggaggcagaggcgggtggatcacctgaggtcgggaatttgagaccagcctggccaacatggagaaacctcatctcn

SEQ ID NO: 105028 - DNA, 404 bp, Homo sapiens
agaaataatgatttcctaaagtttcaaggtctctccactgttgattttctgtgttatgaaggtggaacagagattaagggattaaccatcaacgatgctttctgtggctttttaagttggtcattgctaaaaaaattatgtaatggcgcttgctaaagcacttcaagataggtataggaatcacagcaatgagattttgcagtggggaagagattgggttcaactctaaatgcagcatgggcaagttggaatttatagccaaggaggagggtggaggccagtggataaaaaaaattcccagctgggcacagtggctcacacctgtaatctcatcactttgggaggccgaggtgggtggatcacttgaggtcaggagttcaagaccagcctgaccaacatggtgg

SEQ ID NO: 105029 - DNA, 408 bp, Homo sapiens
  misc_feature (1)...(408): n = a,t,c or g
cgcccttaccacgctactcctacctatctccccttttatactaataatcttataaaaaaaaaaaaaaaaaaaaaaaaaaaaaaaaaaaaaaaaaaaaggggggggccccctttaaaaaaaccaatttttcccccccgggggggggaaaatttttttttttttttgggccccctaattttccttccgggggggggtttttaaaaggggggggggggaaaaaccccggggcccccccattttatggggtgggaaaaccccccccttttggggggggggttaaaaaccaaaccccggaaagnnnattattnctatgaggggagggaattggataaaacacattcatagaagcggggaagaatatcttttttattgtgcacctttgtaaccatcacccgcgcccatatattg

SEQ ID NO: 105030 - DNA, 416 bp, Homo sapiens
cacaaattgtattctatggaagacaaatactgatagaaaacatccccctaaatagtataggtggtttcatttgagggttgagtgcatgaatgtgtgatgtatagcaaacaaacaaatcagaaagtgaatatttttaaaagagcttcgtattaattagtaagaacaactttagagtgtaactggcatcacacctgtaaaatgtaactaatcttttaaaatgagaactagtggctgatgatttatcttgtacatttatgtttcaggagctagaaaagaacattaagcactgaactacaatatatgtgttgccttttgattaaaagcaaatctatttttaagtgaaaaaaaaaaaaaaaaaaaaaaaaaaaaaaaaaaaaaaaaaaaaaaaaaaaaaaaaaccccccctccctcccccg

SEQ ID NO: 105031 - DNA, 394 bp, Homo sapiens
  misc_feature (1)...(394): n = a,t,c or g
ccaagtgcttcgcatactgaaccatataaatgtgctgcttttattggtcaaaacggccaaatattggcaattttatattggttagcttcatagtatgtgagctaggatacttatcccatcagagaggttgcgtagcacagtgaatcagagcccaggctctggggccgcacacctgaggtccagccctggctctgccacttgtcactaagtgattgtggactggagacaaccctcaggggccttgggttcctaatctgtgacagggatgacaataatgacctcctcgtgctgttataaaatacagaaatgtactaaaatacaaaaattggccaggcatggtggcacatgcctgtagtcccagctactcaggaggctgaggcaggagaactcaggn

SEQ ID NO: 105032 - DNA, 388 bp, Homo sapiens
cccacttctcccttcatggcctgaaccagtgtttcaggggccttagaattttatttttggtttacagcagcgtttttttttttttttttttttggaaagggggtttggttttgcccccgggtgggggggcgggggcccatttttagttaatggcacccttggccccccgggtaaaggggattccccggcccccccccccttaggggggggaactacgggcccccccccccccccggggttattttttggtttttaaaaaaaaagggggttccccctggtgggccgggggggccccaattcccggccttggggacccccccgtttggcccccccaagggggggggattacgggccggaccccccagggttttttgattttttaacagcc

SEQ ID NO: 105033 - DNA, 419 bp, Homo sapiens
cagagtctcgttccgtcgtcaggtggaggttgcagtgagccaagattgcgccattgcactccagcctaggcgacagagcaagactgcgtctcaaaaaaaaaaaaaaaaaaaaggggggcaggttattaagggcccggggggtttaacttcccccgggtttgagtcccaaaaaccattttgcccaggaaacccgtgtttgtggcccccctggaaaaaaacaggcccccagggggggttggttttgggcgggcttcccctcgggaaacctttccagggccggcccccattgtcggacccaccgggcccccttgaggacccgaaattttcccacaacccttggggtttgggaattaatttgcctgcccggcttccaagaaccggcccagggttggagccgggggctaataatccaattcggg

SEQ ID NO: 105034 - DNA, 403 bp, Homo sapiens
cctcatacaggagggtgcttctctgggactaagcttccagattaaggatcaggcagcaatatttgctgttttgcaatctttgttgttctgcagcctctgctggtgatacccaggcaaacagcgtctggagtggacctccagcaaactccaacagacctgcagctgagggacctgactgttagaaggaaaactaatagcagaaaggaatagcatcaacatcaacaagaaggaaatccacaccaaaaccccatctgtaggtcaccaacattaacgaccaaaggtagataaaaccacaaagatggggagaaaccagagcagaaaagctgaaaattctaaaaaccagagtgcctcttctcctccaaaggatcacaactcctcgccagcaatggaataaagctggatg

SEQ ID NO: 105035 - DNA, 400 bp, Homo sapiens
cggttacttgcagggctgaggtgggaggatgacttgagcctgggaggttgagcctgcggtgggctgtgattgtgccactgcgctccagcctgggcgacagagagagaccctgttttaggggaaaaaaaaagaacgatgatgagttattgccacccacctatgagaatggttgaaaaaaaaatagttggtgatatcaaatgctagtgaggatatggagaaactgggttcctcacacattgctgatgggaatgtaaaatggtccagatactctgaaatatagtctgacagtgtcttaaaaatctaaatgtacattcaccatatgaactagcaattgtactcctgggcatttatccaagagaaatgaaaacttacatcttcacaaaaaaaaccagtatgtgaa

SEQ ID NO: 105036 - DNA, 401 bp, Homo sapiens
cccacgcgtccgcccacgcgtccgcccacgcgtccgcttattaccgcttgtgtgcttatcctaaaagttcttttctatatccttcctcttttcttctggtggtttctaacttccctttgaatatcttagatactaccattggtcctaaagcaacagagactttatttataaaacatgtcatgcatgatgtaataagtatgcagctcaaaagcaagactttttataattacttttttcttttatcattaaatgtattctattttgttctctcctgctgcaaaagaagaaaaagatctcagctgggcatggtgtctcacatctgtaatcccagcactttgggaggccgaggcaggtggatcacttaaggccaggagtttgagactagcctggccaacatggcg

SEQ ID NO: 105037 - DNA, 384 bp, Homo sapiens
atggtggcatgtgcctgtggacccagctatatgggaatctgaagcaggattgcttgagcccgggaggtggaggctacagtgagctgtgttcatgccactatactccagcctgggtgacagggtgacagagtgagaactgtctcaaaaaaaaaaaaaaaaaatttccgggaccccggggggggggggaagaaattaataaaaacccctcaaaccctggggaaaaaattggcccttgccccggggtggggaaacgggctttggggaccctattttggcggttttttgcaaaaaaaaaaggaccacctgccctttaggtggaatacaaccacttttttagttactacaaaaacggtgccggacaaaaaatttaaaattttttttttg

SEQ ID NO: 105038 - DNA, 402 bp, Homo sapiens
caccagtggaggctgcagaacagcaaatattacagaacagcaaatattgctgcctgatccttcctctggaagcttcgtcccagagggtcacccacctgtatgagtagtctgtcgacccctactgggaggtgtctcccagttaggctacatgggcgtcatggacccattcaaggaggcagtctgtctgttctcagaactcaaacactgtgctgggagaaccactgctctcttcagagctgtcagacagggatgtttaagtctgaagaattttctgctgcctttttttcagctatgcccagcccacagaggtggagttctatagaggcagtaggccttgctgagctgtggtgggctccacccagttcgagcatccaggccactttgtttacctactcaagcctg

SEQ ID NO: 105039 - DNA, 398 bp, Homo sapiens
caggctgttctcctgcttcagcctccacagatgcatgccaccatgcccagctaacttttttttgtagagagggagtttcgccatgttgcccaggttggtttcaaactcctgggctcaagccatcctgttgcctcggcctcgcaaagtgatgggattagaggcatgagccaccgagtccagccatgaatttgtatttctaagaccctaagacctgggagcaggagcatgagtgagtagatcctagcaagaagttctgacacgcactgggaaaggcagggaagccagccgggtgttaacaggtgaatgaagaaagtaatctttttttctaacctgagactccaaggtaggtttgatctattcagaaggtgagatgttctttgatggagtcaggagagaag

SEQ ID NO: 105040 - DNA, 385 bp, Homo sapiens
tgggcacctgtaatcccagctactctggaggctgaggcaggagagtcacttgaacctgggaggcagaggttgcagtgagcagagattgtgccattacactcctgggagacagaatgagactccgtctaaaaaaaaaaaaaaagggaggtggccctaggggggggggtttatgcctgaaactccagcattttgggaggattgtttggggccaggatttccaaaccaccctgcaccaaaaaaaacccttgtttattaaaaaaaaatttgggggttggggggggagtttcatttcagcccaggagtttagggctggagggagttataataaagccctcccctccagcctgtttttaaataataataaattttaaaagtaaaaaatttt

SEQ ID NO: 105041 - DNA, 462 bp, Homo sapiens
  misc_feature (1)...(462): n = a,t,c or g
cgcccgtggggaatgatagcgatcgacggcgctcccgngccggaantcccgggacgacccacgcgtgcgcggtaacatcccacaatgcttggctaattttttgtagtaacagggtcttgccacgttgcccaggctggtctcaaactcctgggctcaagcaatccccccgtgtcagcctcccaaagtgctccatattttttgtttgggttttaagtgggaggtgaggggacaatgaatttggctttgaacatgttgaatttgagatatatttccccccagtcattggagntcatattatctctggcttttcctctctcactcccacatggatggcctgctttctatcattttccccacataaaagaacaggatttaattttagcctctcttgtaagtctgtattatatgaccaatctcttagccccctgcctagtccactcaggtgcccagccacaattccag

SEQ ID NO: 105042 - DNA, 425 bp, Homo sapiens
  misc_feature (1)...(425): n = a,t,c or g
tctcactatattgcccagtctggtctctaactcctgggctcgagcaatcctcccacctcagcctcccaaagcgctgggattataggcgtgagccaccgcacccggcctcaatttttgtttatacatttttttaagtatcacctaattctttatttttgtaattttgagataatttatatgccaacaaattcgcccttttaagtgaaggattcagcgactttcaattccacagcattccccctcnnacctaanaaaaaaaaaaaaaaaaaaaaaaaaaaagggggggggccgtttaaaagaaccaaattttacggccgggggaggggaaggttttattttttttttggggcccccaaaattaatttcgggggccgcttttaaaagccccggaatgggaaaaacctggggtgcccccacttattcct

SEQ ID NO: 105043 - DNA, 419 bp, Homo sapiens
tattgtgaatattgcaatgaatatgagagtgtggttatctctttgatatactcatttatttacctttggacaaatagctagtaataaatagcttgcacctctggtctcagctacttgggagactaaagcaaggggatcacttgagcccccgaggttgaggttgcagtgagccatgatcactccactgcattctagcttggttgacagagtgagaacctctccctcctaaaaaaatccttaagaaatgtgttgatgcctggttcccttggtcagaattttcatttgatgtgttgagagtgtagcacagatgttggaatgaacctctcaagctgattttaatgtgcaaccaagtttgagaaccaccaaggaagagtttttatgaattaagattcctatactctatcctagaactaatacag

SEQ ID NO: 105044 - DNA, 439 bp, Homo sapiens
ctgtaatcccagctacttgggaggctgaggcaggagaatctgagattgcgccactgcactccagcctaggcaacaagagcaaaacttcatctcaaaaaaaaaaaggaaggaaggaaaaaggaatttttcccacactggcagggacaacctaccccagcccttgtttttccccagcctaggactcactttatattcaaggtttccatcttcagcctgaaaaaaaacagggagcagttaccatacactgtacagacccaatccttacttcccctcaattcccactggggccaggtagctaacttgaaaaagcaggaagccccactggcacttggttaggcaagggcctgtcaaaggtcaggggcaaacaaaatcctctattcacccccagcatagcctttatgaagggaaggcctataaggacacagggagtcacccattt

SEQ ID NO: 105045 - DNA, 401 bp, Homo sapiens
  misc_feature (1)...(401): n = a,t,c or g
gatatgtttttttttgggaggggtgatgaaaatattcagaaattagatagtgatgggggttataacagccttgtgaatataatttttaaatccactgaattgtgtacttgaaaatgctgggattacaggcgtgagagaccgtgcccggctccaaatatatgtattttttaattgacttttttttttttgggcaaaaagttaaatcaaagtttttttttttttttttttttaaaaggaagtctggttttgccccccaggttaaagggtgggggggcatttttgtttaattgaaacctaaccctccaaggtaaaaataattctcctgcctcaccctcctagagagctgaaactttaggcttgggcccccatgccaaactatggtttgtttttttaaaaaaaan

SEQ ID NO: 105046 - DNA, 409 bp, Homo sapiens
cagggtttctccatgttggtccagctagtctcgaactcccgacctcaggagatccacccgcctcggcctcccaaagtgctgggattacaggcgtgagccaccacaccttacctcttgagagattttttgtttgttttcatttccaaccatgcttttttgtttgaatcccccgattgcttgacacttgtcttttcctataatgaggtttgtgacagtgaacaaggccccaggtcacctgctcttggtgccagtctctgttaacgctaccccagcgcctcaaacagatgaggctcacgggccgggatcatacaggcacggtcagtgccaggcaggtcttggccctttgctttggttgacttggttgataatcacggcaatcttctgaggctgggctgtgactcctcttgcc

SEQ ID NO: 105047 - DNA, 413 bp, Homo sapiens
agatggggtttcaccatgttggccaggctggtcttgaactcctgagctcaaggaatccacctgtcttcagaagtgctgggattataggcgtgagcccgtgggcccggcccctggctgttaatattcactgacaatgtgattgtgtattcacaaacaatgtgattgtacatgtggaaaaatcagaatctggaggtaaattgttagaataaatgtctttagaaagaaatatgaaaaatttcttttttctttgacccaataattccgctctcaggtatatatccaatagaaagaaatacgtgcacatctacattgaaagtcatatataaaactggtggtggctcatgcctgtggactcagcaacatgggagaatcgcttgaggccaggagttacagatcagcttgggcaacataga

SEQ ID NO: 105048 - DNA, 374 bp, Homo sapiens
ctcaaactccagggctcaagccatttcctacctcaacctcctgagtagctgagactacaaccatgcaccaccacacctggctaattttttatttttttaagaaatggggtctcactgtgttgtctagtctgatctcaaactcctggccttaagcagtgctcccgccaccactgggaaggttgtttttaaagaaataatgtattagtctctagtgcattcaatacagtaagaatagatctaatactctaatactctgcaaattcttttacaagtggtgggaagacatttctgcagaggaaaataatctcaagtcatggtaaaaatccacttatggatgtgcacatttgaaatactacaaaaagaagaaaatagag

SEQ ID NO: 105049 - DNA, 423 bp, Homo sapiens
ttggaaagatcacttgagcccaggagttagaggttgcagtgagccgagatcacaccactgcactccagcatgggcaaaaaaaaatgagactcttgtttaaagaaaaaaaaaaagagtttagaaagggccaatattctttataaacggtaaattattattcagaaattatcattactcacttataaccaccagggatacggtcttttattccttccatgggatcctgctgctttggaaacaaccggagcttacaatttaaattgggcggaaattgaagctttcggggagagatagggagacttagaagaaattggggggacatctctgaaaaagatggaagcaaagcctaaaaactagggtttgattaaaaaccagtttaacttgtaaagggtagcaaacgttgccccaaaaggcgaggaaggg

SEQ ID NO: 105050 - DNA, 422 bp, Homo sapiens
agctgagatcacgccactgcactccagcctgggtgacagagcgagaatctatcttaaaaaaaaaaaaaaaggggcggccgttttaaaggatccatgtttctttccccggccgggcaaggtaatcccttttttatggggcccctaaaatcaatttccctggccgttgtttaacaacgccgtgaggggaaaaacctgggggccccccatattactcgcctgggggcacatccccttttcgccggctggcataaaacccaaggcgccgagttttaaggcttaatttgaaaaactatataacatccttttgaattttagttgaaatggttacatacaaaatttttttgcagagtaatttttaccattcttttttttttacaattggcctaaagcttttgctttaaaacttttttttatttttaggg

SEQ ID NO: 105051 - DNA, 416 bp, Homo sapiens
ctgtgtgtggaaatcaaacaacaaaaaggcaccgccatgtgtagctgcgttacgctttcggtggaaagatgacatggatgaaatggcccctgggaaacactggggaggcctgactagcaaggtgcagagtgggggattaatggggagatacacagggcctcttactaaaactgagaatagcattctgttgaagaacccttattttgaggctgggcacagtggctcacgcctgtgacatcagcacttggggaggccgaggtgggaggattacttgaggccaggaggtcaaggctgcagtgagttatgatcaagccactgcactttcacctgagtgacagagggagaccctgtctctaaaaaattaaaaagaaccatatttgggggatgatatcatccctaaataataaagatagctg

SEQ ID NO: 105052 - DNA, 398 bp, Homo sapiens
cggacgcgtgggcggacgcgtgggcggacgcgtgggtcgcgatccgcctgcctcggcctcccaaagtgctgggattacaggcgtgagccactgcgcctggcagagagttttaatctagagattgtcccctgcttgttcctgtcctgtctggctaaggttctggaatcccggagctgaagaccatgttggcgggtgtgatcttggaggactacctggatatcaagaactttggggccaaggtggtgggcctctcctgcaccctggccaccggcagcaccctgttcctgggcaaagtgggccctttcgtgcacctgtctgtaatgatcgctgcctacctgggccgtgtgcgcaccacgaccatcggggagcctgagaacaagagcaagcaaaacgaaatg

SEQ ID NO: 105053 - DNA, 398 bp, Homo sapiens
cccacgcgtccgcccacgcgtccgcggacgcgtgggcggctactcaggctgaggcaggagaattgcttgggcagggaggcggagtttggagtgagccgggatggctccactgcactccagcctgggtgatagagcgggaccctgtctcaaaaaaaaaaagaatttcaagatattacatccttaatggggagctttaaaactaaatagataaattacttatgatatataatcataaaagaaatcttcccttaaataaaactttggacttaagataaatatcaaaatccaaattattaattatctggaataaattgtagggagaatacatgacaacttttgggcaccaagtaaatttattgcagaatagtgtaacttatttttaaaactaaactgaaaac

SEQ ID NO: 105054 - DNA, 411 bp, Homo sapiens
ttgagcaagatttttggtgccatttttccaataccgtgcgctcattttgagtccctatgtcacattttgaagctgaattgctgcaatctcatgattaaacctgaacagatgtggagttgcttcttatggatgagtaaagaaagtggtttcttgagctggaaactactcctggtgaagatgatgtgaacattgttaaaatgacaacaaaggattttggatattccataaacttagttgataaagcagtatcagagtttaagaggattcattcctattttgaaagaggttctgctgtgggtaaagtgctatcacacagtatagtatgttaaggagaaatctttcatgaaaggaagagtcccttgatgcagcaaatttctttattgacttttattttattttatttttctgaga

SEQ ID NO: 105055 - DNA, 404 bp, Homo sapiens
cttttgactatccacagcggagggaaatttctgttctttgagggtaggagggagccaatagttaggtctcatgaatatggtaggtgatcaaaccactgattcaagtcattgtttcatgttataaacatggactgagccagctactacatttcagtagaaggtactgtagattcaaaagtgaacatgggtctggcatttcagaaagacacaggttagtgagataaatgactataaaaagaggtagcactgtagactgatgtcctgtaacagaggtacacgtgtgctgttagagccaagagggggtcaaaataaaaagacagggcacggtggctcatacctgtgatcccagcactttaggaggctgaggtgggaggatcacttgaggccaggagttcaagaccagc

SEQ ID NO: 105056 - DNA, 482 bp, Homo sapiens
  misc_feature (1)...(482): n = a,t,c or g
ggctgtcccnncgtnnncaacactgaggccatacggaaggcatcggnacggacccccgggncgacccacgcgtccggtctcgatctcctgacctcgtgatcctcctgcctcggcctcccaaagtgctgggattacaggcatgagccaccgcgcccggcccgattcagtagtttctattcaggttctttattaaactatcttgctaaaatcataaaaagagatgcattttgtatttaattttcttcaagtgacctaggtaactgctcctaaagtcttgactagaattagnttgctttatatgtcttttcttcaagaaaacaagaggaaaggtggggttggcagggaaagaggagatgttggtcaaacccagatagaaagtttcagtcagacaggaggaataagttctggtgattttattacacagcatggtggcaatagttaataattatatattgtatatttcaaaacagctaaaagagggg

SEQ ID NO: 105057 - DNA, 416 bp, Homo sapiens
  misc_feature (1)...(416): n = a,t,c or g
tgacagttgagatattctctaaggctatttatgttctctctaccatgctcgtcacaagcagtcttctgggtcctcacaagcagtctttattgtttatatttctattaacaggtctgttcaaggcaacgtaaacctttcctaccatgttcctcaaaattcttccaagctccttcactacccaattccaaaaccacttccacattttttggtatttgttataacagcaccccacttccaggtactaaagtcttttagttttctattcctgctgtaataaaacccacaaatttcatgcttaaaacagcacgtgtggggcgcggtggctcacatctgtaatcccagcacttcaggaggctgaggtgggcggatcacttgaggtcaggagttaaagaccatcctggttaacatggtgaaan

SEQ ID NO: 105058 - DNA, 424 bp, Homo sapiens
  misc_feature (1)...(424): n = a,t,c or g
cagcttttctgctttcccagaggaattctccccagcttttctgctttcccagaggaattctccccagctttccttctcggatttaggaagtctgtattagtttgctagggctaccatcacgaaatgccacagaccatgtggtttcaacagctggaagttattttctcacagttctagaggccagaagtcaaagatcaaggtgccagctgcagggaccagccccacagggtcggtgggcttctccctgtgtgcagcgatgagagagtgtnnnaaaaaaaaaaaaaaaaaaaaaaaaaaaaaaaaaaaaaaaaaaaaaaaaaaaaannnaaaaaaaaaaaaaaaaaaaaaaaaannnnnnnngggggggcgcgcttttaaaaaaaatataaattaacccccgggtggggggcgtattttttttttt

SEQ ID NO: 105059 - DNA, 409 bp, Homo sapiens
  misc_feature (1)...(409): n = a,t,c or g
tggtttaggtattttggttgaagngatgtgtttttaggtgttactagtgcaatggtttaggtattttggttgaagtgatatgattatgtgtatgtatgtatgtatatatgtatgggcggatatatatatatatatatatatatatatatatatatatatatggaggctgagaagccccttctatcctctctctgcgagatagagacccacgagagtggtgtccaccggcctgacaaccacgaggattgatggtttatgtctcaccccacgagcaagaaaagactggtgtctcttctcatgttctcagagagagagagagagaaccccccctctctccattcttttgntcgaatcgcgccctcacagggngcgagatatacactaacatttatgggcccactttcttttt

SEQ ID NO: 105060 - DNA, 399 bp, Homo sapiens
caactcaatgaatctgttatgctttatttagtttcttcttacctgtactgtgatctggaaagaccctctaggcagaaagttactgtgattgtaggactttcctcatttgcttctgttcttgcctttatcacagttctgcactgcctgctgtccagtgcctgaaaatagatgcttcatgtattttttcttaattttcagtgctttgtgttgggagatgaattccagaatcagtcattctaacacagccagagtggaacaatgctgcaaagtctttaagattttacaaatgaaaagtgtactaggccaggtgcagtggctcacacctgtaatcccagcactttgggaggccgaggcaagttgattacctgagatcaggagtcgaaaccagcctggccaaca

SEQ ID NO: 105061 - DNA, 399 bp, Homo sapiens
  misc_feature (1)...(399): n = a,t,c or g
cggggttttgccatagtggccaggctggtcttgaactcctgacctcaagtaatctgcccaccttggcctcccgcagtgctgggattacaagtgtgagccattgtgtgcaggcttaatttttctgtagacacatgattttactatgttgcccagggcatcttcacaaccatttgtaatttaccattctaccttaccttctattaaccttgcaatccacttagacaacctagtcatattttcttgtgcttttctgcttctgaatatttacttaccttactaatctccgtttatgcaaattctagtttattctttaagattcagtttaaatcccattgcttctgtgaatgttttcttgattattcagntagaagtcagtttcttacctatgcaaaaatagtc

SEQ ID NO: 105062 - DNA, 417 bp, Homo sapiens
  misc_feature (1)...(417): n = a,t,c or g
tgagccgggatcgtgccactgcactccagtgtggatggcagagtgagactctcaaaaaaaaaaaaaaaaaattgggggggaaggggaccccctttcttaaaggccaaatgggtaaaatttttggaaaaactggaaggaacccttaacaaaagacttgggggttccacctggcccttnttttttttttttttcctttttttttgaaaaaaaattttttttttttcccccggggggaggggaggggccttttttttgtttcatggcccccccccctttggggttaaaaaaaatttcctttctttaccgtccccccctaaaaataaagaaaaacgggcccccttccccccccggggtttttttgggggggttaagggaaagggggttaccttgtggggcgggcggggattaaaccccaac

SEQ ID NO: 105063 - DNA, 766 bp, Homo sapiens
ctcacagtttagataattttgttgtcctgtctttgagttctatggttttttttcttctgttgtatccattttgttgtatccattttgttaagcctatccaatttattcatttcagctgggcacagtggttcatgcctgtaatcccagcagcttgggaggcagaggcaggaggatctcttgagttcaggagttcaagaccaacctgggcaacaccatgagatcctgtttctacaaaaataaataacaaataaaacaatttattcatttcggatatattttcagttctagattttctattttgttactttttttctctgctcaaattttctattctctcaatcattctgcctctcgtttttctttaacataaagaaaatttttcatggaattttaaagtctttgtctaaattccaacacttgggtgatccataaggtctttttctatcgattgtttcttctttagattatgtgtcatcatttcttgcttcttagacatagtgcgtataagaacagtggaaatcaaagtagaaaatttcacactaggatgaacatactgtattctctactaggtagcgaagctgagtagctgacctgtgatatcattaggagttgagctgggttggggctagagcagttttaagtagtttcagctcaagattggttttaaacgcttaaggatttggacaggcctctccctccaggtggacttggaatctaatccttgtgagactatgaaatctatctctgctttacagaccagtccctg

SEQ ID NO: 105064 - DNA, 425 bp, Homo sapiens
acagggttgctccatgttgttcaggccggtcttgaactcccgacctcaggtgatccacccacctcagcatcttaaagtgctgggattacaggcatgagccaccgcacccggctggaagtccgttcgtaattgcatacacacttagtattgatagatccttttgatgagtttctcttttatcattaatacttttcctctttatctctagtaatataattattctgaagcctatcttaatattaatataaccacacctgcttttttatacttaatgtttgtgtggtatattttttctacccttgtgctttcaaactatgactttttatattggatttattttattctgttttttagagacagggtctcactctgttgcccaggctggagtgcagtggtgagatcacagctcactgtaaccttgaact

SEQ ID NO: 105065 - DNA, 397 bp, Homo sapiens
cggacgcgtgggcggacgcgtggggatggagttcagtggtcctatcatggctcattatagcctcaaactcccaggctcaagcaatcctaccatgtcagccttcccagtagctgggactacagctggatctaccatgaaagacttgtgaatccaggaagagagactgactgggcaacatgttattcaggtgggaacatccagttgcaggaaaacaagcttaacacgcccactgattctacattatgggtctccctctgttgtccaaggctggagtgtagtagtgctatcccagctgactgcagcctcaaccttccaggctgaagcgatcctcccacctcaacctcccacgtggctgagactacaggtgcttgccactatgcccaactaatatttggaa

SEQ ID NO: 105066 - DNA, 406 bp, Homo sapiens
cggacgcgtgggcgacgcgtgggcttgaacctgtgacctcaagtgatccacccgcctcagcctcccagagtgtcaagattacaggcgtgagccactgcacccggccagcatttttagatataggaattttggctactttttaaaaatatgaattatatattctttttaagtagaaaagtattttaatgaattcatgattgccttcttccctgaaaaattctaaatgatcatttaatcacatctgaaatgttacactctgtgggataaacattgcagccagtagcattgctctgagctgtttgacaggtactgagcaccaccttattaaattaggattccaaggggaattttaataggcagcatataattaccagacttagaattagaccaaagagctaaggttaat

SEQ ID NO: 105067 - DNA, 384 bp, Homo sapiens
  misc_feature (1)...(384): n = a,t,c or g
ttctcctatttctcactgtcttttcccaaacactttctaggagcatatttccttcactcctcctcctttagatcttagctgagagattttctcagttagctttctctgatccagaccttgtttgaattagagagcgtgctgncattattccctattttctctctctttgcatttgtcacgttgcatagaagtgactgctagtagggcagctccatgagggtagtgttgggtttgtcttattcatcgtgcattcctagcacctagaccagtacttggctgtcagtaanaaaaaaaaaaaaaaaaaaaaaaaaacaaaaaaaaaaaaaaaaaaaaaaaaaaaaaaaannnnnggggggggggcctttttaaaggcccccttctttt

SEQ ID NO: 105068 - DNA, 402 bp, Homo sapiens
ctgtacatgtgtccatgtatatatacatgtttatgaatatacataaataattttttaaaaaattttgtcatgcagtctcagccagtcctgctgtttttattttattttattttattttatttatttttttgagacggggtctcactctatcacccaggctggagtgcggtgatatgatcttggctcactgcaacctccgcctcctgggttcaggcaatcttcccacctcagcctgggcaacagagcaagactccatcttataaaaaaaattatgtagtgttgagaatccttgctatccaaatagcctgaagcacaaaagcacagcttattcttgaaattttatggaatagcctatattttgacctttttgcttcttctaagctggacgatgtgtgcttcgag

SEQ ID NO: 105069 - DNA, 407 bp, Homo sapiens
  misc_feature (1)...(407): n = a,t,c or g
gctgcagtgagctgtgattgcgccactgcactccatcctgggagacagagcgagaccctgtctcaaaaaaaaaaaaaaaaaaaanggaggtcctgggaggctagggccatacccaaattccaaggcatttaaaacattttaaaatttttaacgggaacggcccaattttttttttttattttaaaatttggaaaccagaactaccggggggggacttttggaaaccacaaaaaccacctttaatcttttgggaagaaaattgggttcctttttgggcccaagaagtttaacggcggctcctacgggaactactataaaattaaccggaggtttttttttccaattttgggggaaggtttttccccgcatgtatattttttggaaggatgaatggaaaaaaggcttct

SEQ ID NO: 105070 - DNA, 405 bp, Homo sapiens
gatcttgctctgtcgcccaggctacagtgcagtggtgcaatcacggcccactgcagcctcgacctccggagctcaattgatcctcccacctcagcctcctgagtagctgcatctacagatgtgagccaccaaaaaaaaaaaaaaaattttttttgacacaggatttacccttgtggcccaggctgaagggctttgggcctcactgaaagtttttcttgagctaaaaccaccctttcactttaccctcccagggaggggggattaaagcctcactccacccccccgggccttgtttttcttttggaaacatcgttctacaaggcggggggaacatcgttttttaaataagaagtttttttggaaagttaataaacccagttggggcctgggaggaaaacacccaga

SEQ ID NO: 105071 - DNA, 405 bp, Homo sapiens
cccacgcgtccggagccaatctgtctcattgttgtctctctcttttttttttttttttggaaacagtctctttgggccccccaggagggcaggggcccaatttttgttaattgcaccttttgcctccaaaattaaagcaatttgggggccttaccctccggagaagggggaattggcggcccccccccattatccccggtaaaaattggttttttaaaaaaaaacggggttttgccttttggcccgggctagccgaaaggttttttttaaaccctgaatatgtaggggggtttttttggggggattaggggtcaccctagtaaaaaaaaaatggttcccgggaaataataaggtttggcttttttataaatcggaagagttaatttggccttcgaaccaaaaaag

SEQ ID NO: 105072 - DNA, 409 bp, Homo sapiens
  misc_feature (1)...(409): n = a,t,c or g
cggacgcgtggggtctcatgttgctcgggctggtctcgaactcctggcctcaagtgatcctcccaccttggcctcctaaagcgctgaggttataggtgtgagccacttttggccaaaattatttcttgactggacaagaaaaaaaaaaaagcccagattaccaatatcaagcatgaaaaaggggttttccattcaaatcctacagatattaaaaaaaagagctgaaatcattggaataaaaaaccaaccattagaaaaaattaccaaagccaaattttggttcctggaaagttcaacaaaattattttttatttttttggaaacggggtcttgctcagccacccaaactgaagggcaggggcatgatcatggttcattgtaatctcaaactcctgggcttcagcgatcn

SEQ ID NO: 105073 - DNA, 412 bp, Homo sapiens
  misc_feature (1)...(412): n = a,t,c or g
atcccctagcaaccaccaatctattttctgtctttacgaattagcttattctgggtatttcatataaatggaatcatacaatatgtggccatttgtgtctggcttgtttcatgtcacaatttttcaaggttcatctgtgtcgcagcatgtgatcaggatttcattgttttcttatggctgaataacattccattgtgtggatataacattttgtgtattcattcaatttgtcccaattggaggacaactgggttgtttccacttttggctattataataaagctatgaacatttgtgaaaaaaaaaaaaaaaaaaaaaaaaaaaaaaaaaaaaaaaaaaaaaaaaaaanggggggggggggattataaaataaaaaaataggggcggccgctttaaaaatcactttttttta

SEQ ID NO: 105074 - DNA, 373 bp, Homo sapiens
aattacttaaaaaattggaatcaatcctctcatacattgctgctgctttatcaactcagtgtacataacattctatgtcctttcttgtcatttcaaaaatgttcacagcatcttcaccagaagtaggtttcttctcaagaaaccacttcctttgctcatccataggaagtaactcctcatctgtttaagttggatcacgagattgcagtaattcaatcgtatcttcaggcttcacttctaattctagttctcttgctatttctaccacatatgtagctatttccttcacagaaatcttgaacctgtcagagtcatccatgagggatggaatccacttcttcaaaattcttgctaatgtttgatattttgacct

SEQ ID NO: 105075 - DNA, 472 bp, Homo sapiens
  misc_feature (1)...(472): n = a,t,c or g
gagagggcnnnnnacctgatgactgaccgcctcgcaanaacnnnngnnnnnancanncggncnncgannccttcgagagaggaaacgaagggggaagcgttcttttttaaaccatcagatatcgngagaactcaggcacagtcatgagaacagcatcggggaaatcgctcctataatccagtcacctcccacagggaccctcccccgatatatggggattacaatttgagatgatgagatttgagtggggacacagagccaaacatatcacctgtcttttggataaaagtcatttgacctgggatgacatgctatctaattatagatttgatttatgtttctctgatggtcaatgatattgagcacctttttatatgcctgcttgccatttatatgactttttttgagaaatgtctattcagattttttgctcatttttattttttatttttatgtatttatttatttttct

SEQ ID NO: 105076 - DNA, 408 bp, Homo sapiens
  misc_feature (1)...(408): n = a,t,c or g
ctcacgctagcgcattgatggccgatcannnntttctatcatatcatatcatatagacctatgttgtaatatttcatgattacttcctcaaaggaggcgcttatatgaatcattggctatcaacgttatcccacaacttttgtttattacatcctgtaggtaaatgataactccacttttgtcaagagaaatgaactttttcaaatgaatgtgtattttttgtgtatcaataaagatgattgcattgtcgtgagtatcttgctcttgatgtatttaaaaaatagatacagtgatgtgtgactttaaaattgattagttcaggccaggcacggtggctcatgcctgtaatcccagcactttaggaggccaaggtgggtggatcacctgaggtaaggagttcaagaccac

SEQ ID NO: 105077 - DNA, 469 bp, Homo sapiens
  misc_feature (1)...(469): n = a,t,c or g
gtgggatnnnnnnnaactgagacctgaatgcatgtcgaggaactcataaaccagagtgctcagattggccaggtctgggtcacaccaatcatggaagttggggaggtggctgtcagcttcacttgaacctgaaggtctgggagtggaaggcatgacagccgcccacctccaattaaggcactgttatcagaaaaagggggattgtattggataaaggacagacacaaccagacatccactacacttggagatattccaagtctgtgtggggtcctggggataaggaggtgccaggaaaggagaagaaataagaccagctttgtaggtctatcgtagtagggtaaaggtgacacaaagtgtcacttgtggctgggcaccgtggttcacgcctgtgatcccaacactttgggaggtcaaggcaggaggattgcttaaggccaggagttcaagaccagcctgagcaacatgg

SEQ ID NO: 105078 - DNA, 389 bp, Homo sapiens
ggcacgagaataaaaaccagtaacaatcaatatgtaaaaacggcccacttccctaaaaaaaagtaatttttgtagtctgcaaggtttttttttttttggtttaagccaaaaacctggtaaatctaacaggtcccccggaaaaaaaaaaaaccctttcttttcgggtggaaaggccccataaaagggtttttaaaaaattttcttatcacccgggctggggggttcaccccagaaaccccacttattgggggggctgggggagaaaaattacttgaccttggaaaaggggggttgcagggacccaaaataatgcccctgttttccaccctgggcaggggagggaaaccctttctcaaaaaaaaaaaaacaaaaatttcctttttttggaa

SEQ ID NO: 105079 - DNA, 402 bp, Homo sapiens
ggcacgaggactgaggtgggaggatcacttgagcctgggaggttgaggctgcagtgaactgagattgcgccactgcactcagcgtaggtgacatagtgagaccctgtttccagcaaaacaaaataagacaaaacaaaacaaaacaaaaatcataaaaattctggaaatgcaaagagcctcctgaactctgtaacaggaatgtgtaattttggcattaaccacatgaggacaaattaaagttagtgtgcctccccaagttacccatatttgtgttgaatcaatggttaacagttggctatcaaacttttttctcattcataatcaaggaaaaaatcattaatcagactggataaggttctagatgaatatgaagaagagaagagacatttacaagaaatggct

SEQ ID NO: 105080 - DNA, 417 bp, Homo sapiens
ggcagaaattctgaaggcatttgaggaactttatgtcttaggattggatttataaatattagtcatcattgcatgatactcaaagaaaattctctttttttttttttttgggaaacaaagttttactttgccccccaggctgacgggcgggggcccaatttgggttaatggaaccccccttccccggggtaaaggggatcccccggcccaacctcccggaaaagggggaacgggggggggggccccccaggcccagttatttttggttttttaagaaaaaacggggttcccccaggggggctaaaggggcccaaatctttggcccccggaatcggcccccctgggccccccaaagaccggggattacgggggggaccccccgccccgggcctcctaaaaaaaaatcctaaggtttgg

SEQ ID NO: 105081 - DNA, 499 bp, Homo sapiens
  misc_feature (1)...(499): n = a,t,c or g
ngagtgccccccaatgaaaaccaggttagacangcaaaanccncncaanaanangaaccagacacagaaggaaaaatgctttaagattttgcttatatgaggtagctgtgaaattcatagagagaggaagaagaatagatactaccaggcattgtggggctgggagattgaggagctattgtttaatgggtatagacttgcagtttgggataatgaaaaagttctggagatgaatggtggtgatcattgcccagcaatgtgactgtactgaatgtcattattgacttaaaatggctaaaatgataaattttatgttatttatattttaccacacacacacacacacacacacacacacacacacacacacacacacgcgagagagaggacctagttatatatatgggaaggtctcatttaagctgactcatctttaagatatacgggcgataggagaattttctctgtgagatatttaatanattacacatattctctg

SEQ ID NO: 105082 - DNA, 477 bp, Homo sapiens
  misc_feature (1)...(477): n = a,t,c or g
gcgattgagtcctancnagtngcgnggaattcgttcctaagtaagtcaggtccctaagccccgtcccaagaagtgacacaagtggccaacatccacactgtaggcttgcaggctacccgccctgagatttggtaaagaacactgccttgttccccatcagtaaacaaggttacctacctcaggaggctgcttgtgagagagcaaatgcagtatcttcagaatgatttatttttttaattaattgtaaagacttgtgccattggctgctctttctagtcccctaaatttctgttctagttttaaatttctctagaacttgcaatagttgggggttttataatgatgttttacaatgtttatttcttaaataaaaacttaaaaattcaacatttctcagctggtggctcacacctgtaatcccagcattttgggaggccaaggcgggaggatcacttgaggccaggagttcaagaccag

SEQ ID NO: 105083 - DNA, 482 bp, Homo sapiens
  misc_feature (1)...(482): n = a,t,c or g
gagcgcatcgattcgatacactagtccangnggnggaattccggggtttcaccatgttggccagaatggtctcgatctcctgacctcatgatccatccaccttggcctcccaaagtgctggcattacaggcctgggccaccacgcccggccataagcataacgcccagtacataagcatatttactgggaaaccaaaaaattggtgtgactcacttccttgcaatattggctttatttttttctggaaccaaagccatgatatctccaaagtatgtctgtatcatattttatctattagttgaggaacatttgggttgcttttactttctggctattaatactgctacgtgcgtttgtgtatacaagttatttgatacatacatgtatcaagtagaatcccatgccactcatgaatttatttcctactatttttttaaaatattatgtagcttgagcattaggctttatgctgtgctcctaa

SEQ ID NO: 105084 - DNA, 485 bp, Homo sapiens
  misc_feature (1)...(485): n = a,t,c or g
gggtatgcggggccggnnnttaccgatngcccagggtactgnannnncnnnnaannnnngaactccngacctcaagtgatctgcctgcctcggcctcccacagtgctttgattataggcgtgagccactgcacccggccagagtacgcattttaattcatgtctttcactgggagaaagtcatacttcggtgttttaattgttctataaaataaaaattaaaagtggtttgggcacctgaggaaggggtacagatgcgtgtacagatgcgtgtgtgtgtgtgtgtgtgtgtgtgtgcgcgcgcgcacacctggggacacacgtgcacacagtgtaagaaaagcatacgccgaggtgatgtctcacgttctacttcaacacagagtagcctctgatacaggccacccatcattacatagatgacatggtgagctaacaagatgggcgcctctgactgtctttataagagagcttggtggacacaca

SEQ ID NO: 105085 - DNA, 487 bp, Homo sapiens
  misc_feature (1)...(487): n = a,t,c or g
agccaatgtcggccttnnnnnnccccgaaactgnagcaagngtcgnnggcnnncaaacacaaagagggacctatgagagactttttttcagtagatcagaaaaggaaaaaattagcctttctatccttgtagttttgttcttataatagagcccaggtagttcaaaaggtacagttggcaggagaaagtcttctttcaaaatacccataatggagagaccaaaaaaaaaaaagggaatttctggctggtggaaaaattttttttatttttgtttccaccttgactaaggtggaataaatcctgacctgaaaaggggggttaaatctttggttaatcaaaaacccctttaaaagggatgccaaaaggccaggcgcaggggttcacccttgtaatcccacccttttgggaggccgaggcgggcaaatcacaaggtcaaaaaatcaaaaccttcctggccaattgggtgaaactctgtctttattaaaaa

SEQ ID NO: 105086 - DNA, 473 bp, Homo sapiens
  misc_feature (1)...(473): n = a,t,c or g
ntgcctgatacttcnttagngcggnggaattcgacagggtttcaccatgttggcccnncnnccttgaactcctcgacctcaggtgatccacccacctcggcctcccaaagtgctgggattagaggcgtgagccatcgtgcctggctgaaagaactgattctaatacgtagccaaattctttgttacaaaggttggtatgttattagaaattacctaacattgagcctctggagcttctgccctgaaagttgagctatgcagtttcagcaggtacaagatctaccccagacacaagaggcgctatgccaggaccgatgggaaggttttctagttccttagtgcaaaatgcgagggcattactttctttctttcttttttttttttttttttggaagttttgttttgttccccaggttgaagggaaggggggaaatttggtttaatggccgtccccccttccgggtaaaaacatt

SEQ ID NO: 105087 - DNA, 422 bp, Homo sapiens
  misc_feature (1)...(422): n = a,t,c or g
ctttaaagaaaaatgaaaaaggttagtgtttgggggccgggggaggactgaccgcttcataagccagtacgtctgagctgagtatgtttcaataaaccttttgatatttctcanaaaaaaaaaaaaaaaaaaaaaaaaaaaaaaaaaaaaaaaaaaaagggggggggcccttaaaaaaaaaccctgggggggccaaaataaaacgggggaaaaaaaaaaaaattttttttttttaagggggggaaaaaaaaaaccctggggggattttaaaaaaaaaaactttttttgggggggggaaaattggggcaaaccccccccaaaaaaaaaaaccccttggggaaaaaaaaaaatttttaaggggaaaggggggaaaacacccccttatttttgttttttaaaaaaaatggggnacncnnnnccaa

SEQ ID NO: 105088 - DNA, 370 bp, Homo sapiens
tcagacattgcctcatccgtcagtgtctctagtatagccacggcacttcatggtgcattggagtctggacgctggagggctcactaaaacacggatcaccaggccccagcccctgagtgtctgagtcggcagacctggcatggagcctgggaatctgcttttttatcgagttcccaagtgatgctgatgttgctggtttggagaccgccttttttttgggggggtggacagggtcttgctctgttgtgcagcctggagtgtagtggtgcaatcacagctcactgcagcctcgaccttctgggcccaggcaatcctcctgcctcagcctcccaagtagctgggactacaagtacatgccaccatgcctggt

SEQ ID NO: 105089 - DNA, 376 bp, Homo sapiens
tggtttcgaagaagatataaaatattattagttctgtggctgtgaatgttataattaaggagatttgtagggagattaggatagagaggtagagtttttttcgtgatagtggttcactggataagtggcgttggcttgccatgattgtgaggggtaggagtcaggtagttagtattaggaggggggttgttagggggtcggaggaaaaggttggggaacagctatagcactcgaataattcttctcaccctaacaggtcaacctcgcttccccacccttactaacattaacgaaaataaccctaccctactaaaccccattaaacgcctggcagccggaagcctattcgcaggatttctcattactaacaacattg

SEQ ID NO: 105090 - DNA, 331 bp, Homo sapiens
aataacttgaccaacggaacaagttaccctagggataacagcgcaatcctattctagagtccatatcaacaatagggtttacgacctcgatgttggatcaggacatcccgatggtgcagccgctattaaaggttcgtttgttcaacgattaaagtcctacgtgatctgagttcagaccggagtaatccaggtcggtttctatctacttcaaattcctccctgaaaaaaaaaaaaaaaaaggggcgcccgttttaaaggatccttgggggggcccaaatttacccgggcatgcaaggtaatagttttttccttatagggagccgaattaaaa

SEQ ID NO: 105091 - DNA, 421 bp, Homo sapiens
ggccccaagtgatggttttcaaattgtgcttccaagaatcctaagattttaggcatatttgaaatccttttgccacaaacttaacctatttaattgttttgatttttttttttaaaacgttgatgggagttgtgaggagtcttcctgtgttgcccaggccagcctcctgaactgaactcaaatgatccttccgcctcaaaatagctgggattataggtgtgcaccactgcacctggctagttgttttgattctaaatttagttttgttaaaatgaatcacatttgctttaaaaataatgatgttttcaaaatacagtgatataggccaggcacagggactcatgcctgtaatcccagcgctttgggaagctgacgcgggaggatcacttcagcctaggagtttgagcctgggcaacaaagg

SEQ ID NO: 105092 - DNA, 414 bp, Homo sapiens
ggagagttactatttttgtatatatttgcatagtggttattcctgcttcctaaactactgaaatttgtgattgtatgtttgtgtgagcttcagtttaatgaaagattcataatggttctttgtattattataatacttggggttggggggttctttctgttttgttttttactttaattttgttttgatttttttttttttttttggcgggggtaggggggggtttggaccttgggcttttttaaaaaaatggaacccttttaaaaaatttcaaaaaagggacccccccggggttaaaaaagttgtttttctttttttaccagccccacctttttatttgggaaaggaaagttttgaaggttcaatttgttttcccagttgggccttgaacccaaaaacaattggtggggttgt

SEQ ID NO: 105093 - DNA, 412 bp, Homo sapiens
  misc_feature (1)...(412): n = a,t,c or g
tcctagctactcgggaggctgaggcaggacgatggcgtgaacccggcaggcggagccaagatcgcggccactgcactccagcctaggtgacagagtgaaactccttctcaaaaaaaaaaaaaaaaaaaaaaaaaaaaaaaacggggggggccctataaaaaaatccccgggggggccaaaaatatgggggacgaaaaaaaaaaaaattttttttttaaagaggggctaaaaaaaaaaccctgggggtaattgaaaaaaaaacctttatttgggggggggaaaaaatgggacaacccccccaaaaaaaaaaaaccctttcaaggaaaaaaaaaattttgatggtaaaaagggggaaaaaatatcattaaaacctgtgtaaaaaaaagtcannaaannntccttgacaactgan

SEQ ID NO: 105094 - DNA, 440 bp, Homo sapiens
cctttgagggcgtttcccattaagggcacattctgtaaatgaacgagcagcagattccagcacagtaggcctgtttgttattcatgctgagggacattgaaaagcagtcaagattagctcccctcatgccacccgtttgtgacctcagtgccacctgggcctctaagatgtatgtggcagagactagaacttctatttaacaagagaaagaagtaggagttctgtggctatccagtgcccctaatgggcaccctgcattggttgacaactcctaaaagacccgcaagtgctatttgctggctacaaagtcccccaccccttggagcacaagatcatcatccgagtgcagaccacgccggactacagcccccaggaagcctttaccaacgccatcaccgacctcatcagcgagctgtccctgctggaggagcgcttccgga

SEQ ID NO: 105095 - DNA, 386 bp, Homo sapiens
caatcattgtcattgattgtactgattatgatacaggattattgtttggcccttcgtgtacagtgtgacatttaatcttggcggggcatggcggttcacgcctgtaatcccagcacttcgggaggccaaggcaggtggatcacttgaggtcaggagcttgagaccagcctggccaacatgatgacctcacatctaccataaacaagggaacgagactgtgtccaaaaaaaaaaaaaacggggatcccatttataaggaaagcttatgaaggaggatcacttgaactcttttgtttttgttggagcgcacaaaaatcatatactgggcccggtttttaacacctggggaagggaaaaaccctggcttctccaaaattaatgcccctg

SEQ ID NO: 105096 - DNA, 422 bp, Homo sapiens
  misc_feature (1)...(422): n = a,t,c or g
ggctgcatgtggcccaggacagttttgtttgcatttcaacacaaatttgtaaactttcttaaaacattaggagattttggccaggtacagtggctcatgcgtgtaatcccagcactttgggaggctgaggcaggcaaattacctgaggncaggagatggagacccccctgaccatggagagaactcctcatttccacaaaaacaaaaataatttgctcggggctctcgccacctcttgtactatcatcctcccgggcggctgaaataaaagacatttgccaccacacccagatgattttgtttatttgatatagaaggggtgttctccatgctgcgcggctggctttagcacaactgccgcttggagaaacacccccctctgtccacctgggttgttttaaaaaaccaccccactcccccgc

SEQ ID NO: 105097 - DNA, 420 bp, Homo sapiens
ggtcgacccacgcgtccgcggacgcgtgggctgcggaggtgccaacttatgctcatgtagagtcactcctctgtggctaaggatctggctgagagacaaaaggcaggcagtaatgtctactctctggattccagagggtctttgatgccacttcccaatttgtcatgtagctatgaggaaccaggactatactcagatgacacttgccatcagagacttaggctgatatatttttaaaaccatggaagattaattgtataatacatatacaaaatatggatatatatattagtatatatgagtagttgtaattgatatacatatatatatgaacctggctaggtgcagtggctcactcctgtaatcccagcactttgggaggccaaagcaggtggatcacttgaggtcaggagtttgaga

SEQ ID NO: 105098 - DNA, 420 bp, Homo sapiens
  misc_feature (1)...(420): n = a,t,c or g
tagagatggggtttcatcatgttggccaggctggtctcaaactcctgacctcaggtgatccacccactttggtctcccaaagttctggaattgcaggcgtgagctactgctcccggccaaagtctgttatctaattatctaagatattttcatatctaagngaaaggtggcgaaagcttttgataagaatcacatcagaggtcagcttaccattcactaaagatgttggaggactttctcagntcccttggatttattgaatgattgactgattttttgagacagtctcactcttgtcgcccaggttgaagcaaacttgctcaccggaccctatgcttccagggttcaagggttctcttaactcagcctgccgatagttggaatatgggggctgcacccccccaactattttggattttg

SEQ ID NO: 105099 - DNA, 420 bp, Homo sapiens
caggggtcatgccaacgtctcttgccctgtttaccccttattttaggaaacaaattgccttatggcttaaaaaaatccttttggaagtgtgacgtgccagtagaaaagcatagacatcatgagtgaacagctcagtggcttttcacaagtaaacaggcccgtgtaaccaacacctagatcaggaaatacagcattgcaaccccctcaccacacacacacacacacacacacacacacacacacacacagacacacacacacacacacacacacacacacacgcgcgtgtatttaaaaagtgcgtgtccgcgcactcttttctccaaaaaagaaaccactcttctgtctttcagtatcacagatttatgtgggacgatgtcttttaaaaagacttttatttatttttttatacagacatag

SEQ ID NO: 105100 - DNA, 415 bp, Homo sapiens
  misc_feature (1)...(415): n = a,t,c or g
gctctccctctatttgggtgtgtgatcttggacatattaggaacgctgcctctattttgttacctataaaatgaggataatagctaactacagtaaattaaatatattaatacaacaaactaaatttatattagtgtagccaacacaattatattaatcttcatagcaattcacgtgttagctatttctttttttttttttaaaaaggaagttttgtttttgccccccaggagggagggggggggggcattttaagttaattgaaacctttgcttctggggttaagggaattttcctgcctaaccctccctaaaaaaggggataacgggggccctttatacccccgggttattttttgtttttttaaaaaaaacaggatttcgccatgtgggccaggcttggcttgacttcctcn

SEQ ID NO: 105101 - DNA, 412 bp, Homo sapiens
  misc_feature (1)...(412): n = a,t,c or g
ggaggcaggagggtggtgactgcaatgagctgagattgttccactgcactccagcctgggcaacagagggagaccctatctaaaaaaaaaaaaaaaaaggggcccaaaactttacggggggctacattccctcccacccaggttccctggggtatattttaaaaaccaaatttgaaactcgaggttgaggaaaaaaaaagggggttttattaaaatcatgaccccggaaatctaggctggctctacctctacctaacccaaactggggggagcccctcctttcctaaacctcagtttattcctaaaatgaggagaggggaccaaatgatctcaaaggccccttccatccctgagggcccttgattcccgggattaccccaggagctagggaaacatggaaggaactccaggn

SEQ ID NO: 105102 - DNA, 428 bp, Homo sapiens
  misc_feature (1)...(428): n = a,t,c or g
attctggctgctcaggaatctgatgggacaaggagctgagatcgtgccactgcactccagcctggacgacagagtgagactctgtctcaaaaaaaataaataaataaaaaataaaaataaaaacaattgaactcatggaggtagagagtagaaggatggttaccagaggctgggaatggtagctggggtgggggagatgtggggtagttaatgggtccaaaaaaaccagaaagaatgaataagacctagtatttgctagcacaacagcatgactatagtcaataataatttaattgtacattttaaaataactcaaagaatataattggattgtttgtaacacataggataaatgctggaggggacggatacctcattcttcatgatgcaattatgcattggacaccttgattccggacatatatccn

SEQ ID NO: 105103 - DNA, 433 bp, Homo sapiens
ggaggcaagagattctgtgagctgggatcgagccactgcactccagcctgggcgacaaagagagacttagtctcccgaaaaaaaaaaaagaaaagaccgaaaaaaaaaggggcgggggcccttggggacacctaacagggcctcccttttttttgggcaaacaaaaaatggaagaaaaaaaaccgttggaaaggaaaaaaaccttgggaaaacccccaaaaaggggggggccaaaaaaaaaaaaagggggggtttttttaggggggtggggggggccccaggacccccaaagggaccccccccccttaaaatccccctggacacaacggggggggaagaagccccttttctttcttcttggccccaaattccctccccaaaaaaaaaaaaaaaagggggcggggacccccaaaccgggaaaaagggaggcctt

SEQ ID NO: 105104 - DNA, 390 bp, Homo sapiens
  misc_feature (1)...(390): n = a,t,c or g
gaaagcattttagaaacagtactggatgatctttgagactttttcagtcccaacattatataaagccattcaaccagattttatttatctatttctgccatttccttcccctctagttcccaaccaggagccataaggcagtgtgacttggagagacataggttattattgtagctgtaaaccattccaaggaagaaaaggctatctggcaactcctttttctcttcttctttatctgattatagncaggggcttagaatatattcacaagatttttttttttttttggaaacaaagtctcgttttgttgcccaggctggagaacaggggggcaaccttgggtaacttgaacctccccctcccagttaaagcgattttatggcctcaccg

SEQ ID NO: 105105 - DNA, 368 bp, Homo sapiens
cggacgcgtggggtttttactcaatgttcattgcttttgcatcatcataaagtcaaaaaaattgtatgttgaaccatcatttaagtcagggactgtttgcagtgttatatttcattgcctaagactctgattttacagtctactttctctttttaaaaagggagaatcacaagtgtcaacaaagtgttaaagacatggtagcaccagatggaactttctgtctcggttctttctaagattactgtatttcagtaattacataaaataatttttttttgagagggagtcttgctctgtcacccgggctggagtgcagtggcacagactcagctcactgtagcctctgcctcctgcatttaggcgattct

SEQ ID NO: 105106 - DNA, 406 bp, Homo sapiens
gtttcaccatcttttccttgctggtcttgaactactgacctcgggtgatccacccgcctcggcctcccaaagttctgagattacaggcatgagccaccacgcccagctgatttttttttttttaaatcggtaggggctgaggtttcttcagccttggagggggctgtcttttggatttttgaaaaaatcctatttaataacttagggggttggttggtaccaacagggaattcaatcaactggctttatttctaaaatattttaaagatattttatctcaggatttctggagggggttctgtaactctagggactgggaatgagctttggctttgttcctttacaccctgaggttaaaaatctggtgcactggagggaccaaaaagcctcttaaagaaagggcact

SEQ ID NO: 105107 - DNA, 404 bp, Homo sapiens
gaaaactgaaagcaccactgtggttcttttaaaaaaaatattgcagttaggtgtaactgaattggcagaacataacctggtgtgagctcatgacagagaattgtacagtggatttagtctagcattggtattatagactatctagcaataaatcactgattataattgagttttgctaggcacattccacatctggggaattttgcatagtatctgtgttttactaggtgctctgtacattctcatctgaaatgagtttttcttcacaaatgtgtaatataaatgtatagaccacatacctagacaggtctgtgatgcatgcaggtacacacacacacacacacacacacacacgcgcacacacacacacacacaccactctcacaggggggtgactgtatttt

SEQ ID NO: 105108 - DNA, 412 bp, Homo sapiens
tgtgcctatagtctcagctactcaagaggctgaggcatgagaatctgttgaacccaggaggcgcagggtgccgagagcccagatcacaccactgcactgcagcctgggcgacagagcaagaccctgtctaaaaaaaaaaaaagccttaactttaaaaccgttagggctattaatttaaaaatgttgggggcccttatttcctttcaccttttcctttggggaatttggttttagtatggaaaaaataacccctaacctttttttatcctaaaaaggcgaggggaaaataaacccaaaattttggactttttttttttttttaaaaaccccaattttttccccggggggggggggggggggggggaaaaaccccaccacccccttttttctcgggggggagggagacctcttt

SEQ ID NO: 105109 - DNA, 421 bp, Homo sapiens
  misc_feature (1)...(421): n = a,t,c or g
cggacgcgtgggcggcctcccagctactcaagaggctgaggtgagaggatcacttgagcctggaagttcgagacagcagtgtgctgtgattgcaccactgcactccatcctgggtaactgattgacaccctgttgatcaatcaatcactccatcctgggtgacagagcaaggccctggaggtaggtaggtaggtaggcaggtagggcagccaatgggaggttggggaaatcagcagtggccagaacattcagggccctaccagctccattatggagtttggatctcatcttaagagcagccagggtaatgcgggtggatttgtgttccaaaatatggtgctggcagcgagacaggaggcaaagtctctgagggggctgaggcttggatctgcatgggaggacgtgggcctgagctggaggn

SEQ ID NO: 105110 - DNA, 437 bp, Homo sapiens
cccacgcgtccggcaggcactaaggtgcctcattgaaaaccttggagttctgcagaatgtgactaagtacttaactaatctctagggtgccttccagataatgaagtgtgatttttgtattgtctatgtgtgttgggacctttaaagccgcattccacttcaaaacaaacaccaggtggtgctctaactatttgtttaacgggtcagatagtggtataatgtatttccagccccagaagcaagtgattaaggttatcaattacattaaaacaaaaacaaaacatatgctaaaatgaactgaccacttttggaatagaatcctatcatcctgtggtgatactttcagagatacctggctaggtgtggtgcctcacgcctataatcccagcactttgggaggccgagccaggaggatcacttgagcccaggagtttgag

SEQ ID NO: 105111 - DNA, 460 bp, Homo sapiens
gttttttaatacagttcaaaacaagttataaatgtcagtatactttttcctagttttgaaagtatccgtattaatttctagggttcaatatttttaatcttgaggtaaaattcacatattatacaggtaattgcttgtatctgtcttaaatgtatcttcattgaatttatcttttatggagataaaatttacgtatcataaaattcacagtattaaagcatactgttcagtagtttgagttaaaattgtgcaaccatcaccactaattccagaatatttttacaactccaaaagaaacactgtactaagtggttgtcactttctatctcctggcaatcactaatatccttttaatagatttgttttgttttgttttttgagacaaatctcgctgtgtcgctcaggctggagtgtagtggcgctatcttggctcactgcaacctctgcctcttgagctcag

SEQ ID NO: 105112 - DNA, 414 bp, Homo sapiens
aaatagttggacatagtggcggacgtttgtagtcccagctactcaggaggctgaggctataggaggtgggggctgtagggagccatggttgcaccactgcgctccagcctgggcaacagagcaagaccctatctctaaaggaaaaacaaaacaaaacaaaacaaaacatgaagagtttcttggggccagttggcatctaaaaatatctaagtcttttgattctcagctatgacctggctacgttctaggctgtctttacgtgtttctaggactcttggcaaattctcagaacagttgacttaaaaagattagccacgtagtatttttacaaggagagagggaggtgaagtgatgagatggggccatacttataaaatgattcgggattattgatgaagtagtccctaggtttct

SEQ ID NO: 105113 - DNA, 424 bp, Homo sapiens
cggttctgtctcgctggcattccaggcaccactgggatgtgaaaaaaaaactcctgcagctagctcagtgtctgcccaaacggctgtccagttttgtgcttgaaacccagggccctggtgatgtaggcacccaagaaaatctcctggtctgtgggttgcaaacactgtgggaaaagtgtagtatctgggccggagtccaccgttccccatggcacagtccctcacggctttccttggctagggtagggagttccctgaccccttgtgcttcccaggtgaggcgatgccccaccctgcttcagcctaaatcacatttttaaccatgtttaaaatatatctacaatttgacccagccatcccattactgggtatatacccaaaggactattaatcatgctgctataaagacacatgcacacgtatg

SEQ ID NO: 105114 - DNA, 418 bp, Homo sapiens
ctcgaactcctggcctcaggtgatctgcccgcctcggcctcccaaggtgctgggattataggcatgagccaccgcgcccggccttcccccaatgttttataataaacatttcaaacctacacaaaagttgaaagaattttacagtgaatacctgtattcccaccactagattctcccctttgcattccattctgtttattccatcacccatctgcctctgcccgtccatccctctatccaccatcagtctatctgcttgttcccgatgcatttcaaagtaggcagctgacctcaggccacatcgcccctacacatgtcagcacacagatcattaactagggttcaatatttgcttatgggtttttcctttcaagggaaaatttacccaagtgaaatgcagactttttgtttttttaga

SEQ ID NO: 105115 - DNA, 399 bp, Homo sapiens
  misc_feature (1)...(399): n = a,t,c or g
actagttctagatcgtgatccgcctgccttggcctcccaaagtgctgggattacaggcatgagccaccatggccagccaaaaaagaagaaattttttttgttttttaaanttttagacaggttcttaactctgttgcccaggctgaggcgggaggattgcttgagcccgggaggtcagggctgcagtgagccgtgatcacaccgctgcgttccagcctgggcaacagagtgagaccttctctcaaaaaaaaaaaaaaagggggttttggaaaaaccttttttgcccccccccagtgtgggaaaaccacctttttctccaccggaaaggctttttttttttattttgcgcccacccctggggggggtttttccccccccctcaaaaaaaattatttcctg

SEQ ID NO: 105116 - DNA, 398 bp, Homo sapiens
  misc_feature (1)...(398): n = a,t,c or g
caggttggtctcgaactcctgacctcaagtgatccacccacctcagcctcccaaagtgctgggattgcaggtgtgagtcactctgcctggcccaaaagtgtacattttaaatgtgagggtgaattcactgctcataagccatttatttacttttggcggggggagggagagagagagagagagagagtgtgtgtgtgtgtgtgtgtatgtgttgtatatagagagtttgaacagttgagcaatacattgtaaaacctagatttgacaatatttaggttattttattaaacttactatctgcctatatgtctcttaaaagggtctatccagtttgattactcatcaattaaaaacaagggtctagtaattcatgtggccaattaaatctaaaagatacn

SEQ ID NO: 105117 - DNA, 409 bp, Homo sapiens
  misc_feature (1)...(409): n = a,t,c or g
cccacgcgtccgcccacgcgtccgcccacgcgtccggaacatacacactcatgtatgtagttttttactcattccttttatttatttattgagtcagtctctctctgttgcccaggccagaggttgcagtgagccgagatcacaccatcgcactccggcctgggtgacagaacaagactttgtctcaaaaaaaaaaaaaaaaaaagggggggcccttttaaaggaaccaattttaaggcccgggggggggaaagaaaaattttttttttgggggccccaaaattaaatcccggggccggggtttaaaaaggggggggggggaaaaccccgggggttaccaaatttaaggcgcctgggggaaaagnnnngnnnttgggggggcntttttttttttttttttttggggttg

SEQ ID NO: 105118 - DNA, 382 bp, Homo sapiens
ggcgtgggagcacatgcctgtagtcccagctattcaggaggctgaggcgggaggatcacctgagcctgggagtttcaggctgcagtgagccgtgattgtgccattgcactccagtctgggcaacagagtgtcttaaaaaacaaaacaaaacaaaacaaacaaacaaacaaaaaagctaggaaattcggaaaacataagagcaaaagacaggatatggaaaataactattggacacattcaagaaagtggtgaagatgagaactgagacatatataagggctaactcatgaagggtcttacgtatttcgctaagaaatctgaaccatcttctataggtagttcaatgtatgtgagtcaatgaaggactttaatatgggaaatg

SEQ ID NO: 105119 - DNA, 410 bp, Homo sapiens
ggttgtattgagccgagattgagccactgcactccagcctgggcaacagagcaagactccacctctcaaaaaaaaaaaaaaaaaaaaaaaaaaaaacccctgccttagcccaaaaacaaaaaccgggggccccctggccccaaacccaaaggggaaacccccgggttccttttccccctttccttttaaacccccggggaaaaaaaggaaaggggccctttttttcacccccggaaaaaaaaaaggggtttttaaaccctagggggaaaaaaagggccaaattttaaaaaaggccaaaggggggggggttttaaccagggcggggcccttaaatatttgaaaaaaaaatttacccaaaaaaaatgtttgggggggggggaggggcccccccctgaaaccccaacatttgg

SEQ ID NO: 105120 - DNA, 373 bp, Homo sapiens
ctggaagcagtcattggacatcatcttaaagaaggcccaccatggtaaatgtatttccttaaactgagtatataaaaatattattttaacatgtagtcagcatacaataattaccaatagatatttaataccttttactaagtctatggaatatagtgtgtattttacacttatagcacttctcaactcagatgttatattttcattggaaatacccgatctgtatttagatgtcatgaaatttatacttgaaaaaatagattctgggccagcacggtggctcacacctgtaacttcagcactttaggaagccgaggcaagtggatcatttgaggataggagttcatgaccagcctggccaacgtggtgcgac

SEQ ID NO: 105121 - DNA, 389 bp, Homo sapiens
cattttgtatagaaataagaatagtaattttcacctgcttgtcaattaagttaatataaatttaacagatttaattgctccaggccccttacttagtgaattgaatttccttagatgtttaaaatacatttacacagtcagtctgtcaggcacagtcagtccttgacaggtcagagttaccaccttaaacagaaacttcttaagctcttgggcaatctgtgatactaagaaattaaatttgtaaatgtagtaaaacaggttttggttaagacttccaggagttcgagaccagcctgggcaacatagtgagaccctgcttctacagaaaaataaaagctagccaggtgtaatggcatgcacccatagtcctagctacttgggaggctgag

SEQ ID NO: 105122 - DNA, 381 bp, Homo sapiens
cattaccatccactctttttaaaaaattcgtttaaagatagggtcttactctgtcctccaggctagattatagtggcttgatcataactcactgtatgtaaccttgaactcctgaggcattaaaatctcttgaacccaggaggtggagattgcagtgagctgagattgcaccactgcactccagcctgggcgactaagtgaggctttgtctaaaaataaaaaagaaagaagtgtctttgaacggagggagagatatgttatggctcattgggggcaggacagagagagctgttcctggagacgccccccgcccccaggcactggctgttcctcccctaactgctttatccctcaggtggaggtttggtgttacttcctgtg

SEQ ID NO: 105123 - DNA, 380 bp, Homo sapiens
gtcaggttgatcgaggccaggctggtctcaaacttctgacctcaagtgatccgctcgcctctgcctcccaaagtgcagggattacaagcgtgagccactgcgcctggccaaaaacaagttttttttaaaaaaagtaaaataagggcctgtgacacaactgaacttcaatataaattgtttccaaaactagggaagacattcagaatcaaaccacaggttaaacactggcttaagcagaaggacctgcattttttttttctgcctataagtttattcaatgcaaaataatcctctccagttttactgaggtcactgaccacacccacaaccaaatctgcttctaaactggaatttggttgctgacccaaccccggcctcgg

SEQ ID NO: 105124 - DNA, 310 bp, Homo sapiens
ctcttgagaataaatgacaggccccatgttacatgggtcctactgtcagaagcaaagcaggatccctttgcataatgcacactcaagtaaattaaaccaggctagggaggagacaagggcactgtgtgggacaccttacatttctttgatgggcagaaaagactggaccataacaaagatcattggatgacaatccatgctgaattgccccacgagctttctgcttaatgctatgctttcaaaaaagaatgtataagtggaattggtagtatctaggcagagaaagagtacaagatacaatttgatggtt

SEQ ID NO: 105125 - DNA, 378 bp, Homo sapiens
ataaattgccacaagtgtagtggcttaaaacaacacatatttattctcctgcagttccagagatcagaaatctgaagtgggttttactggactgcgatcaagaaatagtgcaagtgtagtgatgttgaatcatgcttgctctttgctttcttagtgtgtcttgtaagcctcattttttggcacaactattacatacaagactatcctggtttatgtttacatgtttgaaaagttcattatatatatacatatgtatacattttagagacagggtctagttttgtccaagctggagtgcagcaacgtgatcataggtcactgtaacctcaaacacctgggctcaagcaatcttcctacctcagcctcccgagtagctgg

SEQ ID NO: 105126 - DNA, 396 bp, Homo sapiens
aatgaatacaccctgggcaacatagaccccatctctctctctctctctctcttttttttttttttttttaaaaaaaacccaaactttgtttaaaaaataggtaaataatttaaaacaaaggattgggctttcgaaaaggggggaaaaaaaacttttggttttaatttccgggtttgggggggggttcccgggggccggatggataaaaaagggaaaaccccccccgggatttccccaaggtttggggccgtgaaaacggggtccacccggaaaaaagggaaactttaacaaaatgggctttaacccaaaaactttggtttttaaaaaccaaaattttggacctgggggggcaaaacctggcaccccaggggtcaggggtcccctgggggacctagg

SEQ ID NO: 105127 - DNA, 422 bp, Homo sapiens
gggagacgtagaaatagcaaataggaccccgtctctactaggaccaaaatggtgaaacgccatctctgctgaaaatacaaaaaaaaaaaatacccggttttggggggggccccctgaaatcccaactactcggggggctggggtgggaaaatcattaaaaccccgggggcgggggttgcagggacccaaaataaccccagggccttccaccttgggggacaaaccaaaattttgtcaaaaaaaaggaggggggaagggaaaaagggaaggaaggaaggaaggaaggagggggggaaaaaaaaaaaaccctcccaaaaggaataggggcccttaacttagggggtttattaacctcaccctgacctttatatagttaaaaaaaaatttgcttttattcttaaaaaagagaaaccattcaaggc

SEQ ID NO: 105128 - DNA, 369 bp, Homo sapiens
atggataatggcttgaacccacgaggcgggggttgcagtgagccaagatcactccactgcactctagcctggtgacagagcgagactttgtctcttaaaaaaaaaaacccaaaaaaaaaataaaaaaaagtgaccgggtttccaaaataaaaaaaccggggggggggggccttttaggccaaaaaccaaaacaaattttaaggtatttttaaaaaacccttaatccccgcatttgaccccagggtttaaacccccaaaaaaaaaaaaggtggaaaattggtcaaaaacccccctgggaaaaaaaaaaccccaaaaaaagggaggggcctcttaacattattttaaaaggaaattaatttaaaatcaccc

SEQ ID NO: 105129 - DNA, 401 bp, Homo sapiens
  misc_feature (1)...(401): n = a,t,c or g
aaccactgagcggtttatctacaggatcacatttggccctaaggaaacggaggttaatgatttgcccggagcccccagtgaaccagtggcagcactgaggttggaagccaggtcttttattttgaagctctgatccttttcattggtttttgattttttttttttgcctttttaaaaaacagggtcttgtttgtcccccaggctggagtgcaggggtgaaataataactgttcattgcagccgggaactcccaagctgaagccatcctcccacctcagcctcccaaagttctgggtctgggggtttccatctgggctgagctgccttcttagcgaaaatctgctgaccctttaaaatgagggtagagaaactcacagcgctgggtctactcctaaaataan

SEQ ID NO: 105130 - DNA, 409 bp, Homo sapiens
gcagaatttctcagagttcagcagaatattcatagttgttacaaaaaaaaagttcttaatttttaaatattttaggcaatgctggcttaagcgactttaacctttttgtttggttttaaatcataagctttctgtatactctgttagcatgtaaaaggaagcgctctatgtggagtttcccaaatttccttttctgggaaaaccttttctggtttacaaaataccttttaattctaacattttcaggaatttaatttgagaaattctaatattgagggattatgtatcagtgaggaacaatttcattttttagaacatgtagactgggtatggtggctcacacctggaatcctagcactttgggaggccaaggaggatagattatttgaggtcaggagtttcagaccat

SEQ ID NO: 105131 - DNA, 354 bp, Homo sapiens
gggaagcagaggcaggagcctgcactgagctatgatcacgccactgtactcctgacctcgtgatccgcccatctcggcctcccaaagtgctgggattacaggagtgatccaccgtgcctggcctgatttgtgttttattaaagctctgagtttagatgctactatcatgaaatactttaggaaaccttgtctttttctaagatggagacattaattagatagtggttgcctgctggcattccatcgtttacatgggctcaaaaatactgcattgtggcaactgagtcaaacatgcatagttagaagtagatctcagtggtgacgttaaggttttgggaagtttcacagagatgt

SEQ ID NO: 105132 - DNA, 350 bp, Homo sapiens
ggaggccattatcttaagccaattaatgcaggaacagaaaatcaagcaccgcatgctctcacccataagtgggagctaaacattggatacacatggacacaaagatagaaacagcagaccccgggaactactatagtggggagagagggaagagaccaagggctgaaaaactacctgtttgttactatgctctttacctgggtaatgggatcatttgtaacccaaagcctccatgttgctggaaaggacatgatttcatatatatatatgtatgtgggcatatatacatacatatatatatatgcacacatatatatatatattttttttgagacggaggcttgctctgt

SEQ ID NO: 105133 - DNA, 340 bp, Homo sapiens
cttttttttattaatttgggctaacatatgatgagctttgatctacaaatgcaggtcttgcttcaacttaaaaatattttcttttctaatatctttaaatagctcttctgtgctttttttctctctccttcaaaactagatttctatcacctgtctttctatgtctagaccttgtttctgaaagatttgatctctttggcctttttttttcttttttgggaggcaggttcttgctctgtcacccaggctggtgtgcaggggcccaactcaactcactgcaacctctgcctcccaggctcaaacaatccttctacctcagcctcccaagcagctgggacca

SEQ ID NO: 105134 - DNA, 354 bp, Homo sapiens
aactctcttttcaacataatgttcctggcaaaaaaagagaggacttttttttttgggttctgggaaaaaaccctttttaaaaaaaaaaaaaagttccggctttagtttctttaacctctctaaaaaaagtttggaggaataaaatttttttagaattctttttgggcaagcctctgtcttctccaagtggtttttttttaaatttttttaaataataaatattaaggcggggcccaggggggctcccccatgtaaccctacccctttgggaaaccaaaacggggggatcactgggggttaggagtttgaaaccaacctggccaacagggggaaaccccatctttactaaaaatc

SEQ ID NO: 105135 - DNA, 335 bp, Homo sapiens
gagagagctagcaccagcttcaaccctgaaggtgaaaagaaagttatcctaaatagcgtttataaaaggtaggttgccaggtaaagtaagcttcctcctttttcagatctatttttgctgagtccaggtacagagaaggctttctttgccctattccttaatgggctccatcctgaacttagtaatttcagctaagaaatagtagctaggttaaaaagatcacctgtaggccgggcacagtggctcatgcctgtaatcccagcactttggaaggccaaggaaagtggatcacctgaggtcaggagttcaagaccagcctggccaacatggtgaaa

SEQ ID NO: 105136 - DNA, 377 bp, Homo sapiens
cccacttgtatgagatacctagagtaataaaattcatgaagataggaagtataatggtagtggccagggactggagtgaggggaatcgggaagttactgtatattgggttcagagtttcagttttgtaagttgaaaagttgtgtggatggatggtggcgacatccattcacaggctgcataaatgtacttaatgccactgaactatacacacaaaaggtgttatggtgggaaattttatcttagttgtattttatcagaatttttttaaaacttttttttaagataaaattttaggctgggcacggtggcccatgcccttaatcccagcattttgggagtccgagatgggaggattgcttgagcccaagagtttgag

SEQ ID NO: 105137 - DNA, 395 bp, Homo sapiens
  misc_feature (1)...(395): n = a,t,c or g
gaaatccatttaatgggtcatgttacaaaaaaacaaaacccacaatggaaaaatccatatttattttataaatagtattcctatttataaaataggagtaaacttctatttcaattatgtataggtagggtatactgtgttgcaatgtaaaatttttatgtggctcacataaatgtttgaatgatactgctatatgtgatgttaacacataccaccttagtaactgtaaaaatgtggtgggtagatagctcccttaccaagagacaaaaaaaaaaacggaatcccggggaaaccttttggctagcgacaaatttttttttttttaaaaattccaacaggggaaagggtaaaaggcaccgtttgggctccttttttcttttttgatgcggggaggn

SEQ ID NO: 105138 - DNA, 371 bp, Homo sapiens
  misc_feature (1)...(371): n = a,t,c or g
tagacgatacctgagtagaaaaaaagagggtcttggtgagatgcttttcatggttagaatatggtatcccagatcagaaaagagagaggcatcaattggaatcccatcaatgtaagtcaggaaaattggccttgacttcagactggggactggctttccagcactcacagaggacatggccacagggatagcaaaggcaggtgtagactggtgagccaccatgaggagcanagggaggtaccctttgaaaatatcaaaattggccaggtgcagtggctcacgcttataatcccagcactttgggaggtcaaggcgggaggatcgcttgaggccagaagtttgagatcagtccggccaacatggcaaaaccc

SEQ ID NO: 105139 - DNA, 381 bp, Homo sapiens
tgattttttgagactacagtttattctttaacccctaactatttgagtgtattacctatccaccaagaacttcccattcattactgtgatacaggtaacaaaatgaggaaattaatctgaaataggtgctcagcctttttgtttcattacactgactctttttttctttttaaaacagggatgagggatttcgctatgctgaccgggctgaagtgcagaggctactcacaggcacgatcctagagcactgcggcctccaacgtcctgggctctgacgatcctcttgcttcaccctcccatgtggctgggactacaggcattagtcaccacacccggctaattaaaaaagcgtttttttcacagacaggggttagctcttgt

SEQ ID NO: 105140 - DNA, 380 bp, Homo sapiens
agaaaagcaggtttaatcagaagaaatagatttgcagagattaagaaagtgatttctgggcacttttaaaaatacttaaaaggttgatggcagtaactttcttgattttactttgatgtttttttcttgatatatactatgctaactggttatcagcagtgattagggctcaccactgagaaagaggaggaagggacctcacagagaaaactgggaagaaagattagtaaaaattagatttctttacatgaacaatattaagactattccaatttaggccttgtgtggtggctcacgactgtaattccagcactttgggaggccaaggcaggcagatcatctgaggtcaggagttcatgaccagcctggacaacatggtg

SEQ ID NO: 105141 - DNA, 380 bp, Homo sapiens
  misc_feature (1)...(380): n = a,t,c or g
ttagctggtattcaaaccntcacccagntaattgggtcgaggaaaaatataataaaataattcccatgattacacaaatgttcttttatttatattaatcactgtaacaatcctatttatggattaatttctttgtaccccaaacaactgttttcttatgaaaattttaaagatttttgtaacaaaatataaccttaaattcctaattttgaactgaaaacatctactccataattagagaaactataaaattgggccatggccaggcacggtggctcacgcctgtaatcccagcactttgggagaccaaggcgggcggatcacatgaggtccggagttccaggtcagcctggccaacgcggtgaaagtccatctacatt

SEQ ID NO: 105142 - DNA, 420 bp, Homo sapiens
  misc_feature (1)...(420): n = a,t,c or g
gtaatttctgtgtgactataaaggataggcttatctcttatatcaatcatattctaaaaggctgaggcaggggaattgcttgaacccgggaggcagaggttatcgtgagctgacattgcgccactgcactccagcgcggaagacagagtgagcanaaaaaaaaaaaatagggaaaaaagaaacccaaaaaaaaaatttttcccgggggcgtttttcttttgttccccaataaatttttttggtaaaaaaaaaattaaagggggccccacggaaaaaaaaatcttttaaaaaaaccccggggggcccaaaaaaaatgtttaaagggggggcaccttttcccccccttttaatttattaaaaaacccctttttggcccctttttaaaaccaggggttaaaaaaaaaaattaaaagggttccn

SEQ ID NO: 105143 - DNA, 401 bp, Homo sapiens
  misc_feature (1)...(401): n = a,t,c or g
acgtttaatctatccttgcatgagnnatgcaccacggagcaattttattttttgtaagatactgttctattggcgacacttatttaagtaagaataaatggttttagaaaagtagctctgaggtttctaaactacagattcactacctattcaagatgacattatttatattcagtatttgtagaagtggtagatattaatgtagtagagttataatacctttacttaaatgatgggagagattatcaaccaagctaatataatcagtgtgtgtcaaataatcaggaggctgagacatgaaagtcacctgatcccaggaggcagaggttacagtgagctaagatcataccactgcacttcaacctgggtgacagagtgagactcttgtctcaaaaaatgaa

SEQ ID NO: 105144 - DNA, 396 bp, Homo sapiens
tactttttcagaacttaatgttggttgacttcattttctattgtacatgtctgtgtgtgtgtggggtgtgtgtgtgtgtgtgtgtagagagagagaagcacatatttcccaacagcataacaagtgtaattttatgggaaaaagtatttacacctaatttttgaattttttggagagatggggtctcaccgtgttgtccaggctggtctcaaattcttaggctccagcagtccacctgcctgggcctcccgaaatgctgggattacaggccaccacacccagccacagcagcgtcttgtccttacttttaccactactatctactgaaaatctggagatattcctttgacttatcttgtctttggaatttggtagtttggggtttggcatttggac

SEQ ID NO: 105145 - DNA, 995 bp, Homo sapiens
  misc_feature (1)...(995): n = a,t,c or g
gataataatgggattcttcttcaacatacaacaaactttgtttttcttgggagattttaacagtgttacattctgaattttttaggttatgtccccatgtctcagctacgtgagactttctgcttttctgttagttactgggacctacccgtggccccactgttattgttactagaaagcctggcctaatgtgagaaataattacagataaaactttttttttcagtgctgccttaacaatttcaggaaaagactaaaatgcttccgatgtggagcagacaagtttggtaagactggattcagctgtttgcaatatgcattaaaacctactaactggggcagggagcagtggctcactgttaatcccaccaactttggcaaaagnggncncccaaaaagnngggnttttggggaagatcacttgagggacagggagttcaataccagcctggggcaagagataggcaaggaccctgcctgttacaaaaaaaggaatttttaaatttttctggggtgttggttggccacacacctgtaagtcctagctactccaggagggtttaggtgagaggatttgctttggagtcccaggaagttgaaaggctgcagtgagctatggtccataccactgcacttccagccctgggcaacaaacaagaccctggcctctcaaaaaaaacaaaaccaaaaatctgacaaatagggttgttaactgtgagcctgaggaaaagtatagattttagtgtacttaaacaacttgtctgttttctttaaatcttttcccttaggttagataatgctgctcatgattgtgagagcacagaaagttcttttgttttctagaattaagtctgctcacctcggtttgcattctgcatctgcctttctttagtgcagggtagtgtcagtcccactgtggcccaaagtttgcattctgcgttaaccaagtcacaattaatgaggttttactataggcacaaatgcttaaaaaaaaa

SEQ ID NO: 105146 - DNA, 391 bp, Homo sapiens
  misc_feature (1)...(391): n = a,t,c or g
ttactatttttactcaaacatgcgcgcagcgagggaagtaaattgttatttgaaaaagataaaacattggtataaggcaagggctggcaaaatactgcctgtggccaaatcctgcccaccaccgggttttgtaaataaacttctcttggaatatagccacatccattaatttatgtgttttctggccgcattcacaatacaacatcagagctgaaacagagcccttatgtcccgagaagccaattttctctctggacctttacagaaaaagagctgaccccacagataaggtaaccttataaattgttgattacacacacacacacacacactcacacacactcacgcacacacactatttaacacactactctgtctttatatacctttn

SEQ ID NO: 105147 - DNA, 1753 bp, Homo sapiens
atggtaaatgcaggccttagtgtcaggaaccgggacaacaaccctgagggttcccccaagaacatttcacttctcagcaaactgaggcagctcctaagcagattgtcagcaaagcacagtcagcatgagcatgccgggtggggcagtggggctggaagtgcaggaaggaggcgaagcaccatctccccgaggaaggcgagtgcgctctccatggacaatgagtcccgagttgtgctgcaagaccttgctgtccgaggaatgttttccttttggtatcggactcgaggtctcttagaagataaatgcggctcccactactcaggagggcccacggcgctgatctggcgaacggatcgtccccactggagctcgcggctgcagtccgcttacgcccgcgggccgtcagcctcccagctagagcgaagggccttccaaccaatgggcagtgcgtgcccgcccgtggctcttcttgacaggcctaatcctgctgtcccagccaatcagcttgccggaggagctctcgatccggtcccgcaggttccggcgcagacgatgacacggacctactttccggtcaacgcggcctgcggtaccacctcccacccgggtccaatgatctacctgggttttattgagctgctcagatcctggggtgaggtacgggctcctgaagcgttctggagccctggctgggcaccggtgcggcccctgcagtccccactttgagtgggtccgtggcccagccttggaagctcagggctgggagtgctgtgagtcttcctttgcccagagcctgtgttttcttctagattctttccaccatggccagacgcccccggaacagcagggcctggcacttcgtcctgagtgcagcccgccgagacgcagatgcccgggccgtggctcttagcaggctccacttaactggggctacgactctgatgggcaggtaggttccagcgggcgaggcggacgtggctgggcctaaggtgtggagatgccctaggcaggcaggcggacattacctgaacacggaatcagtcggagaaaaagatgcttctgaggctagaggaccagtccaaacctgggcctgtctcctggatgcaccgcattcagtaagactctttaatttggcaaaggacacacacagcctcaggggtgacaggacctcagaacacactgcattcttcactgtgctttctcctctgaaacacatggtgcatggagaggttggcagttgcttttggttcattcaacagaaattctccactacggggctgggcactgtggctcacacctataatcctagcactttgggaggctgaagctggaggaccacttgagccccaggagtttgagacctgcctgggcaacatggtgaaacactgtctctacaaaaatttaaaaaatgtgtcaggcgtggtggcacgtgcctgtagtcccaacgactcaggaggctgagctgggaggattgcttgagccagggaggtcaaggctgcagtgagccgtgatcacaccagtgcgttccagcctgggtgacagagctagaccctgactcaaaaaaaacaaaaacaaaaaaattctttggtttacccagcccatttctgtttgtttgttttttaacacacatatatgtgaacaaagagtatgcgtttgtactggcagaagaagcgtctggtaagacaaccagcaagttaacaatggtcacctccagaaatgggctgggtaaaacaaaaaaattctttggtttacc

SEQ ID NO: 105148 - DNA, 395 bp, Homo sapiens
tgggtgtggtggaggatgcagtaagctgagattgcgccactgcactccagcctaggcgacaaagcgagactccttctcaaaaaaaaaaaaaaaaaagggcatttccggggccccccccccaaaaatttttatttggtgagaaggggggggaaaaaaaaatttttgtttttaaaaaagttcccaaaaccccaaattttaaaaggcccccaaaagaattttaaaagggggggccccaaaataattttggaaaaattacttggccttttggaagggggggaagcccaatctttaatggagccttccctggggttctttaaaaaacaccaaaagcccactaaaaaaaaacacctccggggaatttttgggggcaaaacaaaattttgggggggaggaag

SEQ ID NO: 105149 - DNA, 335 bp, Homo sapiens
agcaatccctcatatcactttggaataagttgagggggtgttgctgttgcacagactggtcttgaactcctagcctcaagggatcatcctgccttggcctcccaaagtactggaattacaggcatgaaccactgagcctggccttacatttatcctttttttaaaaaaaatattttctgaacacttaatagtcattatagcacagggattaagagtatggactctgaactggacttttgggcccaagtctgttctgcaccacttattactgtgtgagtctgagcaagtgacttattatctacttacctccattttgtcacatgaggataaaaaaa

SEQ ID NO: 105150 - DNA, 395 bp, Homo sapiens
tcaccatattagccaggctggtctcaaactcctgacctcaggtgatgcacccgccttggcctcccaaagtgtcaagtggtttttaaatggtccttctggcttcagcaggtgctcctctgggagccaggctgtgagctgtgggctggccttgctggatttggggaatgggcctgagagagtgtccaggcccctgtgggctgtgtgaggttggcctggcttgctggcagcatcgcctccatggttgctcccagcacctccatgtcttgggtgcccatgtggtatcatcgcaaggcatagtggcgctgagcctgcacaggtcagtggccttggtgacttccatctgtgctcattttcacattttggttgtggcacccagcccattaggagcctcagat

SEQ ID NO: 105151 - DNA, 387 bp, Homo sapiens
tgatgacttagcaaggaattctactcccttgcttctccatgtcctctgaagaaagaggaagaatctactctaatacgttttctttcttttttttttttgggaaagggggccaaataaacccccagggggggggccaagccacagaacccaggttaagggaaccctcaccctcgggcttaaccctccaaggaccggggaatgggggccccccccccccacccgggcaaaattttttttttaaaaaaaaagggggttacccggggggggccgggggggttttaaaccccgggcccaaggggaacaccccccctgggccccccaaggcccggaaaaaaaggggggggcccccggggccgggccaaaaatttctttaaaacccaaaggggg

SEQ ID NO: 105152 - DNA, 375 bp, Homo sapiens
ctggtttagggactacactttgagaactactccgtgcagaaatagacaacacagtaggtggggaagtatgggagaggagagaggtgtgtctgggtaatgccatggtttacccatcatttaggtgtatctacatatcataccactgaaaattcaattagagatagtgaatttggacattaccactgttcatggacccgtgtgatggtcatattgtcaagtgagaggctgaagagccaagggcaagttactcagtgagtcactgttgagtatacagtcttttaagaagccatcggttcacacctgtaatcccagcactttgggaggctgaggcaggtggatcacctgaggtctggagttcacaaccagcctggccaa

SEQ ID NO: 105153 - DNA, 382 bp, Homo sapiens
  misc_feature (1)...(382): n = a,t,c or g
gggagtcagatcaacccagttggctctgtcccttattcactcagggtcctcaggtaagtcttagtcccgtgtcctcgtttgcaaagtggagctaatgatcatgcttaatgccgaaggtggtgtggctgtggagaccccctcactgtcactgacaaataggagctgtcagcagcccaggtgccacacaatgatggtgactgtgaggaggccccccacagccctttcctttgctattgtctgtggacattaaagctactggtccccaagtaactgccattaaaaatgacctccagatggccgagtgcagtggctcactcctgtagtcccaggactttgggaggccaaggagggtggatcgcttaaatccagaagttcatgaccn

SEQ ID NO: 105154 - DNA, 411 bp, Homo sapiens
  misc_feature (1)...(411): n = a,t,c or g
aatacaccctgtccgtatattatattaaatggttagatataaaaatcataagattaagtaagaaaatataatcttgttgcaaagagagctttcctaaagatacgtaagggtnnttttttttttttttttttttttttgggggaaaattcttttttttcctttaggggggggccccggggggggggtcatattttttggaatttcccccccccgggttaaggggttttccccccccccccccccccagggggggggaacaaggggggggcccccccccccgggtttttttttttttttccctgaaaaacggggtttccccctttgggcccggggggcccacccccccctctttttggacccccccccttccccccccccaaggggtataatttccggcgtgacccccccccc

SEQ ID NO: 105155 - DNA, 404 bp, Homo sapiens
aatacatgtgggggaaatattcactctaggttggatgaaataagattcttgctgtattaccttgggcaagtaatctaaccctttaagcttcaacttcttgctctataagctgagaataatatgacctaaaagaaataatgtctactaattgggtggtacaatactgggtgtatcactcaaggttcaaccaggaaaataggaaccactttttttctgagacaatctagctctgtcgcccaggctggagtcaagtgcagcggcatgatcttgtgctaccgcaacctccgcctcccgggctcaagcaatcttcccgactcagcctcgtaagtagctgggaccacagctacctatccatgagctggagccacagagaggcctcatctgctgctggagatgtcacctga

SEQ ID NO: 105156 - DNA, 410 bp, Homo sapiens
tttcgtcaaaatgttctcaagggttctcatgtctctcgaacctctatttctaagcatgactctcagaaacagatatcaaaggataacaggatgtgagtgatttctttttttttttttttttttttttttaaaaaaaatttttttttttcccccccggggggggggggggggggggaattaaaaaaaacaaacccccccccttggggggaaaaagaattttcccccccccccccccaaaagggggggggggggaacaccccccccccccccccttctttttttggttttttagggggaagggggtttcccggggggggccggggggggaaaaaaaacacccaaaggaaacccccccccccccccccccaaggggggtgaaatgggaagagggccccccccccgtggggggg

SEQ ID NO: 105157 - DNA, 419 bp, Homo sapiens
aatacatgtcctgtattattccatttatattatgttccaacccaaagtcagtctattgtgaagggtggctgaacagtgggtaactgttaggaaggaaagacagtactgacaggaaaatgtcacctgctcttagaaatgctatcttgatccaggcagtggccataggtgtatacaaatgtaaaagggcactggatctgtagttttgttttgttttgttttgtttgcgataggctcactctgttgcccaagctggactgcaatggcacgatcatagctcgctgtaaccccgaaatcctgggcttaagtgatgctcttgtagttgggactaaaggcgtgcaccatcacgcccagctatttgtaaatttggatgggggttggggagcaggtctcgaactcctgtcctcaagcaatcctctcac

SEQ ID NO: 105158 - DNA, 443 bp, Homo sapiens
actgaacttccatcctctatagcggccgcaatacatgtggcctttagtcaaggagaccattggtaaccctgacatgaatattttttggtgtcacttgaaaaagccttactaaaatattcgaaacataacagaaggatagcaacgcagacaacaaacatagataattctttcaaggagttcagctctaaatgggaggaaagacaaggcaagaaggtgaagaagagacaggaagctagggcagtgcagaaatggagacaaagggaaagaaaaggaatcgagaagaatgcacaggtggaataggaggatacaacttttgtttgttttgaggtggagtcttgctctgttgcccaggcgacagattctcctgcctcagcctcctgaatagctgggattattggtgtgtgccaccacgcccggctaatttttgtatttttagtagagat

SEQ ID NO: 105159 - DNA, 408 bp, Homo sapiens
ggcgaccctggcgatggcggtgaagcccatcataacgtagtagcggggaaggggacacggtccgcactcaccgtggcgccggcggagacggctgagggtggtggagggaagaaaagcgacagagagcaagaggagggcctataaatatccgttgcctgccttactttgttctcaccaatggaaaccaaatgaatggttagacagtcaaataaagattccaacaggcttgtgatagttaaagtagccatcattcatttttatttttatttatctattttggaaacagggtctctctctggcgcccatgttggagtgccgcggtgcagtgctggctcactgacacctccgcctcccacggtcaagcctttctcatgcctcagcctcccaagtagctgtgactacaggggc

SEQ ID NO: 105160 - DNA, 408 bp, Homo sapiens
aatacactgcgcctgggtaatttttgtatttttagtagagacgggggtttcgccatattggccaggctggtcttgaactcctgacctcaggtgatctgcccacctcggatgctgcatgtttttaaacatgtttttctaaccctggcgcccttgaagaccaggttctgcataaacaggaggtcctgtcacaggcctttccgctcagctcagcatgaggaggagaatcaacctgttcctcccctggccacgcccaagacgaggcaggtgactcaatggaaagagccagaccgggtgacaggagctaccccgtccctccccagcctcccaggccggctgcagggccaagtcacttcccgcctgagcctccttcctcttcttttaaggggaagccacgcccccagtccgctt

SEQ ID NO: 105161 - DNA, 391 bp, Homo sapiens
aatacaggggtcctgtcttcacaaaaaataatttatctatccaggcatgggagtgtgcgcctatagtcccagctactcaggaagctgagacaggattgcttaagcccagaagtaccaggttgcagtgagccatgatcacgccactgcaccccagcctgggtgtcagagtaagatcttgtcttcccccacccccagaattccattcatccaatttatttggatgcctattacatactactacatgcaaggtgccactagagaatctacagacacaacagtgagcaaaatggtttatgctttcataaagcttatattctagagtaaaagcaaataataaaccaaatcaacaaatacataatgtaaggttgttgtatatagtggtatgcagatg

SEQ ID NO: 105162 - DNA, 405 bp, Homo sapiens
aataccagggttttactatgttgctcgggcttttcttgaactcctgggctcaagtgatcttcttgcctcggactcccgaagtgtttagattacaggtgtaagccaccaagcctggctttttttttttttttttaagtctggggaaacattttgggcaaaaaaaaaagggaaagcccccggggaggcttttggggggggggccaacctatcttttttttgggggggggaaaaaaaaaaaaaaaaaatcgccccccccgaagtaagggggctcctcataaaaaaaaagggaaattgcgggtgtttccaaaaagacaaaaaccccccttttttgttttgtttcaccaaaaaaaaaagggggccaccccccttttccctaaattatggccgaaaaaaaaaactgggggg

SEQ ID NO: 105163 - DNA, 430 bp, Homo sapiens
aatacatgtggtgtcagatatgtgctgatatattcacattctctcaagtaatctcccaaataccaatccatacattttgaagaggttttcagggattaggaaaacagtttatggtagcgaaacagagtaaagcaggcccaaaatattggcaatggtacttttaaaataaatattgactaagagatgactatgtaccaggtactacaccaaggattggggataatgaggtaacgcttgcctcaaaaactcagtctagtggggagaagtgactgacagacagtttgaggccagggtaatagtaaccagtatgacagagatatgcaaggccaggcccagtggttcactgttataattccagcactgtgggaggccgaagcaggggaatcgtctgagctcaggaatttgcgaccagcctgtgcaacatgacaaa

SEQ ID NO: 105164 - DNA, 429 bp, Homo sapiens
  misc_feature (1)...(429): n = a,t,c or g
aatacaggggtcttcttattttgcccaggctggtctcaaattcctgggctgaagtgatcctcccacctcagcctcccaaagacctaggattacaggcatgaaccactgggcccaggctattttaaaacaattctgtaaaaaatggtaaatatggtaaaaagctaatgaatgagcaactcaaaaaagcatgtatagaaaaatatatttaattttacaaaaggagggatgctctttactgggaagagtacaacagggagctttctgggggtgttgaaaaatcactttatatattcatctcaatgatgggtacatgagtggtacatatatatataaaattttattaatctctggctaaactatatagtttatatcacaatttataaaaaacaacaagatgtgtgtatgatagagatactgggacatgctggn

SEQ ID NO: 105165 - DNA, 386 bp, Homo sapiens
ggaaaggccttatcgctgtgtgtgtgtttcagtctacgtggattaaacattacttcgctccgtctgcctggattaaacgtgcactttgcagtcctcacttctccgtaccagtgatctggggatcgctacggaccttaaaatacccatagccccttcgcccctgcaacaggcacttctccccacgtttgatgtgtgaataattacattgactgagaaaaaaagaaaaaaaaaaagaaaagggagagggaaaaaaaaaaaaaaaaaaaaaaaaaaaaaaaaaaaaaaaaaaaatagggggggggggccccaaaaaaaaaaaaaaaatttacccccgggggggggaaaaattttttttttttatagggccccaaaaaaaaaaccccgcc

SEQ ID NO: 105166 - DNA, 407 bp, Homo sapiens
  misc_feature (1)...(407): n = a,t,c or g
cccaagcgtnnnnanaagtttccaagattgtgctcaccagttaagataatggtggctttggagagaggggggaacatggctgggagggacgtgatgggggatcctgtttggtcttgctccctcacctggtggtggcttttcccacgggcgcactttgatcactcctgggctgctcacgactcatggctctttctctgcgcttgttatccttgaacacaaagtttcattgaaaaagaattactcgtgttaaccaggatggtctcgatctcctgacctcgtgatctgcccccctcggcctcccagagtgctgggattacacaatgaaaccctgtctctactaaaaatacaaaaaattagctgagcgtggtgacaggcacctgtagtcccagctactctggagactgaga
